United States Patent Application Publication US 2012/0159672 A1 - sequence listing, part 6

SEQ ID NO: 11631 - protein, 167 aa, Triticum aestivum
  peptide (1)..(167): Ceres Seq. ID no. 15226350
  misc_feature (1)..(142): Pfam Name: Pfam Description:  Vesicle transport v-SNARE protein
  misc_feature (1)..(167): NCBI GI NO: 15241780 NR Description: v-SNARE AtVTI1a (ZIG) [Arabidopsis thaliana]
  misc_feature (1)..(167): NCBI GI NO: 6690274 NR Description: v-SNARE AtVTI1a [Arabidopsis thaliana]
  misc_feature (1)..(167): NCBI GI NO: 15228600 NR Description: SNARE protein AtVTI13 [Arabidopsis thaliana]
  misc_feature (1)..(165): NCBI GI NO: 34910406 NR Description: putative vesicle transport v-SNARE protein
  misc_feature (1)..(167): NCBI GI NO: 26451552 NR Description: putative vesicle transport protein
  misc_feature (1)..(164): NCBI GI NO: 34914100 NR Description: similar to vesicle transport protein
  misc_feature (1)..(166): NCBI GI NO: 18396008 NR Description: v-SNARE protein AtVTI1b, putative
  misc_feature (1)..(166): NCBI GI NO: 6690276 NR Description: v-SNARE AtVTI1b [Arabidopsis thaliana]
  misc_feature (1)..(166): NCBI GI NO: 27805772 NR Description: Vesicle transport v-SNARE 12
  misc_feature (1)..(167): NCBI GI NO: 9758339 NR Description: v-SNARE AtVTI1a-like protein
MDVEARSLPPSIRTSLLVKLREFKSDLNNFKSEVKRITSANLNAAARDELLEAGLADTKTASADQRARLMMSTDRLGRTTDRIKDSRRMMIETEELGVSVLQDLHSQRQSLLRTGDTLSGVDENVGKSKKILTGMTRRMNRNKWTIGAIITALVAAIILILYFKLTK

SEQ ID NO: 11632 - DNA, 887 bp, Triticum aestivum
  misc_feature (1)..(887): Ceres Seq. ID no. 13661963
aacgaatatatcctagctactcgatcttgtcccagccaataggtagctgcttctgtctgcctagtgaacttttctcgctagctaccagggaaaagaccacctcaccggtcaccaccatggctgggctagtgctagccaagtgccttcttctgttctccctctccgccgcgctcctctctctgctcggcaccggcgcctccgccattggcctgccccagcctcatgcgccagtgaacttcaccatcggcgtgcagggcatggtctggtgcaagacctgcaggtacatcggctacaatgccaacatggacgcctccccactcaaaggcgtggaggtgtacctgcagtgccggcacggcccggggcggctgaagaaggtgcaaggggcatcggggcagggcggctactttgtcatccagtcggcgcagatggcgtccttcaccaacgacgagtgcaaggtgtacgcggagagctcgtcgtcgaccgcgtgcagcctcgtcgacgaacccgctgccggcgaggggctgccgctcaagttcgactccttcgtcaagcacggcgatggcctgcaggcgctctactccgtcggcaacttcttcttccgccccagcaaccccaacaagtgctactgacgcatccatccgtcatgtacatacttgtgggacttgaataaatgggtcaggaactcaggatgaattagttgttggagtagctggggatatgcatccggtgctgtaatgttgatttaagtttcttctattgttgcagtagttttgtaagcttcttttaattagcaaccgcatgatcgaaataactcgaatatgattagggcagtgtatgtcctgtcatgtgatgactaaccgatgtgctacaaggctctatgtataact

SEQ ID NO: 11633 - protein, 208 aa, Triticum aestivum
  peptide (1)..(208): Ceres Seq. ID no. 13661964
  misc_feature (83)..(204): Pfam Name: Pfam Description:  Pollen proteins Ole e I family
  misc_feature (45)..(207): NCBI GI NO: 34910756 NR Description: P0042A10.7
  misc_feature (71)..(207): NCBI GI NO: 34910764 NR Description: P0042A10.11
  misc_feature (41)..(202): NCBI GI NO: 15226806 NR Description: proline-rich glyco protein -related
  misc_feature (71)..(207): NCBI GI NO: 419777 NR Description: proline-rich protein - Persian tobacco
  misc_feature (71)..(207): NCBI GI NO: 11322245 NR Description: arabinogalactan protein [Daucus carota]
  misc_feature (70)..(204): NCBI GI NO: 15226166 NR Description: proline-rich protein -related
RIYPSYSILSQPIGSCFCLPSELFSLATREKTTSPVTTMAGLVLAKCLLLFSLSAALLSLLGTGASAIGLPQPHAPVNFTIGVQGMVWCKTCRYIGYNANMDASPLKGVEVYLQCRHGPGRLKKVQGASGQGGYFVIQSAQMASFTNDECKVYAESSSSTACSLVDEPAAGEGLPLKFDSFVKHGDGLQALYSVGNFFFRPSNPNKCY

SEQ ID NO: 11634 - protein, 170 aa, Triticum aestivum
  peptide (1)..(170): Ceres Seq. ID no. 13661965
  misc_feature (45)..(166): Pfam Name: Pfam Description:  Pollen proteins Ole e I family
  misc_feature (7)..(169): NCBI GI NO: 34910756 NR Description: P0042A10.7
  misc_feature (33)..(169): NCBI GI NO: 34910764 NR Description: P0042A10.11
  misc_feature (3)..(164): NCBI GI NO: 15226806 NR Description: proline-rich glyco protein -related
  misc_feature (33)..(169): NCBI GI NO: 419777 NR Description: proline-rich protein - Persian tobacco
  misc_feature (33)..(169): NCBI GI NO: 11322245 NR Description: arabinogalactan protein [Daucus carota]
  misc_feature (32)..(166): NCBI GI NO: 15226166 NR Description: proline-rich protein -related
MAGLVLAKCLLLFSLSAALLSLLGTGASAIGLPQPHAPVNFTIGVQGMVWCKTCRYIGYNANMDASPLKGVEVYLQCRHGPGRLKKVQGASGQGGYFVIQSAQMASFTNDECKVYAESSSSTACSLVDEPAAGEGLPLKFDSFVKHGDGLQALYSVGNFFFRPSNPNKCY

SEQ ID NO: 11635 - protein, 123 aa, Triticum aestivum
  peptide (1)..(123): Ceres Seq. ID no. 13661966
  misc_feature (1)..(119): Pfam Name: Pfam Description:  Pollen proteins Ole e I family
  misc_feature (1)..(122): NCBI GI NO: 34910756 NR Description: P0042A10.7
  misc_feature (1)..(122): NCBI GI NO: 34910764 NR Description: P0042A10.11
  misc_feature (1)..(117): NCBI GI NO: 15226806 NR Description: proline-rich glyco protein -related
  misc_feature (1)..(122): NCBI GI NO: 419777 NR Description: proline-rich protein - Persian tobacco
  misc_feature (1)..(122): NCBI GI NO: 11322245 NR Description: arabinogalactan protein [Daucus carota]
  misc_feature (1)..(119): NCBI GI NO: 15226166 NR Description: proline-rich protein -related
MVWCKTCRYIGYNANMDASPLKGVEVYLQCRHGPGRLKKVQGASGQGGYFVIQSAQMASFTNDECKVYAESSSSTACSLVDEPAAGEGLPLKFDSFVKHGDGLQALYSVGNFFFRPSNPNKCY

SEQ ID NO: 11636 - DNA, 886 bp, Triticum aestivum
  misc_feature (1)..(886): Ceres Seq. ID no. 13661797
ctgcttggatggatcagccgagaccgcacacaccagccacaccactccaccgaagcgaaaggggacaaaggtttgcacgtcgccaagtcctgaaccattacctagcagagcagggatcccatcgacgaggcgaggacagaggtggatcaacaatggcgtcgcttctttcgccgaacaccgtcgctgcgaccacggcgaggccgtccggcaggaggagccgccttactcccagtgtcaccgccatggcaaccaagggcccgaagcccagctccggcggcacgaaaagatcgtcgggcactaccacggtgttcccggtggggaagcccgcgggcccgccgcggccggcgacgacgaaggggtcggcgcccgtgaagctgctgacgaacgtggagaagctacggctgctgaccaaggcggagaaggcgggcctgctgtccgcggcggagcgcgccgggctgtcgctgtcggcggtcgagcgcctcgggctgctgtccaaggcggaggagctcggggtgctgtcggccgccaccgaccctggcacccccggctcgctgcagggcctcgcgctcctgctgctggccgccggccccgccgtcgtcttcctcgtccccgagcagtacccctgggaggtggcgctccaggccgtcgccgccctcgtctgcgtcgccgggggctccgccgcgttcgccgcgtccagcttcgtgtccaggctccagggctcctccggctgatctcgacgaactctgcttgcttcagcatcgaccgagtgtcaattgccgcgtttgattctagcaccaatgatcttgcgtagagttaatctacttctgtaaagatgggctgatatttatacgatgcgccattcggttgcaatactgcaggtttttgt

SEQ ID NO: 11637 - protein, 269 aa, Triticum aestivum
  peptide (1)..(269): Ceres Seq. ID no. 13661798
  misc_feature (99)..(229): Pfam Name: Pfam Description:  Aminotransferase class-III
CLDGSAETAHTSHTTPPKRKGTKVCTSPSPEPLPSRAGIPSTRRGQRWINNGVASFAEHRRCDHGEAVRQEEPPYSQCHRHGNQGPEAQLRRHEKIVGHYHGVPGGEARGPAAAGDDEGVGAREAADERGEATAADQGGEGGPAVRGGARRAVAVGGRAPRAAVQGGGARGAVGRHRPWHPRLAAGPRAPAAGRRPRRRLPRPRAVPLGGGAPGRRRPRLRRRGLRRVRRVQLRVQAPGLLRLISTNSACFSIDRVSIAAFDSSTNDLA

SEQ ID NO: 11638 - protein, 242 aa, Triticum aestivum
  peptide (1)..(242): Ceres Seq. ID no. 13661799
  misc_feature (108)..(240): NCBI GI NO: 15241507 NR Description: expressed protein [Arabidopsis thaliana]
  misc_feature (108)..(240): NCBI GI NO: 17978981 NR Description: AT5g08050/F13G24_250 [Arabidopsis thaliana]
  misc_feature (123)..(240): NCBI GI NO: 34912136 NR Description: OSJNBb0024F06.20
  misc_feature (123)..(238): NCBI GI NO: 18410681 NR Description: expressed protein [Arabidopsis thaliana]
  misc_feature (123)..(238): NCBI GI NO: 25406370 NR Description: hypothetical protein F25A4.30
AWMDQPRPHTPATPLHRSERGQRFARRQVLNHYLAEQGSHRRGEDRGGSTMASLLSPNTVAATTARPSGRRSRLTPSVTAMATKGPKPSSGGTKRSSGTTTVFPVGKPAGPPRPATTKGSAPVKLLTNVEKLRLLTKAEKAGLLSAAERAGLSLSAVERLGLLSKAEELGVLSAATDPGTPGSLQGLALLLLAAGPAVVFLVPEQYPWEVALQAVAALVCVAGGSAAFAASSFVSRLQGSSG

SEQ ID NO: 11639 - protein, 240 aa, Triticum aestivum
  peptide (1)..(240): Ceres Seq. ID no. 13661800
  misc_feature (106)..(238): NCBI GI NO: 15241507 NR Description: expressed protein [Arabidopsis thaliana]
  misc_feature (106)..(238): NCBI GI NO: 17978981 NR Description: AT5g08050/F13G24_250 [Arabidopsis thaliana]
  misc_feature (121)..(238): NCBI GI NO: 34912136 NR Description: OSJNBb0024F06.20
  misc_feature (121)..(236): NCBI GI NO: 18410681 NR Description: expressed protein [Arabidopsis thaliana]
  misc_feature (121)..(236): NCBI GI NO: 25406370 NR Description: hypothetical protein F25A4.30
MDQPRPHTPATPLHRSERGQRFARRQVLNHYLAEQGSHRRGEDRGGSTMASLLSPNTVAATTARPSGRRSRLTPSVTAMATKGPKPSSGGTKRSSGTTTVFPVGKPAGPPRPATTKGSAPVKLLTNVEKLRLLTKAEKAGLLSAAERAGLSLSAVERLGLLSKAEELGVLSAATDPGTPGSLQGLALLLLAAGPAVVFLVPEQYPWEVALQAVAALVCVAGGSAAFAASSFVSRLQGSSG

SEQ ID NO: 11640 - DNA, 894 bp, Triticum aestivum
  misc_feature (1)..(894): Ceres Seq. ID no. 15225572
acacacacaatggttggtatggctgtggttggtcaatggactctctgtgtcgcctcgccgtcgccgagagtaaagtcggcaacttgcaattcaaactcttgtccaaccaccgttaacttacgctctgagctgtctgcatttcgtcctcagttccggctcttctctcgtgtttctccgacacgccgccgccgtctttgcgcttccagctccgccgattcgggaatcttcctccctcaccttgtcgcttctatggagcaagttgaggagacttacattatggtcaaaccagacggcatccaacgaggccttgttggagaaatcatctctcgttttgagaagaaggggtttaaactgattggacttaagatgttccaatgcccaaaagaattggctcaggaacattataaggatcttagtgctaagtctttctttcctagcctgattgagtacatcacttctggcccagttgtgtgtatggcttgggaaggtgttggtgtggttgcttcagtcaggaagctgatagggaaaactgatcctcttcaagctgaacctggtaccattagaggagatcttgctgtacaaaccggaaggaacatcgtgcatggtagtgacagtcctgaaaacggaaagcgtgagattgctctgtggttcaaagaaggcgagctgtgcgggtgggattcagctctagctaaatggctaagggagtgatccttgagaagacaaattcaattctttttccttgttactgagtgcgaatgggctttggtcctttgttttgtttttgtttttgtttttgttttggcggcgtgtacgtggacttgttgatctttctggcatctttaatcacacttgtcatgtaatgaaatgagttgaatagattcaccttttctctgc

SEQ ID NO: 11641 - protein, 235 aa, Triticum aestivum
  peptide (1)..(235): Ceres Seq. ID no. 15225573
  misc_feature (88)..(225): Pfam Name: Pfam Description:  Nucleoside diphosphate kinase
  misc_feature (4)..(235): NCBI GI NO: 21832064 NR Description: nucloside diphosphate kinase 2 [Brassica rapa]
  misc_feature (4)..(235): NCBI GI NO: 30697820 NR Description: nucleotide diphosphate kinase Ia (emb|CAB58230.1)
  misc_feature (4)..(235): NCBI GI NO: 3093480 NR Description: nucleoside diphosphate kinase type 2
  misc_feature (16)..(235): NCBI GI NO: 266607 NR Description: Nucleoside diphosphate kinase II
  misc_feature (84)..(235): NCBI GI NO: 11260887 NR Description: nucleoside-diphosphate kinase (EC 2.7.4.6) Ia
  misc_feature (7)..(235): NCBI GI NO: 27807824 NR Description: nucleoside diphosphate kinase [Nicotiana tabacum]
  misc_feature (28)..(235): NCBI GI NO: 1346673 NR Description: Nucleoside diphosphate kinase II
  misc_feature (88)..(235): NCBI GI NO: 9652119 NR Description: nucleoside diphosphate kinase [Lolium perenne]
  misc_feature (87)..(235): NCBI GI NO: 22297811 NR Description: nucleoside diphosphate kinase
  misc_feature (87)..(235): NCBI GI NO: 20138835 NR Description: Nucleoside diphosphate kinase
THTMVGMAVVGQWTLCVASPSPRVKSATCNSNSCPTTVNLRSELSAFRPQFRLFSRVSPTRRRRLCASSSADSGIFLPHLVASMEQVEETYIMVKPDGIQRGLVGEIISRFEKKGFKLIGLKMFQCPKELAQEHYKDLSAKSFFPSLIEYITSGPVVCMAWEGVGVVASVRKLIGKTDPLQAEPGTIRGDLAVQTGRNIVHGSDSPENGKREIALWFKEGELCGWDSALAKWLRE

SEQ ID NO: 11642 - protein, 232 aa, Triticum aestivum
  peptide (1)..(232): Ceres Seq. ID no. 15225574
  misc_feature (85)..(222): Pfam Name: Pfam Description:  Nucleoside diphosphate kinase
  misc_feature (1)..(232): NCBI GI NO: 21832064 NR Description: nucloside diphosphate kinase 2 [Brassica rapa]
  misc_feature (1)..(232): NCBI GI NO: 30697820 NR Description: nucleotide diphosphate kinase Ia (emb|CAB58230.1)
  misc_feature (1)..(232): NCBI GI NO: 3093480 NR Description: nucleoside diphosphate kinase type 2
  misc_feature (13)..(232): NCBI GI NO: 266607 NR Description: Nucleoside diphosphate kinase II
  misc_feature (81)..(232): NCBI GI NO: 11260887 NR Description: nucleoside-diphosphate kinase (EC 2.7.4.6) Ia
  misc_feature (4)..(232): NCBI GI NO: 27807824 NR Description: nucleoside diphosphate kinase [Nicotiana tabacum]
  misc_feature (25)..(232): NCBI GI NO: 1346673 NR Description: Nucleoside diphosphate kinase II
  misc_feature (85)..(232): NCBI GI NO: 9652119 NR Description: nucleoside diphosphate kinase [Lolium perenne]
  misc_feature (84)..(232): NCBI GI NO: 22297811 NR Description: nucleoside diphosphate kinase
  misc_feature (84)..(232): NCBI GI NO: 20138835 NR Description: Nucleoside diphosphate kinase
MVGMAVVGQWTLCVASPSPRVKSATCNSNSCPTTVNLRSELSAFRPQFRLFSRVSPTRRRRLCASSSADSGIFLPHLVASMEQVEETYIMVKPDGIQRGLVGEIISRFEKKGFKLIGLKMFQCPKELAQEHYKDLSAKSFFPSLIEYITSGPVVCMAWEGVGVVASVRKLIGKTDPLQAEPGTIRGDLAVQTGRNIVHGSDSPENGKREIALWFKEGELCGWDSALAKWLRE

SEQ ID NO: 11643 - protein, 229 aa, Triticum aestivum
  peptide (1)..(229): Ceres Seq. ID no. 15225575
  misc_feature (82)..(219): Pfam Name: Pfam Description:  Nucleoside diphosphate kinase
  misc_feature (1)..(229): NCBI GI NO: 21832064 NR Description: nucloside diphosphate kinase 2 [Brassica rapa]
  misc_feature (1)..(229): NCBI GI NO: 30697820 NR Description: nucleotide diphosphate kinase Ia (emb|CAB58230.1)
  misc_feature (1)..(229): NCBI GI NO: 3093480 NR Description: nucleoside diphosphate kinase type 2
  misc_feature (10)..(229): NCBI GI NO: 266607 NR Description: Nucleoside diphosphate kinase II
  misc_feature (78)..(229): NCBI GI NO: 11260887 NR Description: nucleoside-diphosphate kinase (EC 2.7.4.6) Ia
  misc_feature (1)..(229): NCBI GI NO: 27807824 NR Description: nucleoside diphosphate kinase [Nicotiana tabacum]
  misc_feature (22)..(229): NCBI GI NO: 1346673 NR Description: Nucleoside diphosphate kinase II
  misc_feature (82)..(229): NCBI GI NO: 9652119 NR Description: nucleoside diphosphate kinase [Lolium perenne]
  misc_feature (81)..(229): NCBI GI NO: 22297811 NR Description: nucleoside diphosphate kinase
  misc_feature (81)..(229): NCBI GI NO: 20138835 NR Description: Nucleoside diphosphate kinase
MAVVGQWTLCVASPSPRVKSATCNSNSCPTTVNLRSELSAFRPQFRLFSRVSPTRRRRLCASSSADSGIFLPHLVASMEQVEETYIMVKPDGIQRGLVGEIISRFEKKGFKLIGLKMFQCPKELAQEHYKDLSAKSFFPSLIEYITSGPVVCMAWEGVGVVASVRKLIGKTDPLQAEPGTIRGDLAVQTGRNIVHGSDSPENGKREIALWFKEGELCGWDSALAKWLRE

SEQ ID NO: 11644 - DNA, 1147 bp, Triticum aestivum
  misc_feature (1)..(1147): Ceres Seq. ID no. 13661801
tcgcaccaacgccacagacagaccaacaccgcagcacgcaccacgcgccccccccccccaccctgtgatccctcgccgtggtctcgccgccgcgccgacccctccaccggcattcgattcggagcgcagctcgtccgccggcgcggagccatgggcacggttgtggatgctcccgcagttgtgactgagaaggaggtggttgctgagaacatgttgggtgacaagaaagtcacagtagtatttgttcttggcggtcctggaagtggaaagggcacacagtgttccaacattgttgaacactttggattcacccatcttagtgctggagatcttttgcgcgcggagattaaatctggctctgagaatggaactatgattgagaacatgataaaggagggaaagattgttccgtcggaggtgactataaagctcttgcagcaagccatgataaagaatgagaatgataagttcctcatcgacgggtttccaaggaatgaagagaatcgtgctgcgttcgagaatgttacaaaaatttcgcctgcatttgtgctattcttcaattgttccgaggaagagatggaaaggcgtcttttgggacgcaatgagggtagagttgatgacaacatcgagactatcaggaagagattcaaagtttttgttgaatccagtttgcctgtgattgagtactatgacgcgaaggacaaggttaagaagatcgatgctgcaaaaccaattcctgaggtgtttgaagatgtcaaagccatttttgccccatatgccaaggctacatagaacagtataaaggaccacaaaggtgataaatggaatgatttcatacaaggttttgctcaagtgtgactacatatctgtgattacaaacccttaatatagatcagacttatcagtagacaatttgatttgttgccagcaataagttagatctggtttgtggtgttcctgctagaagtttttatttaccacccattgttggtgtatcccatgtagtatacctgtaccattgtgtaatttacggtaaggacggatcagaccttgtgcccatgagctatccggttgtattacagaaaattgaacttatcacatgttcactcatatttacattctttatacactgttggttcttctgttg

SEQ ID NO: 11645 - protein, 263 aa, Triticum aestivum
  peptide (1)..(263): Ceres Seq. ID no. 13661802
  misc_feature (82)..(235): Pfam Name: Pfam Description:  Adenylate kinase
  misc_feature (51)..(261): NCBI GI NO: 6683811 NR Description: UMP/CMP kinase a [Oryza sativa]
  misc_feature (51)..(261): NCBI GI NO: 6683813 NR Description: UMP/CMP kinase b [Oryza sativa]
  misc_feature (66)..(261): NCBI GI NO: 30690243 NR Description: predicted protein [Arabidopsis thaliana]
  misc_feature (66)..(261): NCBI GI NO: 30690246 NR Description: predicted protein [Arabidopsis thaliana]
  misc_feature (75)..(257): NCBI GI NO: 11260827 NR Description: URIDYLATE KINASE-like protein
  misc_feature (75)..(257): NCBI GI NO: 18411518 NR Description: URIDYLATE KINASE-related protein
  misc_feature (75)..(257): NCBI GI NO: 34897826 NR Description: putative UMP/CMP kinase
  misc_feature (63)..(219): NCBI GI NO: 5305496 NR Description: adenylate kinase [Ceratopteris richardii]
  misc_feature (79)..(261): NCBI GI NO: 3913952 NR Description: ADENYLATE KINASE (ATP-AMP TRANSPHOSPHORYLASE)
  misc_feature (76)..(256): NCBI GI NO: 31230627 NR Description: ENSANGP00000014384 [Anopheles gambiae]
SHQRHRQTNTAARTTRPPPPPCDPSPWSRRRADPSTGIRFGAQLVRRRGAMGTVVDAPAVVTEKEVVAENMLGDKKVTVVFVLGGPGSGKGTQCSNIVEHFGFTHLSAGDLLRAEIKSGSENGTMIENMIKEGKIVPSEVTIKLLQQAMIKNENDKFLIDGFPRNEENRAAFENVTKISPAFVLFFNCSEEEMERRLLGRNEGRVDDNIETIRKRFKVFVESSLPVIEYYDAKDKVKKIDAAKPIPEVFEDVKAIFAPYAKAT

SEQ ID NO: 11646 - protein, 213 aa, Triticum aestivum
  peptide (1)..(213): Ceres Seq. ID no. 13661803
  misc_feature (32)..(185): Pfam Name: Pfam Description:  Adenylate kinase
  misc_feature (1)..(211): NCBI GI NO: 6683811 NR Description: UMP/CMP kinase a [Oryza sativa]
  misc_feature (1)..(211): NCBI GI NO: 6683813 NR Description: UMP/CMP kinase b [Oryza sativa]
  misc_feature (16)..(211): NCBI GI NO: 30690243 NR Description: predicted protein [Arabidopsis thaliana]
  misc_feature (16)..(211): NCBI GI NO: 30690246 NR Description: predicted protein [Arabidopsis thaliana]
  misc_feature (25)..(207): NCBI GI NO: 11260827 NR Description: URIDYLATE KINASE-like protein
  misc_feature (25)..(207): NCBI GI NO: 18411518 NR Description: URIDYLATE KINASE-related protein
  misc_feature (25)..(207): NCBI GI NO: 34897826 NR Description: putative UMP/CMP kinase
  misc_feature (13)..(169): NCBI GI NO: 5305496 NR Description: adenylate kinase [Ceratopteris richardii]
  misc_feature (29)..(211): NCBI GI NO: 3913952 NR Description: ADENYLATE KINASE (ATP-AMP TRANSPHOSPHORYLASE)
  misc_feature (26)..(206): NCBI GI NO: 31230627 NR Description: ENSANGP00000014384 [Anopheles gambiae]
MGTVVDAPAVVTEKEVVAENMLGDKKVTVVFVLGGPGSGKGTQCSNIVEHFGFTHLSAGDLLRAEIKSGSENGTMIENMIKEGKIVPSEVTIKLLQQAMIKNENDKFLIDGFPRNEENRAAFENVTKISPAFVLFFNCSEEEMERRLLGRNEGRVDDNIETIRKRFKVFVESSLPVIEYYDAKDKVKKIDAAKPIPEVFEDVKAIFAPYAKAT

SEQ ID NO: 11647 - protein, 193 aa, Triticum aestivum
  peptide (1)..(193): Ceres Seq. ID no. 13661804
  misc_feature (12)..(165): Pfam Name: Pfam Description:  Adenylate kinase
  misc_feature (1)..(191): NCBI GI NO: 6683811 NR Description: UMP/CMP kinase a [Oryza sativa]
  misc_feature (1)..(191): NCBI GI NO: 6683813 NR Description: UMP/CMP kinase b [Oryza sativa]
  misc_feature (1)..(191): NCBI GI NO: 30690243 NR Description: predicted protein [Arabidopsis thaliana]
  misc_feature (1)..(191): NCBI GI NO: 30690246 NR Description: predicted protein [Arabidopsis thaliana]
  misc_feature (5)..(187): NCBI GI NO: 11260827 NR Description: URIDYLATE KINASE-like protein
  misc_feature (5)..(187): NCBI GI NO: 18411518 NR Description: URIDYLATE KINASE-related protein
  misc_feature (5)..(187): NCBI GI NO: 34897826 NR Description: putative UMP/CMP kinase
  misc_feature (1)..(149): NCBI GI NO: 5305496 NR Description: adenylate kinase [Ceratopteris richardii]
  misc_feature (9)..(191): NCBI GI NO: 3913952 NR Description: ADENYLATE KINASE (ATP-AMP TRANSPHOSPHORYLASE)
  misc_feature (6)..(186): NCBI GI NO: 31230627 NR Description: ENSANGP00000014384 [Anopheles gambiae]
MLGDKKVTVVFVLGGPGSGKGTQCSNIVEHFGFTHLSAGDLLRAEIKSGSENGTMIENMIKEGKIVPSEVTIKLLQQAMIKNENDKFLIDGFPRNEENRAAFENVTKISPAFVLFFNCSEEEMERRLLGRNEGRVDDNIETIRKRFKVFVESSLPVIEYYDAKDKVKKIDAAKPIPEVFEDVKAIFAPYAKAT

SEQ ID NO: 11648 - DNA, 748 bp, Triticum aestivum
  misc_feature (1)..(748): Ceres Seq. ID no. 14301683
acatcgattccttcctgccactccttcctcgcatgccccctgacttcctgcaccgagactgctaagctagctctgtaatctcgtcggcctctttctctgccccctcggccggcttgccacccgataggtcctgatgtcgggcaccgtctgctccatgtgcggcgacgtcggtttccaggacaagctcttcggctgtgcccgctgccgctgccgcttccagcactcctattgcacgaactactacggcgacgcggccccggccgacgcgggcgccggcgtctgcgactggtgcctcagcgacgaccccctcgtgaagaacaagcgcccttcggcgccgccggccatgcagcaccgcggtcacgcgactgggatgggctgcggcaaagtcaaggtgaccggcggcggcgagcaggagggcggccggagagtggccaaggcggccgtccgcaggtacaagctcctcaaagacgtcctgtgctagctagctggtgcatgcatggtcctgggtcaccgtactcgtttccttagatcgggacctcgtcatcatgtgtactaaaaaacgatgctgtttaattaggtagtcgatagtcgttgtacctagctagctggtggggttctgcttccatatcgatccttgcgtgcaaatgtctgcatgtcacaatgagatctacttccgcatgtaaatatgtactgctactctttatctctgtcatcaactgcgtgctgtcgtgtgtggtcaggacttttg

SEQ ID NO: 11649 - protein, 115 aa, Triticum aestivum
  peptide (1)..(115): Ceres Seq. ID no. 14301684
  misc_feature (2)..(115): NCBI GI NO: 38345466 NR Description: OSJNBa0010H02.4
  misc_feature (2)..(107): NCBI GI NO: 21742342 NR Description: OSJNBb0034G17.21
  misc_feature (5)..(62): NCBI GI NO: 18378917 NR Description: expressed protein [Arabidopsis thaliana]
  misc_feature (8)..(62): NCBI GI NO: 21553800 NR Description: unknown [Arabidopsis thaliana]
  misc_feature (5)..(115): NCBI GI NO: 15232353 NR Description: expressed protein [Arabidopsis thaliana]
  misc_feature (8)..(115): NCBI GI NO: 21554245 NR Description: unknown [Arabidopsis thaliana]
  misc_feature (2)..(58): NCBI GI NO: 21740708 NR Description: OSJNBa0086B14.1
MSGTVCSMCGDVGFQDKLFGCARCRCRFQHSYCTNYYGDAAPADAGAGVCDWCLSDDPLVKNKRPSAPPAMQHRGHATGMGCGKVKVTGGGEQEGGRRVAKAAVRRYKLLKDVLC

SEQ ID NO: 11650 - protein, 108 aa, Triticum aestivum
  peptide (1)..(108): Ceres Seq. ID no. 14301685
  misc_feature (1)..(108): NCBI GI NO: 38345466 NR Description: OSJNBa0010H02.4
  misc_feature (1)..(100): NCBI GI NO: 21742342 NR Description: OSJNBb0034G17.21
  misc_feature (1)..(55): NCBI GI NO: 18378917 NR Description: expressed protein [Arabidopsis thaliana]
  misc_feature (1)..(55): NCBI GI NO: 21553800 NR Description: unknown [Arabidopsis thaliana]
  misc_feature (1)..(108): NCBI GI NO: 15232353 NR Description: expressed protein [Arabidopsis thaliana]
  misc_feature (1)..(108): NCBI GI NO: 21554245 NR Description: unknown [Arabidopsis thaliana]
  misc_feature (1)..(51): NCBI GI NO: 21740708 NR Description: OSJNBa0086B14.1
MCGDVGFQDKLFGCARCRCRFQHSYCTNYYGDAAPADAGAGVCDWCLSDDPLVKNKRPSAPPAMQHRGHATGMGCGKVKVTGGGEQEGGRRVAKAAVRRYKLLKDVLC

SEQ ID NO: 11651 - DNA, 681 bp, Triticum aestivum
  misc_feature (1)..(681): Ceres Seq. ID no. 15227036
atcgaaaaagattaggtcgagtgtgctctcacagacacggataacgcaaaacctctctgtcttcccaaatccaccacctcacaacgacgactacgatggctctttctactggaatcttctccaccttcctctgcgtcaaaacggtgacgttacgcagctcaccgttcctccgtgtttcccctcctcatccggctaacctgcggatggtgcgagccgtgacctccgcgacggcggcgtcctccgagccgtcagccaccaagactcgggagccacgtggcatcatgaagcctcgcccagtgtcccccgagatgcaggacgtggtgggtgagccggtgattcctcgcacgcaggctcttaagcgcatttgggcctacatcaaggaacacgaccttcaggatccacaagacaagaaggttataatctgcgacgagaagctgaagaagatattcgcaggcaaagaccgtgtcgggttcttggagattgcaaagctcatcggtcctcacttcctctgaatgagaagacaatcgatcactagcgtatgtttacatattagtaacgttaggtttaagaagttttatgcaacaaagtagtagtcaagccctttgggacgatatcttttgcgtttgttggttatgtgtctctttgcttcagattgcagtttaaaatttgctatgttttgtc

SEQ ID NO: 11652 - protein, 138 aa, Triticum aestivum
  peptide (1)..(138): Ceres Seq. ID no. 15227037
  misc_feature (62)..(138): Pfam Name: Pfam Description:  SWIB/MDM2 domain
  misc_feature (1)..(138): NCBI GI NO: 14423526 NR Description: putative protein [Arabidopsis thaliana]
  misc_feature (1)..(138): NCBI GI NO: 15235320 NR Description: expressed protein [Arabidopsis thaliana]
  misc_feature (1)..(138): NCBI GI NO: 21553903 NR Description: unknown [Arabidopsis thaliana]
  misc_feature (1)..(138): NCBI GI NO: 18397658 NR Description: expressed protein [Arabidopsis thaliana]
  misc_feature (1)..(138): NCBI GI NO: 19698859 NR Description: unknown protein [Arabidopsis thaliana]
  misc_feature (1)..(138): NCBI GI NO: 21593713 NR Description: unknown [Arabidopsis thaliana]
  misc_feature (9)..(138): NCBI GI NO: 14488372 NR Description: hypothetical protein
  misc_feature (28)..(138): NCBI GI NO: 18396594 NR Description: expressed protein [Arabidopsis thaliana]
  misc_feature (28)..(138): NCBI GI NO: 21593643 NR Description: unknown [Arabidopsis thaliana]
  misc_feature (36)..(137): NCBI GI NO: 33667910 NR Description: SWIb domain-containing protein [Solanum chacoense]
MALSTGIFSTFLCVKTVTLRSSPFLRVSPPHPANLRMVRAVTSATAASSEPSATKTREPRGIMKPRPVSPEMQDVVGEPVIPRTQALKRIWAYIKEHDLQDPQDKKVIICDEKLKKIFAGKDRVGFLEIAKLIGPHFL

SEQ ID NO: 11653 - protein, 102 aa, Triticum aestivum
  peptide (1)..(102): Ceres Seq. ID no. 15227038
  misc_feature (26)..(102): Pfam Name: Pfam Description:  SWIB/MDM2 domain
  misc_feature (1)..(102): NCBI GI NO: 14423526 NR Description: putative protein [Arabidopsis thaliana]
  misc_feature (1)..(102): NCBI GI NO: 15235320 NR Description: expressed protein [Arabidopsis thaliana]
  misc_feature (1)..(102): NCBI GI NO: 21553903 NR Description: unknown [Arabidopsis thaliana]
  misc_feature (1)..(102): NCBI GI NO: 18397658 NR Description: expressed protein [Arabidopsis thaliana]
  misc_feature (1)..(102): NCBI GI NO: 19698859 NR Description: unknown protein [Arabidopsis thaliana]
  misc_feature (1)..(102): NCBI GI NO: 21593713 NR Description: unknown [Arabidopsis thaliana]
  misc_feature (1)..(102): NCBI GI NO: 14488372 NR Description: hypothetical protein
  misc_feature (1)..(102): NCBI GI NO: 18396594 NR Description: expressed protein [Arabidopsis thaliana]
  misc_feature (1)..(102): NCBI GI NO: 21593643 NR Description: unknown [Arabidopsis thaliana]
  misc_feature (1)..(101): NCBI GI NO: 33667910 NR Description: SWIb domain-containing protein [Solanum chacoense]
MVRAVTSATAASSEPSATKTREPRGIMKPRPVSPEMQDVVGEPVIPRTQALKRIWAYIKEHDLQDPQDKKVIICDEKLKKIFAGKDRVGFLEIAKLIGPHFL

SEQ ID NO: 11654 - protein, 76 aa, Triticum aestivum
  peptide (1)..(76): Ceres Seq. ID no. 15227039
  misc_feature (1)..(76): Pfam Name: Pfam Description:  SWIB/MDM2 domain
  misc_feature (1)..(76): NCBI GI NO: 14423526 NR Description: putative protein [Arabidopsis thaliana]
  misc_feature (1)..(76): NCBI GI NO: 15235320 NR Description: expressed protein [Arabidopsis thaliana]
  misc_feature (1)..(76): NCBI GI NO: 21553903 NR Description: unknown [Arabidopsis thaliana]
  misc_feature (1)..(76): NCBI GI NO: 18397658 NR Description: expressed protein [Arabidopsis thaliana]
  misc_feature (1)..(76): NCBI GI NO: 19698859 NR Description: unknown protein [Arabidopsis thaliana]
  misc_feature (1)..(76): NCBI GI NO: 21593713 NR Description: unknown [Arabidopsis thaliana]
  misc_feature (1)..(76): NCBI GI NO: 14488372 NR Description: hypothetical protein
  misc_feature (1)..(76): NCBI GI NO: 18396594 NR Description: expressed protein [Arabidopsis thaliana]
  misc_feature (1)..(76): NCBI GI NO: 21593643 NR Description: unknown [Arabidopsis thaliana]
  misc_feature (1)..(75): NCBI GI NO: 33667910 NR Description: SWIb domain-containing protein [Solanum chacoense]
MKPRPVSPEMQDVVGEPVIPRTQALKRIWAYIKEHDLQDPQDKKVIICDEKLKKIFAGKDRVGFLEIAKLIGPHFL

SEQ ID NO: 11655 - DNA, 850 bp, Triticum aestivum
  misc_feature (1)..(850): Ceres Seq. ID no. 13661411
aaaaacccctctccccaccatccagtctctctccaaatctcgggacagaaaggccgccgtaccgaattagagattgacagcggcggggcgggagccagcgagctcggcgcgaacccggccccggcgagatgctcggcaagcggcagaggagcatgctgatgcgccggacgaccagcctggcgtccatgccgtcggtgcccaagcaggtgcgccagggcagcggcggcggcggcggcgacaaggacaaaacggcgcgcgcgcggccgtcctcctccgtgtcggccggcgcggtggggacgggcggcggcggctacccctctcccgggagggacgccttcgccgggctgatgatcacggcggcgttcctgtcggcctgcggcttctgcgccaagcccctcggccccggcgaggacacctacatctacaggggcgaggtggcattctgcagccaggagtgcagggagcatcggatcaagaaagacgagctcatggaacagaactgcaccatcacatccatccgggaggccccgtcggaccagtccggcagcggcggcggctcgggcggcgccggggacgccgtcgccgccgcatagccgggcggccattagcttactctattatactagctgctagtgatgtgccacatatatttggcacatgtccgccatgtttaaaccgcccgtccgtgtatacagatcgaactgggtagccggaagttgttgttgtgggtggtgatgccccagtagtggccggtgactgaggatgccatgtgacacatggaacatggtggtttcctctcctgccccagtggagaaccgaacctggactgcaatgcaacatcaaattgcgt

SEQ ID NO: 11656 - protein, 154 aa, Triticum aestivum
  peptide (1)..(154): Ceres Seq. ID no. 13661412
  misc_feature (79)..(122): Pfam Name: DUF581 Pfam Description: Protein of unknown function
  misc_feature (32)..(123): NCBI GI NO: 38344280 NR Description: OSJNBa0013K16.12
  misc_feature (31)..(154): NCBI GI NO: 37572957 NR Description: unknown protein
  misc_feature (1)..(129): NCBI GI NO: 30692533 NR Description: senescence-associated protein -related
  misc_feature (79)..(133): NCBI GI NO: 15238001 NR Description: senescence-associated protein -related
  misc_feature (1)..(151): NCBI GI NO: 18411783 NR Description: senescence-associated protein -related
  misc_feature (1)..(151): NCBI GI NO: 21593931 NR Description: unknown [Arabidopsis thaliana]
  misc_feature (79)..(144): NCBI GI NO: 7485163 NR Description: hypothetical protein - Arabidopsis thaliana
  misc_feature (79)..(144): NCBI GI NO: 18414940 NR Description: senescence-associated protein -related
  misc_feature (79)..(144): NCBI GI NO: 18406598 NR Description: senescence-associated protein -related
  misc_feature (79)..(131): NCBI GI NO: 21594214 NR Description: unknown [Arabidopsis thaliana]
MLGKRQRSMLMRRTTSLASMPSVPKQVRQGSGGGGGDKDKTARARPSSSVSAGAVGTGGGGYPSPGRDAFAGLMITAAFLSACGFCAKPLGPGEDTYIYRGEVAFCSQECREHRIKKDELMEQNCTITSIREAPSDQSGSGGGSGGAGDAVAAA

SEQ ID NO: 11657 - protein, 146 aa, Triticum aestivum
  peptide (1)..(146): Ceres Seq. ID no. 13661413
  misc_feature (71)..(114): Pfam Name: DUF581 Pfam Description: Protein of unknown function
  misc_feature (24)..(115): NCBI GI NO: 38344280 NR Description: OSJNBa0013K16.12
  misc_feature (23)..(146): NCBI GI NO: 37572957 NR Description: unknown protein
  misc_feature (1)..(121): NCBI GI NO: 30692533 NR Description: senescence-associated protein -related
  misc_feature (71)..(125): NCBI GI NO: 15238001 NR Description: senescence-associated protein -related
  misc_feature (1)..(143): NCBI GI NO: 18411783 NR Description: senescence-associated protein -related
  misc_feature (1)..(143): NCBI GI NO: 21593931 NR Description: unknown [Arabidopsis thaliana]
  misc_feature (71)..(136): NCBI GI NO: 7485163 NR Description: hypothetical protein - Arabidopsis thaliana
  misc_feature (71)..(136): NCBI GI NO: 18414940 NR Description: senescence-associated protein -related
  misc_feature (71)..(136): NCBI GI NO: 18406598 NR Description: senescence-associated protein -related
  misc_feature (71)..(123): NCBI GI NO: 21594214 NR Description: unknown [Arabidopsis thaliana]
MLMRRTTSLASMPSVPKQVRQGSGGGGGDKDKTARARPSSSVSAGAVGTGGGGYPSPGRDAFAGLMITAAFLSACGFCAKPLGPGEDTYIYRGEVAFCSQECREHRIKKDELMEQNCTITSIREAPSDQSGSGGGSGGAGDAVAAA

SEQ ID NO: 11658 - protein, 144 aa, Triticum aestivum
  peptide (1)..(144): Ceres Seq. ID no. 13661414
  misc_feature (69)..(112): Pfam Name: DUF581 Pfam Description: Protein of unknown function
  misc_feature (22)..(113): NCBI GI NO: 38344280 NR Description: OSJNBa0013K16.12
  misc_feature (21)..(144): NCBI GI NO: 37572957 NR Description: unknown protein
  misc_feature (1)..(119): NCBI GI NO: 30692533 NR Description: senescence-associated protein -related
  misc_feature (69)..(123): NCBI GI NO: 15238001 NR Description: senescence-associated protein -related
  misc_feature (1)..(141): NCBI GI NO: 18411783 NR Description: senescence-associated protein -related
  misc_feature (1)..(141): NCBI GI NO: 21593931 NR Description: unknown [Arabidopsis thaliana]
  misc_feature (69)..(134): NCBI GI NO: 7485163 NR Description: hypothetical protein - Arabidopsis thaliana
  misc_feature (69)..(134): NCBI GI NO: 18414940 NR Description: senescence-associated protein -related
  misc_feature (69)..(134): NCBI GI NO: 18406598 NR Description: senescence-associated protein -related
  misc_feature (69)..(121): NCBI GI NO: 21594214 NR Description: unknown [Arabidopsis thaliana]
MRRTTSLASMPSVPKQVRQGSGGGGGDKDKTARARPSSSVSAGAVGTGGGGYPSPGRDAFAGLMITAAFLSACGFCAKPLGPGEDTYIYRGEVAFCSQECREHRIKKDELMEQNCTITSIREAPSDQSGSGGGSGGAGDAVAAA

SEQ ID NO: 11659 - DNA, 420 bp, Triticum aestivum
  misc_feature (1)..(420): Ceres Seq. ID no. 13664306
atttttctccaagagaaacgtaaatttgcagttcctttgtcactagttttcgatgctgtagaattgaagagtgagagagagagagatagatcgttgaagacgcagcggtgatcgaaacagaggagagatctggaaatggaaggtggaggatccaacgttagatctagctactacaacgtcctcggtattcgcaaagacgcctctgtttccgatgtccgggctgcttaccgtaagctcgccatgaaatggcatccggatagatacgcgaggactcctgacgtcgccggagaagccaaacgtcgatttcagcaaatccaagaagcctattctgttctgaatgacgagaataagcgctcgatgtatgacgctggactatacgatccccatgaagatgacgacgacgacttctgcgacttcatg

SEQ ID NO: 11660 - protein, 95 aa, Triticum aestivum
  peptide (1)..(95): Ceres Seq. ID no. 13664307
  misc_feature (11)..(80): Pfam Name: Pfam Description:  DnaJ domain
  misc_feature (2)..(94): NCBI GI NO: 21554587 NR Description: DnaJ protein, putative [Arabidopsis thaliana]
  misc_feature (2)..(94): NCBI GI NO: 18405757 NR Description: DnaJ protein family [Arabidopsis thaliana]
  misc_feature (2)..(89): NCBI GI NO: 25404111 NR Description: probable DnaJ protein
  misc_feature (4)..(94): NCBI GI NO: 23428796 NR Description: DnaJ-like protein [Glycine max]
  misc_feature (8)..(94): NCBI GI NO: 7484474 NR Description: probable heat shock protein EMB1 - white spruce
  misc_feature (1)..(91): NCBI GI NO: 15223307 NR Description: DnaJ protein family [Arabidopsis thaliana]
  misc_feature (10)..(94): NCBI GI NO: 34912486 NR Description: heat shock protein-like
  misc_feature (8)..(94): NCBI GI NO: 15231803 NR Description: DnaJ protein family [Arabidopsis thaliana]
  misc_feature (9)..(87): NCBI GI NO: 29841011 NR Description: similar to DnaJ
  misc_feature (12)..(77): NCBI GI NO: 38566154 NR Description: DnaJ homolog subfamily B member 6
MEGGGSNVRSSYYNVLGIRKDASVSDVRAAYRKLAMKWHPDRYARTPDVAGEAKRRFQQIQEAYSVLNDENKRSMYDAGLYDPHEDDDDDFCDFM

SEQ ID NO: 11661 - protein, 60 aa, Triticum aestivum
  peptide (1)..(60): Ceres Seq. ID no. 13664308
  misc_feature (1)..(59): NCBI GI NO: 21554587 NR Description: DnaJ protein, putative [Arabidopsis thaliana]
  misc_feature (1)..(59): NCBI GI NO: 18405757 NR Description: DnaJ protein family [Arabidopsis thaliana]
  misc_feature (1)..(54): NCBI GI NO: 25404111 NR Description: probable DnaJ protein
  misc_feature (1)..(59): NCBI GI NO: 23428796 NR Description: DnaJ-like protein [Glycine max]
  misc_feature (1)..(59): NCBI GI NO: 7484474 NR Description: probable heat shock protein EMB1 - white spruce
  misc_feature (1)..(56): NCBI GI NO: 15223307 NR Description: DnaJ protein family [Arabidopsis thaliana]
  misc_feature (1)..(59): NCBI GI NO: 34912486 NR Description: heat shock protein-like
  misc_feature (1)..(59): NCBI GI NO: 15231803 NR Description: DnaJ protein family [Arabidopsis thaliana]
  misc_feature (1)..(52): NCBI GI NO: 29841011 NR Description: similar to DnaJ
  misc_feature (1)..(42): NCBI GI NO: 38566154 NR Description: DnaJ homolog subfamily B member 6
MKWHPDRYARTPDVAGEAKRRFQQIQEAYSVLNDENKRSMYDAGLYDPHEDDDDDFCDFM

SEQ ID NO: 11662 - DNA, 1010 bp, Triticum aestivum
  misc_feature (1)..(1010): Ceres Seq. ID no. 13661419
agaacatcctaatcaaaaagttatgctgtaatctatggtgcatcacaatcaatcctactcgttgttttattgataacttgcagcaaaaatgctgggattggaggaagcccctccggcgcatgcccgcacagcagagaaaacctgcgacccgtccggcatgacctttgctaccggtggtgcatgcgtgttggacagtacatcgcacgaggtccctgccctcgccaagcagatttacactttcaagaagatggtcaaggacgggaccatcacggagaatcaactgagtcgctctgtagcgctcgtggcctactccggcaacgactatgcaggcaccggcgtcattgggctaggtagccccaacgatattaatgcttatattggaaaggtgacaaaagagattgcagctaatgtggatcaattgttgaagcttggggtgacaaaggttcttgtcaataacttgcaccctatcggttgcacgccatcacacacccgaaccaacaactacaccacgtgtgatatttttagaaacttgggtgcatctatccacaacgataatctgaaacaagttatgacatcaaagaagaatgtctacatcattgacgtgtacaccgcattcgctaatattgtggatcatgcggcaggtaaaggctcagagttgtccaaacaattcaagcgcaaactatcgccgtgttgcgagagtttgaattcgaagggttactgcggacagcaaaacgagtcatccggggagcttctgtacactgtgtgtgacaagtcaagtaaatttttctattgggacgatatgcacccgacccatgcaggatgggaggttgtgataaaacaattggaaaagcccttgagagagtttgtaaatcaagcctaggtagctggttttatatatctgtgtagagctttgcatccatgatgacaaccttctgatttatttcatagtttcaagtatttggaagacgggattttcccgattccatgatgaatattatattgtatttgct

SEQ ID NO: 11663 - protein, 263 aa, Triticum aestivum
  peptide (1)..(263): Ceres Seq. ID no. 13661420
  misc_feature (1)..(252): Pfam Name: Pfam Description:  GDSL-like Lipase/Acylhydrolase
  misc_feature (1)..(260): NCBI GI NO: 10241432 NR Description: putative lipase/acylhydrolase
  misc_feature (1)..(260): NCBI GI NO: 32488918 NR Description: OSJNBb0059K02.9
  misc_feature (1)..(256): NCBI GI NO: 15242811 NR Description: GDSL-motif lipase/hydrolase protein
  misc_feature (1)..(257): NCBI GI NO: 6143883 NR Description: unknown protein [Arabidopsis thaliana]
  misc_feature (23)..(257): NCBI GI NO: 28393114 NR Description: putative lipase acylhydrolase
  misc_feature (23)..(257): NCBI GI NO: 15232799 NR Description: GDSL-motif lipase/hydrolase protein
  misc_feature (1)..(262): NCBI GI NO: 15242810 NR Description: GDSL-motif lipase/hydrolase protein
  misc_feature (23)..(252): NCBI GI NO: 20260298 NR Description: unknown protein [Arabidopsis thaliana]
  misc_feature (2)..(260): NCBI GI NO: 18266041 NR Description: anther-specific proline-rich protein
  misc_feature (22)..(252): NCBI GI NO: 15223959 NR Description: GDSL-motif lipase/hydrolase protein
MLGLEEAPPAHARTAEKTCDPSGMTFATGGACVLDSTSHEVPALAKQIYTFKKMVKDGTITENQLSRSVALVAYSGNDYAGTGVIGLGSPNDINAYIGKVTKEIAANVDQLLKLGVTKVLVNNLHPIGCTPSHTRTNNYTTCDIFRNLGASIHNDNLKQVMTSKKNVYIIDVYTAFANIVDHAAGKGSELSKQFKRKLSPCCESLNSKGYCGQQNESSGELLYTVCDKSSKFFYWDDMHPTHAGWEVVIKQLEKPLREFVNQA

SEQ ID NO: 11664 - protein, 240 aa, Triticum aestivum
  peptide (1)..(240): Ceres Seq. ID no. 13661421
  misc_feature (1)..(229): Pfam Name: Pfam Description:  GDSL-like Lipase/Acylhydrolase
  misc_feature (1)..(237): NCBI GI NO: 10241432 NR Description: putative lipase/acylhydrolase
  misc_feature (1)..(237): NCBI GI NO: 32488918 NR Description: OSJNBb0059K02.9
  misc_feature (1)..(233): NCBI GI NO: 15242811 NR Description: GDSL-motif lipase/hydrolase protein
  misc_feature (1)..(234): NCBI GI NO: 6143883 NR Description: unknown protein [Arabidopsis thaliana]
  misc_feature (1)..(234): NCBI GI NO: 28393114 NR Description: putative lipase acylhydrolase
  misc_feature (1)..(234): NCBI GI NO: 15232799 NR Description: GDSL-motif lipase/hydrolase protein
  misc_feature (1)..(239): NCBI GI NO: 15242810 NR Description: GDSL-motif lipase/hydrolase protein
  misc_feature (1)..(229): NCBI GI NO: 20260298 NR Description: unknown protein [Arabidopsis thaliana]
  misc_feature (1)..(237): NCBI GI NO: 18266041 NR Description: anther-specific proline-rich protein
  misc_feature (1)..(229): NCBI GI NO: 15223959 NR Description: GDSL-motif lipase/hydrolase protein
MTFATGGACVLDSTSHEVPALAKQIYTFKKMVKDGTITENQLSRSVALVAYSGNDYAGTGVIGLGSPNDINAYIGKVTKEIAANVDQLLKLGVTKVLVNNLHPIGCTPSHTRTNNYTTCDIFRNLGASIHNDNLKQVMTSKKNVYIIDVYTAFANIVDHAAGKGSELSKQFKRKLSPCCESLNSKGYCGQQNESSGELLYTVCDKSSKFFYWDDMHPTHAGWEVVIKQLEKPLREFVNQA

SEQ ID NO: 11665 - protein, 210 aa, Triticum aestivum
  peptide (1)..(210): Ceres Seq. ID no. 13661422
  misc_feature (1)..(199): Pfam Name: Pfam Description:  GDSL-like Lipase/Acylhydrolase
  misc_feature (1)..(207): NCBI GI NO: 10241432 NR Description: putative lipase/acylhydrolase
  misc_feature (1)..(207): NCBI GI NO: 32488918 NR Description: OSJNBb0059K02.9
  misc_feature (1)..(203): NCBI GI NO: 15242811 NR Description: GDSL-motif lipase/hydrolase protein
  misc_feature (1)..(204): NCBI GI NO: 6143883 NR Description: unknown protein [Arabidopsis thaliana]
  misc_feature (1)..(204): NCBI GI NO: 28393114 NR Description: putative lipase acylhydrolase
  misc_feature (1)..(204): NCBI GI NO: 15232799 NR Description: GDSL-motif lipase/hydrolase protein
  misc_feature (1)..(209): NCBI GI NO: 15242810 NR Description: GDSL-motif lipase/hydrolase protein
  misc_feature (1)..(199): NCBI GI NO: 20260298 NR Description: unknown protein [Arabidopsis thaliana]
  misc_feature (1)..(207): NCBI GI NO: 18266041 NR Description: anther-specific proline-rich protein
  misc_feature (1)..(199): NCBI GI NO: 15223959 NR Description: GDSL-motif lipase/hydrolase protein
MVKDGTITENQLSRSVALVAYSGNDYAGTGVIGLGSPNDINAYIGKVTKEIAANVDQLLKLGVTKVLVNNLHPIGCTPSHTRTNNYTTCDIFRNLGASIHNDNLKQVMTSKKNVYIIDVYTAFANIVDHAAGKGSELSKQFKRKLSPCCESLNSKGYCGQQNESSGELLYTVCDKSSKFFYWDDMHPTHAGWEVVIKQLEKPLREFVNQA

SEQ ID NO: 11666 - DNA, 1262 bp, Triticum aestivum
  misc_feature (1)..(1262): Ceres Seq. ID no. 14301894
atcaacaaaccaacccaaccagcaatagccaccccaatccatccagctcctccaagctcagtgtccgagctcagctcagctacccacacttcactcagtagcagctaccggtagcgagaaagaaagatcgatagtgcgacgtgcgcgatgacgacggtggcgataggcattctggccatggcgtgcctcgtggcggtggcgcggggcggcaacttcttccaggactccgagatgacctggggggacggccgcggcaaggtcgtcgacggcggccgcgggctcgacctcacgctcgacaagacctccggctccggcttccagtccaagaccgagtacctcttcggcaagatcgacatgcagatcaagctcgtccccggcaactccgccggcaccgtcaccaccttctacctgtcgtcgcaggggacggcgcacgacgagatcgacttcgagttcctgggcaacgtcaccggcgagccctacacgctgcacaccaacgtgttcgcgaaagggcaggggcagcgggagcagcagttccgcctctggttcgaccccaccaaggccttccacacctactccatcatctggaacccgcagcacgtcatattcgcggtggacggcacggcgatcagggacttcaagaaccacgaggcgcgcggcgtgtcgttccccaagagccagccgatgcggctgtacgcgagcctgtggaacgccgacgactgggccacgcagggcggccgggtcaagaccgactggagcaaggcgccgttcgtcgcctccttccgcaacttcaacgccgacgcctgcgtcatgtcgggcggcgcgcagcgctgccccgccggcacaatggaggcctctgcggccggcggcagcggcagctggtggaaccaggagctcagcggcatgggctaccgccgcatgcggtgggtgcagaggaagttcatgatctacaactactgcaccgaccccaagcgggtggcgcagggcgtgcctgccgagtgcaagctccgctgatgagatcctcccgcagcttacaagaacaacaacgcatgaacccgtcatctgagatgtgttttgtttcggctttcgatccgtgagaacgaaggaaggaaggaagtgcgcgcatcagagctctgtcggatggtgtaaatgtagtaccgtagtatgcatatcgcattctttcatttgtttcgttgtcacacgggtcgttccatgtacttatgcaagttctataattagctagttccttttagccttgaaaatcc

SEQ ID NO: 11667 - protein, 287 aa, Triticum aestivum
  peptide (1)..(287): Ceres Seq. ID no. 14301895
  misc_feature (23)..(204): Pfam Name: Pfam Description:  Glycosyl hydrolases family 16
  misc_feature (1)..(287): NCBI GI NO: 7447413 NR Description: xyloglucan endo-1,4-beta-D-glucanase (EC 3
  misc_feature (1)..(287): NCBI GI NO: 14330332 NR Description: Xet1 protein [Schedonorus pratensis]
  misc_feature (1)..(286): NCBI GI NO: 7447412 NR Description: xyloglucan endo-1,4-beta-D-glucanase (EC 3
  misc_feature (1)..(286): NCBI GI NO: 8886867 NR Description: xyloglucan endotransglycosylase XET2
  misc_feature (1)..(286): NCBI GI NO: 29500891 NR Description: putative xyloglucan endotransglycosylase
  misc_feature (1)..(285): NCBI GI NO: 8886865 NR Description: xyloglucan endotransglycosylase XET1
  misc_feature (1)..(284): NCBI GI NO: 22947852 NR Description: xyloglucan endotransglycosylase
  misc_feature (1)..(284): NCBI GI NO: 15235997 NR Description: xyloglucan endotransglycosylase (XTR-6)
  misc_feature (1)..(284): NCBI GI NO: 17064792 NR Description: xyloglucan endo-1, 4-beta-D-glucanase (XTR-6)
  misc_feature (6)..(285): NCBI GI NO: 1076604 NR Description: xyloglucan endo-1,4-beta-D-glucanase (EC 3
MTTVAIGILAMACLVAVARGGNFFQDSEMTWGDGRGKVVDGGRGLDLTLDKTSGSGFQSKTEYLFGKIDMQIKLVPGNSAGTVTTFYLSSQGTAHDEIDFEFLGNVTGEPYTLHTNVFAKGQGQREQQFRLWFDPTKAFHTYSIIWNPQHVIFAVDGTAIRDFKNHEARGVSFPKSQPMRLYASLWNADDWATQGGRVKTDWSKAPFVASFRNFNADACVMSGGAQRCPAGTMEASAAGGSGSWWNQELSGMGYRRMRWVQRKFMIYNYCTDPKRVAQGVPAECKLR

SEQ ID NO: 11668 - protein, 277 aa, Triticum aestivum
  peptide (1)..(277): Ceres Seq. ID no. 14301896
  misc_feature (13)..(194): Pfam Name: Pfam Description:  Glycosyl hydrolases family 16
  misc_feature (1)..(277): NCBI GI NO: 7447413 NR Description: xyloglucan endo-1,4-beta-D-glucanase (EC 3
  misc_feature (1)..(277): NCBI GI NO: 14330332 NR Description: Xet1 protein [Schedonorus pratensis]
  misc_feature (1)..(276): NCBI GI NO: 7447412 NR Description: xyloglucan endo-1,4-beta-D-glucanase (EC 3
  misc_feature (1)..(276): NCBI GI NO: 8886867 NR Description: xyloglucan endotransglycosylase XET2
  misc_feature (1)..(276): NCBI GI NO: 29500891 NR Description: putative xyloglucan endotransglycosylase
  misc_feature (1)..(275): NCBI GI NO: 8886865 NR Description: xyloglucan endotransglycosylase XET1
  misc_feature (1)..(274): NCBI GI NO: 22947852 NR Description: xyloglucan endotransglycosylase
  misc_feature (1)..(274): NCBI GI NO: 15235997 NR Description: xyloglucan endotransglycosylase (XTR-6)
  misc_feature (1)..(274): NCBI GI NO: 17064792 NR Description: xyloglucan endo-1, 4-beta-D-glucanase (XTR-6)
  misc_feature (1)..(275): NCBI GI NO: 1076604 NR Description: xyloglucan endo-1,4-beta-D-glucanase (EC 3
MACLVAVARGGNFFQDSEMTWGDGRGKVVDGGRGLDLTLDKTSGSGFQSKTEYLFGKIDMQIKLVPGNSAGTVTTFYLSSQGTAHDEIDFEFLGNVTGEPYTLHTNVFAKGQGQREQQFRLWFDPTKAFHTYSIIWNPQHVIFAVDGTAIRDFKNHEARGVSFPKSQPMRLYASLWNADDWATQGGRVKTDWSKAPFVASFRNFNADACVMSGGAQRCPAGTMEASAAGGSGSWWNQELSGMGYRRMRWVQRKFMIYNYCTDPKRVAQGVPAECKLR

SEQ ID NO: 11669 - protein, 259 aa, Triticum aestivum
  peptide (1)..(259): Ceres Seq. ID no. 14301897
  misc_feature (1)..(176): Pfam Name: Pfam Description:  Glycosyl hydrolases family 16
  misc_feature (1)..(259): NCBI GI NO: 7447413 NR Description: xyloglucan endo-1,4-beta-D-glucanase (EC 3
  misc_feature (1)..(259): NCBI GI NO: 14330332 NR Description: Xet1 protein [Schedonorus pratensis]
  misc_feature (1)..(258): NCBI GI NO: 7447412 NR Description: xyloglucan endo-1,4-beta-D-glucanase (EC 3
  misc_feature (1)..(258): NCBI GI NO: 8886867 NR Description: xyloglucan endotransglycosylase XET2
  misc_feature (1)..(258): NCBI GI NO: 29500891 NR Description: putative xyloglucan endotransglycosylase
  misc_feature (1)..(257): NCBI GI NO: 8886865 NR Description: xyloglucan endotransglycosylase XET1
  misc_feature (1)..(256): NCBI GI NO: 22947852 NR Description: xyloglucan endotransglycosylase
  misc_feature (1)..(256): NCBI GI NO: 15235997 NR Description: xyloglucan endotransglycosylase (XTR-6)
  misc_feature (1)..(256): NCBI GI NO: 17064792 NR Description: xyloglucan endo-1, 4-beta-D-glucanase (XTR-6)
  misc_feature (1)..(257): NCBI GI NO: 1076604 NR Description: xyloglucan endo-1,4-beta-D-glucanase (EC 3
MTWGDGRGKVVDGGRGLDLTLDKTSGSGFQSKTEYLFGKIDMQIKLVPGNSAGTVTTFYLSSQGTAHDEIDFEFLGNVTGEPYTLHTNVFAKGQGQREQQFRLWFDPTKAFHTYSIIWNPQHVIFAVDGTAIRDFKNHEARGVSFPKSQPMRLYASLWNADDWATQGGRVKTDWSKAPFVASFRNFNADACVMSGGAQRCPAGTMEASAAGGSGSWWNQELSGMGYRRMRWVQRKFMIYNYCTDPKRVAQGVPAECKLR

SEQ ID NO: 11670 - DNA, 955 bp, Triticum aestivum
  misc_feature (1)..(955): Ceres Seq. ID no. 13664314
accgctccagtcccgccaggatctgccgccccacaccgtgcccagctccgccgcccccgcgccccccctctcagccgctcgacgctcgccggagcggcggatctccgacgcgtcgctccctcccgcaggcaacagacggcatctaggcagaacctcccaccattccaccggaatcggagaacctagtcgcggcgcctcaacctcgcctgaactcaccgtcgatggcggccgctgcggggtcgtacggcaagctcgacaagtcattcaagcttgccgctcgctccatactcaccgccttctcccgcgaggatcttaacaatgctttcccatcgttcacggacgccgaaagggagcgcctgtaccaaatgttcatctatgtgatcaagtctttgcatggcaatatagtggaggagttccgaaatctctgcgatgaaatagaaattgctactgcccttgacaaggtagatcagtttgccgaagaacaaactctggacgtattatcttcagacaagactagcattgaagacatcaaagaaaggatatcaaaggagaagaaggatgaaattgaacttttaaaaggtttactagagaagactcaagaaaggaacaatgccatgaaggcccgaatcgaacccttgaagcaaggggaggatttcaatgacacaagagatgttctcacgaagctgaaggaatggaattctgcatgtcagagctgcaatgaccattgagcttctctggttactcgatgtagtcaagagacatctgctgtgtagctttgtgtgttcgtagagtggaggtcgagtcaggggtcatgctcccccatgaaccaatggtgctaaccaattgtagcgtgatttcgtttcttcgttgcaaggcatagctgttgcgtttctgtattttcgtcgcctcatgtttcctgcacccatagttgatgcttgctttagtgatcatcctg

SEQ ID NO: 11671 - protein, 168 aa, Triticum aestivum
  peptide (1)..(168): Ceres Seq. ID no. 13664315
  misc_feature (2)..(161): NCBI GI NO: 34905298 NR Description: P0577B11.20
  misc_feature (11)..(155): NCBI GI NO: 18415295 NR Description: expressed protein [Arabidopsis thaliana]
  misc_feature (37)..(155): NCBI GI NO: 7487713 NR Description: hypothetical protein T5K18
MAAAAGSYGKLDKSFKLAARSILTAFSREDLNNAFPSFTDAERERLYQMFIYVIKSLHGNIVEEFRNLCDEIEIATALDKVDQFAEEQTLDVLSSDKTSIEDIKERISKEKKDEIELLKGLLEKTQERNNAMKARIEPLKQGEDFNDTRDVLTKLKEWNSACQSCNDH

SEQ ID NO: 11672 - protein, 120 aa, Triticum aestivum
  peptide (1)..(120): Ceres Seq. ID no. 13664316
  misc_feature (1)..(113): NCBI GI NO: 34905298 NR Description: P0577B11.20
  misc_feature (1)..(107): NCBI GI NO: 18415295 NR Description: expressed protein [Arabidopsis thaliana]
  misc_feature (1)..(107): NCBI GI NO: 7487713 NR Description: hypothetical protein T5K18
MFIYVIKSLHGNIVEEFRNLCDEIEIATALDKVDQFAEEQTLDVLSSDKTSIEDIKERISKEKKDEIELLKGLLEKTQERNNAMKARIEPLKQGEDFNDTRDVLTKLKEWNSACQSCNDH

SEQ ID NO: 11673 - protein, 104 aa, Triticum aestivum
  peptide (1)..(104): Ceres Seq. ID no. 13664317
PLQSRQDLPPHTVPSSAAPAPPLSAARRSPERRISDASLPPAGNRRHLGRTSHHSTGIGEPSRGASTSPELTVDGGRCGVVRQARQVIQACRSLHTHRLLPRGS

SEQ ID NO: 11674 - DNA, 857 bp, Triticum aestivum
  misc_feature (1)..(857): Ceres Seq. ID no. 13661487
tggaaactttgggtcttagaaatggtcctgctaaggaggccgaagatgctgcagaatgtaccaaacagacaaatttgagcactgagaatgagcaactagaaagtgcagaaggtactgagcggcatctggatgtttcatttcatggtactgaagctagcacagacgaagctgcctctgaagcagctgaatcttcagtctcagctacttagacacaggcagagagaacagttgataaaccagctggctcatctgatttggacaatcctatctctgaagcttcacccgatcctgatgtcaatgggagtgatttggctggctcggcattatcttctgagcaagctgtccgtaacgaagatgtggaggtaccgaccaagactgatgcagtcgtggatactgaaatgaaaactgatacagtcgtggaaactgatgcagtcggggatgttggagtgaaagctgatgcagtcgtggaggtaccaagcaaggaagtatctgccgtggatgttgaagctaaaactggcgcagcagaagcaaaagagtgaagtggcagcttatctcatggactgaaatggcatagctgacgagcaattattagtcagacccctcagaagacaggcaatcatctttgcttcaagtgctcatcagccacaagcaacttcgaagcaaactgctgtacaataagcaagtgtactattttgccttccattgtggccaatcactgtacaaatgggcaccattgtctaactgcacgcgtacacttcatcagaaattggtcaatttgcttcaaaatttaccctccgtttcatggggaacaattggttgatgcgaaatgtcatttggcggtagtctcgtgtcttgcg

SEQ ID NO: 11675 - protein, 90 aa, Triticum aestivum
  peptide (1)..(90): Ceres Seq. ID no. 13661488
MFHFMVLKLAQTKLPLKQLNLQSQLLRHRQREQLINQLAHLIWTILSLKLHPILMSMGVIWLARHYLLSKLSVTKMWRYRPRLMQSWILK

SEQ ID NO: 11676 - protein, 86 aa, Triticum aestivum
  peptide (1)..(86): Ceres Seq. ID no. 13661489
MVLKLAQTKLPLKQLNLQSQLLRHRQREQLINQLAHLIWTILSLKLHPILMSMGVIWLARHYLLSKLSVTKMWRYRPRLMQSWILK

SEQ ID NO: 11677 - protein, 68 aa, Triticum aestivum
  peptide (1)..(68): Ceres Seq. ID no. 13661490
  misc_feature (1)..(68): NCBI GI NO: 34912146 NR Description: P0712E02.15
ETLGLRNGPAKEAEDAAECTKQTNLSTENEQLESAEGTERHLDVSFHGTEASTDEAASEAAESSVSAT

SEQ ID NO: 11678 - DNA, 659 bp, Triticum aestivum
  misc_feature (1)..(659): Ceres Seq. ID no. 13661877
atcctaatcgaaaagatttttttggcgagagagctaagatgtgtctccgttactccctttgcttgatcttattctctctcatttcactccaaggttttgccaagaagacaggagatgtgtcggaattgcagatcggtgttaagtttaagccagcaacgtgtgaagtgaaggctcacaaaggtgatatgatcaaggtgcactacagggggaaacttactgatggaacagtattcgattcgagctttgaaagggatgaaccgttcgagtttgagttaggaagtggtcaggttatcaaaggctgggatcaaggattgctaggtgcgtgtgtaggagagaagaggaagttaaagatacctgctaaacttggatatggtgaacagggctctcctccaaccatccccggtggggcaacactgatatttgacacagagcttatcgcggtaaatgaaaaaccagctggtggagaacaagaacaagaagaagaagatgtagacgacacatatggagctgacgagctgtgattgattctctattctccaaccgtttagcttcagagttcctctacgaataaaatgtctatgtgcgtttgctttttaatcattggatgcttttagttttgcttctttctaagttatcaacaattacttcgttttggtttg

SEQ ID NO: 11679 - protein, 172 aa, Triticum aestivum
  peptide (1)..(172): Ceres Seq. ID no. 13661878
  misc_feature (52)..(145): Pfam Name: Pfam Description:  FKBP-type peptidyl-prolyl cis-trans isomerase
  misc_feature (11)..(172): NCBI GI NO: 15239019 NR Description: immunophilin / FKBP-type peptidyl-prolyl cis-transisomerase
  misc_feature (12)..(172): NCBI GI NO: 2129623 NR Description: probable peptidylprolyl isomerase (EC 5
  misc_feature (17)..(161): NCBI GI NO: 23396588 NR Description: FK506-binding protein 2 precursor
  misc_feature (21)..(160): NCBI GI NO: 2129622 NR Description: probable peptidylprolyl isomerase (EC 5
  misc_feature (21)..(160): NCBI GI NO: 18404471 NR Description: immunophilin / FKBP-type peptidyl-prolyl cis-transisomerase
  misc_feature (19)..(166): NCBI GI NO: 38174807 NR Description: putative immunophilin
  misc_feature (21)..(160): NCBI GI NO: 21593622 NR Description: immunophilin (FKBP15-1) [Arabidopsis thaliana]
  misc_feature (21)..(159): NCBI GI NO: 34906954 NR Description: rapamycin-binding protein-like
  misc_feature (15)..(150): NCBI GI NO: 6679805 NR Description: FK506 binding protein 2; FK506 binding protein 2
  misc_feature (21)..(150): NCBI GI NO: 27694894 NR Description: Similar to FK506 binding protein 2 (13 kDa)
PNRKDFFGERAKMCLRYSLCLILFSLISLQGFAKKTGDVSELQIGVKFKPATCEVKAHKGDMIKVHYRGKLTDGTVFDSSFERDEPFEFELGSGQVIKGWDQGLLGACVGEKRKLKIPAKLGYGEQGSPPTIPGGATLIFDTELIAVNEKPAGGEQEQEEEDVDDTYGADEL

SEQ ID NO: 11680 - protein, 160 aa, Triticum aestivum
  peptide (1)..(160): Ceres Seq. ID no. 13661879
  misc_feature (40)..(133): Pfam Name: Pfam Description:  FKBP-type peptidyl-prolyl cis-trans isomerase
  misc_feature (1)..(160): NCBI GI NO: 15239019 NR Description: immunophilin / FKBP-type peptidyl-prolyl cis-transisomerase
  misc_feature (1)..(160): NCBI GI NO: 2129623 NR Description: probable peptidylprolyl isomerase (EC 5
  misc_feature (5)..(149): NCBI GI NO: 23396588 NR Description: FK506-binding protein 2 precursor
  misc_feature (9)..(148): NCBI GI NO: 2129622 NR Description: probable peptidylprolyl isomerase (EC 5
  misc_feature (9)..(148): NCBI GI NO: 18404471 NR Description: immunophilin / FKBP-type peptidyl-prolyl cis-transisomerase
  misc_feature (7)..(154): NCBI GI NO: 38174807 NR Description: putative immunophilin
  misc_feature (9)..(148): NCBI GI NO: 21593622 NR Description: immunophilin (FKBP15-1) [Arabidopsis thaliana]
  misc_feature (9)..(147): NCBI GI NO: 34906954 NR Description: rapamycin-binding protein-like
  misc_feature (3)..(138): NCBI GI NO: 6679805 NR Description: FK506 binding protein 2; FK506 binding protein 2
  misc_feature (9)..(138): NCBI GI NO: 27694894 NR Description: Similar to FK506 binding protein 2 (13 kDa)
MCLRYSLCLILFSLISLQGFAKKTGDVSELQIGVKFKPATCEVKAHKGDMIKVHYRGKLTDGTVFDSSFERDEPFEFELGSGQVIKGWDQGLLGACVGEKRKLKIPAKLGYGEQGSPPTIPGGATLIFDTELIAVNEKPAGGEQEQEEEDVDDTYGADEL

SEQ ID NO: 11681 - protein, 111 aa, Triticum aestivum
  peptide (1)..(111): Ceres Seq. ID no. 13661880
  misc_feature (1)..(84): Pfam Name: Pfam Description:  FKBP-type peptidyl-prolyl cis-trans isomerase
  misc_feature (1)..(111): NCBI GI NO: 15239019 NR Description: immunophilin / FKBP-type peptidyl-prolyl cis-transisomerase
  misc_feature (1)..(111): NCBI GI NO: 2129623 NR Description: probable peptidylprolyl isomerase (EC 5
  misc_feature (1)..(100): NCBI GI NO: 23396588 NR Description: FK506-binding protein 2 precursor
  misc_feature (1)..(99): NCBI GI NO: 2129622 NR Description: probable peptidylprolyl isomerase (EC 5
  misc_feature (1)..(99): NCBI GI NO: 18404471 NR Description: immunophilin / FKBP-type peptidyl-prolyl cis-transisomerase
  misc_feature (1)..(105): NCBI GI NO: 38174807 NR Description: putative immunophilin
  misc_feature (1)..(99): NCBI GI NO: 21593622 NR Description: immunophilin (FKBP15-1) [Arabidopsis thaliana]
  misc_feature (1)..(98): NCBI GI NO: 34906954 NR Description: rapamycin-binding protein-like
  misc_feature (1)..(89): NCBI GI NO: 6679805 NR Description: FK506 binding protein 2; FK506 binding protein 2
  misc_feature (1)..(89): NCBI GI NO: 27694894 NR Description: Similar to FK506 binding protein 2 (13 kDa)
MIKVHYRGKLTDGTVFDSSFERDEPFEFELGSGQVIKGWDQGLLGACVGEKRKLKIPAKLGYGEQGSPPTIPGGATLIFDTELIAVNEKPAGGEQEQEEEDVDDTYGADEL

SEQ ID NO: 11682 - DNA, 1136 bp, Triticum aestivum
  misc_feature (1)..(1136): Ceres Seq. ID no. 13662018
cctagaacatcctaatcgaaaaatcacgaaaggtctcgctcgctagctgccgtccccgcccgcctgccgcctcgtgccctcgacacgacacgacacgatggccgcggccgcgccatcccgccaccgccccgagggacctccctcggaggaggaggcggcgagggactgggcggggctgccgggggacgcgctgctggcggtgctccacaggctagaccacgtcgacgtcctcatgggggccggccaggtgtgcagcccctggcgctgcgcggcgcggaacgagccggagctgtggcgccgcgtcgaggtgcgctcccacgccgaccgccgatctcacgtcgcggcgccctcccgcgccagacgccactcctgctccgtcctctgtgggctggcgcgcgccgccgtcaggcgtgccgcggggcagtgcgaggccttctgcggcgagggcgccgtggacgacagcgtcctctccctccttgccgactcggcgccttcgctgaagagcctccggatcatctccggcgacaggatcgtcgacgagaggctcagcctcaccatcacgaacttctccctgctggaggagctggagctctcgctttgcaccgacgtctacccggggacgtgcgaggccgtcggcaccgcctgccctctcctcaagcgcttccgtctgagcaagaagcagttctgcaagtggaacaccaagaacatcgaccaggaggccatggccatcgccaccatgggcgggctgcggtcgcttcagctcttcgccaaccctctcagcgacgacgggctggcggccatccttgacggatgcccgcgcctcgagtctctcgacatccgccactgcttcaacgttgggatgggcgctgctgcgatccgagcacggtgtcctgggatcaagacgctgaggctgccggatgactccacgatcgattacgatctgaagttttctcccccggatatgaccccgtggaacacccaggatgagcatcaatgtgattggcacgagttggtctatttcagttcatggtagtctagtgtactggtgtgcagcttccccacaagataccgctgctgtaagtaggagtacaaccaaatggacgggttaataatggcaatgatacttttttttggtt

SEQ ID NO: 11683 - protein, 311 aa, Triticum aestivum
  peptide (1)..(311): Ceres Seq. ID no. 13662019
  misc_feature (1)..(300): NCBI GI NO: 40253673 NR Description: putative N7 protein
  misc_feature (1)..(291): NCBI GI NO: 38637156 NR Description: F-box protein family-like
  misc_feature (95)..(297): NCBI GI NO: 38637159 NR Description: F-box protein family-like
  misc_feature (95)..(287): NCBI GI NO: 40253669 NR Description: F-box protein-like
  misc_feature (17)..(303): NCBI GI NO: 18412953 NR Description: F-box protein family, AtFBL9/AtFBL23
  misc_feature (14)..(268): NCBI GI NO: 40253645 NR Description: F-box protein-like
  misc_feature (18)..(281): NCBI GI NO: 18412951 NR Description: F-box protein family, AtFBL22
  misc_feature (22)..(196): NCBI GI NO: 40253668 NR Description: glutamic acid-rich protein precursor-like protein
  misc_feature (198)..(276): NCBI GI NO: 40253668 NR Description: glutamic acid-rich protein precursor-like protein
  misc_feature (20)..(163): NCBI GI NO: 38637157 NR Description: hypothetical protein
MAAAAPSRHRPEGPPSEEEAARDWAGLPGDALLAVLHRLDHVDVLMGAGQVCSPWRCAARNEPELWRRVEVRSHADRRSHVAAPSRARRHSCSVLCGLARAAVRRAAGQCEAFCGEGAVDDSVLSLLADSAPSLKSLRIISGDRIVDERLSLTITNFSLLEELELSLCTDVYPGTCEAVGTACPLLKRFRLSKKQFCKWNTKNIDQEAMAIATMGGLRSLQLFANPLSDDGLAAILDGCPRLESLDIRHCFNVGMGAAAIRARCPGIKTLRLPDDSTIDYDLKFSPPDMTPWNTQDEHQCDWHELVYFSSW

SEQ ID NO: 11684 - protein, 266 aa, Triticum aestivum
  peptide (1)..(266): Ceres Seq. ID no. 13662020
  misc_feature (1)..(255): NCBI GI NO: 40253673 NR Description: putative N7 protein
  misc_feature (1)..(246): NCBI GI NO: 38637156 NR Description: F-box protein family-like
  misc_feature (50)..(252): NCBI GI NO: 38637159 NR Description: F-box protein family-like
  misc_feature (50)..(242): NCBI GI NO: 40253669 NR Description: F-box protein-like
  misc_feature (1)..(258): NCBI GI NO: 18412953 NR Description: F-box protein family, AtFBL9/AtFBL23
  misc_feature (1)..(223): NCBI GI NO: 40253645 NR Description: F-box protein-like
  misc_feature (1)..(236): NCBI GI NO: 18412951 NR Description: F-box protein family, AtFBL22
  misc_feature (1)..(151): NCBI GI NO: 40253668 NR Description: glutamic acid-rich protein precursor-like protein
  misc_feature (153)..(231): NCBI GI NO: 40253668 NR Description: glutamic acid-rich protein precursor-like protein
  misc_feature (1)..(118): NCBI GI NO: 38637157 NR Description: hypothetical protein
MGAGQVCSPWRCAARNEPELWRRVEVRSHADRRSHVAAPSRARRHSCSVLCGLARAAVRRAAGQCEAFCGEGAVDDSVLSLLADSAPSLKSLRIISGDRIVDERLSLTITNFSLLEELELSLCTDVYPGTCEAVGTACPLLKRFRLSKKQFCKWNTKNIDQEAMAIATMGGLRSLQLFANPLSDDGLAAILDGCPRLESLDIRHCFNVGMGAAAIRARCPGIKTLRLPDDSTIDYDLKFSPPDMTPWNTQDEHQCDWHELVYFSSW

SEQ ID NO: 11685 - DNA, 643 bp, Triticum aestivum
  misc_feature (1)..(643): Ceres Seq. ID no. 13661491
aatcaggaagacgagtgagaagagaagaagcaatggggagaaagaagggattgccggagtttgaagagacggcgccggatggcttcgatccggcgaatccatacaaggatccggtggcgatggtggaaatgagagagcacatcgtccgcgaaaagtggatccagatcgagaaggctaagatcatgcgcgagaaggtcaaatggtgttaccgcgtcgaaggagtcaaccattaccagaaatgccgtcatctcgtccagcagtacctcgactccactcgcggcgtcggctgggggaaagaccaccgtcctatgtcgctccacggtcctaagcctgaggctgttgaagctgaataatgatttgcgtgtgattaatctgaggtgacggagcttttaatacaagacatgaaaaggtctttggactctgcagatttgctcttgtttgttctttttcttttgttgaaacatgtcagtctttggactggcggatacatggaagggtttttataagcttcagtaatgtattgaagaaactacactcaacattagtctttcattatgctacccaaataagtccatttttttctttgttccgggcttccggctagttttttactttcttgccaaaaactgtagcttaaattctc

SEQ ID NO: 11686 - protein, 116 aa, Triticum aestivum
  peptide (1)..(116): Ceres Seq. ID no. 15218790
  misc_feature (11)..(116): NCBI GI NO: 18401879 NR Description: expressed protein [Arabidopsis thaliana]
  misc_feature (11)..(114): NCBI GI NO: 18402495 NR Description: NADH-ubiquinone oxidoreductase 12 kD subunit -related
  misc_feature (11)..(107): NCBI GI NO: 11994104 NR Description: gene_id:MYF24
  misc_feature (14)..(116): NCBI GI NO: 37537116 NR Description: unknown protein
  misc_feature (23)..(88): NCBI GI NO: 400649 NR Description: NADH-ubiquinone oxidoreductase 12 kDa subunit
  misc_feature (23)..(88): NCBI GI NO: 32420171 NR Description: NADH-UBIQUINONE OXIDOREDUCTASE 12 KD SUBUNITPRECURSOR
  misc_feature (23)..(89): NCBI GI NO: 40742951 NR Description: hypothetical protein AN7561.2
SGRRVRREEAMGRKKGLPEFEETAPDGFDPANPYKDPVAMVEMREHIVREKWIQIEKAKIMREKVKWCYRVEGVNHYQKCRHLVQQYLDSTRGVGWGKDHRPMSLHGPKPEAVEAE

SEQ ID NO: 11687 - protein, 106 aa, Triticum aestivum
  peptide (1)..(106): Ceres Seq. ID no. 15218791
  misc_feature (1)..(106): NCBI GI NO: 18401879 NR Description: expressed protein [Arabidopsis thaliana]
  misc_feature (1)..(104): NCBI GI NO: 18402495 NR Description: NADH-ubiquinone oxidoreductase 12 kD subunit -related
  misc_feature (1)..(97): NCBI GI NO: 11994104 NR Description: gene_id:MYF24
  misc_feature (4)..(106): NCBI GI NO: 37537116 NR Description: unknown protein
  misc_feature (13)..(78): NCBI GI NO: 400649 NR Description: NADH-ubiquinone oxidoreductase 12 kDa subunit
  misc_feature (13)..(78): NCBI GI NO: 32420171 NR Description: NADH-UBIQUINONE OXIDOREDUCTASE 12 KD SUBUNITPRECURSOR
  misc_feature (13)..(79): NCBI GI NO: 40742951 NR Description: hypothetical protein AN7561.2
MGRKKGLPEFEETAPDGFDPANPYKDPVAMVEMREHIVREKWIQIEKAKIMREKVKWCYRVEGVNHYQKCRHLVQQYLDSTRGVGWGKDHRPMSLHGPKPEAVEAE

SEQ ID NO: 11688 - protein, 77 aa, Triticum aestivum
  peptide (1)..(77): Ceres Seq. ID no. 15218792
  misc_feature (1)..(77): NCBI GI NO: 18401879 NR Description: expressed protein [Arabidopsis thaliana]
  misc_feature (1)..(75): NCBI GI NO: 18402495 NR Description: NADH-ubiquinone oxidoreductase 12 kD subunit -related
  misc_feature (1)..(68): NCBI GI NO: 11994104 NR Description: gene_id:MYF24
  misc_feature (1)..(77): NCBI GI NO: 37537116 NR Description: unknown protein
  misc_feature (1)..(49): NCBI GI NO: 400649 NR Description: NADH-ubiquinone oxidoreductase 12 kDa subunit
  misc_feature (1)..(49): NCBI GI NO: 32420171 NR Description: NADH-UBIQUINONE OXIDOREDUCTASE 12 KD SUBUNITPRECURSOR
  misc_feature (1)..(50): NCBI GI NO: 40742951 NR Description: hypothetical protein AN7561.2
MVEMREHIVREKWIQIEKAKIMREKVKWCYRVEGVNHYQKCRHLVQQYLDSTRGVGWGKDHRPMSLHGPKPEAVEAE

SEQ ID NO: 11689 - DNA, 852 bp, Triticum aestivum
  misc_feature (1)..(852): Ceres Seq. ID no. 12624328
atatttaatttgtttctagtttctacatttcgctattcacgaatctgagatgttatgctctagccatgatctgcgattcttctggctcctgcgagattgacaaaatacaagatacttttaatcaatggaagcaagcacctgaaaatacaggagagtatgtgcatcttaccagagaactgctaaccacctgtgagagcgtccaatggcaggtggatgagttagagaaggcaatttctgttgctgagagagatccagcttactatggactaaacgaggttgaaattgggaaacggaggaactggactagcaccgcccgcaaccaggtggtatcaatacggaggaatgttgaagctggaaagcacaagactgcctttggacgttcggtcaatccttccgaactaggcagatccaagcagcacatttctcaggataacgatgacttcattgcttcagaatctgatcaacagatgctcctgatgaagcgtcaggatgatgagttggatgcgcttagtgctagtgtccagcgaattggaggtgtaggtctcacaatacacgaagagcttgttggacaggaaaaacttctaggtgaactaagcctcgacatggaaactacctccaaccggctcgattttgtgcagaaaagagtggctatggttctgaagaaggccagcttgaaagggcagatcatgatgatagctttcttggtggttcttttcatcatccttttcgttttggtattcttgacttgagagatggagtttaagttgcgtgagtatttgccatcaggtgtataattgattcgtgtaattggggccggtatagtttgttcttcgggatctgcctctgccaagt

SEQ ID NO: 11690 - protein, 227 aa, Triticum aestivum
  peptide (1)..(227): Ceres Seq. ID no. 12624329
  misc_feature (140)..(201): Pfam Name: Pfam Description:  SNARE domain
  misc_feature (47)..(227): NCBI GI NO: 34905840 NR Description: putative syntaxin
  misc_feature (11)..(60): NCBI GI NO: 34905840 NR Description: putative syntaxin
  misc_feature (11)..(227): NCBI GI NO: 18396813 NR Description: syntaxin SYP6 family; protein id: At1g28490
  misc_feature (11)..(227): NCBI GI NO: 18175840 NR Description: unknown protein [Arabidopsis thaliana]
  misc_feature (11)..(172): NCBI GI NO: 498040 NR Description: ORF
  misc_feature (48)..(198): NCBI GI NO: 6560768 NR Description: F3M18.7 [Arabidopsis thaliana]
  misc_feature (11)..(226): NCBI GI NO: 20148776 NR Description: syntaxin 6 [Chlamydomonas reinhardtii]
  misc_feature (10)..(133): NCBI GI NO: 6560768 NR Description: F3M18.7 [Arabidopsis thaliana]
  misc_feature (29)..(226): NCBI GI NO: 12857762 NR Description: unnamed protein product [Mus musculus]
  misc_feature (35)..(226): NCBI GI NO: 10946800 NR Description: syntaxin 6 [Mus musculus]
MICDSSGSCEIDKIQDTFNQWKQAPENTGEYVHLTRELLTTCESVQWQVDELEKAISVAERDPAYYGLNEVEIGKRRNWTSTARNQVVSIRRNVEAGKHKTAFGRSVNPSELGRSKQHISQDNDDFIASESDQQMLLMKRQDDELDALSASVQRIGGVGLTIHEELVGQEKLLGELSLDMETTSNRLDFVQKRVAMVLKKASLKGQIMMIAFLVVLFIILFVLVFLT

SEQ ID NO: 11691 - DNA, 886 bp, Triticum aestivum
  misc_feature (1)..(886): Ceres Seq. ID no. 13661499
aacccaaagcagaccggaccgtctgaacagacagcataagaagcgagaaggcagagacgggagcctcgccgccgacgggcaagatgcagcgcgcgtcgctcgcgtccgccttgctgctgctctgctccctctgttccttcttcgcgcagccgtcgcaggcgttcctcgacggcacgcgcggcgcaggggcgtgcatttctcggctgcttggcgagggcttcggcgacgagaagatccccatggccgtcgtggtgccgtcggtgccagattactccccgctgccggcaccgaccgctgtcgcggtcgccgcgcctgcgcctgcgcccacgcccacgccaacgccaacgccggtgcccggctcggaggagtacatgccgaagctgccgtcggagaggctgagccctggggcgccggccagcggcaatgcgggcgcgccggcgcctgccgcgtcgggcgatggggcgagcaccgcattcatcagcagcaaccccgcggtgccgctccccgccggcgtcaccgactccgccaccgtcctgcccatgcccacccctggacaagagcaacggcaggacgtggggatgggcaccctgcttcaggctagggcggtgccgttggtcgctcctctcctcatggtgctctacttttgagtttcttgttggggtagtagactagttcctttctcttactgtataatcatcgtgcgattagttgtcagaatctgcgcttgtaatcagcaccgtagtgctttcgttatcatctagtaggcgattgtaagctctaaccatctgtaaacagtgtcacctctgcttactgcatgcttcttgtctcttgttacacctgtatcctgcgtacgagtaagtctgcattgcaaatttgcaattctttc

SEQ ID NO: 11692 - protein, 199 aa, Triticum aestivum
  peptide (1)..(199): Ceres Seq. ID no. 15218793
TQSRPDRLNRQHKKREGRDGSLAADGQDAARVARVRLAAALLPLFLLRAAVAGVPRRHARRRGVHFSAAWRGLRRREDPHGRRGAVGARLLPAAGTDRCRGRRACACAHAHANANAGARLGGVHAEAAVGEAEPWGAGQRQCGRAGACRVGRWGEHRIHQQQPRGAAPRRRHRLRHRPAHAHPWTRATAGRGDGHPASG

SEQ ID NO: 11693 - protein, 187 aa, Triticum aestivum
  peptide (1)..(187): Ceres Seq. ID no. 15218794
  misc_feature (1)..(187): NCBI GI NO: 38605910 NR Description: OSJNBb0088C09.4
  misc_feature (34)..(177): NCBI GI NO: 21225405 NR Description: putative acyltransferase
  misc_feature (61)..(175): NCBI GI NO: 38637992 NR Description: conserved hypothetical protein
  misc_feature (52)..(185): NCBI GI NO: 23017292 NR Description: hypothetical protein [Thermobifida fusca]
  misc_feature (72)..(185): NCBI GI NO: 21536976 NR Description: unknown [Arabidopsis thaliana]
  misc_feature (72)..(185): NCBI GI NO: 18394953 NR Description: expressed protein [Arabidopsis thaliana]
  misc_feature (58)..(156): NCBI GI NO: 9630030 NR Description: unknown
  misc_feature (30)..(185): NCBI GI NO: 21219450 NR Description: putative secreted proline-rich protein
  misc_feature (59)..(160): NCBI GI NO: 17537803 NR Description: Putative protein, nematode specific
  misc_feature (72)..(169): NCBI GI NO: 25402935 NR Description: protein T22I11.8 [imported] - Arabidopsis thaliana
MQRASLASALLLLCSLCSFFAQPSQAFLDGTRGAGACISRLLGEGFGDEKIPMAVVVPSVPDYSPLPAPTAVAVAAPAPAPTPTPTPTPVPGSEEYMPKLPSERLSPGAPASGNAGAPAPAASGDGASTAFISSNPAVPLPAGVTDSATVLPMPTPGQEQRQDVGMGTLLQARAVPLVAPLLMVLYF

SEQ ID NO: 11694 - protein, 135 aa, Triticum aestivum
  peptide (1)..(135): Ceres Seq. ID no. 15218795
  misc_feature (1)..(135): NCBI GI NO: 38605910 NR Description: OSJNBb0088C09.4
  misc_feature (1)..(125): NCBI GI NO: 21225405 NR Description: putative acyltransferase
  misc_feature (9)..(123): NCBI GI NO: 38637992 NR Description: conserved hypothetical protein
  misc_feature (1)..(133): NCBI GI NO: 23017292 NR Description: hypothetical protein [Thermobifida fusca]
  misc_feature (20)..(133): NCBI GI NO: 21536976 NR Description: unknown [Arabidopsis thaliana]
  misc_feature (20)..(133): NCBI GI NO: 18394953 NR Description: expressed protein [Arabidopsis thaliana]
  misc_feature (6)..(104): NCBI GI NO: 9630030 NR Description: unknown
  misc_feature (1)..(133): NCBI GI NO: 21219450 NR Description: putative secreted proline-rich protein
  misc_feature (7)..(108): NCBI GI NO: 17537803 NR Description: Putative protein, nematode specific
  misc_feature (20)..(117): NCBI GI NO: 25402935 NR Description: protein T22I11.8 [imported] - Arabidopsis thaliana
MAVVVPSVPDYSPLPAPTAVAVAAPAPAPTPTPTPTPVPGSEEYMPKLPSERLSPGAPASGNAGAPAPAASGDGASTAFISSNPAVPLPAGVTDSATVLPMPTPGQEQRQDVGMGTLLQARAVPLVAPLLMVLYF

SEQ ID NO: 11695 - DNA, 971 bp, Triticum aestivum
  misc_feature (1)..(971): Ceres Seq. ID no. 15226351
aaaccttaggggataacttagaaacaagaaaacggcgtcggtttgacccgacggaggaaccatgtcgtcgtctcttcttctctcaggctctacagtatcttcttcattcattgctccttcgaagctttatctcttacggaatcaaaatcaatcactgtcactatctcggaacgtttcgagaaccttcaaaccccttaggtgctcctccgctgattctccatacggaggcaacgtgcccacgttccctcgaaccagggtctgggacccatacaagcgtctagggataagcccctacgcctccgaggaagagatctgggcctcgcgcaacttcctcttggagcagtacgcgggacacgagaggagccaagagtctatagaaggcgcattcgagaagcttctcatgtctagttttgtgaagaggaagaagactaaaatcaacctcaagacgaggttgaagaagaaagttgaggagtctcctccgtggcttaaagctcttcttgatttcgttgagatgcctcccatggatactgttttcagaagactctttcttttcgctttcatgggtggttggagtatcatgaactctgcagaaggcggtcctgcctttcaggtggcggtgtcgttggcggcttgcgtatatttccttaatgagaagacgaagagcttggggagagcttgcttaatcgggtttggtgcattaacagtcgggtggttctgcggttcgctagtcattcccatgattccgacggctttcattaacccgacatggaccctggagcttctaacgtcactggttgcttatgtgtttttgtttctttcttgtactttcctcaagtaggttgttgcacttttatccagactttgtgtttctttcttgtacctgttctcgccggaaaattgaacttgagttctacaacattggttaactcttgttaaagtatggaatcaagttgatcaggatcttaccaacc

SEQ ID NO: 11696 - protein, 258 aa, Triticum aestivum
  peptide (1)..(258): Ceres Seq. ID no. 15226352
  misc_feature (1)..(258): NCBI GI NO: 15237199 NR Description: expressed protein [Arabidopsis thaliana]
  misc_feature (145)..(258): NCBI GI NO: 37573058 NR Description: unknown protein
  misc_feature (14)..(258): NCBI GI NO: 11357625 NR Description: hypothetical protein F24M12
  misc_feature (24)..(258): NCBI GI NO: 18409276 NR Description: expressed protein [Arabidopsis thaliana]
  misc_feature (69)..(258): NCBI GI NO: 17230751 NR Description: hypothetical protein [Nostoc sp. PCC 7120]
  misc_feature (68)..(258): NCBI GI NO: 23129945 NR Description: COG2214: DnaJ-class molecular chaperone
  misc_feature (70)..(258): NCBI GI NO: 23039527 NR Description: hypothetical protein
  misc_feature (69)..(258): NCBI GI NO: 16329734 NR Description: unknown protein [Synechocystis sp. PCC 6803]
MSSSLLLSGSTVSSSFIAPSKLYLLRNQNQSLSLSRNVSRTFKPLRCSSADSPYGGNVPTFPRTRVWDPYKRLGISPYASEEEIWASRNFLLEQYAGHERSQESIEGAFEKLLMSSFVKRKKTKINLKTRLKKKVEESPPWLKALLDFVEMPPMDTVFRRLFLFAFMGGWSIMNSAEGGPAFQVAVSLAACVYFLNEKTKSLGRACLIGFGALTVGWFCGSLVIPMIPTAFINPTWTLELLTSLVAYVFLFLSCTFLK

SEQ ID NO: 11697 - protein, 145 aa, Triticum aestivum
  peptide (1)..(145): Ceres Seq. ID no. 15226353
  misc_feature (1)..(145): NCBI GI NO: 15237199 NR Description: expressed protein [Arabidopsis thaliana]
  misc_feature (32)..(145): NCBI GI NO: 37573058 NR Description: unknown protein
  misc_feature (1)..(145): NCBI GI NO: 11357625 NR Description: hypothetical protein F24M12
  misc_feature (1)..(145): NCBI GI NO: 18409276 NR Description: expressed protein [Arabidopsis thaliana]
  misc_feature (1)..(145): NCBI GI NO: 17230751 NR Description: hypothetical protein [Nostoc sp. PCC 7120]
  misc_feature (1)..(145): NCBI GI NO: 23129945 NR Description: COG2214: DnaJ-class molecular chaperone
  misc_feature (1)..(145): NCBI GI NO: 23039527 NR Description: hypothetical protein
  misc_feature (1)..(145): NCBI GI NO: 16329734 NR Description: unknown protein [Synechocystis sp. PCC 6803]
MSSFVKRKKTKINLKTRLKKKVEESPPWLKALLDFVEMPPMDTVFRRLFLFAFMGGWSIMNSAEGGPAFQVAVSLAACVYFLNEKTKSLGRACLIGFGALTVGWFCGSLVIPMIPTAFINPTWTLELLTSLVAYVFLFLSCTFLK

SEQ ID NO: 11698 - DNA, 1139 bp, Triticum aestivum
  misc_feature (1)..(1139): Ceres Seq. ID no. 15224904
gctagcttcctgagtagtacatcctcttgacgttgaccattcgctttcccatcgcagaggatcatgtccatgttcacctccagcagctccggcgtgccgtccccgtctccggaggcgggcagcagcatggtcagaacggcgcggcagccccagcgccaggcgtttgactacttcgtggttctagacttcgaggcgacgtgcgagaaaggcgcgcagatctacccgcaggagatcatcgagttcccctccgtgctcgtcgacggcgccaccggcgacctcgactccgccgagttccgcacctacgtgcgcccgcagcaccaccccgcgctgaccgacttctgcagggacctcaccggcatccggcaggcggacgtcgacggcggcgtgcagctggccgaggcgctccgcctgcacgccgcgtggctgcaggactcggcgtgggccaggagcggcggctgcttcgccgtcgtcacgtggggggactgggacctccgcaccatgctggagacggagtgccgcttcaaagacctcgccaagccgccctgcttcaaccactggatcaacctcaagatccccttcgccgcggcgatgggcggaggtcggtgggctgctctgcggtcggccgtcgaagcggcggggctccagtgggagggccgcgcgcactgcggcctcgacgacgctcgtaacacggcgcggcttctcgtggagctgatgcggcgcggcgtccagctcagcatcacgacctcgaccccatcgcctcaggtaactgtaactccatacggtggcgccgccgcggcgtgctactgctactgcggggtggcgagcagaggtggcgtggtggccgtgccggggccgatgcaggggagatgcttctacggttgcggtaactggacgccgtccatgggagcagcgtgctcctacttcacgtgggcagattaattgctactcaatccatgggtttggatttggagaatacgctataaattatatgtgcgagtatcactccagctctttgatttctcttgtcaacacagtgttgacaacactcttttgagcttggttttcttaacaacttgaatcctattgcgtggtgtatttgattttgtcatgaacttcaaattctatacatgtttgagtac

SEQ ID NO: 11699 - protein, 291 aa, Triticum aestivum
  peptide (1)..(291): Ceres Seq. ID no. 15224905
  misc_feature (27)..(228): NCBI GI NO: 18087835 NR Description: hypothetical protein MGC16943 [Homo sapiens]
  misc_feature (27)..(228): NCBI GI NO: 34534279 NR Description: unnamed protein product [Homo sapiens]
  misc_feature (31)..(228): NCBI GI NO: 13386250 NR Description: RIKEN cDNA 4933424N09 [Mus musculus]
  misc_feature (31)..(228): NCBI GI NO: 26325030 NR Description: unnamed protein product [Mus musculus]
  misc_feature (19)..(230): NCBI GI NO: 2852640 NR Description: unknown [Homo sapiens]
  misc_feature (19)..(230): NCBI GI NO: 37547043 NR Description: similar to prion protein interacting 1 like (30
  misc_feature (19)..(230): NCBI GI NO: 28174986 NR Description: Prnpip1 protein [Mus musculus]
  misc_feature (19)..(230): NCBI GI NO: 33859765 NR Description: prion protein interacting protein 1 [Mus musculus]
  misc_feature (165)..(228): NCBI GI NO: 34903352 NR Description: unnamed protein product
  misc_feature (231)..(289): NCBI GI NO: 34903352 NR Description: unnamed protein product
MSMFTSSSSGVPSPSPEAGSSMVRTARQPQRQAFDYFVVLDFEATCEKGAQIYPQEIIEFPSVLVDGATGDLDSAEFRTYVRPQHHPALTDFCRDLTGIRQADVDGGVQLAEALRLHAAWLQDSAWARSGGCFAVVTWGDWDLRTMLETECRFKDLAKPPCFNHWINLKIPFAAAMGGGRWAALRSAVEAAGLQWEGRAHCGLDDARNTARLLVELMRRGVQLSITTSTPSPQVTVTPYGGAAAACYCYCGVASRGGVVAVPGPMQGRCFYGCGNWTPSMGAACSYFTWAD

SEQ ID NO: 11700 - protein, 289 aa, Triticum aestivum
  peptide (1)..(289): Ceres Seq. ID no. 15224906
  misc_feature (25)..(226): NCBI GI NO: 18087835 NR Description: hypothetical protein MGC16943 [Homo sapiens]
  misc_feature (25)..(226): NCBI GI NO: 34534279 NR Description: unnamed protein product [Homo sapiens]
  misc_feature (29)..(226): NCBI GI NO: 13386250 NR Description: RIKEN cDNA 4933424N09 [Mus musculus]
  misc_feature (29)..(226): NCBI GI NO: 26325030 NR Description: unnamed protein product [Mus musculus]
  misc_feature (17)..(228): NCBI GI NO: 2852640 NR Description: unknown [Homo sapiens]
  misc_feature (17)..(228): NCBI GI NO: 37547043 NR Description: similar to prion protein interacting 1 like (30
  misc_feature (17)..(228): NCBI GI NO: 28174986 NR Description: Prnpip1 protein [Mus musculus]
  misc_feature (17)..(228): NCBI GI NO: 33859765 NR Description: prion protein interacting protein 1 [Mus musculus]
  misc_feature (163)..(226): NCBI GI NO: 34903352 NR Description: unnamed protein product
  misc_feature (229)..(287): NCBI GI NO: 34903352 NR Description: unnamed protein product
MFTSSSSGVPSPSPEAGSSMVRTARQPQRQAFDYFVVLDFEATCEKGAQIYPQEIIEFPSVLVDGATGDLDSAEFRTYVRPQHHPALTDFCRDLTGIRQADVDGGVQLAEALRLHAAWLQDSAWARSGGCFAVVTWGDWDLRTMLETECRFKDLAKPPCFNHWINLKIPFAAAMGGGRWAALRSAVEAAGLQWEGRAHCGLDDARNTARLLVELMRRGVQLSITTSTPSPQVTVTPYGGAAAACYCYCGVASRGGVVAVPGPMQGRCFYGCGNWTPSMGAACSYFTWAD

SEQ ID NO: 11701 - protein, 270 aa, Triticum aestivum
  peptide (1)..(270): Ceres Seq. ID no. 15224907
  misc_feature (6)..(207): NCBI GI NO: 18087835 NR Description: hypothetical protein MGC16943 [Homo sapiens]
  misc_feature (6)..(207): NCBI GI NO: 34534279 NR Description: unnamed protein product [Homo sapiens]
  misc_feature (10)..(207): NCBI GI NO: 13386250 NR Description: RIKEN cDNA 4933424N09 [Mus musculus]
  misc_feature (10)..(207): NCBI GI NO: 26325030 NR Description: unnamed protein product [Mus musculus]
  misc_feature (1)..(209): NCBI GI NO: 2852640 NR Description: unknown [Homo sapiens]
  misc_feature (1)..(209): NCBI GI NO: 37547043 NR Description: similar to prion protein interacting 1 like (30
  misc_feature (1)..(209): NCBI GI NO: 28174986 NR Description: Prnpip1 protein [Mus musculus]
  misc_feature (1)..(209): NCBI GI NO: 33859765 NR Description: prion protein interacting protein 1 [Mus musculus]
  misc_feature (144)..(207): NCBI GI NO: 34903352 NR Description: unnamed protein product
  misc_feature (210)..(268): NCBI GI NO: 34903352 NR Description: unnamed protein product
MVRTARQPQRQAFDYFVVLDFEATCEKGAQIYPQEIIEFPSVLVDGATGDLDSAEFRTYVRPQHHPALTDFCRDLTGIRQADVDGGVQLAEALRLHAAWLQDSAWARSGGCFAVVTWGDWDLRTMLETECRFKDLAKPPCFNHWINLKIPFAAAMGGGRWAALRSAVEAAGLQWEGRAHCGLDDARNTARLLVELMRRGVQLSITTSTPSPQVTVTPYGGAAAACYCYCGVASRGGVVAVPGPMQGRCFYGCGNWTPSMGAACSYFTWAD

SEQ ID NO: 11702 - DNA, 648 bp, Triticum aestivum
  misc_feature (1)..(648): Ceres Seq. ID no. 12624019
acactgaccgaagacatcgatatccatggccccgaccgtcatctccccagccacgggcgccgtcgcctcgcccatcgcgagcgacctcgggaaggccgcgcgctccgtcggactcgggctccccgcgctgccgccgctgcccggcctcgcatcccacggccagccccgcgtcgcgtccttttgcaaaaggctcgcgaggaacgtggtgtcaatggccgccggtgagccggccgcgccgctggccgacaacgccgagcttaccgagttcttcaactccttgaaacaagagtgggacagggtggaggacaagtacgcggtgaccacgctcgccgtcgccgccacgctcggcatgtggagcgccggcggagtagtatcggcaatcgacaggctccccgtggttccaggtctcatggaggtcgttggcattggctacagcgggtggtttgcgtacaagaacctgctattcaagcccgacaggaaagcgttcttcgctaaggtcaggaacatttacgaggatataatcagcggctagacgatgaagcacttgaagaggcacatcccaattgagagaagcacaaagtactcaaaacggagacgtgcaattactgtatatcaatatgtactatatatttgagcatagcatctaat

SEQ ID NO: 11703 - protein, 168 aa, Triticum aestivum
  peptide (1)..(168): Ceres Seq. ID no. 12624020
  misc_feature (1)..(168): NCBI GI NO: 37536446 NR Description: hypothetical protein
  misc_feature (1)..(166): NCBI GI NO: 18407178 NR Description: expressed protein; protein id: At2g46820
  misc_feature (1)..(166): NCBI GI NO: 21555057 NR Description: unknown [Arabidopsis thaliana]
  misc_feature (55)..(165): NCBI GI NO: 34393236 NR Description: unknown protein
  misc_feature (33)..(152): NCBI GI NO: 38175474 NR Description: unknown protein
  misc_feature (1)..(165): NCBI GI NO: 687677 NR Description: unknown
  misc_feature (1)..(165): NCBI GI NO: 18411555 NR Description: expressed protein; protein id: At4g01150
  misc_feature (56)..(166): NCBI GI NO: 18403896 NR Description: expressed protein; protein id: At1g52220
  misc_feature (12)..(160): NCBI GI NO: 34909746 NR Description: contains ESTsAU066201
  misc_feature (56)..(166): NCBI GI NO: 21554231 NR Description: unknown [Arabidopsis thaliana]
MAPTVISPATGAVASPIASDLGKAARSVGLGLPALPPLPGLASHGQPRVASFCKRLARNVVSMAAGEPAAPLADNAELTEFFNSLKQEWDRVEDKYAVTTLAVAATLGMWSAGGVVSAIDRLPVVPGLMEVVGIGYSGWFAYKNLLFKPDRKAFFAKVRNIYEDIISG

SEQ ID NO: 11704 - protein, 106 aa, Triticum aestivum
  peptide (1)..(106): Ceres Seq. ID no. 12624021
  misc_feature (1)..(106): NCBI GI NO: 37536446 NR Description: hypothetical protein
  misc_feature (1)..(104): NCBI GI NO: 18407178 NR Description: expressed protein; protein id: At2g46820
  misc_feature (1)..(104): NCBI GI NO: 21555057 NR Description: unknown [Arabidopsis thaliana]
  misc_feature (1)..(103): NCBI GI NO: 34393236 NR Description: unknown protein
  misc_feature (1)..(90): NCBI GI NO: 38175474 NR Description: unknown protein
  misc_feature (1)..(103): NCBI GI NO: 687677 NR Description: unknown
  misc_feature (1)..(103): NCBI GI NO: 18411555 NR Description: expressed protein; protein id: At4g01150
  misc_feature (1)..(104): NCBI GI NO: 18403896 NR Description: expressed protein; protein id: At1g52220
  misc_feature (1)..(98): NCBI GI NO: 34909746 NR Description: contains ESTsAU066201
  misc_feature (1)..(104): NCBI GI NO: 21554231 NR Description: unknown [Arabidopsis thaliana]
MAAGEPAAPLADNAELTEFFNSLKQEWDRVEDKYAVTTLAVAATLGMWSAGGVVSAIDRLPVVPGLMEVVGIGYSGWFAYKNLLFKPDRKAFFAKVRNIYEDIISG

SEQ ID NO: 11705 - protein, 92 aa, Triticum aestivum
  peptide (1)..(92): Ceres Seq. ID no. 12624022
TDRRHRYPWPRPSSPQPRAPSPRPSRATSGRPRAPSDSGSPRCRRCPASHPTASPASRPFAKGSRGTWCQWPPVSRPRRWPTTPSLPSSSTP

SEQ ID NO: 11706 - DNA, 825 bp, Triticum aestivum
  misc_feature (1)..(825): Ceres Seq. ID no. 12784326
aatctctcggagcctcacaaccaccgtatctcgctgcttctccgccgagccgatcacgagcagcaactagttgagatcaagccgtcgccgtcgccgtattcttcttcctctccgacaggaggttaagccgccgtcgccgtcttcttcttcgtctccgacaggagtttaagccgccgtcctcgtcttgttcttcctcgtcttcatcaggaggagcggccggaaacctcgggaagagctggccaacctggatcagctggagggcggcgccgcctccctgcgcgggcacgagaccgaggagcagcgcaacaaattcctcgtgctccgcctctacgaggcgctcaacggccgcgaccacgccgccgtgcactccctcctcgcccccgacctcgagtggtggttccatggcccgcccacgcaccagcacatgatgcgcctcctcaccggctccagctccccgtcctcctcctcctccttccgcttccagccgcgctccgtcgacgccttcggctccaccgtcatcgccgagggcgtcgacgacaaggccaaggcgtactgggtgcacgcctggaccgtgggtgccgatggggtgatcacccagctgcgcgaatacttcaacaccgacctcaccgtcacgcgcctcgccgccgccgccgcgtccaagtgcgtctggcagagccgccgccccgaccgcgcccgcaactccctcccgggcctcgtcctcgccctctaactgcggaaagcaatgtactcctactgtgtaggttttttattgtgggattacttaccacatttccgcacgtctcgtggacagaatgatgaattggt

SEQ ID NO: 11707 - protein, 101 aa, Triticum aestivum
  peptide (1)..(101): Ceres Seq. ID no. 12784327
  misc_feature (1)..(101): NCBI GI NO: 34898184 NR Description: P0034A04.2
  misc_feature (1)..(101): NCBI GI NO: 15228414 NR Description: unknown protein; protein id: At3g10980.1
  misc_feature (1)..(101): NCBI GI NO: 15241041 NR Description: putative protein; protein id: At5g01740
  misc_feature (1)..(101): NCBI GI NO: 33146884 NR Description: unknown protein
  misc_feature (2)..(101): NCBI GI NO: 15028339 NR Description: unknown protein [Arabidopsis thaliana]
  misc_feature (2)..(101): NCBI GI NO: 139780 NR Description: WOUND-INDUCED PROTEIN 1
  misc_feature (2)..(101): NCBI GI NO: 10241935 NR Description: elicitor inducible protein [Nicotiana tabacum]
  misc_feature (2)..(74): NCBI GI NO: 4574320 NR Description: wound-induced protein WI12
MMRLLTGSSSPSSSSSFRFQPRSVDAFGSTVIAEGVDDKAKAYWVHAWTVGADGVITQLREYFNTDLTVTRLAAAAASKCVWQSRRPDRARNSLPGLVLAL

SEQ ID NO: 11708 - protein, 100 aa, Triticum aestivum
  peptide (1)..(100): Ceres Seq. ID no. 12784328
  misc_feature (1)..(100): NCBI GI NO: 34898184 NR Description: P0034A04.2
  misc_feature (1)..(100): NCBI GI NO: 15228414 NR Description: unknown protein; protein id: At3g10980.1
  misc_feature (1)..(100): NCBI GI NO: 15241041 NR Description: putative protein; protein id: At5g01740
  misc_feature (1)..(100): NCBI GI NO: 33146884 NR Description: unknown protein
  misc_feature (1)..(100): NCBI GI NO: 15028339 NR Description: unknown protein [Arabidopsis thaliana]
  misc_feature (1)..(100): NCBI GI NO: 139780 NR Description: WOUND-INDUCED PROTEIN 1
  misc_feature (1)..(100): NCBI GI NO: 10241935 NR Description: elicitor inducible protein [Nicotiana tabacum]
  misc_feature (1)..(73): NCBI GI NO: 4574320 NR Description: wound-induced protein WI12
MRLLTGSSSPSSSSSFRFQPRSVDAFGSTVIAEGVDDKAKAYWVHAWTVGADGVITQLREYFNTDLTVTRLAAAAASKCVWQSRRPDRARNSLPGLVLAL

SEQ ID NO: 11709 - DNA, 912 bp, Triticum aestivum
  misc_feature (1)..(912): Ceres Seq. ID no. 15226744
attcaccgacagtctctgactctcttgtcttaataacccccctgccatcctaggaagaatcgaaagagcgagaaaatgatcagaacgtttttcctcttccttgtcttcttcatcatatggacgcaagtccacgcgcagctaattccaccgtcgaagcccgatggtttcgtatacccaccgggtcgccgtgttgacccggattctatactgatcgaggcgttttatgacccggtgtgcccgtacagtagagactcttggccgccgctaaagcaagcgcttaaacactacggatctcgcgtttccttgctcctccacctacttccgttaccgtaccatgacaatgcgtatgtaacctctcgtgctttacacatagtgaatattcacaacgctaatgctaccttcagtttgctggaagggttctttaagcatcaggcaatgttctatggtgcgcaaacacaactcctgactagacctgaagttgtgggaagaattgtcaagcttggaacagccacgttgggaaactcttatcatcatgttcttaaatctggattcaacgacacaaagtcggaacgtgcaaccagagtttcattcaagtatagcgcttcaagaggtgtgtatggaacaccaaccttctccgtgaatgggttcgcattgccagatgctgatgatccctcagattttggaggatggaaaaaaattattgattctctggttcaaccacacaaagtacaaggtagctagagatgcaagatgatctcgtttcctttatttgacgatcgctagtactttaccttttttcacatctatataatgtaaaaataagagtgctattgctgtgtgatgtgacaatatgcactgtatatataatttgtcaaaacctttttatcgtacaaatgaaacatatattcattg

SEQ ID NO: 11710 - protein, 221 aa, Triticum aestivum
  peptide (1)..(221): Ceres Seq. ID no. 15226745
  misc_feature (1)..(219): NCBI GI NO: 15222928 NR Description: expressed protein [Arabidopsis thaliana]
  misc_feature (1)..(195): NCBI GI NO: 8778813 NR Description: T4O12.23 [Arabidopsis thaliana]
  misc_feature (1)..(218): NCBI GI NO: 22329686 NR Description: expressed protein [Arabidopsis thaliana]
  misc_feature (1)..(212): NCBI GI NO: 25518088 NR Description: T20H2.2 protein - Arabidopsis thaliana
  misc_feature (20)..(213): NCBI GI NO: 38346025 NR Description: OSJNBb0071D01.2
  misc_feature (18)..(173): NCBI GI NO: 32526672 NR Description: unknown protein
MIRTFFLFLVFFIIWTQVHAQLIPPSKPDGFVYPPGRRVDPDSILIEAFYDPVCPYSRDSWPPLKQALKHYGSRVSLLLHLLPLPYHDNAYVTSRALHIVNIHNANATFSLLEGFFKHQAMFYGAQTQLLTRPEVVGRIVKLGTATLGNSYHHVLKSGFNDTKSERATRVSFKYSASRGVYGTPTFSVNGFALPDADDPSDFGGWKKIIDSLVQPHKVQGS

SEQ ID NO: 11711 - DNA, 818 bp, Triticum aestivum
  misc_feature (1)..(818): Ceres Seq. ID no. 13661903
aactagaacatcctaatcgaaaatattttttcgccttacacctcgccatcgactcacatacttttgctggccggccggagccacacgaccacaaggaaggagctaagctagcaccgacaaacagcccttgctgccgtcccgatggcaagcaccaacatggcgtcggccacctccagattcatgctggcggcgggcatccccagcggcaccaacggcggcgtgagcagccgcgtcagcttcgtcccctccaaccgactgggcttgaagctcgtggcccgcgccgaggaggagcccactgccgccgcgccggcggaaccagcaccggccgcggaggagaaaccggacgccgccgtggccaccaaggagcccgccaaagccaagccgccgccgaggggacccaagaggggaaccaaggtgaagattctgaggagggagtcctactggtacaacgggaccggatccgtcgtcacggttgatcaggatcccaacacccgttacccggtggtggtgcgtttcgccaaggtgaactacgccggcgtgtcgaccaacaactacgccctggacgagatcaaggaggttgctgcttaaacgatcgaagctgccgcgtgtgctccatccaatgtttgtatcagtagctcgtcaagtgacgatgtgaatgttagcctctcacaaaccttatgtgtaatacctctgcgattatatgtatttgcctgcttcctcatggacctaataatctcctcctgttgcttaagatgattgcattcttgctcacttttgtacaaaagatcggttgttcatgttaccggaaggctacacag

SEQ ID NO: 11712 - protein, 157 aa, Triticum aestivum
  peptide (1)..(157): Ceres Seq. ID no. 13661904
LEHPNRKYFFALHLAIDSHTFAGRPEPHDHKEGAKLAPTNSPCCRPDGKHQHGVGHLQIHAGGGHPQRHQRRREQPRQLRPLQPTGLEARGPRRGGAHCRRAGGTSTGRGGETGRRRGHQGARQSQAAAEGTQEGNQGEDSEEGVLLVQRDRIRRHG

SEQ ID NO: 11713 - protein, 148 aa, Triticum aestivum
  peptide (1)..(148): Ceres Seq. ID no. 13661905
  misc_feature (86)..(147): Pfam Name: Pfam Description:  Photosystem I reaction centre subunit IV / PsaE
  misc_feature (1)..(148): NCBI GI NO: 131176 NR Description: Photosystem I reaction center subunit IV
  misc_feature (1)..(146): NCBI GI NO: 34394725 NR Description: putative Photosystem I reaction center subunit IV
  misc_feature (6)..(148): NCBI GI NO: 24030202 NR Description: putative photosystem I subunit PSI-E protein
  misc_feature (6)..(148): NCBI GI NO: 30688100 NR Description: photosystem I subunit PSI-E - like protein
  misc_feature (6)..(146): NCBI GI NO: 15225331 NR Description: photosystem I reaction center subunit IV -related
  misc_feature (6)..(146): NCBI GI NO: 21555308 NR Description: Photosystem I reaction center subunit IV B
  misc_feature (1)..(146): NCBI GI NO: 2499966 NR Description: Photosystem I reaction center subunit IV A
  misc_feature (31)..(148): NCBI GI NO: 22091414 NR Description: putative photosystem I subunit PSI-E
  misc_feature (1)..(146): NCBI GI NO: 2499967 NR Description: Photosystem I reaction center subunit IV B
  misc_feature (1)..(146): NCBI GI NO: 26986114 NR Description: putative photosystem I reaction centre subunit IV
MASTNMASATSRFMLAAGIPSGTNGGVSSRVSFVPSNRLGLKLVARAEEEPTAAAPAEPAPAAEEKPDAAVATKEPAKAKPPPRGPKRGTKVKILRRESYWYNGTGSVVTVDQDPNTRYPVVVRFAKVNYAGVSTNNYALDEIKEVAA

SEQ ID NO: 11714 - protein, 143 aa, Triticum aestivum
  peptide (1)..(143): Ceres Seq. ID no. 13661906
  misc_feature (81)..(142): Pfam Name: Pfam Description:  Photosystem I reaction centre subunit IV / PsaE
  misc_feature (1)..(143): NCBI GI NO: 131176 NR Description: Photosystem I reaction center subunit IV
  misc_feature (1)..(141): NCBI GI NO: 34394725 NR Description: putative Photosystem I reaction center subunit IV
  misc_feature (1)..(143): NCBI GI NO: 24030202 NR Description: putative photosystem I subunit PSI-E protein
  misc_feature (1)..(143): NCBI GI NO: 30688100 NR Description: photosystem I subunit PSI-E - like protein
  misc_feature (1)..(141): NCBI GI NO: 15225331 NR Description: photosystem I reaction center subunit IV -related
  misc_feature (1)..(141): NCBI GI NO: 21555308 NR Description: Photosystem I reaction center subunit IV B
  misc_feature (1)..(141): NCBI GI NO: 2499966 NR Description: Photosystem I reaction center subunit IV A
  misc_feature (26)..(143): NCBI GI NO: 22091414 NR Description: putative photosystem I subunit PSI-E
  misc_feature (1)..(141): NCBI GI NO: 2499967 NR Description: Photosystem I reaction center subunit IV B
  misc_feature (1)..(141): NCBI GI NO: 26986114 NR Description: putative photosystem I reaction centre subunit IV
MASATSRFMLAAGIPSGTNGGVSSRVSFVPSNRLGLKLVARAEEEPTAAAPAEPAPAAEEKPDAAVATKEPAKAKPPPRGPKRGTKVKILRRESYWYNGTGSVVTVDQDPNTRYPVVVRFAKVNYAGVSTNNYALDEIKEVAA

SEQ ID NO: 11715 - DNA, 839 bp, Triticum aestivum
  misc_feature (1)..(839): Ceres Seq. ID no. 12624558
aagcccatacatccacactgcttagtctatagactctataccatagtttcaccaccacctagctttaccagaaatggagggtcagagatcacagcgctggggttacttgaaagacaaggctatagccaccagccttgctgaagaagaaacggagaatagcatggatggagaggaggatgatactggagatgaagacaaaaggaagagagtgatagagagagctagaggtcctaacacagaacgtgttcccttgcggctgtgcctggtcgataggtgcactgctaacttaactgaggccaagcagtattaccgcagacacaaagtctgtgaggttcatgcaaaggcctcttctgcaactgttgctggagtcaagcaacgtttttgtcaacaatgcagcaggttccatgagctagcagagtttgatgaaactaaaagaagttgcaggaggcgcttagctggacacaatgagaggaggaggaagatatccggtgacagttacggagaagggtcaggccggagaggggttagcttgacacagactcaagaaagaaacaggatagacatgaaacttcctatgactaactcaccattcaagcgaccacagatcagataaaacaatatcaactcacccaaacgctctctctcttctgtcatctacttatgttctatgtctacgttctcttgttatccaaataatggcatctaaccatgtggtattatctcctacacctctatataattacaaaactctagtaccctttatgtaatcatgtaaaggatgcctatccacaaatgtataagaccttatcatactcttgtattgtctaattatgtttcgt

SEQ ID NO: 11716 - protein, 179 aa, Triticum aestivum
  peptide (1)..(179): Ceres Seq. ID no. 12624559
  misc_feature (62)..(140): Pfam Name: Pfam Description:  SBP domain
  misc_feature (1)..(179): NCBI GI NO: 15232541 NR Description: squamosa promoter binding protein-like 5
  misc_feature (1)..(138): NCBI GI NO: 25456671 NR Description: squamosa promoter binding protein-like 5
  misc_feature (1)..(179): NCBI GI NO: 15219210 NR Description: transcription factor, putative
  misc_feature (10)..(179): NCBI GI NO: 25456654 NR Description: squamosa promoter binding protein 4
  misc_feature (33)..(142): NCBI GI NO: 6094239 NR Description: SQUAMOSA-PROMOTER BINDING PROTEIN 1
  misc_feature (6)..(140): NCBI GI NO: 18403387 NR Description: putative squamosa-promoter binding protein
  misc_feature (6)..(140): NCBI GI NO: 21618221 NR Description: putative squamosa-promoter binding protein
  misc_feature (27)..(146): NCBI GI NO: 30577628 NR Description: squamosa promoter binding like-protein
  misc_feature (21)..(140): NCBI GI NO: 25408313 NR Description: probable squamosa-promoter binding protein
  misc_feature (13)..(149): NCBI GI NO: 6094241 NR Description: SQUAMOSA-PROMOTER BINDING PROTEIN 2
MEGQRSQRWGYLKDKAIATSLAEEETENSMDGEEDDTGDEDKRKRVIERARGPNTERVPLRLCLVDRCTANLTEAKQYYRRHKVCEVHAKASSATVAGVKQRFCQQCSRFHELAEFDETKRSCRRRLAGHNERRRKISGDSYGEGSGRRGVSLTQTQERNRIDMKLPMTNSPFKRPQIR

SEQ ID NO: 11717 - protein, 150 aa, Triticum aestivum
  peptide (1)..(150): Ceres Seq. ID no. 12624560
  misc_feature (33)..(111): Pfam Name: Pfam Description:  SBP domain
  misc_feature (1)..(150): NCBI GI NO: 15232541 NR Description: squamosa promoter binding protein-like 5
  misc_feature (1)..(109): NCBI GI NO: 25456671 NR Description: squamosa promoter binding protein-like 5
  misc_feature (1)..(150): NCBI GI NO: 15219210 NR Description: transcription factor, putative
  misc_feature (1)..(150): NCBI GI NO: 25456654 NR Description: squamosa promoter binding protein 4
  misc_feature (4)..(113): NCBI GI NO: 6094239 NR Description: SQUAMOSA-PROMOTER BINDING PROTEIN 1
  misc_feature (1)..(111): NCBI GI NO: 18403387 NR Description: putative squamosa-promoter binding protein
  misc_feature (1)..(111): NCBI GI NO: 21618221 NR Description: putative squamosa-promoter binding protein
  misc_feature (1)..(117): NCBI GI NO: 30577628 NR Description: squamosa promoter binding like-protein
  misc_feature (1)..(111): NCBI GI NO: 25408313 NR Description: probable squamosa-promoter binding protein
  misc_feature (1)..(120): NCBI GI NO: 6094241 NR Description: SQUAMOSA-PROMOTER BINDING PROTEIN 2
MDGEEDDTGDEDKRKRVIERARGPNTERVPLRLCLVDRCTANLTEAKQYYRRHKVCEVHAKASSATVAGVKQRFCQQCSRFHELAEFDETKRSCRRRLAGHNERRRKISGDSYGEGSGRRGVSLTQTQERNRIDMKLPMTNSPFKRPQIR

SEQ ID NO: 11718 - DNA, 854 bp, Triticum aestivum
  misc_feature (1)..(854): Ceres Seq. ID no. 12624081
aatcgcttcttcgaaacgccaaaagagcaacaacatccaatggcttctcacaccttcctctccttctcatcgcctccgcgcctcctcgtttcccctccgtccactctccgttcctctttcggcggcgtctctctcaacctccaccgtccccagtctgtttccttcccggcctcgaagaaatcgctgacagtcgtttccgccgcgaagaaagctgttgctgtgctcaagggtaactccgacgtcgaaggagttgttactttgacacaagaagacacaggtcctacaaaagtgagtgttcgtatcaccggtctcacaccagggcctcatggctttcacctccatgagtttggtgatacaacaaatggatgcatctcaacagggccacatttcaaccctaacaacatgacacacggagctcctgaagacgagatccgtcatgcgggtgacctgggaaacattactgccaaggccgatggcgtggcagaaacaacacttgtggacaatcagattcctctgactggtcctaactctgttgttggaagagcctttgtggttcacgagcttaaggatgacctcggaaagggtgggcatgagcttagcctgaccactggaaacgcaggcgggagattggcatgcggtgtggttggtttgacgccgctctaagtctgggctaagtaagtactttggtgtctactgtgttggtcgtcttgtctgttgaatcagatgtcaaataaaagttggctgaataagcttttgatgtttatgttcctagcatcaaagtctctttctggagttgtgcctttgtaaacgtgtttgttacttttggtttaaatctgcatttgatcgtttgtttt

SEQ ID NO: 11719 - protein, 220 aa, Triticum aestivum
  peptide (1)..(220): Ceres Seq. ID no. 12624082
  misc_feature (68)..(219): Pfam Name: SODC Pfam Description: Copper/zinc superoxide dismutase
  misc_feature (15)..(220): NCBI GI NO: 11358868 NR Description: superoxide dismutase (EC 1
  misc_feature (15)..(220): NCBI GI NO: 18401659 NR Description: copper/zinc superoxide dismutase
  misc_feature (15)..(220): NCBI GI NO: 5689611 NR Description: copper/zinc superoxide dismutase
  misc_feature (15)..(218): NCBI GI NO: 25285791 NR Description: probable copper/zinc superoxide dismutase
  misc_feature (14)..(220): NCBI GI NO: 20900 NR Description: Cu/Zn superoxide dismutase II [Pisum sativum]
  misc_feature (14)..(220): NCBI GI NO: 134683 NR Description: Superoxide dismutase
  misc_feature (14)..(220): NCBI GI NO: 12230569 NR Description: Superoxide dismutase
  misc_feature (14)..(220): NCBI GI NO: 38073257 NR Description: superoxide dismutase [Trifolium pratense]
  misc_feature (16)..(220): NCBI GI NO: 12230570 NR Description: Superoxide dismutase
  misc_feature (15)..(220): NCBI GI NO: 3914999 NR Description: Superoxide dismutase
NRFFETPKEQQHPMASHTFLSFSSPPRLLVSPPSTLRSSFGGVSLNLHRPQSVSFPASKKSLTVVSAAKKAVAVLKGNSDVEGVVTLTQEDTGPTKVSVRITGLTPGPHGFHLHEFGDTTNGCISTGPHFNPNNMTHGAPEDEIRHAGDLGNITAKADGVAETTLVDNQIPLTGPNSVVGRAFVVHELKDDLGKGGHELSLTTGNAGGRLACGVVGLTPL

SEQ ID NO: 11720 - protein, 207 aa, Triticum aestivum
  peptide (1)..(207): Ceres Seq. ID no. 12624083
  misc_feature (55)..(206): Pfam Name: SODC Pfam Description: Copper/zinc superoxide dismutase
  misc_feature (2)..(207): NCBI GI NO: 11358868 NR Description: superoxide dismutase (EC 1
  misc_feature (2)..(207): NCBI GI NO: 18401659 NR Description: copper/zinc superoxide dismutase
  misc_feature (2)..(207): NCBI GI NO: 5689611 NR Description: copper/zinc superoxide dismutase
  misc_feature (2)..(205): NCBI GI NO: 25285791 NR Description: probable copper/zinc superoxide dismutase
  misc_feature (1)..(207): NCBI GI NO: 20900 NR Description: Cu/Zn superoxide dismutase II [Pisum sativum]
  misc_feature (1)..(207): NCBI GI NO: 134683 NR Description: Superoxide dismutase
  misc_feature (1)..(207): NCBI GI NO: 12230569 NR Description: Superoxide dismutase
  misc_feature (1)..(207): NCBI GI NO: 38073257 NR Description: superoxide dismutase [Trifolium pratense]
  misc_feature (3)..(207): NCBI GI NO: 12230570 NR Description: Superoxide dismutase
  misc_feature (2)..(207): NCBI GI NO: 3914999 NR Description: Superoxide dismutase
MASHTFLSFSSPPRLLVSPPSTLRSSFGGVSLNLHRPQSVSFPASKKSLTVVSAAKKAVAVLKGNSDVEGVVTLTQEDTGPTKVSVRITGLTPGPHGFHLHEFGDTTNGCISTGPHFNPNNMTHGAPEDEIRHAGDLGNITAKADGVAETTLVDNQIPLTGPNSVVGRAFVVHELKDDLGKGGHELSLTTGNAGGRLACGVVGLTPL

SEQ ID NO: 11721 - DNA, 780 bp, Triticum aestivum
  misc_feature (1)..(780): Ceres Seq. ID no. 15172618
aaatcacccacagctaagcttccgccacccaactcttccgtccatccaaaagacgtacggcacgtgcaagttcgaagaaggaaagcatcgaatcaatggcgggcgtgagccggagcatggtggcgccgctgctggtgctgaacctggtgatgtacatcgtcgtcatcggcctcgccagctggaacctcaaccacttcatcaacggcaccaccaactacgccggcgtggccggcaacggcgccaccttctacttcctcctcttcgccatcctcgccggcgtggtgggcgccgcctccaagctcgccggcgtgcaccacgtcaggacctggcgcggggacagcctcgccaccagcgcctcctccgcgctcgtcgcctgggccatcacggcgctcgccttcgggctcgcgtgcaaggagatccacgtcggcggtcaccgcggctggcggctccgggttctcgaggcgttcatcatcatactcgccttcacccagctgctctacgtgatggcgctccacgccggtctcttcggcaaccagttcggcgacgggtacggcgcggagcaccagtacggcgaccaccatcacaagggcatgggcaccggcgcccccgccgccagggtctgaccgtctttgagcttttactttgcttaatttcttgatgggccaatgaacaagatgtatgtatgtatcaatgtatgtgtgcgtgtgtttgtgttgggcgagtgtgatgtaacatgtatgcatacatagtgtcggtgcatgtgctgccgttgttttttac

SEQ ID NO: 11722 - protein, 218 aa, Triticum aestivum
  peptide (1)..(218): Ceres Seq. ID no. 15172619
NHPQLSFRHPTLPSIQKTYGTCKFEEGKHRINGGREPEHGGAAAGAEPGDVHRRHRPRQLEPQPLHQRHHQLRRRGRQRRHLLLPPLRHPRRRGGRRLQARRRAPRQDLARGQPRHQRLLRARRLGHHGARLRARVQGDPRRRSPRLAAPGSRGVHHHTRLHPAALRDGAPRRSLRQPVRRRVRRGAPVRRPPSQGHGHRRPRRQGLTVFELLLCLIS

SEQ ID NO: 11723 - protein, 175 aa, Triticum aestivum
  peptide (1)..(175): Ceres Seq. ID no. 15172620
  misc_feature (14)..(143): Pfam Name: Pfam Description:  AWPM-19-like family
  misc_feature (1)..(175): NCBI GI NO: 6851373 NR Description: plasma membrane associated protein
  misc_feature (1)..(175): NCBI GI NO: 7489659 NR Description: ABA-induced plasma membrane protein PM 19 - wheat
  misc_feature (1)..(172): NCBI GI NO: 4097340 NR Description: hydrophobic LEA-like protein [Oryza sativa]
  misc_feature (1)..(171): NCBI GI NO: 7488688 NR Description: maturation protein PM3 - soybean
  misc_feature (4)..(165): NCBI GI NO: 18390408 NR Description: expressed protein [Arabidopsis thaliana]
  misc_feature (1)..(142): NCBI GI NO: 34911480 NR Description: putative plasma membrane associated protein
  misc_feature (1)..(140): NCBI GI NO: 15218953 NR Description: plasma membrane associated protein -related
  misc_feature (2)..(151): NCBI GI NO: 15239619 NR Description: plasma membrane associated protein -related
MAGVSRSMVAPLLVLNLVMYIVVIGLASWNLNHFINGTTNYAGVAGNGATFYFLLFAILAGVVGAASKLAGVHHVRTWRGDSLATSASSALVAWAITALAFGLACKEIHVGGHRGWRLRVLEAFIIILAFTQLLYVMALHAGLFGNQFGDGYGAEHQYGDHHHKGMGTGAPAARV

SEQ ID NO: 11724 - protein, 168 aa, Triticum aestivum
  peptide (1)..(168): Ceres Seq. ID no. 15172621
  misc_feature (7)..(136): Pfam Name: Pfam Description:  AWPM-19-like family
  misc_feature (1)..(168): NCBI GI NO: 6851373 NR Description: plasma membrane associated protein
  misc_feature (1)..(168): NCBI GI NO: 7489659 NR Description: ABA-induced plasma membrane protein PM 19 - wheat
  misc_feature (1)..(165): NCBI GI NO: 4097340 NR Description: hydrophobic LEA-like protein [Oryza sativa]
  misc_feature (1)..(164): NCBI GI NO: 7488688 NR Description: maturation protein PM3 - soybean
  misc_feature (1)..(158): NCBI GI NO: 18390408 NR Description: expressed protein [Arabidopsis thaliana]
  misc_feature (1)..(135): NCBI GI NO: 34911480 NR Description: putative plasma membrane associated protein
  misc_feature (1)..(133): NCBI GI NO: 15218953 NR Description: plasma membrane associated protein -related
  misc_feature (1)..(144): NCBI GI NO: 15239619 NR Description: plasma membrane associated protein -related
MVAPLLVLNLVMYIVVIGLASWNLNHFINGTTNYAGVAGNGATFYFLLFAILAGVVGAASKLAGVHHVRTWRGDSLATSASSALVAWAITALAFGLACKEIHVGGHRGWRLRVLEAFIIILAFTQLLYVMALHAGLFGNQFGDGYGAEHQYGDHHHKGMGTGAPAARV

SEQ ID NO: 11725 - DNA, 940 bp, Triticum aestivum
  misc_feature (1)..(940): Ceres Seq. ID no. 15173936
aagaacgcaatgtctggtgccgctgacacagctgcggccgccgccgtcgccgccgtcgccggctcatcgggtcccgcggcgttgccgctcagcggacgcgtggccatcgtgaccggcgcgtcgcgcggcatcgggcgagccatcgcggcccacctctcctccctcggcgcaagcgtcgtcctgggctacgcggccagcgcggccgaggccgacgcgctcgccgcagagctcccacgagccgtcgccgtgaaggccaacgtgtccgaagaggccggcgtgcgctccctcttcgacgccgccgagtcggccttcggctgcgcggcgccgcacatcatagtcgccaacgccggcgtgctcggcgacaagtacccgcccctcgccgacaccgccacggcggacttcgaccgcgtgttcgccgtcaacacgcgcggcgccttcctctgcctccgcgaggccgccaaccggctgccccgtggcggcggcggccggatcgtggccgtgacgtcgtccgtggtcgggtcgaacccgacggggtactccgcctacaccgcgtccaaggcggccgtggaggcgatggtgcgtaccatggccaaggagctcaagggcacgcgcgtgacggccaactgcgtggctccgggggccacggccacggacatgttcttcgccgggaagagcaacgagacggtgaggcggaccgcggagatgaacccgatggagcggctcggggaggccggcgacatcgcaccagtggtcggcttcctctgcactgacgccgccgagtgggtcaacgggcaggtcatcagggtcaacggcgggtacgtctgataatctgctggctggcctgtcatgccattagacattacggtgggagcgaaataatgcctctgggtgttgcagaaaactaaaaaaatatatctgccggaaatttatagcacaattt

SEQ ID NO: 11726 - protein, 274 aa, Triticum aestivum
  peptide (1)..(274): Ceres Seq. ID no. 15173937
  misc_feature (13)..(274): NCBI GI NO: 34393370 NR Description: putative short-chain dehydrogenase/reductase
  misc_feature (8)..(274): NCBI GI NO: 34395019 NR Description: putative short-chain dehydrogenase/reductase
  misc_feature (26)..(272): NCBI GI NO: 34395018 NR Description: putative short-chain dehydrogenase/reductase
  misc_feature (28)..(274): NCBI GI NO: 15229203 NR Description: short-chain dehydrogenase/reductase family protein
  misc_feature (26)..(274): NCBI GI NO: 15235621 NR Description: short-chain dehydrogenase/reductase family protein
  misc_feature (127)..(274): NCBI GI NO: 14326547 NR Description: AT3g03980/T11I18_9 [Arabidopsis thaliana]
  misc_feature (1)..(272): NCBI GI NO: 16264709 NR Description: putative SDR family dehydrogenase protein
  misc_feature (30)..(272): NCBI GI NO: 14346023 NR Description: oxygenase-like protein [Streptomyces aureofaciens]
  misc_feature (30)..(272): NCBI GI NO: 29469257 NR Description: oxygenase reductase-like protein
  misc_feature (30)..(272): NCBI GI NO: 14280348 NR Description: oxygenase-reductase PgaM [Streptomyces sp. PGA64]
KNAMSGAADTAAAAAVAAVAGSSGPAALPLSGRVAIVTGASRGIGRAIAAHLSSLGASVVLGYAASAAEADALAAELPRAVAVKANVSEEAGVRSLFDAAESAFGCAAPHIIVANAGVLGDKYPPLADTATADFDRVFAVNTRGAFLCLREAANRLPRGGGGRIVAVTSSVVGSNPTGYSAYTASKAAVEAMVRTMAKELKGTRVTANCVAPGATATDMFFAGKSNETVRRTAEMNPMERLGEAGDIAPVVGFLCTDAAEWVNGQVIRVNGGYV

SEQ ID NO: 11727 - protein, 271 aa, Triticum aestivum
  peptide (1)..(271): Ceres Seq. ID no. 15173938
  misc_feature (10)..(271): NCBI GI NO: 34393370 NR Description: putative short-chain dehydrogenase/reductase
  misc_feature (5)..(271): NCBI GI NO: 34395019 NR Description: putative short-chain dehydrogenase/reductase
  misc_feature (23)..(269): NCBI GI NO: 34395018 NR Description: putative short-chain dehydrogenase/reductase
  misc_feature (25)..(271): NCBI GI NO: 15229203 NR Description: short-chain dehydrogenase/reductase family protein
  misc_feature (23)..(271): NCBI GI NO: 15235621 NR Description: short-chain dehydrogenase/reductase family protein
  misc_feature (124)..(271): NCBI GI NO: 14326547 NR Description: AT3g03980/T11I18_9 [Arabidopsis thaliana]
  misc_feature (1)..(269): NCBI GI NO: 16264709 NR Description: putative SDR family dehydrogenase protein
  misc_feature (27)..(269): NCBI GI NO: 14346023 NR Description: oxygenase-like protein [Streptomyces aureofaciens]
  misc_feature (27)..(269): NCBI GI NO: 29469257 NR Description: oxygenase reductase-like protein
  misc_feature (27)..(269): NCBI GI NO: 14280348 NR Description: oxygenase-reductase PgaM [Streptomyces sp. PGA64]
MSGAADTAAAAAVAAVAGSSGPAALPLSGRVAIVTGASRGIGRAIAAHLSSLGASVVLGYAASAAEADALAAELPRAVAVKANVSEEAGVRSLFDAAESAFGCAAPHIIVANAGVLGDKYPPLADTATADFDRVFAVNTRGAFLCLREAANRLPRGGGGRIVAVTSSVVGSNPTGYSAYTASKAAVEAMVRTMAKELKGTRVTANCVAPGATATDMFFAGKSNETVRRTAEMNPMERLGEAGDIAPVVGFLCTDAAEWVNGQVIRVNGGYV

SEQ ID NO: 11728 - DNA, 634 bp, Triticum aestivum
  misc_feature (1)..(634): Ceres Seq. ID no. 15173929
aaatacacacaagaaatgcaaatgattgatgagcttcttaatgaaaggaatgtaatccatgcatcctataccaacaatccacctctaaaacggacttcgagcaggaataaatctaaatcatcaccttctttcaaatatgatgaagaaaaaaaccagaggaaagaaaagaaagtgaaggatcagcacatggaagcctgcggaagcgaagatgacgactcgagtgataagaaaaccaaagagcggttcccaaggaagagatggctaaacattcctttcaaagttgacaggagaaagccatgctgaccataatggtaagcttacaagtgaaatacaaactattttcattttgactgccccagaagaactcattcgccattacctttttccttagtgttgtctattatatttcctgcaaagattgggtgcaaccctgagttcatatgatgtatggctacgaggcacgagcactcgtagcttctaagggtgctgccaccgtagtccagttccatattcttgagtgtgataatgtcaattttgatttcattggctgtgtaatcagttgtaaatattagttatctcgtctctgttgcacattatctctttccccgctttcgaatcctgatgtgtaattaac

SEQ ID NO: 11729 - protein, 100 aa, Triticum aestivum
  peptide (1)..(100): Ceres Seq. ID no. 15173930
  misc_feature (1)..(100): NCBI GI NO: 7433053 NR Description: hypothetical protein F3I6.4 - Arabidopsis thaliana
  misc_feature (1)..(100): NCBI GI NO: 22329767 NR Description: Altered Response to Gravity
KYTQEMQMIDELLNERNVIHASYTNNPPLKRTSSRNKSKSSPSFKYDEEKNQRKEKKVKDQHMEACGSEDDDSSDKKTKERFPRKRWLNIPFKVDRRKPC

SEQ ID NO: 11730 - protein, 95 aa, Triticum aestivum
  peptide (1)..(95): Ceres Seq. ID no. 15173931
  misc_feature (1)..(95): NCBI GI NO: 7433053 NR Description: hypothetical protein F3I6.4 - Arabidopsis thaliana
  misc_feature (1)..(95): NCBI GI NO: 22329767 NR Description: Altered Response to Gravity
MQMIDELLNERNVIHASYTNNPPLKRTSSRNKSKSSPSFKYDEEKNQRKEKKVKDQHMEACGSEDDDSSDKKTKERFPRKRWLNIPFKVDRRKPC

SEQ ID NO: 11731 - protein, 93 aa, Triticum aestivum
  peptide (1)..(93): Ceres Seq. ID no. 15173932
  misc_feature (1)..(93): NCBI GI NO: 7433053 NR Description: hypothetical protein F3I6.4 - Arabidopsis thaliana
  misc_feature (1)..(93): NCBI GI NO: 22329767 NR Description: Altered Response to Gravity
MIDELLNERNVIHASYTNNPPLKRTSSRNKSKSSPSFKYDEEKNQRKEKKVKDQHMEACGSEDDDSSDKKTKERFPRKRWLNIPFKVDRRKPC

SEQ ID NO: 11732 - DNA, 797 bp, Triticum aestivum
  misc_feature (1)..(797): Ceres Seq. ID no. 15173925
tagacaaggaaggaatgtggtagaaaatccaaaaatggaagctgaacttcgatacaaggatttgtctcataaatttcacaaaatggcacaaaaagcagccaactctccacaatgttgtattctattggataatgcacttgattccgtcgctccgcatatacatgatttactcaatgcatccactagtgccatgaatgaactatgtaaagacaaagagaatgttgacccaaatgtgcagcaagtagatgagttgcttagatctgcacggctgaagaaaaaagaggttcagtcaaagaacttaaggagatagaaaatttggcttgataagttactcaaggggaagcacagagtaactaaaggaccaacaaaacagggagaaaagccacaaaggaagaaggatggtgtgcaacaaaagaaaaaagatggtgtgcagcctcaagtagaagtcgagaagtatgacaacaacaaagaagtaaatttggtgcttcaagagtgcaataatattatgagtttcacccagctcttgacggctgaccatgataatctgttctagcatggaagctccttagataatattttgtacatggtggtgatcatgatgattatctgttctagcatggaactcgtgagatagtatttaatactgaatttcaatcaagtggtactgaatttgtattgttaaattactgctgttttttgttgctatatgactgctgtttgcatacagttttttttgtatagctaagtttgaaatttaatactgaatttcaatcaagtggtattgaatttgtattgtt

SEQ ID NO: 11733 - protein, 102 aa, Triticum aestivum
  peptide (1)..(102): Ceres Seq. ID no. 15173926
  misc_feature (2)..(102): NCBI GI NO: 38346897 NR Description: OSJNBb0006L01.4
  misc_feature (8)..(102): NCBI GI NO: 22758363 NR Description: putative far-red impaired response protein
  misc_feature (77)..(102): NCBI GI NO: 34912682 NR Description: P0686E09.10
  misc_feature (3)..(58): NCBI GI NO: 34912682 NR Description: P0686E09.10
  misc_feature (21)..(102): NCBI GI NO: 37535818 NR Description: putative DNA excision repair cross-complementingprotein
RQGRNVVENPKMEAELRYKDLSHKFHKMAQKAANSPQCCILLDNALDSVAPHIHDLLNASTSAMNELCKDKENVDPNVQQVDELLRSARLKKKEVQSKNLRR

SEQ ID NO: 11734 - protein, 91 aa, Triticum aestivum
  peptide (1)..(91): Ceres Seq. ID no. 15173927
  misc_feature (1)..(91): NCBI GI NO: 38346897 NR Description: OSJNBb0006L01.4
  misc_feature (1)..(91): NCBI GI NO: 22758363 NR Description: putative far-red impaired response protein
  misc_feature (66)..(91): NCBI GI NO: 34912682 NR Description: P0686E09.10
  misc_feature (1)..(47): NCBI GI NO: 34912682 NR Description: P0686E09.10
  misc_feature (10)..(91): NCBI GI NO: 37535818 NR Description: putative DNA excision repair cross-complementingprotein
MEAELRYKDLSHKFHKMAQKAANSPQCCILLDNALDSVAPHIHDLLNASTSAMNELCKDKENVDPNVQQVDELLRSARLKKKEVQSKNLRR

SEQ ID NO: 11735 - protein, 75 aa, Triticum aestivum
  peptide (1)..(75): Ceres Seq. ID no. 15173928
  misc_feature (1)..(75): NCBI GI NO: 38346897 NR Description: OSJNBb0006L01.4
  misc_feature (1)..(75): NCBI GI NO: 22758363 NR Description: putative far-red impaired response protein
  misc_feature (50)..(75): NCBI GI NO: 34912682 NR Description: P0686E09.10
  misc_feature (1)..(31): NCBI GI NO: 34912682 NR Description: P0686E09.10
  misc_feature (1)..(75): NCBI GI NO: 37535818 NR Description: putative DNA excision repair cross-complementingprotein
MAQKAANSPQCCILLDNALDSVAPHIHDLLNASTSAMNELCKDKENVDPNVQQVDELLRSARLKKKEVQSKNLRR

SEQ ID NO: 11736 - DNA, 889 bp, Triticum aestivum
  misc_feature (1)..(889): Ceres Seq. ID no. 15173862
tccgttctcccttctcccatcccatgtaacaaaatcagctcagctcagcgacaacagcggcggatgatgagagctcctcctcggctactgtcgcctccttcctccgccacggctcctcacctcctcctctacgcttcctccgcggcctgccgcctccctccctccgcggccgccgtcgcccgctccgtctccgtctccaccaccgtcgtcgacgccccggccgccgccgccgagccgggctcctccgactcggcctccgccacgccgcgacgccgcctcatcctcctccgccacggggacagcgcggttggggaacgcttcaccagagatcatgacaaaccactgagcaaagctggaagagctgatgcaataagcgtttctgataaattccatcaaatgggatggatacctgagcttatcctatgcagtgatgcaactcgtacaaaggaaactcttcagatcatgcaagagcatgttcaaggattgtctcaagcacttgtgcatttcatcccaagtttctactcgattgctgcaatggatggtcaaactgccgagcacttgcaaaaggcaatttgtgaatattcaactgatgagatactaacggtgatgtgcatgggacataataaaggatgggaagaagcagcctctatgttttctggtgattcagtggtgctcaagacgtgtaatgctgcattgctagaagctgctgggaaatcatggattgaggctttttcgcaggctggccttgggggatggaagcttcacggcattgtaaagccataaagtgaaaacattgtagctaaagctagatacagtttttttgtagcatttttgttctcattttgcctggtgtagctatgattgaatgttaatgaagttattgatgtgg

SEQ ID NO: 11737 - protein, 260 aa, Triticum aestivum
  peptide (1)..(260): Ceres Seq. ID no. 15173863
  misc_feature (92)..(215): Pfam Name: Pfam Description:  Phosphoglycerate mutase family
  misc_feature (47)..(260): NCBI GI NO: 18409499 NR Description: expressed protein [Arabidopsis thaliana]
  misc_feature (108)..(260): NCBI GI NO: 11357772 NR Description: hypothetical protein F4F15
  misc_feature (86)..(253): NCBI GI NO: 32475477 NR Description: conserved hypothetical protein-putativephosphohistidine phosphatase
  misc_feature (91)..(215): NCBI GI NO: 22961147 NR Description: hypothetical protein [Rhodopseudomonas palustris]
  misc_feature (91)..(240): NCBI GI NO: 23136095 NR Description: hypothetical protein [Cytophaga hutchinsonii]
SVLPSPIPCNKISSAQRQQRRMMRAPPRLLSPPSSATAPHLLLYASSAACRLPPSAAAVARSVSVSTTVVDAPAAAAEPGSSDSASATPRRRLILLRHGDSAVGERFTRDHDKPLSKAGRADAISVSDKFHQMGWIPELILCSDATRTKETLQIMQEHVQGLSQALVHFIPSFYSIAAMDGQTAEHLQKAICEYSTDEILTVMCMGHNKGWEEAASMFSGDSVVLKTCNAALLEAAGKSWIEAFSQAGLGGWKLHGIVKP

SEQ ID NO: 11738 - protein, 239 aa, Triticum aestivum
  peptide (1)..(239): Ceres Seq. ID no. 15173864
  misc_feature (71)..(194): Pfam Name: Pfam Description:  Phosphoglycerate mutase family
  misc_feature (26)..(239): NCBI GI NO: 18409499 NR Description: expressed protein [Arabidopsis thaliana]
  misc_feature (87)..(239): NCBI GI NO: 11357772 NR Description: hypothetical protein F4F15
  misc_feature (65)..(232): NCBI GI NO: 32475477 NR Description: conserved hypothetical protein-putativephosphohistidine phosphatase
  misc_feature (70)..(194): NCBI GI NO: 22961147 NR Description: hypothetical protein [Rhodopseudomonas palustris]
  misc_feature (70)..(219): NCBI GI NO: 23136095 NR Description: hypothetical protein [Cytophaga hutchinsonii]
MMRAPPRLLSPPSSATAPHLLLYASSAACRLPPSAAAVARSVSVSTTVVDAPAAAAEPGSSDSASATPRRRLILLRHGDSAVGERFTRDHDKPLSKAGRADAISVSDKFHQMGWIPELILCSDATRTKETLQIMQEHVQGLSQALVHFIPSFYSIAAMDGQTAEHLQKAICEYSTDEILTVMCMGHNKGWEEAASMFSGDSVVLKTCNAALLEAAGKSWIEAFSQAGLGGWKLHGIVKP

SEQ ID NO: 11739 - protein, 238 aa, Triticum aestivum
  peptide (1)..(238): Ceres Seq. ID no. 15173865
  misc_feature (70)..(193): Pfam Name: Pfam Description:  Phosphoglycerate mutase family
  misc_feature (25)..(238): NCBI GI NO: 18409499 NR Description: expressed protein [Arabidopsis thaliana]
  misc_feature (86)..(238): NCBI GI NO: 11357772 NR Description: hypothetical protein F4F15
  misc_feature (64)..(231): NCBI GI NO: 32475477 NR Description: conserved hypothetical protein-putativephosphohistidine phosphatase
  misc_feature (69)..(193): NCBI GI NO: 22961147 NR Description: hypothetical protein [Rhodopseudomonas palustris]
  misc_feature (69)..(218): NCBI GI NO: 23136095 NR Description: hypothetical protein [Cytophaga hutchinsonii]
MRAPPRLLSPPSSATAPHLLLYASSAACRLPPSAAAVARSVSVSTTVVDAPAAAAEPGSSDSASATPRRRLILLRHGDSAVGERFTRDHDKPLSKAGRADAISVSDKFHQMGWIPELILCSDATRTKETLQIMQEHVQGLSQALVHFIPSFYSIAAMDGQTAEHLQKAICEYSTDEILTVMCMGHNKGWEEAASMFSGDSVVLKTCNAALLEAAGKSWIEAFSQAGLGGWKLHGIVKP

SEQ ID NO: 11740 - DNA, 870 bp, Triticum aestivum
  misc_feature (1)..(870): Ceres Seq. ID no. 15173847
caattcagattccccaagatcgtctcgtctcgtctcgaatcgcatccatgggttggcgttggcacgacgacggcgagggcgacggtggccgcggcgggctcggcgacatccccgacctcgccggccgaggcggcggcgaggcggcgcacgtcggcacgcgccgggtggtgcagtcccgctgccacacggaggaggtggagcccggccgcttcgtccgcaagtgcgagaagaccgagcagctcctccgcaactgcgtcggcaggccttctgaactggtggagtcgaaaactgagaacaccgaagaagatgtcacagatgaaatgaccggtggtgcctcgcattctcttggcttcccaacaaaagagccctttgcatttccaggacttcgcagtgacattgaagctattgagaaaggcttcggtagctttctggatgaagctgagcggatgaccaacgaattcttcaaatcttttggatttccaaccattcacgacggggactcgagaccgtttcctaggcaacctgcagagaggcatgttggagaaggtaccgtgaagaagcccaatgagaatgagtactcagaattcggtagccagataactgatgtgtaacaagctacagtcgtataacatgccttgttggagctgaagcctgagaagtgtgtttcgctgggtatctagggtactaaagtggtttctcttttggactcttcattatggttgtaatagtcgatgaagaatcatattttactaattttatctgcaactatcataagtgtatgacttttggttgtatgggcattatgtatagtactgttttcagacgcttcagctgtaacatggataaatctgaagatctcagggctgcaag

SEQ ID NO: 11741 - protein, 202 aa, Triticum aestivum
  peptide (1)..(202): Ceres Seq. ID no. 15173848
  misc_feature (16)..(202): NCBI GI NO: 15227527 NR Description: expressed protein [Arabidopsis thaliana]
  misc_feature (16)..(179): NCBI GI NO: 32709122 NR Description: Mal d 1-associated protein [Malus x domestica]
  misc_feature (16)..(127): NCBI GI NO: 34909928 NR Description: P0665A11.24
  misc_feature (130)..(202): NCBI GI NO: 34909928 NR Description: P0665A11.24
IQIPQDRLVSSRIASMGWRWHDDGEGDGGRGGLGDIPDLAGRGGGEAAHVGTRRVVQSRCHTEEVEPGRFVRKCEKTEQLLRNCVGRPSELVESKTENTEEDVTDEMTGGASHSLGFPTKEPFAFPGLRSDIEAIEKGFGSFLDEAERMTNEFFKSFGFPTIHDGDSRPFPRQPAERHVGEGTVKKPNENEYSEFGSQITDV

SEQ ID NO: 11742 - protein, 187 aa, Triticum aestivum
  peptide (1)..(187): Ceres Seq. ID no. 15173849
  misc_feature (1)..(187): NCBI GI NO: 15227527 NR Description: expressed protein [Arabidopsis thaliana]
  misc_feature (1)..(164): NCBI GI NO: 32709122 NR Description: Mal d 1-associated protein [Malus x domestica]
  misc_feature (1)..(112): NCBI GI NO: 34909928 NR Description: P0665A11.24
  misc_feature (115)..(187): NCBI GI NO: 34909928 NR Description: P0665A11.24
MGWRWHDDGEGDGGRGGLGDIPDLAGRGGGEAAHVGTRRVVQSRCHTEEVEPGRFVRKCEKTEQLLRNCVGRPSELVESKTENTEEDVTDEMTGGASHSLGFPTKEPFAFPGLRSDIEAIEKGFGSFLDEAERMTNEFFKSFGFPTIHDGDSRPFPRQPAERHVGEGTVKKPNENEYSEFGSQITDV

SEQ ID NO: 11743 - protein, 107 aa, Triticum aestivum
  peptide (1)..(107): Ceres Seq. ID no. 15173850
QFRFPKIVSSRLESHPWVGVGTTTARATVAAAGSATSPTSPAEAAARRRTSARAGWCSPAATRRRWSPAASSASARRPSSSSATASAGLLNWWSRKLRTPKKMSQMK

SEQ ID NO: 11744 - DNA, 783 bp, Triticum aestivum
  misc_feature (1)..(783): Ceres Seq. ID no. 15173814
attcaacaacccaaatcctttcaatgctgggtcatccactagtaatagcactcaatcatctgggctgtttacgtcttcccctacaatggggcagcagccatttggccactcatttaaccagcaatcaagcactccagctttctccaccagtatgttcaatacatctaacatcggaatcactggaggtggagggatatttggcaacacttcttcaccttttcaaacatcaccatttcaacaatctgctttggtgaccctcctgaacatcaagtgcatgaataagaagacgggtgagcagtacacgcaagggccgaggttggacaagttcaaggagatgttggtgaagaaggctgaggagcagggagtggagtttatctcgtttgacggtgccaagggcgagtggaagttcagggtgaagcacttcagctcctacgggtttggtgaagccgaagccgacgacctggccgattccttgtagctttgttgataggtgcttgttttcttttggatgaacggtggacactcgattccatgtagcgttggtcggtagctggtctgggagaatattggttgtgatgcttttcttctctgaatgctgctatgagttccttcccatgttcttctgtacatattcttttttcttgcagaatgcacaaaaattacattctggcaccaatctagcacgtgcgtggattggataatgaactgacatctgtacaaatctggtcgatgaataatcttgttactgtcctggatggaatgcatccttttggcagtttatct

SEQ ID NO: 11745 - protein, 158 aa, Triticum aestivum
  peptide (1)..(158): Ceres Seq. ID no. 15173815
  misc_feature (82)..(153): Pfam Name: Pfam Description:  Nucleoporin autopeptidase
  misc_feature (82)..(153): NCBI GI NO: 22329468 NR Description: expressed protein [Arabidopsis thaliana]
  misc_feature (82)..(153): NCBI GI NO: 25402598 NR Description: protein F14N23.29
  misc_feature (82)..(148): NCBI GI NO: 15218866 NR Description: nucleoporin 98-related protein
  misc_feature (82)..(148): NCBI GI NO: 25404873 NR Description: protein T30E16.23
  misc_feature (69)..(142): NCBI GI NO: 34914964 NR Description: similar to Arabidopsis thaliana chromosome 1
FNNPNPFNAGSSTSNSTQSSGLFTSSPTMGQQPFGHSFNQQSSTPAFSTSMFNTSNIGITGGGGIFGNTSSPFQTSPFQQSALVTLLNIKCMNKKTGEQYTQGPRLDKFKEMLVKKAEEQGVEFISFDGAKGEWKFRVKHFSSYGFGEAEADDLADSL

SEQ ID NO: 11746 - protein, 130 aa, Triticum aestivum
  peptide (1)..(130): Ceres Seq. ID no. 15173816
  misc_feature (54)..(125): Pfam Name: Pfam Description:  Nucleoporin autopeptidase
  misc_feature (54)..(125): NCBI GI NO: 22329468 NR Description: expressed protein [Arabidopsis thaliana]
  misc_feature (54)..(125): NCBI GI NO: 25402598 NR Description: protein F14N23.29
  misc_feature (54)..(120): NCBI GI NO: 15218866 NR Description: nucleoporin 98-related protein
  misc_feature (54)..(120): NCBI GI NO: 25404873 NR Description: protein T30E16.23
  misc_feature (41)..(114): NCBI GI NO: 34914964 NR Description: similar to Arabidopsis thaliana chromosome 1
MGQQPFGHSFNQQSSTPAFSTSMFNTSNIGITGGGGIFGNTSSPFQTSPFQQSALVTLLNIKCMNKKTGEQYTQGPRLDKFKEMLVKKAEEQGVEFISFDGAKGEWKFRVKHFSSYGFGEAEADDLADSL

SEQ ID NO: 11747 - protein, 108 aa, Triticum aestivum
  peptide (1)..(108): Ceres Seq. ID no. 15173817
  misc_feature (32)..(103): Pfam Name: Pfam Description:  Nucleoporin autopeptidase
  misc_feature (32)..(103): NCBI GI NO: 22329468 NR Description: expressed protein [Arabidopsis thaliana]
  misc_feature (32)..(103): NCBI GI NO: 25402598 NR Description: protein F14N23.29
  misc_feature (32)..(98): NCBI GI NO: 15218866 NR Description: nucleoporin 98-related protein
  misc_feature (32)..(98): NCBI GI NO: 25404873 NR Description: protein T30E16.23
  misc_feature (19)..(92): NCBI GI NO: 34914964 NR Description: similar to Arabidopsis thaliana chromosome 1
MFNTSNIGITGGGGIFGNTSSPFQTSPFQQSALVTLLNIKCMNKKTGEQYTQGPRLDKFKEMLVKKAEEQGVEFISFDGAKGEWKFRVKHFSSYGFGEAEADDLADSL

SEQ ID NO: 11748 - DNA, 827 bp, Triticum aestivum
  misc_feature (1)..(827): Ceres Seq. ID no. 15173803
tccagtccagtatccgtcgttccccctcgccatcgtcccgcgccccgtccatggccaccgccacgctccctctccgcctcctcccctcgagaaccccactcctccacaccgccgccttcctccctgcgagcacttctctctccgtcaccgcgtccgcgccccgcaactggcgcatcttcgccgccgccgaggaggcgcccgctccggtggaagccgaggcggaggaggtggtagaggatgccgcggttccggagcctgttgaggtgcagctggctgctgctggcgcggggaaggacgccgacatcttcgccgttgtcatgattgggtccagacaatacattgtgatgccagatcattttgaacaaggtactactggtgtcaactagagacaaagcttatattggcatgccagtggtgaccaatgctgctgttcatgcaattcttgaagaacagggactggacgataaagtgattgttttcaagttcaagaagaagaagaagtaccagaggaaagctggtcacagacagccaaatacgaggttaagaattactggcataagtggatatgaggaattccctgctgatccaatacttcaagttccagcttaagtgtaattgtaagttgtttagttacaaatgcttggtagtacattagagtgcaagagcattttccccactgttccccaagtgaggctcttccccaagttaatgtactcgaaatgctgccattcgtcgagtggttggttccatccttttgtttattccgccagctcttgtgttcctttgaaatccaattgtattatcttgattgtgcagaaagacagggg

SEQ ID NO: 11749 - protein, 127 aa, Triticum aestivum
  peptide (1)..(127): Ceres Seq. ID no. 15173804
  misc_feature (32)..(119): NCBI GI NO: 15219695 NR Description: 50S ribosomal protein L21 chloroplast precursor
QSSIRRSPSPSSRAPSMATATLPLRLLPSRTPLLHTAAFLPASTSLSVTASAPRNWRIFAAAEEAPAPVEAEAEEVVEDAAVPEPVEVQLAAAGAGKDADIFAVVMIGSRQYIVMPDHFEQGTTGVN

SEQ ID NO: 11750 - protein, 111 aa, Triticum aestivum
  peptide (1)..(111): Ceres Seq. ID no. 15173805
  misc_feature (16)..(103): NCBI GI NO: 15219695 NR Description: 50S ribosomal protein L21 chloroplast precursor
MATATLPLRLLPSRTPLLHTAAFLPASTSLSVTASAPRNWRIFAAAEEAPAPVEAEAEEVVEDAAVPEPVEVQLAAAGAGKDADIFAVVMIGSRQYIVMPDHFEQGTTGVN

SEQ ID NO: 11751 - protein, 86 aa, Triticum aestivum
  peptide (1)..(86): Ceres Seq. ID no. 15173806
PVQYPSFPLAIVPRPVHGHRHAPSPPPPLENPTPPHRRLPPCEHFSLRHRVRAPQLAHLRRRRGGARSGGSRGGGGGRGCRGSGAC

SEQ ID NO: 11752 - DNA, 922 bp, Triticum aestivum
  misc_feature (1)..(922): Ceres Seq. ID no. 15173795
cacgggcctctctccacgcctgcattccaacacggacgagccaacgagaggagggaggcgagatgacggcggggcctaagagcggcgggggcggcgcggcagccgcgcgagcggcggccgcggggccgaggacggtgctcatcacgggggtcagccgggggctgggccgagctttagctctggagctcgcgcgccgggggcacgccgtcgtcggctgcggccgctcggtcgatcccatccgctccctcgaggccgagatgggttccccgtctcgccactttctcaccgtcgccgacgtcaggtctgacacccccatgggtgaactggcaaaggctgttgtggaaaggaagcaaattcctgatatcatagtaaacaatgctggtacaataaacaagaataacaaaacgtggaatgttccagcagaagaatttgatacggtggttgatacaaatattaaaggaacagcaaatgtacttcgccattttgtaccacttatgatacagaagaaacatgggatgataatcaatttatcctctggttggggaaggtctgctgctgcagaggttgctccatattgtgcttcaaagtgggctattgaaggtttaacacgctcattagcaaaggagttgcctcctggattggcagcaattgctcttagccctggtgttgtgaataccgacatgcttacttcatgctttggaagttcagctgcgttataccaatctactgagcaatgggcacccaaggcagccacaatgattctaagcctttcactggaagataatggtgcctcactaactgtatgatgctgtagcaatgttgtattaatcacagatcggttctcaagtaattatgacatttaacttgcagctgttgaatatcaattatgttgtagtaataagataaaaaggttcatgtaaag

SEQ ID NO: 11753 - protein, 267 aa, Triticum aestivum
  peptide (1)..(267): Ceres Seq. ID no. 15173796
  misc_feature (31)..(267): NCBI GI NO: 18391139 NR Description: short-chain dehydrogenase/reductase family protein
  misc_feature (31)..(267): NCBI GI NO: 21593553 NR Description: unknown [Arabidopsis thaliana]
  misc_feature (43)..(267): NCBI GI NO: 17229376 NR Description: probable short-chain dehydrogenase
  misc_feature (43)..(267): NCBI GI NO: 23042686 NR Description: hypothetical protein
  misc_feature (43)..(267): NCBI GI NO: 30020410 NR Description: Short chain dehydrogenase
  misc_feature (43)..(227): NCBI GI NO: 28209901 NR Description: 3-oxoacyl-
  misc_feature (43)..(267): NCBI GI NO: 20091506 NR Description: 3-oxoacyl-
  misc_feature (43)..(227): NCBI GI NO: 28210515 NR Description: 3-oxoacyl-
  misc_feature (43)..(227): NCBI GI NO: 23056407 NR Description: hypothetical protein [Geobacter metallireducens]
  misc_feature (43)..(238): NCBI GI NO: 20091507 NR Description: 3-oxoacyl-
RASLHACIPTRTSQREEGGEMTAGPKSGGGGAAAARAAAAGPRTVLITGVSRGLGRALALELARRGHAVVGCGRSVDPIRSLEAEMGSPSRHFLTVADVRSDTPMGELAKAVVERKQIPDIIVNNAGTINKNNKTWNVPAEEFDTVVDTNIKGTANVLRHFVPLMIQKKHGMIINLSSGWGRSAAAEVAPYCASKWAIEGLTRSLAKELPPGLAAIALSPGVVNTDMLTSCFGSSAALYQSTEQWAPKAATMILSLSLEDNGASLTV

SEQ ID NO: 11754 - protein, 247 aa, Triticum aestivum
  peptide (1)..(247): Ceres Seq. ID no. 15173797
  misc_feature (11)..(247): NCBI GI NO: 18391139 NR Description: short-chain dehydrogenase/reductase family protein
  misc_feature (11)..(247): NCBI GI NO: 21593553 NR Description: unknown [Arabidopsis thaliana]
  misc_feature (23)..(247): NCBI GI NO: 17229376 NR Description: probable short-chain dehydrogenase
  misc_feature (23)..(247): NCBI GI NO: 23042686 NR Description: hypothetical protein
  misc_feature (23)..(247): NCBI GI NO: 30020410 NR Description: Short chain dehydrogenase
  misc_feature (23)..(207): NCBI GI NO: 28209901 NR Description: 3-oxoacyl-
  misc_feature (23)..(247): NCBI GI NO: 20091506 NR Description: 3-oxoacyl-
  misc_feature (23)..(207): NCBI GI NO: 28210515 NR Description: 3-oxoacyl-
  misc_feature (23)..(207): NCBI GI NO: 23056407 NR Description: hypothetical protein [Geobacter metallireducens]
  misc_feature (23)..(218): NCBI GI NO: 20091507 NR Description: 3-oxoacyl-
MTAGPKSGGGGAAAARAAAAGPRTVLITGVSRGLGRALALELARRGHAVVGCGRSVDPIRSLEAEMGSPSRHFLTVADVRSDTPMGELAKAVVERKQIPDIIVNNAGTINKNNKTWNVPAEEFDTVVDTNIKGTANVLRHFVPLMIQKKHGMIINLSSGWGRSAAAEVAPYCASKWAIEGLTRSLAKELPPGLAAIALSPGVVNTDMLTSCFGSSAALYQSTEQWAPKAATMILSLSLEDNGASLTV

SEQ ID NO: 11755 - protein, 182 aa, Triticum aestivum
  peptide (1)..(182): Ceres Seq. ID no. 15173798
  misc_feature (1)..(182): NCBI GI NO: 18391139 NR Description: short-chain dehydrogenase/reductase family protein
  misc_feature (1)..(182): NCBI GI NO: 21593553 NR Description: unknown [Arabidopsis thaliana]
  misc_feature (1)..(182): NCBI GI NO: 17229376 NR Description: probable short-chain dehydrogenase
  misc_feature (1)..(182): NCBI GI NO: 23042686 NR Description: hypothetical protein
  misc_feature (1)..(182): NCBI GI NO: 30020410 NR Description: Short chain dehydrogenase
  misc_feature (1)..(142): NCBI GI NO: 28209901 NR Description: 3-oxoacyl-
  misc_feature (1)..(182): NCBI GI NO: 20091506 NR Description: 3-oxoacyl-
  misc_feature (1)..(142): NCBI GI NO: 28210515 NR Description: 3-oxoacyl-
  misc_feature (1)..(142): NCBI GI NO: 23056407 NR Description: hypothetical protein [Geobacter metallireducens]
  misc_feature (1)..(153): NCBI GI NO: 20091507 NR Description: 3-oxoacyl-
MGSPSRHFLTVADVRSDTPMGELAKAVVERKQIPDIIVNNAGTINKNNKTWNVPAEEFDTVVDTNIKGTANVLRHFVPLMIQKKHGMIINLSSGWGRSAAAEVAPYCASKWAIEGLTRSLAKELPPGLAAIALSPGVVNTDMLTSCFGSSAALYQSTEQWAPKAATMILSLSLEDNGASLTV

SEQ ID NO: 11756 - DNA, 1132 bp, Triticum aestivum
  misc_feature (1)..(1132): Ceres Seq. ID no. 15173789
acacagggagcaaccaaaccaaacgaacccagccaaccagcaaactccccttctcttctcttcttcttcctcctagtacaccttttgtctctccgtccacagtccacacacagcactctccaccaaaagatcaagcaagagccaagagcacgtgcgatggcggcgacggcgactgcgacggcggcggcgacgagcgtggtgacggggacgacgcggtggtgcccgacgccggagcagctgatgatcctggaggagatgtaccgcggcgggctgcgcacccccaacgcgtcgcagatccagcagatcacggcgcacctggcccactacggccgcatcgagggcaagaacgtcttctactggttccagaaccacaaggcccgggaccgccagaagctccgccgcaggctctgcatgagccaccacctcctctcctgcgcgcactactacgccgccgccaacgccggccagtaccaccagcagcagcagctcctcggcgccggcgcggtgcctcctccgctgctgcagcacccgcagcagcagcagtactactccgcctcttgcgccggtggcggctacgaccagcacctgctcccgacgaccgtcccagcttccgcttacgctgctgctgctgggtacgcctaccccttcgccggcgtgccggcaagccggtgcgccgagccctcgccgccaaacaccccgctctccttccatcatcagggaggaggcgtagtgggatcgccggagtactcgctggggaggctgggcaacttcggcgtggtggaggacacatgccggccgtcgcggtacgagcagcagccgcagcagctggccgcggcaacggaagatcaggcggcgccggtgacggcgacggggctgttctgccggccgctgaagacgctggacctcttccccggcgcgatcaaggaggagcagcgcgacgtcgcctagctatatactacctccaacctatagctagccaccagtagcagcagcagcagcagtcgtcgtcgtagtacgtagagcagtccgtacgttgcgcgcgttgtacgtacgcaggtagagcagtacgtaggagtacgtatctttgtaattcccatcgatttttcgttgattattaatccgctttagtagc

SEQ ID NO: 11757 - protein, 327 aa, Triticum aestivum
  peptide (1)..(327): Ceres Seq. ID no. 15173790
TGSNQTKRTQPTSKLPFSSLLLPPSTPFVSPSTVHTQHSPPKDQARAKSTCDGGDGDCDGGGDERGDGDDAVVPDAGAADDPGGDVPRRAAHPQRVADPADHGAPGPLRPHRGQERLLLVPEPQGPGPPEAPPQALHEPPPPLLRALLRRRQRRPVPPAAAAPRRRRGASSAAAAPAAAAVLLRLLRRWRLRPAPAPDDRPSFRLRCCCWVRLPLRRRAGKPVRRALAAKHPALLPSSGRRRSGIAGVLAGEAGQLRRGGGHMPAVAVRAAAAAAGRGNGRSGGAGDGDGAVLPAAEDAGPLPRRDQGGAARRRLAIYYLQPIASHQ

SEQ ID NO: 11758 - protein, 315 aa, Triticum aestivum
  peptide (1)..(315): Ceres Seq. ID no. 15173791
  misc_feature (72)..(130): Pfam Name: Pfam Description:  Homeobox domain
  misc_feature (196)..(314): NCBI GI NO: 8099120 NR Description: similar to a putative homeodomain transcriptionfactor of Arabidopsis thialiana
  misc_feature (59)..(130): NCBI GI NO: 8099120 NR Description: similar to a putative homeodomain transcriptionfactor of Arabidopsis thialiana
  misc_feature (68)..(304): NCBI GI NO: 39841615 NR Description: narrow sheath 2 [Zea mays]
  misc_feature (70)..(141): NCBI GI NO: 15226914 NR Description: homeodomain transcription factor -related
  misc_feature (2)..(153): NCBI GI NO: 32488911 NR Description: OSJNBb0059K02.2
  misc_feature (70)..(146): NCBI GI NO: 9294502 NR Description: homeodomain transcription factor-like protein
  misc_feature (70)..(146): NCBI GI NO: 15229567 NR Description: hypothetical protein [Arabidopsis thaliana]
  misc_feature (70)..(140): NCBI GI NO: 37909316 NR Description: WOX1 protein [Arabidopsis thaliana]
  misc_feature (69)..(153): NCBI GI NO: 10241438 NR Description: putative homeodomain transcripition factor
  misc_feature (69)..(193): NCBI GI NO: 25405177 NR Description: hypothetical protein F2G19.11
TQGATKPNEPSQPANSPSLLFFFLLVHLLSLRPQSTHSTLHQKIKQEPRARAMAATATATAAATSVVTGTTRWCPTPEQLMILEEMYRGGLRTPNASQIQQITAHLAHYGRIEGKNVFYWFQNHKARDRQKLRRRLCMSHHLLSCAHYYAAANAGQYHQQQQLLGAGAVPPPLLQHPQQQQYYSASCAGGGYDQHLLPTTVPASAYAAAAGYAYPFAGVPASRCAEPSPPNTPLSFHHQGGGVVGSPEYSLGRLGNFGVVEDTCRPSRYEQQPQQLAAATEDQAAPVTATGLFCRPLKTLDLFPGAIKEEQRDVA

SEQ ID NO: 11759 - protein, 263 aa, Triticum aestivum
  peptide (1)..(263): Ceres Seq. ID no. 15173792
  misc_feature (20)..(78): Pfam Name: Pfam Description:  Homeobox domain
  misc_feature (144)..(262): NCBI GI NO: 8099120 NR Description: similar to a putative homeodomain transcriptionfactor of Arabidopsis thialiana
  misc_feature (7)..(78): NCBI GI NO: 8099120 NR Description: similar to a putative homeodomain transcriptionfactor of Arabidopsis thialiana
  misc_feature (16)..(252): NCBI GI NO: 39841615 NR Description: narrow sheath 2 [Zea mays]
  misc_feature (18)..(89): NCBI GI NO: 15226914 NR Description: homeodomain transcription factor -related
  misc_feature (1)..(101): NCBI GI NO: 32488911 NR Description: OSJNBb0059K02.2
  misc_feature (18)..(94): NCBI GI NO: 9294502 NR Description: homeodomain transcription factor-like protein
  misc_feature (18)..(94): NCBI GI NO: 15229567 NR Description: hypothetical protein [Arabidopsis thaliana]
  misc_feature (18)..(88): NCBI GI NO: 37909316 NR Description: WOX1 protein [Arabidopsis thaliana]
  misc_feature (17)..(101): NCBI GI NO: 10241438 NR Description: putative homeodomain transcripition factor
  misc_feature (17)..(141): NCBI GI NO: 25405177 NR Description: hypothetical protein F2G19.11
MAATATATAAATSVVTGTTRWCPTPEQLMILEEMYRGGLRTPNASQIQQITAHLAHYGRIEGKNVFYWFQNHKARDRQKLRRRLCMSHHLLSCAHYYAAANAGQYHQQQQLLGAGAVPPPLLQHPQQQQYYSASCAGGGYDQHLLPTTVPASAYAAAAGYAYPFAGVPASRCAEPSPPNTPLSFHHQGGGVVGSPEYSLGRLGNFGVVEDTCRPSRYEQQPQQLAAATEDQAAPVTATGLFCRPLKTLDLFPGAIKEEQRDVA

SEQ ID NO: 11760 - DNA, 797 bp, Triticum aestivum
  misc_feature (1)..(797): Ceres Seq. ID no. 15173774
atcccaagctagcaaagcccacctagcgctcagccacaagccagtagcccagtacgctctagctagctactagcgttatccacatagcaatggcgccctccatgctcgccctcttcctcgccatgaatctggtcctcctcgtggcagtgcatggctgcgggtcgtgcggcaacacaccgcccgtccctgttccaagcccaccgattgcgtttccaccgccagctcccgtgccgtctccgccttcccccggcggcgggggcggcacctgctcaatcgacactctgaagctgaaggtttgcgccaacgtgctgaacctgctgaagctcaacctcggcgtgccgacggacgagcagtgctgcccgcttctgagcggcctcgctgacctagacgccgccctgtgtctctgcactgccatcaaggccaacgtcctcggcatcaagctcaatgtgcccgtcgacctcgtgctcctcctcaaccagtgcggcaagacctgccccgccgacttcacctgccctcgctgatccatccatcacaaaccatgcattttttacctgcatcgcatcatcgtcgtcggcgtactcgtacttacaatattttttcgtatccgcatgtacctatatattttctcgcaattacaatatggtagtatatgtcagtcgcgtgcatgcatgggctccctcgcaagtgcatgcatgcttcagttagtcattccccgttatggtatctaagtgcatgattcaagtatttgtaaacgggtatatgtacgtggaataaaattttgttcaggttgtcttttt

SEQ ID NO: 11761 - protein, 143 aa, Triticum aestivum
  peptide (1)..(143): Ceres Seq. ID no. 15173775
  misc_feature (60)..(141): Pfam Name: Pfam Description:  Protease inhibitor/seed storage/LTP family
  misc_feature (7)..(142): NCBI GI NO: 39748092 NR Description: lipid transfer protein-like protein
  misc_feature (1)..(141): NCBI GI NO: 37536704 NR Description: putative lipid transfer protein
  misc_feature (1)..(141): NCBI GI NO: 37536702 NR Description: putative lipid transfer protein
  misc_feature (1)..(141): NCBI GI NO: 1084460 NR Description: RCc2 protein - rice
  misc_feature (1)..(141): NCBI GI NO: 37533212 NR Description: putative lipid transfer protein
  misc_feature (1)..(142): NCBI GI NO: 2226329 NR Description: physical impedance induced protein [Zea mays]
  misc_feature (1)..(142): NCBI GI NO: 399204 NR Description: CORTICAL CELL DELINEATING PROTEIN PRECURSOR
  misc_feature (29)..(141): NCBI GI NO: 15235390 NR Description: protease inhibitor/seed storage/lipid transfer
  misc_feature (31)..(141): NCBI GI NO: 15235388 NR Description: protease inhibitor/seed storage/lipid transfer
  misc_feature (1)..(142): NCBI GI NO: 38568019 NR Description: OSJNBa0070C17.11
MAPSMLALFLAMNLVLLVAVHGCGSCGNTPPVPVPSPPIAFPPPAPVPSPPSPGGGGGTCSIDTLKLKVCANVLNLLKLNLGVPTDEQCCPLLSGLADLDAALCLCTAIKANVLGIKLNVPVDLVLLLNQCGKTCPADFTCPR

SEQ ID NO: 11762 - protein, 139 aa, Triticum aestivum
  peptide (1)..(139): Ceres Seq. ID no. 15173776
  misc_feature (56)..(137): Pfam Name: Pfam Description:  Protease inhibitor/seed storage/LTP family
  misc_feature (3)..(138): NCBI GI NO: 39748092 NR Description: lipid transfer protein-like protein
  misc_feature (1)..(137): NCBI GI NO: 37536704 NR Description: putative lipid transfer protein
  misc_feature (1)..(137): NCBI GI NO: 37536702 NR Description: putative lipid transfer protein
  misc_feature (1)..(137): NCBI GI NO: 1084460 NR Description: RCc2 protein - rice
  misc_feature (1)..(137): NCBI GI NO: 37533212 NR Description: putative lipid transfer protein
  misc_feature (1)..(138): NCBI GI NO: 2226329 NR Description: physical impedance induced protein [Zea mays]
  misc_feature (1)..(138): NCBI GI NO: 399204 NR Description: CORTICAL CELL DELINEATING PROTEIN PRECURSOR
  misc_feature (25)..(137): NCBI GI NO: 15235390 NR Description: protease inhibitor/seed storage/lipid transfer
  misc_feature (27)..(137): NCBI GI NO: 15235388 NR Description: protease inhibitor/seed storage/lipid transfer
  misc_feature (1)..(138): NCBI GI NO: 38568019 NR Description: OSJNBa0070C17.11
MLALFLAMNLVLLVAVHGCGSCGNTPPVPVPSPPIAFPPPAPVPSPPSPGGGGGTCSIDTLKLKVCANVLNLLKLNLGVPTDEQCCPLLSGLADLDAALCLCTAIKANVLGIKLNVPVDLVLLLNQCGKTCPADFTCPR

SEQ ID NO: 11763 - protein, 132 aa, Triticum aestivum
  peptide (1)..(132): Ceres Seq. ID no. 15173777
  misc_feature (49)..(130): Pfam Name: Pfam Description:  Protease inhibitor/seed storage/LTP family
  misc_feature (1)..(131): NCBI GI NO: 39748092 NR Description: lipid transfer protein-like protein
  misc_feature (1)..(130): NCBI GI NO: 37536704 NR Description: putative lipid transfer protein
  misc_feature (1)..(130): NCBI GI NO: 37536702 NR Description: putative lipid transfer protein
  misc_feature (1)..(130): NCBI GI NO: 1084460 NR Description: RCc2 protein - rice
  misc_feature (1)..(130): NCBI GI NO: 37533212 NR Description: putative lipid transfer protein
  misc_feature (1)..(131): NCBI GI NO: 2226329 NR Description: physical impedance induced protein [Zea mays]
  misc_feature (1)..(131): NCBI GI NO: 399204 NR Description: CORTICAL CELL DELINEATING PROTEIN PRECURSOR
  misc_feature (18)..(130): NCBI GI NO: 15235390 NR Description: protease inhibitor/seed storage/lipid transfer
  misc_feature (20)..(130): NCBI GI NO: 15235388 NR Description: protease inhibitor/seed storage/lipid transfer
  misc_feature (1)..(131): NCBI GI NO: 38568019 NR Description: OSJNBa0070C17.11
MNLVLLVAVHGCGSCGNTPPVPVPSPPIAFPPPAPVPSPPSPGGGGGTCSIDTLKLKVCANVLNLLKLNLGVPTDEQCCPLLSGLADLDAALCLCTAIKANVLGIKLNVPVDLVLLLNQCGKTCPADFTCPR

SEQ ID NO: 11764 - DNA, 783 bp, Triticum aestivum
  misc_feature (1)..(783): Ceres Seq. ID no. 15173749
atcgatgtcgacggcgacgtcccagcgcctacacgtacgtgtacacccccgcacccccctgactttatctcgccgacatggtcacggccctcctataaaatcaccacacccgacactgctaaatcaacaacactcatcaccgccaaccatcagctttcaatctagctaccagttccagtttagcacacagattttttcctcgggccaacctccagatccatcaacaatggcgaactctgtgtccggagtggcggtgaacgaggagtgcgtgaaggcgttccaggagctgcgggcggaccgcaagcaccggttcgtggtgtacaagatggacgacgacgcgcagcaggtggtggtggacaaggtgggcgcgctcgacgccaccttcgacgacctggcggcggccatgcccgccgacgactgccgctacgccgtctacgacctggacttcgtgtccgaggactcggccggcgagaccccccgcagcaagatcttcttcatccactggtcgccggagtcggcggacgcgaggaacaagatgctgtacgccagctccacggaggggctcaagaaggagctggacggcgtgcagatcgacgtgcaggccaccgacgccagcgagctcaccctcgacatcctcaaggactacaccacctaagttaatcgatgaatcacgtacgcgcttggcatcgcgttcctgcttggagttggatcgtgtcttgtggatccaaataatgtttttccatgtgcagcggggtgtgaataattgatgagtggttttctttc

SEQ ID NO: 11765 - protein, 217 aa, Triticum aestivum
  peptide (1)..(217): Ceres Seq. ID no. 15173750
  misc_feature (87)..(217): Pfam Name: Pfam Description:  Cofilin/tropomyosin-type actin-binding protein
  misc_feature (76)..(217): NCBI GI NO: 1381154 NR Description: WCOR719
  misc_feature (76)..(217): NCBI GI NO: 7441447 NR Description: actin-binding protein WCOR719 - wheat
  misc_feature (76)..(217): NCBI GI NO: 11066101 NR Description: actin depolymerization factor-like protein
  misc_feature (76)..(217): NCBI GI NO: 29124120 NR Description: putative actin-binding protein
  misc_feature (76)..(213): NCBI GI NO: 38345587 NR Description: OSJNBb0012E24.5
  misc_feature (76)..(213): NCBI GI NO: 30697295 NR Description: actin depolymerizing factor 3 - like protein
  misc_feature (76)..(213): NCBI GI NO: 18411410 NR Description: actin-depolymerizing factor -related
  misc_feature (76)..(213): NCBI GI NO: 22831338 NR Description: putative actin-depolymerizing factor 2
  misc_feature (76)..(213): NCBI GI NO: 30697300 NR Description: actin depolymerizing factor 4 - like protein
  misc_feature (76)..(213): NCBI GI NO: 15223471 NR Description: actin depolymerizing factor -related
SMSTATSQRLHVRVHPRTPLTLSRRHGHGPPIKSPHPTLLNQQHSSPPTISFQSSYQFQFSTQIFSSGQPPDPSTMANSVSGVAVNEECVKAFQELRADRKHRFVVYKMDDDAQQVVVDKVGALDATFDDLAAAMPADDCRYAVYDLDFVSEDSAGETPRSKIFFIHWSPESADARNKMLYASSTEGLKKELDGVQIDVQATDASELTLDILKDYTT

SEQ ID NO: 11766 - protein, 216 aa, Triticum aestivum
  peptide (1)..(216): Ceres Seq. ID no. 15173751
  misc_feature (86)..(216): Pfam Name: Pfam Description:  Cofilin/tropomyosin-type actin-binding protein
  misc_feature (75)..(216): NCBI GI NO: 1381154 NR Description: WCOR719
  misc_feature (75)..(216): NCBI GI NO: 7441447 NR Description: actin-binding protein WCOR719 - wheat
  misc_feature (75)..(216): NCBI GI NO: 11066101 NR Description: actin depolymerization factor-like protein
  misc_feature (75)..(216): NCBI GI NO: 29124120 NR Description: putative actin-binding protein
  misc_feature (75)..(212): NCBI GI NO: 38345587 NR Description: OSJNBb0012E24.5
  misc_feature (75)..(212): NCBI GI NO: 30697295 NR Description: actin depolymerizing factor 3 - like protein
  misc_feature (75)..(212): NCBI GI NO: 18411410 NR Description: actin-depolymerizing factor -related
  misc_feature (75)..(212): NCBI GI NO: 22831338 NR Description: putative actin-depolymerizing factor 2
  misc_feature (75)..(212): NCBI GI NO: 30697300 NR Description: actin depolymerizing factor 4 - like protein
  misc_feature (75)..(212): NCBI GI NO: 15223471 NR Description: actin depolymerizing factor -related
MSTATSQRLHVRVHPRTPLTLSRRHGHGPPIKSPHPTLLNQQHSSPPTISFQSSYQFQFSTQIFSSGQPPDPSTMANSVSGVAVNEECVKAFQELRADRKHRFVVYKMDDDAQQVVVDKVGALDATFDDLAAAMPADDCRYAVYDLDFVSEDSAGETPRSKIFFIHWSPESADARNKMLYASSTEGLKKELDGVQIDVQATDASELTLDILKDYTT

SEQ ID NO: 11767 - protein, 142 aa, Triticum aestivum
  peptide (1)..(142): Ceres Seq. ID no. 15173752
  misc_feature (12)..(142): Pfam Name: Pfam Description:  Cofilin/tropomyosin-type actin-binding protein
  misc_feature (1)..(142): NCBI GI NO: 1381154 NR Description: WCOR719
  misc_feature (1)..(142): NCBI GI NO: 7441447 NR Description: actin-binding protein WCOR719 - wheat
  misc_feature (1)..(142): NCBI GI NO: 11066101 NR Description: actin depolymerization factor-like protein
  misc_feature (1)..(142): NCBI GI NO: 29124120 NR Description: putative actin-binding protein
  misc_feature (1)..(138): NCBI GI NO: 38345587 NR Description: OSJNBb0012E24.5
  misc_feature (1)..(138): NCBI GI NO: 30697295 NR Description: actin depolymerizing factor 3 - like protein
  misc_feature (1)..(138): NCBI GI NO: 18411410 NR Description: actin-depolymerizing factor -related
  misc_feature (1)..(138): NCBI GI NO: 22831338 NR Description: putative actin-depolymerizing factor 2
  misc_feature (1)..(138): NCBI GI NO: 30697300 NR Description: actin depolymerizing factor 4 - like protein
  misc_feature (1)..(138): NCBI GI NO: 15223471 NR Description: actin depolymerizing factor -related
MANSVSGVAVNEECVKAFQELRADRKHRFVVYKMDDDAQQVVVDKVGALDATFDDLAAAMPADDCRYAVYDLDFVSEDSAGETPRSKIFFIHWSPESADARNKMLYASSTEGLKKELDGVQIDVQATDASELTLDILKDYTT

SEQ ID NO: 11768 - DNA, 775 bp, Triticum aestivum
  misc_feature (1)..(775): Ceres Seq. ID no. 15173736
gcaattgcatccagttctcgcgccgcccccgtcccataatcccttcccgtcctcgcctcgtcgccggtaatggcgggtcccggcatcggagcggccgcgcctcgcctgtcgctgctgctgctgctgctcgtcgtcgtcttcgcgggctcctcccgccacagccgcaccgaggcggccgtgcggacgtgcacgtacacggtgaaggtgaagacgagctgcgcgtcgccggcgccgacgtcggacgcggttagcgtggcgttcggggacgcgtaccgcaacgaggcgtacggcgcgcgcctcccgagcgcgccgggcgggagggccttcgagcggtgcggcaccgacaccttccgcgtctccggggtgtgcggctacggcgtctgctacctctacctccgccgcgccggccgcgacggctgggcgcccgagtgggtccaggtcaccgagccgggccccggcgccggagagaagcccgccaccttctacttcggggcgccgctgccggacggcgtctggtacggccacaaccgctgcctcaaggccaaggccaaggcagcgggcacggcagcggcggcggctcggacaaacaccacctctgctgctgcttcgcctctgggctagcgcgacctgattcggctctacccaccgggcgcagcccctctccgtatgtaattcggcattcgtcgagaataagcagactgtgcttacagattcagaataagtaattagagaatcataatccgaaatatgatgaggccatgagggcaccttcttc

SEQ ID NO: 11769 - protein, 183 aa, Triticum aestivum
  peptide (1)..(183): Ceres Seq. ID no. 15173737
  misc_feature (34)..(155): Pfam Name: ATS3 Pfam Description: Embryo-specific protein 3,
  misc_feature (34)..(163): NCBI GI NO: 34910236 NR Description: OSJNBa0089K24.2
  misc_feature (40)..(180): NCBI GI NO: 15227355 NR Description: hypothetical protein [Arabidopsis thaliana]
  misc_feature (39)..(158): NCBI GI NO: 8809633 NR Description: contains similarity to embryo-specific protein3~gene_id:MMI9
  misc_feature (39)..(158): NCBI GI NO: 15241727 NR Description: expressed protein [Arabidopsis thaliana]
  misc_feature (13)..(155): NCBI GI NO: 15241758 NR Description: embryo-specific protein - like
  misc_feature (13)..(155): NCBI GI NO: 26450767 NR Description: embryo-specific protein like
  misc_feature (11)..(155): NCBI GI NO: 3335171 NR Description: embryo-specific protein 3 [Arabidopsis thaliana]
  misc_feature (11)..(155): NCBI GI NO: 13877521 NR Description: embryo-specific protein 3; ATS3
  misc_feature (11)..(155): NCBI GI NO: 15240721 NR Description: embryo-specific protein 3 (ATS3)
MAGPGIGAAAPRLSLLLLLLVVVFAGSSRHSRTEAAVRTCTYTVKVKTSCASPAPTSDAVSVAFGDAYRNEAYGARLPSAPGGRAFERCGTDTFRVSGVCGYGVCYLYLRRAGRDGWAPEWVQVTEPGPGAGEKPATFYFGAPLPDGVWYGHNRCLKAKAKAAGTAAAAARTNTTSAAASPLG

SEQ ID NO: 11770 - DNA, 652 bp, Triticum aestivum
  misc_feature (1)..(652): Ceres Seq. ID no. 15173713
acccaactcattcgctctctcgttctcctctccccgcaccaagagcagcaagaggcaagcgcaccccaaagctaagctctgctcagcaattttctccaaagtaacctacacacaaataccaatataccatggcgccatcagtggcctgctccttcttcttcgacgccgagctgcacggtgagcccgacatgccgtcgatggacgcgtgcgcgctctgtgccaagccgctggcgtgcgacagcgacgtcttcatgtacaaaggggacacggcctactgtagcgaggagtgccgccacgagcagatgcacctcgacaccgtctgtgccaagcaggccgcgcggaggcagcagcggttctcggcggggacagaatcccaccgtgggcagcggcagtccagcaaggtgtccgtcgcgagctaagcggccggcctggccgaggaaagttttgttcgaatagacaagatcggaattctgaagaaaacaacatctgtgggcatctgatgtctccgtctctccggccggtgctcttgcctcaaccggaggaagcatcaggtggcacgaagcataggttgttagaagggagagagaaggattgttgcgaaataattggatgtattattgagcctcgagggcgagtatatatatatgaacac

SEQ ID NO: 11771 - protein, 96 aa, Triticum aestivum
  peptide (1)..(96): Ceres Seq. ID no. 15173714
  misc_feature (9)..(62): Pfam Name: DUF581 Pfam Description: Protein of unknown function
  misc_feature (1)..(96): NCBI GI NO: 38344284 NR Description: OSJNBa0013K16.16
  misc_feature (1)..(96): NCBI GI NO: 38344285 NR Description: OSJNBa0013K16.17
  misc_feature (1)..(93): NCBI GI NO: 18414940 NR Description: senescence-associated protein -related
  misc_feature (1)..(93): NCBI GI NO: 21594214 NR Description: unknown [Arabidopsis thaliana]
  misc_feature (11)..(93): NCBI GI NO: 7485163 NR Description: hypothetical protein - Arabidopsis thaliana
  misc_feature (1)..(90): NCBI GI NO: 15238001 NR Description: senescence-associated protein -related
  misc_feature (24)..(62): NCBI GI NO: 38344280 NR Description: OSJNBa0013K16.12
MAPSVACSFFFDAELHGEPDMPSMDACALCAKPLACDSDVFMYKGDTAYCSEECRHEQMHLDTVCAKQAARRQQRFSAGTESHRGQRQSSKVSVAS

SEQ ID NO: 11772 - protein, 76 aa, Triticum aestivum
  peptide (1)..(76): Ceres Seq. ID no. 15173715
  misc_feature (1)..(42): Pfam Name: DUF581 Pfam Description: Protein of unknown function
  misc_feature (1)..(76): NCBI GI NO: 38344284 NR Description: OSJNBa0013K16.16
  misc_feature (1)..(76): NCBI GI NO: 38344285 NR Description: OSJNBa0013K16.17
  misc_feature (1)..(73): NCBI GI NO: 18414940 NR Description: senescence-associated protein -related
  misc_feature (1)..(73): NCBI GI NO: 21594214 NR Description: unknown [Arabidopsis thaliana]
  misc_feature (1)..(73): NCBI GI NO: 7485163 NR Description: hypothetical protein - Arabidopsis thaliana
  misc_feature (1)..(70): NCBI GI NO: 15238001 NR Description: senescence-associated protein -related
  misc_feature (4)..(42): NCBI GI NO: 38344280 NR Description: OSJNBa0013K16.12
MPSMDACALCAKPLACDSDVFMYKGDTAYCSEECRHEQMHLDTVCAKQAARRQQRFSAGTESHRGQRQSSKVSVAS

SEQ ID NO: 11773 - protein, 73 aa, Triticum aestivum
  peptide (1)..(73): Ceres Seq. ID no. 15173716
  misc_feature (1)..(73): NCBI GI NO: 38344284 NR Description: OSJNBa0013K16.16
  misc_feature (1)..(73): NCBI GI NO: 38344285 NR Description: OSJNBa0013K16.17
  misc_feature (1)..(70): NCBI GI NO: 18414940 NR Description: senescence-associated protein -related
  misc_feature (1)..(70): NCBI GI NO: 21594214 NR Description: unknown [Arabidopsis thaliana]
  misc_feature (1)..(70): NCBI GI NO: 7485163 NR Description: hypothetical protein - Arabidopsis thaliana
  misc_feature (1)..(67): NCBI GI NO: 15238001 NR Description: senescence-associated protein -related
  misc_feature (1)..(39): NCBI GI NO: 38344280 NR Description: OSJNBa0013K16.12
MDACALCAKPLACDSDVFMYKGDTAYCSEECRHEQMHLDTVCAKQAARRQQRFSAGTESHRGQRQSSKVSVAS

SEQ ID NO: 11774 - DNA, 624 bp, Triticum aestivum
  misc_feature (1)..(624): Ceres Seq. ID no. 15173027
acttcccccgaaaaggacctcactccccagcccagcccacccctccccgcccgctgcacagtccaaatccccgctccggcccggcgaccgaccgaggatgcccgcctccatgcccaagctgctcttcctcctgctgctcctcctcctcgccgcggccgcccactcttcaccggtcgtcccggatgcggcgggcgaggggtccgaccaggcggcggtgcgcatggtgccgatggccccggctggggggtcggggttcagcggggtggtgctgaacgagacgcggcggcggctggggagcttccagctctgcgcgccctgcacctgctgcggcgggcccaggggcgcctgcgtcctctccccgtgctgctacgctatcaactgcaacatccccaaccgcccattcggattctgctccttcacgcccaggtcttgcgactgcctccactgcaacgtctgagctctgcttctgctctgccctgctctcgagggtgatgagggcaatgttgagggcgatagtaagtattttagagtgtgggtggggaaaaaggacatgacagcatgagagttcccccaacccgaatgcttgccgatttgttattgttttagccctatagccattttgcc

SEQ ID NO: 11775 - protein, 163 aa, Triticum aestivum
  peptide (1)..(163): Ceres Seq. ID no. 15173028
TSPEKDLTPQPSPPLPARCTVQIPAPARRPTEDARLHAQAALPPAAPPPRRGRPLFTGRPGCGGRGVRPGGGAHGADGPGWGVGVQRGGAERDAAAAGELPALRALHLLRRAQGRLRPLPVLLRYQLQHPQPPIRILLLHAQVLRLPPLQRLSSASALPCSRG

SEQ ID NO: 11776 - protein, 151 aa, Triticum aestivum
  peptide (1)..(151): Ceres Seq. ID no. 15173029
  misc_feature (38)..(151): NCBI GI NO: 34906984 NR Description: P0413C03.15
  misc_feature (40)..(151): NCBI GI NO: 21593890 NR Description: unknown [Arabidopsis thaliana]
  misc_feature (40)..(151): NCBI GI NO: 18408246 NR Description: expressed protein [Arabidopsis thaliana]
  misc_feature (40)..(151): NCBI GI NO: 21954063 NR Description: unknown protein [Arabidopsis thaliana]
  misc_feature (33)..(151): NCBI GI NO: 18412619 NR Description: expressed protein [Arabidopsis thaliana]
LPPKRTSLPSPAHPSPPAAQSKSPLRPGDRPRMPASMPKLLFLLLLLLLAAAAHSSPVVPDAAGEGSDQAAVRMVPMAPAGGSGFSGVVLNETRRRLGSFQLCAPCTCCGGPRGACVLSPCCYAINCNIPNRPFGFCSFTPRSCDCLHCNV

SEQ ID NO: 11777 - protein, 119 aa, Triticum aestivum
  peptide (1)..(119): Ceres Seq. ID no. 15173030
  misc_feature (6)..(119): NCBI GI NO: 34906984 NR Description: P0413C03.15
  misc_feature (8)..(119): NCBI GI NO: 21593890 NR Description: unknown [Arabidopsis thaliana]
  misc_feature (8)..(119): NCBI GI NO: 18408246 NR Description: expressed protein [Arabidopsis thaliana]
  misc_feature (8)..(119): NCBI GI NO: 21954063 NR Description: unknown protein [Arabidopsis thaliana]
  misc_feature (1)..(119): NCBI GI NO: 18412619 NR Description: expressed protein [Arabidopsis thaliana]
MPASMPKLLFLLLLLLLAAAAHSSPVVPDAAGEGSDQAAVRMVPMAPAGGSGFSGVVLNETRRRLGSFQLCAPCTCCGGPRGACVLSPCCYAINCNIPNRPFGFCSFTPRSCDCLHCNV

SEQ ID NO: 11778 - DNA, 792 bp, Triticum aestivum
  misc_feature (1)..(792): Ceres Seq. ID no. 15173676
ttgttttcaagatatggtgtccgtggcttcccagccattcttctggcaagtgagactacaatggttcgttacaggggcacaaaagatctgaagtctctggttcagttctatcaagagactacaggcctcgacccaattacatatattgatgttgatcagcaagagagcactggaagtttaggatcagccatgccaggaggccgctctctgcgcaaaatggcgaaagacgagccctttctgtttcttggagccctttttataatcatgaagatcgcggcacacttcgtccccactgtcatctcccaactgagagccttcttgattgtgcgtgttcagaacttgaacttaagaatctgtaggggatcaagccaacttatggaacgggcattgactgtgcttgatgttcagaggctctggagcaagcttagactgagcagtaagacaagggacctaagtaaaggggcgagtaatgctcgagcttgggcttcgtcgtttgcgtccgtctcactgggtgaaccatcctccttacggcatgcctagcctcttcctcatgatgctggtcgatagtctagctgctgatatatggcccaaaattgtttggtcttgcttccccatcctgctatgtacgtgcatccgcgcatgtggggacccaggaatgtaaattttcaggatctcatcttgttgtaaataggaacgcgttttcgctttgctgacgcgatagctgatttctgacctttgtttcagttaactctttgatgtatggggaagatctgagtattttttcgatctctt

SEQ ID NO: 11779 - protein, 179 aa, Triticum aestivum
  peptide (1)..(179): Ceres Seq. ID no. 15173677
  misc_feature (1)..(179): NCBI GI NO: 30103009 NR Description: unknown protein
  misc_feature (1)..(175): NCBI GI NO: 18396691 NR Description: expressed protein [Arabidopsis thaliana]
  misc_feature (1)..(175): NCBI GI NO: 21536613 NR Description: contains similarity to protein disulfide isomerase-related protein
  misc_feature (1)..(175): NCBI GI NO: 18418521 NR Description: expressed protein [Arabidopsis thaliana]
  misc_feature (43)..(175): NCBI GI NO: 9758894 NR Description: contains similarity to protein disulfide isomerase-related protein~gene_id:MRG7
  misc_feature (1)..(42): NCBI GI NO: 9758894 NR Description: contains similarity to protein disulfide isomerase-related protein~gene_id:MRG7
  misc_feature (42)..(175): NCBI GI NO: 6006856 NR Description: unknown protein [Arabidopsis thaliana]
  misc_feature (3)..(175): NCBI GI NO: 18399435 NR Description: expressed protein [Arabidopsis thaliana]
  misc_feature (1)..(176): NCBI GI NO: 29367467 NR Description: disulfide isomerase-like protein
LFSRYGVRGFPAILLASETTMVRYRGTKDLKSLVQFYQETTGLDPITYIDVDQQESTGSLGSAMPGGRSLRKMAKDEPFLFLGALFIIMKIAAHFVPTVISQLRAFLIVRVQNLNLRICRGSSQLMERALTVLDVQRLWSKLRLSSKTRDLSKGASNARAWASSFASVSLGEPSSLRHA

SEQ ID NO: 11780 - protein, 159 aa, Triticum aestivum; identical to SEQ ID NO: 10913
  peptide (1)..(159): Ceres Seq. ID no. 15173678
  misc_feature (1)..(159): NCBI GI NO: 30103009 NR Description: unknown protein
  misc_feature (1)..(155): NCBI GI NO: 18396691 NR Description: expressed protein [Arabidopsis thaliana]
  misc_feature (1)..(155): NCBI GI NO: 21536613 NR Description: contains similarity to protein disulfide isomerase-related protein
  misc_feature (1)..(155): NCBI GI NO: 18418521 NR Description: expressed protein [Arabidopsis thaliana]
  misc_feature (23)..(155): NCBI GI NO: 9758894 NR Description: contains similarity to protein disulfide isomerase-related protein~gene_id:MRG7
  misc_feature (1)..(22): NCBI GI NO: 9758894 NR Description: contains similarity to protein disulfide isomerase-related protein~gene_id:MRG7
  misc_feature (22)..(155): NCBI GI NO: 6006856 NR Description: unknown protein [Arabidopsis thaliana]
  misc_feature (1)..(155): NCBI GI NO: 18399435 NR Description: expressed protein [Arabidopsis thaliana]
  misc_feature (1)..(156): NCBI GI NO: 29367467 NR Description: disulfide isomerase-like protein

SEQ ID NO: 11781 - protein, 116 aa, Triticum aestivum
  peptide (1)..(116): Ceres Seq. ID no. 15173679
  misc_feature (1)..(116): NCBI GI NO: 30103009 NR Description: unknown protein
  misc_feature (1)..(112): NCBI GI NO: 18396691 NR Description: expressed protein [Arabidopsis thaliana]
  misc_feature (1)..(112): NCBI GI NO: 21536613 NR Description: contains similarity to protein disulfide isomerase-related protein
  misc_feature (1)..(112): NCBI GI NO: 18418521 NR Description: expressed protein [Arabidopsis thaliana]
  misc_feature (1)..(112): NCBI GI NO: 9758894 NR Description: contains similarity to protein disulfide isomerase-related protein~gene_id:MRG7
  misc_feature (1)..(112): NCBI GI NO: 6006856 NR Description: unknown protein [Arabidopsis thaliana]
  misc_feature (1)..(112): NCBI GI NO: 18399435 NR Description: expressed protein [Arabidopsis thaliana]
  misc_feature (1)..(113): NCBI GI NO: 29367467 NR Description: disulfide isomerase-like protein
MPGGRSLRKMAKDEPFLFLGALFIIMKIAAHFVPTVISQLRAFLIVRVQNLNLRICRGSSQLMERALTVLDVQRLWSKLRLSSKTRDLSKGASNARAWASSFASVSLGEPSSLRHA

SEQ ID NO: 11782 - DNA, 662 bp, Triticum aestivum
  misc_feature (1)..(662): Ceres Seq. ID no. 15173534
atccaaccctcctgctgctgctgtctgtgttgccgccccgaccgccgcctccaccacccacccacccccaccgcgccggcctctcccccctgtcccgtctccctcatggcctccgccgccgcttccgccgtctccttcgccaggcccgtcaagacaatcaatgccaactcggtctccttctctgctccaaggaaagacaatgtatccttccgtcttcagccagttccccagagattttctgttcgctgtgctgccaaaaaggagacagtagaaaaggtttgtgatattgtgaagagccagcttgcgcttgctgatgacactgtagtttctggctcctctacgtttgctgatcttggtgccgattctttggacacggttgagattgtcatgggcctcgaggaggctttcgggatcagcgtggaggagtcgagcgcgcagaccattgcaacggtggaggacgccgccaacctcatcgacagccttgttgcaaactaaacatatttcctggcaataatgtgctacccactgcaatcgttgctgctggagatggatcccatttgacgtgctagattttactgtggagagtcggtgacatctgtatcagtgtttttgcctgtcttgcgatattacgacattatttattaagcggttgttgaaggaat

SEQ ID NO: 11783 - protein, 164 aa, Triticum aestivum
  peptide (1)..(164): Ceres Seq. ID no. 15173535
  misc_feature (91)..(158): Pfam Name: Pfam Description:  Phosphopantetheine attachment site
  misc_feature (36)..(162): NCBI GI NO: 113169 NR Description: Acyl carrier protein II, chloroplast precursor
  misc_feature (36)..(163): NCBI GI NO: 113172 NR Description: Acyl carrier protein III, chloroplast precursor
  misc_feature (50)..(163): NCBI GI NO: 7442270 NR Description: acyl carrier protein - maize
  misc_feature (36)..(163): NCBI GI NO: 16518983 NR Description: acyl carrier protein [Olea europaea]
  misc_feature (58)..(163): NCBI GI NO: 166975 NR Description: acyl carrier protein III precursor
  misc_feature (36)..(163): NCBI GI NO: 4457219 NR Description: acyl carrier protein [Capsicum chinense]
  misc_feature (36)..(161): NCBI GI NO: 5669599 NR Description: acyl carrier protein [Coriandrum sativum]
  misc_feature (38)..(161): NCBI GI NO: 30102979 NR Description: putative acyl carrier protein, 3'-partial
  misc_feature (36)..(162): NCBI GI NO: 20137323 NR Description: Acyl carrier protein 1, chloroplast precursor
  misc_feature (58)..(162): NCBI GI NO: 2465010 NR Description: acyl carrier protein [Fragaria vesca]
IQPSCCCCLCCRPDRRLHHPPTPTAPASPPCPVSLMASAAASAVSFARPVKTINANSVSFSAPRKDNVSFRLQPVPQRFSVRCAAKKETVEKVCDIVKSQLALADDTVVSGSSTFADLGADSLDTVEIVMGLEEAFGISVEESSAQTIATVEDAANLIDSLVAN

SEQ ID NO: 11784 - protein, 129 aa, Triticum aestivum
  peptide (1)..(129): Ceres Seq. ID no. 15173536
  misc_feature (56)..(123): Pfam Name: Pfam Description:  Phosphopantetheine attachment site
  misc_feature (1)..(127): NCBI GI NO: 113169 NR Description: Acyl carrier protein II, chloroplast precursor
  misc_feature (1)..(128): NCBI GI NO: 113172 NR Description: Acyl carrier protein III, chloroplast precursor
  misc_feature (15)..(128): NCBI GI NO: 7442270 NR Description: acyl carrier protein - maize
  misc_feature (1)..(128): NCBI GI NO: 16518983 NR Description: acyl carrier protein [Olea europaea]
  misc_feature (23)..(128): NCBI GI NO: 166975 NR Description: acyl carrier protein III precursor
  misc_feature (1)..(128): NCBI GI NO: 4457219 NR Description: acyl carrier protein [Capsicum chinense]
  misc_feature (1)..(126): NCBI GI NO: 5669599 NR Description: acyl carrier protein [Coriandrum sativum]
  misc_feature (3)..(126): NCBI GI NO: 30102979 NR Description: putative acyl carrier protein, 3'-partial
  misc_feature (1)..(127): NCBI GI NO: 20137323 NR Description: Acyl carrier protein 1, chloroplast precursor
  misc_feature (23)..(127): NCBI GI NO: 2465010 NR Description: acyl carrier protein [Fragaria vesca]
MASAAASAVSFARPVKTINANSVSFSAPRKDNVSFRLQPVPQRFSVRCAAKKETVEKVCDIVKSQLALADDTVVSGSSTFADLGADSLDTVEIVMGLEEAFGISVEESSAQTIATVEDAANLIDSLVAN

SEQ ID NO: 11785 - protein, 93 aa, Triticum aestivum
  peptide (1)..(93): Ceres Seq. ID no. 15173537
PTLLLLLSVLPPRPPPPPPTHPHRAGLSPLSRLPHGLRRRFRRLLRQARQDNQCQLGLLLCSKERQCILPSSASSPEIFCSLCCQKGDSRKGL

SEQ ID NO: 11786 - DNA, 852 bp, Triticum aestivum
  misc_feature (1)..(852): Ceres Seq. ID no. 15173523
cctgcacccacccactccgccgagaaacagcaacagccacagccacacgcccacgcgcacacaccagatcgtcgacagcgatggcaacggcagcggcagcgggaacgagggaggagatggtctacatggcgaagctggcggagcaggccgagcggtacgaggagatggtcgagttcatggagaaggccgccgtcgccgtcgacgccaaggtattctacctgaatatgaagggagactaccatcgctacctcgcggagttcaagtcggccgccgagcgcaaggatgccgctgactccaccctcggtgcctaccaggccgctcaggacatagccatgaaggagctgccaccgactcaccccatcagactgggcctcgcgctcaacttctccgtgttctactatgagatcctcaactcgcctgatcgtgcgtgctcgctcgccaaacaggccttcgatgaagccatcgctgagctggattccctcggagaagattcctacaaggacagcaccctgataatgcaacttctccgtgacaatctcaccttgtggacctctgatatgcaggatgacgctggcgatgaaatgagggattcaagcaagcctgaggatgagcagtagtgaagggtcctagctactgccctctttctctcttaaccttcgggtagttatgatgcttgtacaaggaccattttcgtgtgtcctttgttgcttggtcttttacctaccctttctttcgttatattgttatacatcgccgtcctcgtgcattattttactttacaacttgaatactgctcgtgtatgcacggcttccttcagatttgaaccagagggttgtcaactcttgcttcct

SEQ ID NO: 11787 - protein, 204 aa, Triticum aestivum
  peptide (1)..(204): Ceres Seq. ID no. 15173524
  misc_feature (57)..(190): Pfam Name: Pfam Description:  14-3-3 protein
  misc_feature (57)..(204): NCBI GI NO: 9798605 NR Description: TaWIN2 [Triticum aestivum]
  misc_feature (30)..(65): NCBI GI NO: 9798605 NR Description: TaWIN2 [Triticum aestivum]
  misc_feature (57)..(203): NCBI GI NO: 29367361 NR Description: WIN2-like protein
  misc_feature (27)..(68): NCBI GI NO: 29367361 NR Description: WIN2-like protein
  misc_feature (62)..(204): NCBI GI NO: 18413181 NR Description: 14-3-3 protein GF14 chi (grf1)
  misc_feature (27)..(67): NCBI GI NO: 18413181 NR Description: 14-3-3 protein GF14 chi (grf1)
  misc_feature (62)..(204): NCBI GI NO: 1702986 NR Description: 14-3-3-like protein GF14 chi
  misc_feature (62)..(204): NCBI GI NO: 13447104 NR Description: GF14 omega [Brassica napus]
  misc_feature (27)..(67): NCBI GI NO: 1702986 NR Description: 14-3-3-like protein GF14 chi
  misc_feature (32)..(67): NCBI GI NO: 13447104 NR Description: GF14 omega [Brassica napus]
CTHPLRRETATATATRPRAHTRSSTAMATAAAAGTREEMVYMAKLAEQAERYEEMVEFMEKAAVAVDAKVFYLNMKGDYHRYLAEFKSAAERKDAADSTLGAYQAAQDIAMKELPPTHPIRLGLALNFSVFYYEILNSPDRACSLAKQAFDEAIAELDSLGEDSYKDSTLIMQLLRDNLTLWTSDMQDDAGDEMRDSSKPEDEQ

SEQ ID NO: 11788 - protein, 178 aa, Triticum aestivum
  peptide (1)..(178): Ceres Seq. ID no. 15173525
  misc_feature (31)..(164): Pfam Name: Pfam Description:  14-3-3 protein
  misc_feature (31)..(178): NCBI GI NO: 9798605 NR Description: TaWIN2 [Triticum aestivum]
  misc_feature (4)..(39): NCBI GI NO: 9798605 NR Description: TaWIN2 [Triticum aestivum]
  misc_feature (31)..(177): NCBI GI NO: 29367361 NR Description: WIN2-like protein
  misc_feature (1)..(42): NCBI GI NO: 29367361 NR Description: WIN2-like protein
  misc_feature (36)..(178): NCBI GI NO: 18413181 NR Description: 14-3-3 protein GF14 chi (grf1)
  misc_feature (1)..(41): NCBI GI NO: 18413181 NR Description: 14-3-3 protein GF14 chi (grf1)
  misc_feature (36)..(178): NCBI GI NO: 1702986 NR Description: 14-3-3-like protein GF14 chi
  misc_feature (36)..(178): NCBI GI NO: 13447104 NR Description: GF14 omega [Brassica napus]
  misc_feature (1)..(41): NCBI GI NO: 1702986 NR Description: 14-3-3-like protein GF14 chi
  misc_feature (6)..(41): NCBI GI NO: 13447104 NR Description: GF14 omega [Brassica napus]
MATAAAAGTREEMVYMAKLAEQAERYEEMVEFMEKAAVAVDAKVFYLNMKGDYHRYLAEFKSAAERKDAADSTLGAYQAAQDIAMKELPPTHPIRLGLALNFSVFYYEILNSPDRACSLAKQAFDEAIAELDSLGEDSYKDSTLIMQLLRDNLTLWTSDMQDDAGDEMRDSSKPEDEQ

SEQ ID NO: 11789 - protein, 166 aa, Triticum aestivum
  peptide (1)..(166): Ceres Seq. ID no. 15173526
  misc_feature (19)..(152): Pfam Name: Pfam Description:  14-3-3 protein
  misc_feature (19)..(166): NCBI GI NO: 9798605 NR Description: TaWIN2 [Triticum aestivum]
  misc_feature (1)..(27): NCBI GI NO: 9798605 NR Description: TaWIN2 [Triticum aestivum]
  misc_feature (19)..(165): NCBI GI NO: 29367361 NR Description: WIN2-like protein
  misc_feature (1)..(30): NCBI GI NO: 29367361 NR Description: WIN2-like protein
  misc_feature (24)..(166): NCBI GI NO: 18413181 NR Description: 14-3-3 protein GF14 chi (grf1)
  misc_feature (1)..(29): NCBI GI NO: 18413181 NR Description: 14-3-3 protein GF14 chi (grf1)
  misc_feature (24)..(166): NCBI GI NO: 1702986 NR Description: 14-3-3-like protein GF14 chi
  misc_feature (24)..(166): NCBI GI NO: 13447104 NR Description: GF14 omega [Brassica napus]
  misc_feature (1)..(29): NCBI GI NO: 1702986 NR Description: 14-3-3-like protein GF14 chi
  misc_feature (1)..(29): NCBI GI NO: 13447104 NR Description: GF14 omega [Brassica napus]
MVYMAKLAEQAERYEEMVEFMEKAAVAVDAKVFYLNMKGDYHRYLAEFKSAAERKDAADSTLGAYQAAQDIAMKELPPTHPIRLGLALNFSVFYYEILNSPDRACSLAKQAFDEAIAELDSLGEDSYKDSTLIMQLLRDNLTLWTSDMQDDAGDEMRDSSKPEDEQ

SEQ ID NO: 11790 - DNA, 986 bp, Triticum aestivum
  misc_feature (1)..(986): Ceres Seq. ID no. 15173516
acatcggcccgtagcggaggagcctcctacagtcctactctcctcctctccccccattcactccatcgacgaagcgcacggagggtaactgcacaggaggaaaaccggcgaaggaagcggcggcggctccgggcgtggtcatggacgagaagacgcaggataaggtggaggcggcggtgctggagatcctgcggggttccgacatggagtccctgacggagtacaaggtccgcaccgccgccgccgaacgcctcggcatcgacctcgacctccccctccacaagcgcttcgtgcgacgcctcgtggaggactacctcaagtccctcgccgaagaagaagacgagaagcagaagggcggctcccgcaaggaggggaaaaagaaacagcagcgtcaggaggaggaagagcaggaagaggatgaggagaaggagggggaagaagaggaggaggaggaggacaagggaggtgaaggaaagaaagagttcgacgataatggagacctcatcctctgccgcctgtcgaagaacaggagggtgacgctgcaggagtttaagggcaaaacgctggtgtcgatccgcgagtactacatcaaggacggcaaggaaatgcccagctccaaagggatgagtatgacggtcgagcagtgggagacattcagcaaatcagtacctgcaatagaagacgccatcagaacacttggagaatcagattgaaaggatgccagaaaaacctaaaaatctcgacgctcgttctggacctctgcaagtagagtagtccatgggtgctctgagtactccatggggctactagagttcatctggacttgtataaagcttctcccttagtcaaggtaccgtacctactgatgcgtgctgggtagacagtttgggtgtgttcgcgaactagttctccgccggtatggtggaccgaagtttcatcgctgtgccatgtgatcttgtgctgttgaattgtcctttctgataccg

SEQ ID NO: 11791 - protein, 190 aa, Triticum aestivum
  peptide (1)..(190): Ceres Seq. ID no. 15173517
  misc_feature (94)..(183): Pfam Name: PC4 Pfam Description: Transcriptional Coactivator p15
  misc_feature (1)..(189): NCBI GI NO: 34910378 NR Description: P0684B02.23
  misc_feature (22)..(186): NCBI GI NO: 13699910 NR Description: putative transcriptional coactivator
  misc_feature (22)..(186): NCBI GI NO: 15236980 NR Description: transcriptional co-activator (KELP) -related
  misc_feature (1)..(186): NCBI GI NO: 16610191 NR Description: PBF68 protein [Nicotiana tabacum]
  misc_feature (1)..(105): NCBI GI NO: 13699910 NR Description: putative transcriptional coactivator
  misc_feature (83)..(186): NCBI GI NO: 15242365 NR Description: transcriptional co-activator (KIWI) -related
  misc_feature (112)..(189): NCBI GI NO: 40739125 NR Description: hypothetical protein AN5806.2
  misc_feature (59)..(180): NCBI GI NO: 17542398 NR Description: RNA polymerase II Transcriptional Coactivator (14
  misc_feature (1)..(106): NCBI GI NO: 15236980 NR Description: transcriptional co-activator (KELP) -related
  misc_feature (60)..(186): NCBI GI NO: 6755364 NR Description: RNA polymerase II transcriptional coactivator
MDEKTQDKVEAAVLEILRGSDMESLTEYKVRTAAAERLGIDLDLPLHKRFVRRLVEDYLKSLAEEEDEKQKGGSRKEGKKKQQRQEEEEQEEDEEKEGEEEEEEEDKGGEGKKEFDDNGDLILCRLSKNRRVTLQEFKGKTLVSIREYYIKDGKEMPSSKGMSMTVEQWETFSKSVPAIEDAIRTLGESD

SEQ ID NO: 11792 - protein, 169 aa, Triticum aestivum
  peptide (1)..(169): Ceres Seq. ID no. 15173518
  misc_feature (73)..(162): Pfam Name: PC4 Pfam Description: Transcriptional Coactivator p15
  misc_feature (1)..(168): NCBI GI NO: 34910378 NR Description: P0684B02.23
  misc_feature (1)..(165): NCBI GI NO: 13699910 NR Description: putative transcriptional coactivator
  misc_feature (1)..(165): NCBI GI NO: 15236980 NR Description: transcriptional co-activator (KELP) -related
  misc_feature (1)..(165): NCBI GI NO: 16610191 NR Description: PBF68 protein [Nicotiana tabacum]
  misc_feature (1)..(84): NCBI GI NO: 13699910 NR Description: putative transcriptional coactivator
  misc_feature (62)..(165): NCBI GI NO: 15242365 NR Description: transcriptional co-activator (KIWI) -related
  misc_feature (91)..(168): NCBI GI NO: 40739125 NR Description: hypothetical protein AN5806.2
  misc_feature (38)..(159): NCBI GI NO: 17542398 NR Description: RNA polymerase II Transcriptional Coactivator (14
  misc_feature (1)..(85): NCBI GI NO: 15236980 NR Description: transcriptional co-activator (KELP) -related
  misc_feature (39)..(165): NCBI GI NO: 6755364 NR Description: RNA polymerase II transcriptional coactivator
MESLTEYKVRTAAAERLGIDLDLPLHKRFVRRLVEDYLKSLAEEEDEKQKGGSRKEGKKKQQRQEEEEQEEDEEKEGEEEEEEEDKGGEGKKEFDDNGDLILCRLSKNRRVTLQEFKGKTLVSIREYYIKDGKEMPSSKGMSMTVEQWETFSKSVPAIEDAIRTLGESD

SEQ ID NO: 11793 - DNA, 615 bp, Triticum aestivum
  misc_feature (1)..(615): Ceres Seq. ID no. 15173484
gcgaggcaggatgctgctatgtcaaggtcagcatggatggggccccatacctgaggaaggtcgatcttaagacctactccagctatgacaacctttccctggagctggagaagatgttcagctgcttcatcactggcaaaagcagttcctgcaaaacatcgacgagagacaggctcactgatggttctagggctgatgctcttcaggaccaagagtatgtacttacctatgaggacaaggatgctgactggatgcttgttggtgatcttccttgggacttgtttaccactacttgtcggaaactgagaatcatgagaggctctgatgctgctggaatggccccaagatagctggaaccgatcggccagaacaaacaagcgtctgtccgtcctggcctctcctcctcctgaagtcttgtgtctgaatcacgcaagtgtggaattttgagttaacgctgcaaggcgccgctgaagggtgcgatggttgtctcaactctctgaaagtgtctgcgctgctgccagtttatctatctacgtgtgtagtggaatatgtgcgtcctactgtaaaacaatccgtttttgacctcgccgttgtagatggtcccttttggttcat

SEQ ID NO: 11794 - protein, 115 aa, Triticum aestivum
  peptide (1)..(115): Ceres Seq. ID no. 15173485
  misc_feature (1)..(115): Pfam Name: Pfam Description:  AUX/IAA family
  misc_feature (1)..(115): NCBI GI NO: 34911088 NR Description: OJ1117_G01.11
  misc_feature (3)..(115): NCBI GI NO: 20257219 NR Description: auxin-regulated protein [Zinnia elegans]
  misc_feature (1)..(115): NCBI GI NO: 15235556 NR Description: AUX/IAA family [Arabidopsis thaliana]
  misc_feature (3)..(115): NCBI GI NO: 15227275 NR Description: auxin-responsive protein IAA8
  misc_feature (6)..(115): NCBI GI NO: 16610193 NR Description: IAA9 protein [Nicotiana tabacum]
  misc_feature (6)..(115): NCBI GI NO: 25989504 NR Description: Aux/IAA protein [Solanum tuberosum]
  misc_feature (3)..(115): NCBI GI NO: 20269051 NR Description: aux/IAA protein
  misc_feature (3)..(115): NCBI GI NO: 7442237 NR Description: GH1 protein - soybean (fragment)
  misc_feature (3)..(115): NCBI GI NO: 29465672 NR Description: Aux/IAA protein [Vitis vinifera]
  misc_feature (2)..(115): NCBI GI NO: 6136832 NR Description: Aux/IAA protein [Cucumis sativus]
EAGCCYVKVSMDGAPYLRKVDLKTYSSYDNLSLELEKMFSCFITGKSSSCKTSTRDRLTDGSRADALQDQEYVLTYEDKDADWMLVGDLPWDLFTTTCRKLRIMRGSDAAGMAPR

SEQ ID NO: 11795 - protein, 105 aa, Triticum aestivum
  peptide (1)..(105): Ceres Seq. ID no. 15173486
  misc_feature (1)..(105): Pfam Name: Pfam Description:  AUX/IAA family
  misc_feature (1)..(105): NCBI GI NO: 34911088 NR Description: OJ1117_G01.11
  misc_feature (1)..(105): NCBI GI NO: 20257219 NR Description: auxin-regulated protein [Zinnia elegans]
  misc_feature (1)..(105): NCBI GI NO: 15235556 NR Description: AUX/IAA family [Arabidopsis thaliana]
  misc_feature (1)..(105): NCBI GI NO: 15227275 NR Description: auxin-responsive protein IAA8
  misc_feature (1)..(105): NCBI GI NO: 16610193 NR Description: IAA9 protein [Nicotiana tabacum]
  misc_feature (1)..(105): NCBI GI NO: 25989504 NR Description: Aux/IAA protein [Solanum tuberosum]
  misc_feature (1)..(105): NCBI GI NO: 20269051 NR Description: aux/IAA protein
  misc_feature (1)..(105): NCBI GI NO: 7442237 NR Description: GH1 protein - soybean (fragment)
  misc_feature (1)..(105): NCBI GI NO: 29465672 NR Description: Aux/IAA protein [Vitis vinifera]
  misc_feature (1)..(105): NCBI GI NO: 6136832 NR Description: Aux/IAA protein [Cucumis sativus]
MDGAPYLRKVDLKTYSSYDNLSLELEKMFSCFITGKSSSCKTSTRDRLTDGSRADALQDQEYVLTYEDKDADWMLVGDLPWDLFTTTCRKLRIMRGSDAAGMAPR

SEQ ID NO: 11796 - protein, 78 aa, Triticum aestivum
  peptide (1)..(78): Ceres Seq. ID no. 15173487
  misc_feature (1)..(78): Pfam Name: Pfam Description:  AUX/IAA family
  misc_feature (1)..(78): NCBI GI NO: 34911088 NR Description: OJ1117_G01.11
  misc_feature (1)..(78): NCBI GI NO: 20257219 NR Description: auxin-regulated protein [Zinnia elegans]
  misc_feature (1)..(78): NCBI GI NO: 15235556 NR Description: AUX/IAA family [Arabidopsis thaliana]
  misc_feature (1)..(78): NCBI GI NO: 15227275 NR Description: auxin-responsive protein IAA8
  misc_feature (1)..(78): NCBI GI NO: 16610193 NR Description: IAA9 protein [Nicotiana tabacum]
  misc_feature (1)..(78): NCBI GI NO: 25989504 NR Description: Aux/IAA protein [Solanum tuberosum]
  misc_feature (1)..(78): NCBI GI NO: 20269051 NR Description: aux/IAA protein
  misc_feature (1)..(78): NCBI GI NO: 7442237 NR Description: GH1 protein - soybean (fragment)
  misc_feature (1)..(78): NCBI GI NO: 29465672 NR Description: Aux/IAA protein [Vitis vinifera]
  misc_feature (1)..(78): NCBI GI NO: 6136832 NR Description: Aux/IAA protein [Cucumis sativus]
MFSCFITGKSSSCKTSTRDRLTDGSRADALQDQEYVLTYEDKDADWMLVGDLPWDLFTTTCRKLRIMRGSDAAGMAPR

SEQ ID NO: 11797 - DNA, 905 bp, Triticum aestivum
  misc_feature (1)..(905): Ceres Seq. ID no. 15173417
acgactccatcgcggagacaaccaaacaacctcgtacagcacaggcgatcgatcggcgcggccatggagaagccgccgatcccgagcatcatctccaccgtcacctactgctgcggggcgtgcgggtacgacctgaggctgagctcgctggcgcgggacacggcgggcggcgctggcgcgaggcggcggtgcgtgggcgcggcggaggtggtgttcgacgccatcgacgacgcgcgcttcggccacctggaggagttccggtggctggacgtgcgcgcctgcctccccttctcgcgccgcacgcgcctgctctgccgcaagtgcggcgcccgcctcggctacggctacgacgacaccgccgccgccgaccgcccgccgcgctaccacatcaagatccgggccctccagcccgcccccgatcccgcctcggaccacgcggcgccgtccgatccgtgatctgagatcctgccgtattctttgattgcctgtgcatgcagccgcatctgtctctctctcctttcaatcgaatctcctccaaagtcgctcgcttggacccgaagcaaggaatgaaacagactggttgattgatcgggatccgattttgctttctgatatttttaagcggaattattggtcttgacttggttgcgttgtggaactgtagaagtcaaaagttgtgtactgttccagtctgaacttccaatgctggtggcgacactgatcgtgcaagggggaggatcgccagcagcagctttcaaccatgcatcgtctctttgattcaaaggatcttcataggatttttgaaggattagaatccttaggaatgtttcctacgttggtcgtttgattcgtaggattgaatcttgtagaatttttttctaaggatttatttgtactacatttcg

SEQ ID NO: 11798 - protein, 152 aa, Triticum aestivum
  peptide (1)..(152): Ceres Seq. ID no. 15173418
DSIAETTKQPRTAQAIDRRGHGEAADPEHHLHRHLLLRGVRVRPEAELAGAGHGGRRWREAAVRGRGGGGVRRHRRRALRPPGGVPVAGRARLPPLLAPHAPALPQVRRPPRLRLRRHRRRRPPAALPHQDPGPPARPRSRLGPRGAVRSVI

SEQ ID NO: 11799 - protein, 151 aa, Triticum aestivum
  peptide (1)..(151): Ceres Seq. ID no. 15173419
  misc_feature (23)..(125): NCBI GI NO: 34908010 NR Description: P0460C04.15
  misc_feature (34)..(137): NCBI GI NO: 15236464 NR Description: expressed protein [Arabidopsis thaliana]
TTPSRRQPNNLVQHRRSIGAAMEKPPIPSIISTVTYCCGACGYDLRLSSLARDTAGGAGARRRCVGAAEVVFDAIDDARFGHLEEFRWLDVRACLPFSRRTRLLCRKCGARLGYGYDDTAAADRPPRYHIKIRALQPAPDPASDHAAPSDP

SEQ ID NO: 11800 - protein, 130 aa, Triticum aestivum
  peptide (1)..(130): Ceres Seq. ID no. 15173420
  misc_feature (2)..(104): NCBI GI NO: 34908010 NR Description: P0460C04.15
  misc_feature (13)..(116): NCBI GI NO: 15236464 NR Description: expressed protein [Arabidopsis thaliana]
MEKPPIPSIISTVTYCCGACGYDLRLSSLARDTAGGAGARRRCVGAAEVVFDAIDDARFGHLEEFRWLDVRACLPFSRRTRLLCRKCGARLGYGYDDTAAADRPPRYHIKIRALQPAPDPASDHAAPSDP

SEQ ID NO: 11801 - DNA, 1086 bp, Triticum aestivum
  misc_feature (1)..(1086): Ceres Seq. ID no. 15173410
gcattgtcgcatcgagttgcacacccactgcctgcacacgtctacgtacaccatggcagccatgcagagacttgtgctccttctgtccgtggcgatcgcggcgtcggcgcagggcccggcggtggcgcccgcggcgccgacgacgcccacggccccggcggcgcccgctccggcggccggcacgacgaacatcacgggggtgctggccaaggccgggcagttcaacaccttcatccggctgctcaagtcgacgggcgtggcggcgcagatcgacaaccagctcaacaacagcttcggcagcggcatgacggtgttcgcgcccaccgacaacgccttcacctcgctcgcctccggcacgctcaactcgctgtccgacagccagaagaacgcgctcatccagtaccacgtcctctccaccgccatccccatgtcgcagttcgacaccgtcagcaacccgctccgcacgcaggccggcagcacctcccccgcccagtacccgctcaacgtcaccgccgagggccagcaggtcaacatcaccaccggcgtcgtcaacgccaccgtcgacaacacgctctacaccggcgaccagctcgtcgtctaccaggtcaacaaggtgctcctgcccatggccatcgccggcacggccgcacccgcgcccgcgccgctcgcgcccaccaagaccaaggggaagacgcccacgtcgacggtcgccgacgcgcccgaggccgaagcgtcgacggacacgtcgctcgcggcgccggcacgggtggtcacactcacaggaggtggtgtcgtcgcggtggttcacgtgcttgccctggcctgcgtctggtgggggccgtgacagcgccgcgcccgatcagagtgtgagccccaacctgaggtctagatccatgcatcacaatctttttttgctcactttcttttcaaaggtgttggtctttttcgtttgatttgttctttttatttcagctcatttttatacctctgtaattgctagggacatgtaaagtgaaatgtactattacgggagtcacatttttatgtaatgttgttactaaataaatatacatatttttatagtgc

SEQ ID NO: 11802 - protein, 289 aa, Triticum aestivum
  peptide (1)..(289): Ceres Seq. ID no. 15173411
  misc_feature (79)..(189): Pfam Name: Pfam Description:  Sperm histone P2
ALSHRVAHPLPAHVYVHHGSHAETCAPSVRGDRGVGAGPGGGARGADDAHGPGGARSGGRHDEHHGGAGQGRAVQHLHPAAQVDGRGGADRQPAQQQLRQRHDGVRAHRQRLHLARLRHAQLAVRQPEERAHPVPRPLHRHPHVAVRHRQQPAPHAGRQHLPRPVPAQRHRRGPAGQHHHRRRQRHRRQHALHRRPARRLPGQQGAPAHGHRRHGRTRARAARAHQDQGEDAHVDGRRRARGRSVDGHVARGAGTGGHTHRRWCRRGGSRACPGLRLVGAVTAPRPIRV

SEQ ID NO: 11803 - protein, 280 aa, Triticum aestivum
  peptide (1)..(280): Ceres Seq. ID no. 15173412
  misc_feature (61)..(208): Pfam Name: Pfam Description:  Fasciclin domain
  misc_feature (30)..(279): NCBI GI NO: 34896012 NR Description: EST D25138
  misc_feature (47)..(273): NCBI GI NO: 30841338 NR Description: arabinogalactan protein [Gossypium hirsutum]
  misc_feature (45)..(277): NCBI GI NO: 21553523 NR Description: arabinogalactan protein-like
  misc_feature (45)..(277): NCBI GI NO: 15242651 NR Description: fasciclin-like arabinogalactan-protein (FLA11)
  misc_feature (24)..(251): NCBI GI NO: 15239344 NR Description: fasciclin-like arabinogalactan-protein (FLA12)
  misc_feature (24)..(251): NCBI GI NO: 21553590 NR Description: arabinogalactan protein-like
  misc_feature (24)..(230): NCBI GI NO: 15294288 NR Description: AT5g60490/muf9_140 [Arabidopsis thaliana]
  misc_feature (18)..(271): NCBI GI NO: 34910950 NR Description: putative arabinogalactan-like protein
  misc_feature (14)..(242): NCBI GI NO: 14190409 NR Description: AT3g60900/T4C21_310 [Arabidopsis thaliana]
  misc_feature (14)..(242): NCBI GI NO: 15232973 NR Description: fasciclin-like arabinogalactan-protein (FLA10)
HCRIELHTHCLHTSTYTMAAMQRLVLLLSVAIAASAQGPAVAPAAPTTPTAPAAPAPAAGTTNITGVLAKAGQFNTFIRLLKSTGVAAQIDNQLNNSFGSGMTVFAPTDNAFTSLASGTLNSLSDSQKNALIQYHVLSTAIPMSQFDTVSNPLRTQAGSTSPAQYPLNVTAEGQQVNITTGVVNATVDNTLYTGDQLVVYQVNKVLLPMAIAGTAAPAPAPLAPTKTKGKTPTSTVADAPEAEASTDTSLAAPARVVTLTGGGVVAVVHVLALACVWWGP

SEQ ID NO: 11804 - protein, 263 aa, Triticum aestivum
  peptide (1)..(263): Ceres Seq. ID no. 15173413
  misc_feature (44)..(191): Pfam Name: Pfam Description:  Fasciclin domain
  misc_feature (13)..(262): NCBI GI NO: 34896012 NR Description: EST D25138
  misc_feature (30)..(256): NCBI GI NO: 30841338 NR Description: arabinogalactan protein [Gossypium hirsutum]
  misc_feature (28)..(260): NCBI GI NO: 21553523 NR Description: arabinogalactan protein-like
  misc_feature (28)..(260): NCBI GI NO: 15242651 NR Description: fasciclin-like arabinogalactan-protein (FLA11)
  misc_feature (7)..(234): NCBI GI NO: 15239344 NR Description: fasciclin-like arabinogalactan-protein (FLA12)
  misc_feature (7)..(234): NCBI GI NO: 21553590 NR Description: arabinogalactan protein-like
  misc_feature (7)..(213): NCBI GI NO: 15294288 NR Description: AT5g60490/muf9_140 [Arabidopsis thaliana]
  misc_feature (1)..(254): NCBI GI NO: 34910950 NR Description: putative arabinogalactan-like protein
  misc_feature (1)..(225): NCBI GI NO: 14190409 NR Description: AT3g60900/T4C21_310 [Arabidopsis thaliana]
  misc_feature (1)..(225): NCBI GI NO: 15232973 NR Description: fasciclin-like arabinogalactan-protein (FLA10)
MAAMQRLVLLLSVAIAASAQGPAVAPAAPTTPTAPAAPAPAAGTTNITGVLAKAGQFNTFIRLLKSTGVAAQIDNQLNNSFGSGMTVFAPTDNAFTSLASGTLNSLSDSQKNALIQYHVLSTAIPMSQFDTVSNPLRTQAGSTSPAQYPLNVTAEGQQVNITTGVVNATVDNTLYTGDQLVVYQVNKVLLPMAIAGTAAPAPAPLAPTKTKGKTPTSTVADAPEAEASTDTSLAAPARVVTLTGGGVVAVVHVLALACVWWGP

SEQ ID NO: 11805 - DNA, 728 bp, Triticum aestivum
  misc_feature (1)..(728): Ceres Seq. ID no. 15173047
gcgtgtccccattccgatccccctcccggcgccgcctccagcctagggtttcctcccgccgcccgtccgccccacccgccgccatggcccgccgcagcggaggaggaaggtcttcccgccctgctccacgtgctgctccagtgagaaacccaccagcgccagcccgtccagctcctccacctgctaccacccagagcagcggtggtggtatcatgagcgggattgggtccaccattgctcagggcatggctttcggtactggaagtgccatggcgcacagggctgttgatgctgtgatgggtccccgtaccattcagcatgagactgttgtcggtgaggctgctgcatctatgactccaatggacaatgctgctgatgacaagtgtggcaacccttccaaggccttccaagattgcatcaaccactacggaagcgatatcagcaagtgccagttctaccttgacatgctgaacgagtgccgccgtggaggagcaactctttaagctactatctttgcttgattggggcttaattgggcagaacctgttttcagtcatgatgatgatgatatatatctcctaaataattcattggcaatattatgaacctatgccacagcttgtgtctattacctaccctagttcgtggtctctgttgtcccgggagtatttccttgtattgatgttggaattaccttcatggcagtgggtttataaatatggagtttg

SEQ ID NO: 11806 - protein, 166 aa, Triticum aestivum
  peptide (1)..(166): Ceres Seq. ID no. 15173048
  misc_feature (28)..(165): NCBI GI NO: 13174237 NR Description: unknown protein [Oryza sativa]
  misc_feature (28)..(166): NCBI GI NO: 15237688 NR Description: expressed protein [Arabidopsis thaliana]
  misc_feature (28)..(166): NCBI GI NO: 15242455 NR Description: expressed protein [Arabidopsis thaliana]
  misc_feature (38)..(161): NCBI GI NO: 23509031 NR Description: hypothetical protein, conserved
  misc_feature (9)..(160): NCBI GI NO: 40741607 NR Description: hypothetical protein AN4755.2
VSPFRSPSRRRLQPRVSSRRPSAPPAAMARRSGGGRSSRPAPRAAPVRNPPAPARPAPPPATTQSSGGGIMSGIGSTIAQGMAFGTGSAMAHRAVDAVMGPRTIQHETVVGEAAASMTPMDNAADDKCGNPSKAFQDCINHYGSDISKCQFYLDMLNECRRGGATL

SEQ ID NO: 11807 - protein, 139 aa, Triticum aestivum
  peptide (1)..(139): Ceres Seq. ID no. 15173049
  misc_feature (1)..(138): NCBI GI NO: 13174237 NR Description: unknown protein [Oryza sativa]
  misc_feature (1)..(139): NCBI GI NO: 15237688 NR Description: expressed protein [Arabidopsis thaliana]
  misc_feature (1)..(139): NCBI GI NO: 15242455 NR Description: expressed protein [Arabidopsis thaliana]
  misc_feature (11)..(134): NCBI GI NO: 23509031 NR Description: hypothetical protein, conserved
  misc_feature (1)..(133): NCBI GI NO: 40741607 NR Description: hypothetical protein AN4755.2
MARRSGGGRSSRPAPRAAPVRNPPAPARPAPPPATTQSSGGGIMSGIGSTIAQGMAFGTGSAMAHRAVDAVMGPRTIQHETVVGEAAASMTPMDNAADDKCGNPSKAFQDCINHYGSDISKCQFYLDMLNECRRGGATL

SEQ ID NO: 11808 - protein, 96 aa, Triticum aestivum
  peptide (1)..(96): Ceres Seq. ID no. 15173050
  misc_feature (1)..(95): NCBI GI NO: 13174237 NR Description: unknown protein [Oryza sativa]
  misc_feature (1)..(96): NCBI GI NO: 15237688 NR Description: expressed protein [Arabidopsis thaliana]
  misc_feature (1)..(96): NCBI GI NO: 15242455 NR Description: expressed protein [Arabidopsis thaliana]
  misc_feature (1)..(91): NCBI GI NO: 23509031 NR Description: hypothetical protein, conserved
  misc_feature (1)..(90): NCBI GI NO: 40741607 NR Description: hypothetical protein AN4755.2
MSGIGSTIAQGMAFGTGSAMAHRAVDAVMGPRTIQHETVVGEAAASMTPMDNAADDKCGNPSKAFQDCINHYGSDISKCQFYLDMLNECRRGGATL

SEQ ID NO: 11809 - DNA, 534 bp, Triticum aestivum
  misc_feature (1)..(534): Ceres Seq. ID no. 15173382
acagctaccaccactctatcagtctatcccgttggttctacttggcgtcagcacggcacctgccttccaagttcatccaccatgggcgactcatcctcggcttcctacatcagaatggtgcaccatctgatagagaagtgcatttgcttcaacctcaacaaggaggggtgcatggaggccctggagaagcatgccaagatcaacccggtcgtcactgccactgtgtggaaagagctggagaaggagaacaaggagttcttcgagtcttacaacagggaccgcgtggagcggaacatcgaggcggcgacgatggagcggatccagaagatgctctccgacgcggctgcctccaagacctccgacgacgatgagggctagaaggctgctgcttatgtccaagctcatgcgcatgcatcacctctagctaattaattgtatgaatagcatgtcttccgttaattggatccattatgtctaggaggatcgaatttattaattgcacctatctcataacagaccagtagcttgaaaccg

SEQ ID NO: 11810 - protein, 125 aa, Triticum aestivum
  peptide (1)..(125): Ceres Seq. ID no. 15173383
  misc_feature (28)..(122): NCBI GI NO: 15233218 NR Description: expressed protein [Arabidopsis thaliana]
  misc_feature (29)..(123): NCBI GI NO: 34908092 NR Description: P0031D11.2
  misc_feature (28)..(112): NCBI GI NO: 29028782 NR Description: At5g02580 [Arabidopsis thaliana]
  misc_feature (28)..(112): NCBI GI NO: 21553770 NR Description: unknown [Arabidopsis thaliana]
  misc_feature (28)..(112): NCBI GI NO: 15228557 NR Description: hypothetical protein [Arabidopsis thaliana]
  misc_feature (52)..(112): NCBI GI NO: 11358211 NR Description: hypothetical protein T22P11
  misc_feature (28)..(74): NCBI GI NO: 30679685 NR Description: expressed protein [Arabidopsis thaliana]
  misc_feature (24)..(90): NCBI GI NO: 15237627 NR Description: hypothetical protein [Arabidopsis thaliana]
  misc_feature (24)..(90): NCBI GI NO: 18398808 NR Description: expressed protein [Arabidopsis thaliana]
  misc_feature (24)..(90): NCBI GI NO: 6056200 NR Description: unknown protein [Arabidopsis thaliana]
TATTTLSVYPVGSTWRQHGTCLPSSSTMGDSSSASYIRMVHHLIEKCICFNLNKEGCMEALEKHAKINPVVTATVWKELEKENKEFFESYNRDRVERNIEAATMERIQKMLSDAAASKTSDDDEG

SEQ ID NO: 11811 - protein, 122 aa, Triticum aestivum
  peptide (1)..(122): Ceres Seq. ID no. 15173384
SYHHSISLSRWFYLASARHLPSKFIHHGRLILGFLHQNGAPSDREVHLLQPQQGGVHGGPGEACQDQPGRHCHCVERAGEGEQGVLRVLQQGPRGAEHRGGDDGADPEDALRRGCLQDLRRR

SEQ ID NO: 11812 - protein, 98 aa, Triticum aestivum
  peptide (1)..(98): Ceres Seq. ID no. 15173385
  misc_feature (1)..(95): NCBI GI NO: 15233218 NR Description: expressed protein [Arabidopsis thaliana]
  misc_feature (2)..(96): NCBI GI NO: 34908092 NR Description: P0031D11.2
  misc_feature (1)..(85): NCBI GI NO: 29028782 NR Description: At5g02580 [Arabidopsis thaliana]
  misc_feature (1)..(85): NCBI GI NO: 21553770 NR Description: unknown [Arabidopsis thaliana]
  misc_feature (1)..(85): NCBI GI NO: 15228557 NR Description: hypothetical protein [Arabidopsis thaliana]
  misc_feature (25)..(85): NCBI GI NO: 11358211 NR Description: hypothetical protein T22P11
  misc_feature (1)..(47): NCBI GI NO: 30679685 NR Description: expressed protein [Arabidopsis thaliana]
  misc_feature (1)..(63): NCBI GI NO: 15237627 NR Description: hypothetical protein [Arabidopsis thaliana]
  misc_feature (1)..(63): NCBI GI NO: 18398808 NR Description: expressed protein [Arabidopsis thaliana]
  misc_feature (1)..(63): NCBI GI NO: 6056200 NR Description: unknown protein [Arabidopsis thaliana]
MGDSSSASYIRMVHHLIEKCICFNLNKEGCMEALEKHAKINPVVTATVWKELEKENKEFFESYNRDRVERNIEAATMERIQKMLSDAAASKTSDDDEG

SEQ ID NO: 11813 - DNA, 688 bp, Triticum aestivum
  misc_feature (1)..(688): Ceres Seq. ID no. 15173348
cttgctagatactacttgaacaacttcgcagatgggacgaagcaggatgccatggatcttcttcaaggactttacatcacatctgttagtcgagacatggcacctccaacaaaagcaggatttgtagagagctatgcgtccgcccgccttgcttttgcattggtttccggagcttttatgttcatgatgatgtcactgagacatgctcggcatgatgctcgtcatttattgctgtcacttctctgggctggtctttgcatcgggatcacacactttgtgagaagcaatggccgggtattcacgaaccggccccgtgcccacaagtcgtcacacccttgatggaaagcaggcggggtgatagattatcattcgttcatcaaacaatggcagtactccacttttttctatgtagagatgtaatttgtgtccatccctttctcctgaagattgtgttctattatctatctatattctttgttcttcaagtccatatgcataatcgatctttgaccagtaaataaacagctgttgctagttgcaacaatcacattttccagtaccaggacatagttacagcttcccgcgataaaaggatatagagatacggctttccggtgtatttatgccaaagtggcgaagtgatgttgtgcagagcttttcagttatgccaattgagatttgttgttcc

SEQ ID NO: 11814 - protein, 112 aa, Triticum aestivum
  peptide (1)..(112): Ceres Seq. ID no. 15173349
  misc_feature (1)..(108): NCBI GI NO: 30693470 NR Description: expressed protein [Arabidopsis thaliana]
  misc_feature (1)..(108): NCBI GI NO: 30840665 NR Description: SAC1-like protein AtSAC1b [Arabidopsis thaliana]
  misc_feature (1)..(108): NCBI GI NO: 10177117 NR Description: emb|CAB63010
  misc_feature (1)..(71): NCBI GI NO: 11281506 NR Description: hypothetical protein F26O13
  misc_feature (1)..(66): NCBI GI NO: 15239234 NR Description: hypothetical protein [Arabidopsis thaliana]
  misc_feature (1)..(105): NCBI GI NO: 30693541 NR Description: transmembrane protein G5p (AtG5) -related
LARYYLNNFADGTKQDAMDLLQGLYITSVSRDMAPPTKAGFVESYASARLAFALVSGAFMFMMMSLRHARHDARHLLLSLLWAGLCIGITHFVRSNGRVFTNRPRAHKSSHP

SEQ ID NO: 11815 - protein, 95 aa, Triticum aestivum
  peptide (1)..(95): Ceres Seq. ID no. 15173350
  misc_feature (1)..(91): NCBI GI NO: 30693470 NR Description: expressed protein [Arabidopsis thaliana]
  misc_feature (1)..(91): NCBI GI NO: 30840665 NR Description: SAC1-like protein AtSAC1b [Arabidopsis thaliana]
  misc_feature (1)..(91): NCBI GI NO: 10177117 NR Description: emb|CAB63010
  misc_feature (1)..(54): NCBI GI NO: 11281506 NR Description: hypothetical protein F26O13
  misc_feature (1)..(49): NCBI GI NO: 15239234 NR Description: hypothetical protein [Arabidopsis thaliana]
  misc_feature (1)..(88): NCBI GI NO: 30693541 NR Description: transmembrane protein G5p (AtG5) -related
MDLLQGLYITSVSRDMAPPTKAGFVESYASARLAFALVSGAFMFMMMSLRHARHDARHLLLSLLWAGLCIGITHFVRSNGRVFTNRPRAHKSSHP

SEQ ID NO: 11816 - protein, 80 aa, Triticum aestivum
  peptide (1)..(80): Ceres Seq. ID no. 15173351
  misc_feature (1)..(76): NCBI GI NO: 30693470 NR Description: expressed protein [Arabidopsis thaliana]
  misc_feature (1)..(76): NCBI GI NO: 30840665 NR Description: SAC1-like protein AtSAC1b [Arabidopsis thaliana]
  misc_feature (1)..(76): NCBI GI NO: 10177117 NR Description: emb|CAB63010
  misc_feature (1)..(39): NCBI GI NO: 11281506 NR Description: hypothetical protein F26O13
  misc_feature (1)..(34): NCBI GI NO: 15239234 NR Description: hypothetical protein [Arabidopsis thaliana]
  misc_feature (1)..(73): NCBI GI NO: 30693541 NR Description: transmembrane protein G5p (AtG5) -related
MAPPTKAGFVESYASARLAFALVSGAFMFMMMSLRHARHDARHLLLSLLWAGLCIGITHFVRSNGRVFTNRPRAHKSSHP

SEQ ID NO: 11817 - DNA, 818 bp, Triticum aestivum
  misc_feature (1)..(818): Ceres Seq. ID no. 15173284
actccgccacacgagtgagcagcatacgcgcgacagacgatcccgaacccagagagggggaacacggagccggccgcggagggggagcccagccaagccagccagagtgaacaaccgtcccaaccaccgacgggcgggcatgagggccaccgagatgttgaccgccgcggcgggggctgccgccgggacgacgccctccacggcctcggtggccggcctggccggggccagcgggggcgtccccgccgcgggcgccggcgggaacttccccctcggcgccgccctcctcgccttcgccttcgccaacctcgtcaacgtcctctccatctggttaaaggagaagaagtgggatgcaaggaagtttcttacatcttccggagttatttcatctctttctgcggccgtggcaagtttggctgtggcggttggccaacaagaaggcggagatagctctgtttttgcccttgcattggtttttgctgccgttgtaatgtatgatgcatcaggagttaggtttcacacaggccgccaagctgcgttgttaaatcaaatagtttctgatttatcaccggaacatccaattatctctaccttccggccgcttcgggaacctcttggacacagtccatttcaggtttttgccggagcccttgttggttgtacagtagcgtatttaatggggaattcttctgtatgagaaatactgtagttggcaatttgccttatactcagattacactacttttatacgaggaacattttttgtgcaaagtctactttgtatctctggccatataaagtgcccttctgttgaactg

SEQ ID NO: 11818 - protein, 231 aa, Triticum aestivum
  peptide (1)..(231): Ceres Seq. ID no. 15173285
  misc_feature (88)..(229): Pfam Name: Pfam Description:  Divergent PAP2 family
  misc_feature (66)..(230): NCBI GI NO: 30686309 NR Description: expressed protein [Arabidopsis thaliana]
  misc_feature (66)..(213): NCBI GI NO: 11994397 NR Description: gb|AAB61516
  misc_feature (82)..(226): NCBI GI NO: 38344227 NR Description: OJ991113_30.3
  misc_feature (88)..(223): NCBI GI NO: 15220480 NR Description: F12A21.27 [Arabidopsis thaliana]
  misc_feature (88)..(223): NCBI GI NO: 18395459 NR Description: expressed protein [Arabidopsis thaliana]
  misc_feature (88)..(223): NCBI GI NO: 21555270 NR Description: unknown [Arabidopsis thaliana]
  misc_feature (82)..(227): NCBI GI NO: 29150195 NR Description: putative protein
  misc_feature (88)..(212): NCBI GI NO: 12324675 NR Description: unknown protein [Arabidopsis thaliana]
  misc_feature (88)..(212): NCBI GI NO: 9743358 NR Description: F21J9.1 [Arabidopsis thaliana]
  misc_feature (88)..(212): NCBI GI NO: 26449729 NR Description: unknown protein [Arabidopsis thaliana]
LRHTSEQHTRDRRSRTQRGGTRSRPRRGSPAKPARVNNRPNHRRAGMRATEMLTAAAGAAAGTTPSTASVAGLAGASGGVPAAGAGGNFPLGAALLAFAFANLVNVLSIWLKEKKWDARKFLTSSGVISSLSAAVASLAVAVGQQEGGDSSVFALALVFAAVVMYDASGVRFHTGRQAALLNQIVSDLSPEHPIISTFRPLREPLGHSPFQVFAGALVGCTVAYLMGNSSV

SEQ ID NO: 11819 - protein, 185 aa, Triticum aestivum
  peptide (1)..(185): Ceres Seq. ID no. 15173286
  misc_feature (42)..(183): Pfam Name: Pfam Description:  Divergent PAP2 family
  misc_feature (20)..(184): NCBI GI NO: 30686309 NR Description: expressed protein [Arabidopsis thaliana]
  misc_feature (20)..(167): NCBI GI NO: 11994397 NR Description: gb|AAB61516
  misc_feature (36)..(180): NCBI GI NO: 38344227 NR Description: OJ991113_30.3
  misc_feature (42)..(177): NCBI GI NO: 15220480 NR Description: F12A21.27 [Arabidopsis thaliana]
  misc_feature (42)..(177): NCBI GI NO: 18395459 NR Description: expressed protein [Arabidopsis thaliana]
  misc_feature (42)..(177): NCBI GI NO: 21555270 NR Description: unknown [Arabidopsis thaliana]
  misc_feature (36)..(181): NCBI GI NO: 29150195 NR Description: putative protein
  misc_feature (42)..(166): NCBI GI NO: 12324675 NR Description: unknown protein [Arabidopsis thaliana]
  misc_feature (42)..(166): NCBI GI NO: 9743358 NR Description: F21J9.1 [Arabidopsis thaliana]
  misc_feature (42)..(166): NCBI GI NO: 26449729 NR Description: unknown protein [Arabidopsis thaliana]
MRATEMLTAAAGAAAGTTPSTASVAGLAGASGGVPAAGAGGNFPLGAALLAFAFANLVNVLSIWLKEKKWDARKFLTSSGVISSLSAAVASLAVAVGQQEGGDSSVFALALVFAAVVMYDASGVRFHTGRQAALLNQIVSDLSPEHPIISTFRPLREPLGHSPFQVFAGALVGCTVAYLMGNSSV

SEQ ID NO: 11820 - protein, 180 aa, Triticum aestivum
  peptide (1)..(180): Ceres Seq. ID no. 15173287
  misc_feature (37)..(178): Pfam Name: Pfam Description:  Divergent PAP2 family
  misc_feature (15)..(179): NCBI GI NO: 30686309 NR Description: expressed protein [Arabidopsis thaliana]
  misc_feature (15)..(162): NCBI GI NO: 11994397 NR Description: gb|AAB61516
  misc_feature (31)..(175): NCBI GI NO: 38344227 NR Description: OJ991113_30.3
  misc_feature (37)..(172): NCBI GI NO: 15220480 NR Description: F12A21.27 [Arabidopsis thaliana]
  misc_feature (37)..(172): NCBI GI NO: 18395459 NR Description: expressed protein [Arabidopsis thaliana]
  misc_feature (37)..(172): NCBI GI NO: 21555270 NR Description: unknown [Arabidopsis thaliana]
  misc_feature (31)..(176): NCBI GI NO: 29150195 NR Description: putative protein
  misc_feature (37)..(161): NCBI GI NO: 12324675 NR Description: unknown protein [Arabidopsis thaliana]
  misc_feature (37)..(161): NCBI GI NO: 9743358 NR Description: F21J9.1 [Arabidopsis thaliana]
  misc_feature (37)..(161): NCBI GI NO: 26449729 NR Description: unknown protein [Arabidopsis thaliana]
MLTAAAGAAAGTTPSTASVAGLAGASGGVPAAGAGGNFPLGAALLAFAFANLVNVLSIWLKEKKWDARKFLTSSGVISSLSAAVASLAVAVGQQEGGDSSVFALALVFAAVVMYDASGVRFHTGRQAALLNQIVSDLSPEHPIISTFRPLREPLGHSPFQVFAGALVGCTVAYLMGNSSV

SEQ ID NO: 11821 - DNA, 733 bp, Triticum aestivum
  misc_feature (1)..(733): Ceres Seq. ID no. 15173921
caggtgtcaactgtaagataggagtggatataaatacaacatcagctgattcagagaaaactatgccctttttcatgtcaaaaggctggagagagaccctgtgtaaatgtggaacatgcaccaacttctatgcacaacgaggcattgcacatcttactgataaggaggactctattgaggaatatgagaagatagctaagcagaaaagggagaagaagttggagcagcaggaaggagctgaagctaacttcatcaattcacttaaccatgtccagaagatagagattctgagtggcatcaatgacatgaaaaatgagtttcaatcctttatggaatcctttgatccatcaaaaccagttacatctgatgatgtaaaatctattttcgagaatcttgctaggaagaagcagaggttatcctgagcttcagttgcttcaggccttgcttgagcgggtgagcctaatgccctgctgcttctacgccaaaatttccaactgttatctggccaccactgtcttggtgggtactgttaacttatgctgtggccaccatggcgtgtttatctactgtactgtaatgctagcttcgtcgtagttctgctagatgtttcaaagtcagctcgtgatagtgatccgagcgaccagtggagtgaacagcatgtttgttcctttggatcaaaactttgtggtgattcccattacccaaaaatgtgttctccattgcgctgcccttg

SEQ ID NO: 11822 - protein, 139 aa, Triticum aestivum
  peptide (1)..(139): Ceres Seq. ID no. 15173922
  misc_feature (4)..(138): NCBI GI NO: 17064724 NR Description: putative protein [Arabidopsis thaliana]
  misc_feature (4)..(138): NCBI GI NO: 22328893 NR Description: expressed protein [Arabidopsis thaliana]
  misc_feature (4)..(110): NCBI GI NO: 7487590 NR Description: hypothetical protein T32A16
  misc_feature (24)..(137): NCBI GI NO: 27882071 NR Description: Unknown (protein for MGC:55404) [Danio rerio]
  misc_feature (4)..(138): NCBI GI NO: 28175400 NR Description: Similar to RIKEN cDNA 5730410I19 gene
  misc_feature (6)..(139): NCBI GI NO: 31202469 NR Description: ENSANGP00000011180 [Anopheles gambiae]
  misc_feature (29)..(137): NCBI GI NO: 30388577 NR Description: 5730410I19Rik protein [Mus musculus]
  misc_feature (29)..(137): NCBI GI NO: 37590093 NR Description: Unknown (protein for IMAGE:6812098) [Mus musculus]
  misc_feature (24)..(131): NCBI GI NO: 19921458 NR Description: CG15141-PA [Drosophila melanogaster]
  misc_feature (29)..(137): NCBI GI NO: 29789154 NR Description: RIKEN cDNA 5730410I19 [Mus musculus]
GVNCKIGVDINTTSADSEKTMPFFMSKGWRETLCKCGTCTNFYAQRGIAHLTDKEDSIEEYEKIAKQKREKKLEQQEGAEANFINSLNHVQKIEILSGINDMKNEFQSFMESFDPSKPVTSDDVKSIFENLARKKQRLS

SEQ ID NO: 11823 - protein, 119 aa, Triticum aestivum
  peptide (1)..(119): Ceres Seq. ID no. 15173923
  misc_feature (1)..(118): NCBI GI NO: 17064724 NR Description: putative protein [Arabidopsis thaliana]
  misc_feature (1)..(118): NCBI GI NO: 22328893 NR Description: expressed protein [Arabidopsis thaliana]
  misc_feature (1)..(90): NCBI GI NO: 7487590 NR Description: hypothetical protein T32A16
  misc_feature (4)..(117): NCBI GI NO: 27882071 NR Description: Unknown (protein for MGC:55404) [Danio rerio]
  misc_feature (1)..(118): NCBI GI NO: 28175400 NR Description: Similar to RIKEN cDNA 5730410I19 gene
  misc_feature (1)..(119): NCBI GI NO: 31202469 NR Description: ENSANGP00000011180 [Anopheles gambiae]
  misc_feature (9)..(117): NCBI GI NO: 30388577 NR Description: 5730410I19Rik protein [Mus musculus]
  misc_feature (9)..(117): NCBI GI NO: 37590093 NR Description: Unknown (protein for IMAGE:6812098) [Mus musculus]
  misc_feature (4)..(111): NCBI GI NO: 19921458 NR Description: CG15141-PA [Drosophila melanogaster]
  misc_feature (9)..(117): NCBI GI NO: 29789154 NR Description: RIKEN cDNA 5730410I19 [Mus musculus]
MPFFMSKGWRETLCKCGTCTNFYAQRGIAHLTDKEDSIEEYEKIAKQKREKKLEQQEGAEANFINSLNHVQKIEILSGINDMKNEFQSFMESFDPSKPVTSDDVKSIFENLARKKQRLS

SEQ ID NO: 11824 - protein, 115 aa, Triticum aestivum
  peptide (1)..(115): Ceres Seq. ID no. 15173924
  misc_feature (1)..(114): NCBI GI NO: 17064724 NR Description: putative protein [Arabidopsis thaliana]
  misc_feature (1)..(114): NCBI GI NO: 22328893 NR Description: expressed protein [Arabidopsis thaliana]
  misc_feature (1)..(86): NCBI GI NO: 7487590 NR Description: hypothetical protein T32A16
  misc_feature (1)..(113): NCBI GI NO: 27882071 NR Description: Unknown (protein for MGC:55404) [Danio rerio]
  misc_feature (1)..(114): NCBI GI NO: 28175400 NR Description: Similar to RIKEN cDNA 5730410I19 gene
  misc_feature (1)..(115): NCBI GI NO: 31202469 NR Description: ENSANGP00000011180 [Anopheles gambiae]
  misc_feature (5)..(113): NCBI GI NO: 30388577 NR Description: 5730410I19Rik protein [Mus musculus]
  misc_feature (5)..(113): NCBI GI NO: 37590093 NR Description: Unknown (protein for IMAGE:6812098) [Mus musculus]
  misc_feature (1)..(107): NCBI GI NO: 19921458 NR Description: CG15141-PA [Drosophila melanogaster]
  misc_feature (5)..(113): NCBI GI NO: 29789154 NR Description: RIKEN cDNA 5730410I19 [Mus musculus]
MSKGWRETLCKCGTCTNFYAQRGIAHLTDKEDSIEEYEKIAKQKREKKLEQQEGAEANFINSLNHVQKIEILSGINDMKNEFQSFMESFDPSKPVTSDDVKSIFENLARKKQRLS

SEQ ID NO: 11825 - DNA, 969 bp, Triticum aestivum
  misc_feature (1)..(969): Ceres Seq. ID no. 15173146
tcgcaggaaatactcttccgtcccccatctttgaaccttcctcctcctccgcgctgacctacccctcaccctcccctcccctcccctccccggcaacaaaccaggcccctcctacatagaggcaatccgttccggcctctcagcccgcagcagcaccccggccggagctcccgcgacgccgagccggacggacgggaggagccaccgccccgcagcacgcgcgcgctggtagggcgagggaggggaggggatcgatggcgaagctgtacgtgcaggcggtgcccccgccggatctgaacaagaacaccgagtggttcatgtacccgggggtctggaccacctacatcttcatcctcttcgtctcctggctcctcatcctctccatcttcggctgcacccccggcatggcctggacgctcgtcaacctcggccacttcgcgattacataccacttcttccactggaagaagggaactccatttgctgatgaccaggggatgtataatagattgacttggtgggagcaaatggacaacggcaagcagcttactcgcaacagaaaatttcttgttgtggttcctgtagtcctgtacttgatcgcttcgcacaccacagactatcaacatcctatgctctttttgaacaccattgcagtcacagtactggttgttgcgaaactaccgaacatgcacaaggtccggatttttggaatcaatgcgggtaactaagcggcagcgtcccagggtagacagcactcaatatcatgtttcatttgaatggctggatggtgttgcacctagttctgaattcgctcctcagagtaccagtgtgtagtgtttgagagctgttagtagatgacatgtgatcattgtacagagaaacgctaaaaggcctggaaaatgatgctgttttgcaactttgcccgacacacgttctgtagactctttatgctgctatatgttttgttgc

SEQ ID NO: 11826 - protein, 157 aa, Triticum aestivum
  peptide (1)..(157): Ceres Seq. ID no. 15173147
  misc_feature (14)..(154): Pfam Name: Pfam Description:  ORMDL family
  misc_feature (1)..(157): NCBI GI NO: 38344271 NR Description: OSJNBa0005N02.9
  misc_feature (1)..(154): NCBI GI NO: 18378814 NR Description: expressed protein [Arabidopsis thaliana]
  misc_feature (5)..(155): NCBI GI NO: 34394897 NR Description: putative ORMDL2
  misc_feature (4)..(154): NCBI GI NO: 15238262 NR Description: expressed protein [Arabidopsis thaliana]
  misc_feature (1)..(147): NCBI GI NO: 25513580 NR Description: F6F3.4 protein - Arabidopsis thaliana
  misc_feature (5)..(147): NCBI GI NO: 34901370 NR Description: OSJNBb0062P14.15
  misc_feature (15)..(150): NCBI GI NO: 6323382 NR Description: Homologous to ORM1.; Orm2p
  misc_feature (12)..(146): NCBI GI NO: 40745942 NR Description: hypothetical protein AN1933.2
  misc_feature (15)..(150): NCBI GI NO: 6321475 NR Description: Product of gene unknown; Orm1p
MAKLYVQAVPPPDLNKNTEWFMYPGVWTTYIFILFVSWLLILSIFGCTPGMAWTLVNLGHFAITYHFFHWKKGTPFADDQGMYNRLTWWEQMDNGKQLTRNRKFLVVVPVVLYLIASHTTDYQHPMLFLNTIAVTVLVVAKLPNMHKVRIFGINAGN

SEQ ID NO: 11827 - protein, 136 aa, Triticum aestivum
  peptide (1)..(136): Ceres Seq. ID no. 15173148
  misc_feature (1)..(133): Pfam Name: Pfam Description:  ORMDL family
  misc_feature (1)..(136): NCBI GI NO: 38344271 NR Description: OSJNBa0005N02.9
  misc_feature (1)..(133): NCBI GI NO: 18378814 NR Description: expressed protein [Arabidopsis thaliana]
  misc_feature (1)..(134): NCBI GI NO: 34394897 NR Description: putative ORMDL2
  misc_feature (1)..(133): NCBI GI NO: 15238262 NR Description: expressed protein [Arabidopsis thaliana]
  misc_feature (1)..(126): NCBI GI NO: 25513580 NR Description: F6F3.4 protein - Arabidopsis thaliana
  misc_feature (1)..(126): NCBI GI NO: 34901370 NR Description: OSJNBb0062P14.15
  misc_feature (1)..(129): NCBI GI NO: 6323382 NR Description: Homologous to ORM1.; Orm2p
  misc_feature (1)..(125): NCBI GI NO: 40745942 NR Description: hypothetical protein AN1933.2
  misc_feature (1)..(129): NCBI GI NO: 6321475 NR Description: Product of gene unknown; Orm1p
MYPGVWTTYIFILFVSWLLILSIFGCTPGMAWTLVNLGHFAITYHFFHWKKGTPFADDQGMYNRLTWWEQMDNGKQLTRNRKFLVVVPVVLYLIASHTTDYQHPMLFLNTIAVTVLVVAKLPNMHKVRIFGINAGN

SEQ ID NO: 11828 - protein, 107 aa, Triticum aestivum
  peptide (1)..(107): Ceres Seq. ID no. 15173149
  misc_feature (1)..(104): Pfam Name: Pfam Description:  ORMDL family
  misc_feature (1)..(107): NCBI GI NO: 38344271 NR Description: OSJNBa0005N02.9
  misc_feature (1)..(104): NCBI GI NO: 18378814 NR Description: expressed protein [Arabidopsis thaliana]
  misc_feature (1)..(105): NCBI GI NO: 34394897 NR Description: putative ORMDL2
  misc_feature (1)..(104): NCBI GI NO: 15238262 NR Description: expressed protein [Arabidopsis thaliana]
  misc_feature (1)..(97): NCBI GI NO: 25513580 NR Description: F6F3.4 protein - Arabidopsis thaliana
  misc_feature (1)..(97): NCBI GI NO: 34901370 NR Description: OSJNBb0062P14.15
  misc_feature (1)..(100): NCBI GI NO: 6323382 NR Description: Homologous to ORM1.; Orm2p
  misc_feature (1)..(96): NCBI GI NO: 40745942 NR Description: hypothetical protein AN1933.2
  misc_feature (1)..(100): NCBI GI NO: 6321475 NR Description: Product of gene unknown; Orm1p
MAWTLVNLGHFAITYHFFHWKKGTPFADDQGMYNRLTWWEQMDNGKQLTRNRKFLVVVPVVLYLIASHTTDYQHPMLFLNTIAVTVLVVAKLPNMHKVRIFGINAGN

SEQ ID NO: 11829 - DNA, 975 bp, Triticum aestivum
  misc_feature (1)..(975): Ceres Seq. ID no. 15173365
ctcaggtagcgagtcagtgacgcacgctctccgtgccacaccacgaccgcaccgttctacccgcttagctacccaagagaccggcgtccggcaatggagtcgcgggtgaagcccgggttcagcggcgcgggcagcctgtccggcagccggaggagctacatgggggcggcggcgcctagcaagccggcggtggacgggtgcggcgtggcactgcgcgtgttcatcctggcggcgacgctggtcgccgccgtggtgatgggcctggaccggcagacggccaccgtgcaggtcaccatcgccgacacgctgccgccgctgcaggtccccgtcacggccaagtggtcctactcctccgccttcgtgtacttcgtggtggcgaacgcgatggcgtgcgtcttctcggcggtggcgctggcggcgtgccgcagccggagcgcggtggtgccgctgatggtcggcgacctggtggtgcaggcgctcctgttctcggcggtgggcgcgtcggcggagttcggcatcctgggcgagcgcggcaactcccacgtgcgctggggcaaggtgtgccacgtctacagcagcttttgcgagcgcgccatggccgccgtcatcgtctccctcatcgccgccttcgccaacctcgtgcacctcatgttcgccatcctagacgtccacaaaaactcctcctactactagtaactagctcagccgctgctgatccatcgtgcacgcatcggagatgcccgatcgatgcatgcagatggtatacctgatttccgtgtgaactaacggtctcggctttagacgcgttggtttgatttaacggcttattgttgtgtcgatgcattttggcactgtaatgttagctattgatacaaatgtatggaggattttacttgttatgtactaatatcgacgtattggtcatcttttcagctgatttggcatgaactaatatggatggattggtaacttttg

SEQ ID NO: 11830 - protein, 199 aa, Triticum aestivum
  peptide (1)..(199): Ceres Seq. ID no. 15173366
  misc_feature (31)..(180): Pfam Name: DUF588 Pfam Description: Domain of unknown function
  misc_feature (1)..(199): NCBI GI NO: 34915110 NR Description: P0503E05.4
  misc_feature (35)..(194): NCBI GI NO: 21617994 NR Description: unknown [Arabidopsis thaliana]
  misc_feature (35)..(194): NCBI GI NO: 18414493 NR Description: expressed integral membrane protein common family
  misc_feature (35)..(194): NCBI GI NO: 15234654 NR Description: expressed protein [Arabidopsis thaliana]
  misc_feature (8)..(194): NCBI GI NO: 18414489 NR Description: expressed integral membrane protein common family
  misc_feature (23)..(189): NCBI GI NO: 21553953 NR Description: unknown [Arabidopsis thaliana]
  misc_feature (16)..(187): NCBI GI NO: 34394242 NR Description: integral membrane protein-like
  misc_feature (38)..(189): NCBI GI NO: 15237068 NR Description: expressed integral membrane protein common family
  misc_feature (40)..(198): NCBI GI NO: 38637029 NR Description: hypothetical protein
MESRVKPGFSGAGSLSGSRRSYMGAAAPSKPAVDGCGVALRVFILAATLVAAVVMGLDRQTATVQVTIADTLPPLQVPVTAKWSYSSAFVYFVVANAMACVFSAVALAACRSRSAVVPLMVGDLVVQALLFSAVGASAEFGILGERGNSHVRWGKVCHVYSSFCERAMAAVIVSLIAAFANLVHLMFAILDVHKNSSYY

SEQ ID NO: 11831 - protein, 177 aa, Triticum aestivum
  peptide (1)..(177): Ceres Seq. ID no. 15173367
  misc_feature (9)..(158): Pfam Name: DUF588 Pfam Description: Domain of unknown function
  misc_feature (1)..(177): NCBI GI NO: 34915110 NR Description: P0503E05.4
  misc_feature (13)..(172): NCBI GI NO: 21617994 NR Description: unknown [Arabidopsis thaliana]
  misc_feature (13)..(172): NCBI GI NO: 18414493 NR Description: expressed integral membrane protein common family
  misc_feature (13)..(172): NCBI GI NO: 15234654 NR Description: expressed protein [Arabidopsis thaliana]
  misc_feature (1)..(172): NCBI GI NO: 18414489 NR Description: expressed integral membrane protein common family
  misc_feature (1)..(167): NCBI GI NO: 21553953 NR Description: unknown [Arabidopsis thaliana]
  misc_feature (1)..(165): NCBI GI NO: 34394242 NR Description: integral membrane protein-like
  misc_feature (16)..(167): NCBI GI NO: 15237068 NR Description: expressed integral membrane protein common family
  misc_feature (18)..(176): NCBI GI NO: 38637029 NR Description: hypothetical protein
MGAAAPSKPAVDGCGVALRVFILAATLVAAVVMGLDRQTATVQVTIADTLPPLQVPVTAKWSYSSAFVYFVVANAMACVFSAVALAACRSRSAVVPLMVGDLVVQALLFSAVGASAEFGILGERGNSHVRWGKVCHVYSSFCERAMAAVIVSLIAAFANLVHLMFAILDVHKNSSYY

SEQ ID NO: 11832 - protein, 145 aa, Triticum aestivum
  peptide (1)..(145): Ceres Seq. ID no. 15173368
  misc_feature (1)..(126): Pfam Name: DUF588 Pfam Description: Domain of unknown function
  misc_feature (1)..(145): NCBI GI NO: 34915110 NR Description: P0503E05.4
  misc_feature (1)..(140): NCBI GI NO: 21617994 NR Description: unknown [Arabidopsis thaliana]
  misc_feature (1)..(140): NCBI GI NO: 18414493 NR Description: expressed integral membrane protein common family
  misc_feature (1)..(140): NCBI GI NO: 15234654 NR Description: expressed protein [Arabidopsis thaliana]
  misc_feature (1)..(140): NCBI GI NO: 18414489 NR Description: expressed integral membrane protein common family
  misc_feature (1)..(135): NCBI GI NO: 21553953 NR Description: unknown [Arabidopsis thaliana]
  misc_feature (1)..(133): NCBI GI NO: 34394242 NR Description: integral membrane protein-like
  misc_feature (1)..(135): NCBI GI NO: 15237068 NR Description: expressed integral membrane protein common family
  misc_feature (1)..(144): NCBI GI NO: 38637029 NR Description: hypothetical protein
MGLDRQTATVQVTIADTLPPLQVPVTAKWSYSSAFVYFVVANAMACVFSAVALAACRSRSAVVPLMVGDLVVQALLFSAVGASAEFGILGERGNSHVRWGKVCHVYSSFCERAMAAVIVSLIAAFANLVHLMFAILDVHKNSSYY

SEQ ID NO: 11833 - DNA, 728 bp, Triticum aestivum
  misc_feature (1)..(728): Ceres Seq. ID no. 15173355
aagaaagcattgtaagatggttgtgaccaatgctttgtttggacaaaagctggtgaatgctagacgactaggatttgtgtttcggcgaaagcagatattgaaaggagctgcccaggaggagcacgattgtattccggatgaacactatgtgcagacattattttctatcaaaggactggaagatgaacttgaaaggagaactttgacctatacatcatggaaccagtcaactttagatcctaaagataaaatgacttggcatccaacgacatttgaatatgacgcagcaagttctgagcagatcaatgctataaagagtatcgatcatgtgaactatgaggtggaacacaggactgagtggtgccaatccaacggcacatccgtcccatgtttcttatttgccagaaagttctcatatggcgccgcgatgcatctgttggaggatggcgcttttggtctgctaaaatctgctcaactactggttaacttttaacaaattctcttgtatacgagcaatcatttttcgtgtgggtggatcaattcatagccaggtccagcttcgttgtttgcagtagcatttgcagctgaagctactcagcgatggagtatcatagtttactgctaggatttagattgtgtatagatcatcggatcggagcagagtaggttattattgtacagagcatcattgaagtacgggaatagcatcaggatgcaatctccaactt

SEQ ID NO: 11834 - protein, 163 aa, Triticum aestivum
  peptide (1)..(163): Ceres Seq. ID no. 15173356
  misc_feature (1)..(105): NCBI GI NO: 34911442 NR Description: P0431H09.21
  misc_feature (38)..(152): NCBI GI NO: 30682534 NR Description: expressed protein [Arabidopsis thaliana]
  misc_feature (1)..(148): NCBI GI NO: 15241437 NR Description: expressed protein [Arabidopsis thaliana]
  misc_feature (53)..(152): NCBI GI NO: 25402693 NR Description: hypothetical protein
  misc_feature (1)..(111): NCBI GI NO: 30684956 NR Description: expressed protein [Arabidopsis thaliana]
RKHCKMVVTNALFGQKLVNARRLGFVFRRKQILKGAAQEEHDCIPDEHYVQTLFSIKGLEDELERRTLTYTSWNQSTLDPKDKMTWHPTTFEYDAASSEQINAIKSIDHVNYEVEHRTEWCQSNGTSVPCFLFARKFSYGAAMHLLEDGAFGLLKSAQLLVNF

SEQ ID NO: 11835 - protein, 158 aa, Triticum aestivum
  peptide (1)..(158): Ceres Seq. ID no. 15173357
  misc_feature (1)..(100): NCBI GI NO: 34911442 NR Description: P0431H09.21
  misc_feature (33)..(147): NCBI GI NO: 30682534 NR Description: expressed protein [Arabidopsis thaliana]
  misc_feature (1)..(143): NCBI GI NO: 15241437 NR Description: expressed protein [Arabidopsis thaliana]
  misc_feature (48)..(147): NCBI GI NO: 25402693 NR Description: hypothetical protein
  misc_feature (1)..(106): NCBI GI NO: 30684956 NR Description: expressed protein [Arabidopsis thaliana]
MVVTNALFGQKLVNARRLGFVFRRKQILKGAAQEEHDCIPDEHYVQTLFSIKGLEDELERRTLTYTSWNQSTLDPKDKMTWHPTTFEYDAASSEQINAIKSIDHVNYEVEHRTEWCQSNGTSVPCFLFARKFSYGAAMHLLEDGAFGLLKSAQLLVNF

SEQ ID NO: 11836 - DNA, 690 bp, Triticum aestivum
  misc_feature (1)..(690): Ceres Seq. ID no. 15173156
ccccacggcagcctctcctcctcctctcctccctcgccgtcgccgtcgccttcgtctccgcctccaaccggcggccgcgccaccagctcgtctcctccgatggcgactgtgccagttaaccccaagccgttcttgcaaaacctaacagggaagatggtcatcgtcaagctgaaatggggcatggagtacaaaggatatcttgtttcagtggactcctacatgaatctgcagctaagtggtactgaggaatacattgatgggcaatgctctggaaatttgggagacatactgataagatgcaacaatgtgatgtatctccgaggtgttccagaggaggacacggacattccagatgcggcctgaagagcacatggactgttcctggttgatgcttgctgttcactgctgaaaaagaacttcctagttcgtctccatttgcgcctactggactgtattacgtacaggcgttgaactcatgttaactctagttctgcatcctggatgaatgaatgattaacttgcatgtttgaaacggatgattgcttattgctgattggtcctgatcctgccgttggatatgtatggtttgctgtctgaattgcaatgatcgtatttgtgcaatttgaaccatatttgctgagttcctgagcatggactcaacatacccagcatgaagggatatttccgcac

SEQ ID NO: 11837 - protein, 120 aa, Triticum aestivum
  peptide (1)..(120): Ceres Seq. ID no. 15173157
  misc_feature (43)..(108): Pfam Name: Pfam Description:  LSM domain
  misc_feature (34)..(119): NCBI GI NO: 15234669 NR Description: snRNP Sm protein F - like [Arabidopsis thaliana]
  misc_feature (3)..(115): NCBI GI NO: 38079111 NR Description: similar to SNRPF protein [Mus musculus]
  misc_feature (36)..(115): NCBI GI NO: 39645845 NR Description: Unknown (protein for IMAGE:5176590) [Homo sapiens]
  misc_feature (36)..(115): NCBI GI NO: 4507131 NR Description: small nuclear ribonucleoprotein polypeptide F
  misc_feature (36)..(115): NCBI GI NO: 34864945 NR Description: similar to Small nuclear ribonucleoprotein F
  misc_feature (36)..(115): NCBI GI NO: 33876795 NR Description: SNRPF protein [Homo sapiens]
  misc_feature (34)..(115): NCBI GI NO: 31212897 NR Description: ENSANGP00000002801 [Anopheles gambiae]
  misc_feature (35)..(115): NCBI GI NO: 495021 NR Description: membrane-associated protein
  misc_feature (35)..(115): NCBI GI NO: 22024001 NR Description: Developmental embryonic B CG16792-PA
  misc_feature (35)..(108): NCBI GI NO: 39589637 NR Description: Hypothetical protein CBG12250
PHGSLSSSSPPSPSPSPSSPPPTGGRATSSSPPMATVPVNPKPFLQNLTGKMVIVKLKWGMEYKGYLVSVDSYMNLQLSGTEEYIDGQCSGNLGDILIRCNNVMYLRGVPEEDTDIPDAA

SEQ ID NO: 11838 - protein, 87 aa, Triticum aestivum
  peptide (1)..(87): Ceres Seq. ID no. 15173158
  misc_feature (10)..(75): Pfam Name: Pfam Description:  LSM domain
  misc_feature (1)..(86): NCBI GI NO: 15234669 NR Description: snRNP Sm protein F - like [Arabidopsis thaliana]
  misc_feature (1)..(82): NCBI GI NO: 38079111 NR Description: similar to SNRPF protein [Mus musculus]
  misc_feature (3)..(82): NCBI GI NO: 39645845 NR Description: Unknown (protein for IMAGE:5176590) [Homo sapiens]
  misc_feature (3)..(82): NCBI GI NO: 4507131 NR Description: small nuclear ribonucleoprotein polypeptide F
  misc_feature (3)..(82): NCBI GI NO: 34864945 NR Description: similar to Small nuclear ribonucleoprotein F
  misc_feature (3)..(82): NCBI GI NO: 33876795 NR Description: SNRPF protein [Homo sapiens]
  misc_feature (1)..(82): NCBI GI NO: 31212897 NR Description: ENSANGP00000002801 [Anopheles gambiae]
  misc_feature (2)..(82): NCBI GI NO: 495021 NR Description: membrane-associated protein
  misc_feature (2)..(82): NCBI GI NO: 22024001 NR Description: Developmental embryonic B CG16792-PA
  misc_feature (2)..(75): NCBI GI NO: 39589637 NR Description: Hypothetical protein CBG12250
MATVPVNPKPFLQNLTGKMVIVKLKWGMEYKGYLVSVDSYMNLQLSGTEEYIDGQCSGNLGDILIRCNNVMYLRGVPEEDTDIPDAA

SEQ ID NO: 11839 - protein, 69 aa, Triticum aestivum
  peptide (1)..(69): Ceres Seq. ID no. 15173159
  misc_feature (1)..(57): Pfam Name: Pfam Description:  LSM domain
  misc_feature (1)..(68): NCBI GI NO: 15234669 NR Description: snRNP Sm protein F - like [Arabidopsis thaliana]
  misc_feature (1)..(64): NCBI GI NO: 38079111 NR Description: similar to SNRPF protein [Mus musculus]
  misc_feature (1)..(64): NCBI GI NO: 39645845 NR Description: Unknown (protein for IMAGE:5176590) [Homo sapiens]
  misc_feature (1)..(64): NCBI GI NO: 4507131 NR Description: small nuclear ribonucleoprotein polypeptide F
  misc_feature (1)..(64): NCBI GI NO: 33876795 NR Description: SNRPF protein [Homo sapiens]
  misc_feature (1)..(64): NCBI GI NO: 34864945 NR Description: similar to Small nuclear ribonucleoprotein F
  misc_feature (1)..(64): NCBI GI NO: 31212897 NR Description: ENSANGP00000002801 [Anopheles gambiae]
  misc_feature (1)..(64): NCBI GI NO: 495021 NR Description: membrane-associated protein
  misc_feature (1)..(64): NCBI GI NO: 22024001 NR Description: Developmental embryonic B CG16792-PA
  misc_feature (1)..(57): NCBI GI NO: 39589637 NR Description: Hypothetical protein CBG12250
MVIVKLKWGMEYKGYLVSVDSYMNLQLSGTEEYIDGQCSGNLGDILIRCNNVMYLRGVPEEDTDIPDAA

SEQ ID NO: 11840 - DNA, 748 bp, Triticum aestivum
  misc_feature (1)..(748): Ceres Seq. ID no. 15173531
aaatagcctcccagccctctctgcctcccgaaaaaacaaacaaacagagatcgcgcttccaatctagctctgcggctgtcgcgaggctccacatttccctccccgcagcgccgaagtaagcatgtgtcccggcggcaggtacgcgggccttgacctccccgccggcgccggcgcgggggacctgcggccggcgttcgacgtgctggacgcggaccacgacggccgcatcagccgcgacgacctcaagaccttctacgccaacgcgggcgccaccgacgagcgcttcgacgacgacgacatcgaggccatgatcaccgccgccgacgccgacctcgacggcttcgtgcagtaccacgagttcgagggcctccttggccgcgcagctaaggcgggggcggacagcggctgccgctcggcgatggaggacgccttccggctaatggaccgcgacggggacggcaaggtcgggttcgaggacctcaaggcctacctcgggtgggccgggatgccggtcgccgacgacgagatccgcgccatgataagtatggctggtgacggcgacagcggcgtggggctcgaggcgctcgccagaatactcgccgtggactttgatgccatcgtctgaagaatctaaaataatcctactgtaaagcactagacttgattttttgggactttttccccctaaaatttggttggtggggagagcaggctggcgtgagattgattgttgtgagtggttctcgtt

SEQ ID NO: 11841 - protein, 167 aa, Triticum aestivum
  peptide (1)..(167): Ceres Seq. ID no. 15173532
  misc_feature (20)..(46): Pfam Name: Pfam Description:  EF hand
  misc_feature (1)..(162): NCBI GI NO: 5702231 NR Description: hypersensitive reaction associated Ca2+-binding
  misc_feature (1)..(158): NCBI GI NO: 15239904 NR Description: sodium-inducible calcium-binding protein
  misc_feature (1)..(156): NCBI GI NO: 2352828 NR Description: NaCl-inducible Ca2+-binding protein
  misc_feature (19)..(159): NCBI GI NO: 34909152 NR Description: putative calmodulin
  misc_feature (20)..(159): NCBI GI NO: 4959637 NR Description: calmodulin mutant SYNCAM37 [synthetic construct]
  misc_feature (20)..(159): NCBI GI NO: 1168797 NR Description: CALTRACTIN (CENTRIN)
  misc_feature (20)..(159): NCBI GI NO: 4959626 NR Description: calmodulin mutant SYNCAM14 [synthetic construct]
  misc_feature (20)..(159): NCBI GI NO: 4959162 NR Description: calmodulin mutant SYNCAM57A [synthetic construct]
  misc_feature (20)..(159): NCBI GI NO: 7441481 NR Description: probable calmodulin - rice
  misc_feature (22)..(167): NCBI GI NO: 32413509 NR Description: hypothetical protein [Neurospora crassa]
MCPGGRYAGLDLPAGAGAGDLRPAFDVLDADHDGRISRDDLKTFYANAGATDERFDDDDIEAMITAADADLDGFVQYHEFEGLLGRAAKAGADSGCRSAMEDAFRLMDRDGDGKVGFEDLKAYLGWAGMPVADDEIRAMISMAGDGDSGVGLEALARILAVDFDAIV

SEQ ID NO: 11842 - protein, 105 aa, Triticum aestivum
  peptide (1)..(105): Ceres Seq. ID no. 15173533
  misc_feature (1)..(100): NCBI GI NO: 5702231 NR Description: hypersensitive reaction associated Ca2+-binding
  misc_feature (1)..(96): NCBI GI NO: 15239904 NR Description: sodium-inducible calcium-binding protein
  misc_feature (1)..(94): NCBI GI NO: 2352828 NR Description: NaCl-inducible Ca2+-binding protein
  misc_feature (1)..(97): NCBI GI NO: 34909152 NR Description: putative calmodulin
  misc_feature (1)..(97): NCBI GI NO: 4959637 NR Description: calmodulin mutant SYNCAM37 [synthetic construct]
  misc_feature (1)..(97): NCBI GI NO: 1168797 NR Description: CALTRACTIN (CENTRIN)
  misc_feature (1)..(97): NCBI GI NO: 4959162 NR Description: calmodulin mutant SYNCAM57A [synthetic construct]
  misc_feature (1)..(97): NCBI GI NO: 4959626 NR Description: calmodulin mutant SYNCAM14 [synthetic construct]
  misc_feature (1)..(97): NCBI GI NO: 7441481 NR Description: probable calmodulin - rice
  misc_feature (1)..(105): NCBI GI NO: 32413509 NR Description: hypothetical protein [Neurospora crassa]
MITAADADLDGFVQYHEFEGLLGRAAKAGADSGCRSAMEDAFRLMDRDGDGKVGFEDLKAYLGWAGMPVADDEIRAMISMAGDGDSGVGLEALARILAVDFDAIV

SEQ ID NO: 11843 - DNA, 644 bp, Triticum aestivum
  misc_feature (1)..(644): Ceres Seq. ID no. 15173519
tactaacagtccaaaactcgtataacttgctgtgtcgcaattttgatgctggattggcagaatgctgccatcacgagagaatcagtttgctggcgtacagcccaatggcaatgggtatactttcagggaagtatcactcatctgatgacagcggaccgccagatgcaaggatgaatcttttcatggggagatactccgagggtgaatccagatacaatctgaagaaccccaaactggaatcggcagtgaaggaatatagaagaattggcgtcaagtatggcatttcgccatcaatcctagcagttgcatttgtactcagacacccccttgtgggttcagctgttttcggtgttactaaattatggcagctcgaggaggttcttcaggccacaggggtccatctctgtgaagaaatattggcggagatcaatgatgtacatgcaagatttcccaatccttgtccataataatgttccaaaatacgatatttttctttgtccattgcgatatccagatatgataaataggcggtagcaatttgtgcatgtcatccttgtgaatcttctttgtaccgttccaattttatcagttcatgtctgcgaagggacaatagagagtagcaattttgcaacgctgagttagtc

SEQ ID NO: 11844 - protein, 154 aa, Triticum aestivum
  peptide (1)..(154): Ceres Seq. ID no. 15173520
  misc_feature (2)..(154): NCBI GI NO: 33592130 NR Description: probable oxidoreductase [Bordetella pertussis]
  misc_feature (2)..(154): NCBI GI NO: 33596300 NR Description: probable oxidoreductase [Bordetella parapertussis]
  misc_feature (1)..(154): NCBI GI NO: 23468633 NR Description: hypothetical protein
  misc_feature (1)..(154): NCBI GI NO: 28869684 NR Description: oxidoreductase, aldo/keto reductase family
  misc_feature (1)..(154): NCBI GI NO: 15599630 NR Description: probable oxidoreductase
  misc_feature (1)..(154): NCBI GI NO: 32039650 NR Description: hypothetical protein
  misc_feature (1)..(154): NCBI GI NO: 23124929 NR Description: hypothetical protein [Nostoc punctiforme]
  misc_feature (1)..(154): NCBI GI NO: 23102470 NR Description: hypothetical protein [Azotobacter vinelandii]
  misc_feature (2)..(154): NCBI GI NO: 40062540 NR Description: oxidoreductase,aldo/keto reductase family
  misc_feature (1)..(154): NCBI GI NO: 26988049 NR Description: oxidoreductase, aldo/keto reductase family
LTVQNSYNLLCRNFDAGLAECCHHERISLLAYSPMAMGILSGKYHSSDDSGPPDARMNLFMGRYSEGESRYNLKNPKLESAVKEYRRIGVKYGISPSILAVAFVLRHPLVGSAVFGVTKLWQLEEVLQATGVHLCEEILAEINDVHARFPNPCP

SEQ ID NO: 11845 - protein, 120 aa, Triticum aestivum
  peptide (1)..(120): Ceres Seq. ID no. 15173521
  misc_feature (1)..(120): NCBI GI NO: 33592130 NR Description: probable oxidoreductase [Bordetella pertussis]
  misc_feature (1)..(120): NCBI GI NO: 33596300 NR Description: probable oxidoreductase [Bordetella parapertussis]
  misc_feature (1)..(120): NCBI GI NO: 23468633 NR Description: hypothetical protein
  misc_feature (1)..(120): NCBI GI NO: 28869684 NR Description: oxidoreductase, aldo/keto reductase family
  misc_feature (1)..(120): NCBI GI NO: 15599630 NR Description: probable oxidoreductase
  misc_feature (1)..(120): NCBI GI NO: 32039650 NR Description: hypothetical protein
  misc_feature (1)..(120): NCBI GI NO: 23124929 NR Description: hypothetical protein [Nostoc punctiforme]
  misc_feature (1)..(120): NCBI GI NO: 23102470 NR Description: hypothetical protein [Azotobacter vinelandii]
  misc_feature (1)..(120): NCBI GI NO: 40062540 NR Description: oxidoreductase,aldo/keto reductase family
  misc_feature (1)..(120): NCBI GI NO: 26988049 NR Description: oxidoreductase, aldo/keto reductase family
MAMGILSGKYHSSDDSGPPDARMNLFMGRYSEGESRYNLKNPKLESAVKEYRRIGVKYGISPSILAVAFVLRHPLVGSAVFGVTKLWQLEEVLQATGVHLCEEILAEINDVHARFPNPCP

SEQ ID NO: 11846 - protein, 118 aa, Triticum aestivum
  peptide (1)..(118): Ceres Seq. ID no. 15173522
  misc_feature (1)..(118): NCBI GI NO: 33592130 NR Description: probable oxidoreductase [Bordetella pertussis]
  misc_feature (1)..(118): NCBI GI NO: 33596300 NR Description: probable oxidoreductase [Bordetella parapertussis]
  misc_feature (1)..(118): NCBI GI NO: 23468633 NR Description: hypothetical protein
  misc_feature (1)..(118): NCBI GI NO: 28869684 NR Description: oxidoreductase, aldo/keto reductase family
  misc_feature (1)..(118): NCBI GI NO: 15599630 NR Description: probable oxidoreductase
  misc_feature (1)..(118): NCBI GI NO: 32039650 NR Description: hypothetical protein
  misc_feature (1)..(118): NCBI GI NO: 23124929 NR Description: hypothetical protein [Nostoc punctiforme]
  misc_feature (1)..(118): NCBI GI NO: 23102470 NR Description: hypothetical protein [Azotobacter vinelandii]
  misc_feature (1)..(118): NCBI GI NO: 40062540 NR Description: oxidoreductase,aldo/keto reductase family
  misc_feature (1)..(118): NCBI GI NO: 26988049 NR Description: oxidoreductase, aldo/keto reductase family
MGILSGKYHSSDDSGPPDARMNLFMGRYSEGESRYNLKNPKLESAVKEYRRIGVKYGISPSILAVAFVLRHPLVGSAVFGVTKLWQLEEVLQATGVHLCEEILAEINDVHARFPNPCP

SEQ ID NO: 11847 - DNA, 917 bp, Triticum aestivum
  misc_feature (1)..(917): Ceres Seq. ID no. 15174100
  misc_feature (902)..(902): n is a, c, t, g, unknown, or other
ctctctcctctctacactgtgttgcgtagcccggaccgacatgaccggcggcgtgaacggcaacggcggaggcggtgggggcggcggcggggcgtgcgcggtgtgcaagcaccagcggcgcaagtgcgagcccaactgcgagctggccgcctacttcccggccaacaggatgaacgacttccgcgcgctgcacctcgtcttcggggtggccaacctcaccaagctcatcaaggccaacgccaccgaggcggcgcgccgccgcgccgccgagacgctgacgtgggaggcgcggtggcgcgagcgcgacccctccgaggggtgctaccgcgaggtctcctgcctccgccgcgagaacgccgtgctgcgcgccgagaacgccgcgctcaggcgccgggccgaccagtgcgcgtgctgtgtcaccacgttgcagcagcagcagcagcagatattgctcgtctcggcttacaacaacggcgcccggccccccggcggcgtgctgcacggggccagcgccggagtcgtgcccggcggcttctacgccggcgcgccgaggcccggggcagctggtcaggcggagcccagggagaagagcagcgcgaggtgtgacgctcagcgcacagctagctagcagtgggctatgggagaagatgaaggcagaaattcaaccgtttcatatgaaattcatgtcctgagtaggaaaaagccctaagtgttggttttggaataaaaagtactccctccgtcccataatataatagtgtcaaaaacgttcttatattatgggacgaagggaatactagctttactcttttttttcttcttctgcttgagcaggacatctaaagttcaaagtgtaaaaactcagctttgtataactggtgattcatttaattagaagccangaagatgattcatac

SEQ ID NO: 11848 - protein, 208 aa, Triticum aestivum
  peptide (1)..(208): Ceres Seq. ID no. 15174101
  misc_feature (31)..(110): Pfam Name: Pfam Description:  Protein of unknown function DUF260
  misc_feature (16)..(171): NCBI GI NO: 37572992 NR Description: putative lateral organ boundaries
  misc_feature (12)..(110): NCBI GI NO: 15221448 NR Description: lateral organ boundaries
  misc_feature (12)..(110): NCBI GI NO: 29428013 NR Description: Putative LOB domain protein 2
  misc_feature (26)..(149): NCBI GI NO: 15219335 NR Description: lateral organ boundaries
  misc_feature (16)..(129): NCBI GI NO: 30690020 NR Description: lateral organ boundaries
  misc_feature (16)..(128): NCBI GI NO: 25354729 NR Description: hypothetical protein At2g45420
  misc_feature (16)..(124): NCBI GI NO: 37531318 NR Description: unknown protein
  misc_feature (31)..(150): NCBI GI NO: 15231388 NR Description: lateral organ boundaries (LOB) domain family
  misc_feature (31)..(161): NCBI GI NO: 34914280 NR Description: B1151A10.6
  misc_feature (23)..(183): NCBI GI NO: 34907878 NR Description: P0031D02.27
SLLSTLCCVARTDMTGGVNGNGGGGGGGGGACAVCKHQRRKCEPNCELAAYFPANRMNDFRALHLVFGVANLTKLIKANATEAARRRAAETLTWEARWRERDPSEGCYREVSCLRRENAVLRAENAALRRRADQCACCVTTLQQQQQQILLVSAYNNGARPPGGVLHGASAGVVPGGFYAGAPRPGAAGQAEPREKSSARCDAQRTAS

SEQ ID NO: 11849 - protein, 201 aa, Triticum aestivum
  peptide (1)..(201): Ceres Seq. ID no. 15174102
LSPLYTVLRSPDRHDRRRERQRRRRWGRRRGVRGVQAPAAQVRAQLRAGRLLPGQQDERLPRAAPRLRGGQPHQAHQGQRHRGGAPPRRRDADVGGAVARARPLRGVLPRGLLPPPRERRAARRERRAQAPGRPVRVLCHHVAAAAAADIARLGLQQRRPAPRRRAARGQRRSRARRLLRRRAEARGSWSGGAQGEEQREV

SEQ ID NO: 11850 - protein, 195 aa, Triticum aestivum
  peptide (1)..(195): Ceres Seq. ID no. 15174103
  misc_feature (18)..(97): Pfam Name: Pfam Description:  Protein of unknown function DUF260
  misc_feature (3)..(158): NCBI GI NO: 37572992 NR Description: putative lateral organ boundaries
  misc_feature (1)..(97): NCBI GI NO: 15221448 NR Description: lateral organ boundaries
  misc_feature (1)..(97): NCBI GI NO: 29428013 NR Description: Putative LOB domain protein 2
  misc_feature (13)..(136): NCBI GI NO: 15219335 NR Description: lateral organ boundaries
  misc_feature (3)..(116): NCBI GI NO: 30690020 NR Description: lateral organ boundaries
  misc_feature (3)..(115): NCBI GI NO: 25354729 NR Description: hypothetical protein At2g45420
  misc_feature (3)..(111): NCBI GI NO: 37531318 NR Description: unknown protein
  misc_feature (18)..(137): NCBI GI NO: 15231388 NR Description: lateral organ boundaries (LOB) domain family
  misc_feature (18)..(148): NCBI GI NO: 34914280 NR Description: B1151A10.6
  misc_feature (10)..(170): NCBI GI NO: 34907878 NR Description: P0031D02.27
MTGGVNGNGGGGGGGGGACAVCKHQRRKCEPNCELAAYFPANRMNDFRALHLVFGVANLTKLIKANATEAARRRAAETLTWEARWRERDPSEGCYREVSCLRRENAVLRAENAALRRRADQCACCVTTLQQQQQQILLVSAYNNGARPPGGVLHGASAGVVPGGFYAGAPRPGAAGQAEPREKSSARCDAQRTAS

SEQ ID NO: 11851 - DNA, 966 bp, Triticum aestivum
  misc_feature (1)..(966): Ceres Seq. ID no. 15174225
actcgaccctgcctccagtccatagccatacaccaccaccttcctcccaagtcccaagcgaacaaacactcgatcgcttcgatggcgactctgcggcggtgctccgggctgttgctcgcggcggtggcgctggcgctggcggcggggatggcggcggcgcaggggccggccggcgcgccggcgccggcggccgggatcagctcggagtgcatgaccgcggtgctcaacatgtccgactgcctgccgtacgtggagagcgggagcaagacgcggcacccggacaaggcctgctgcccggagctggacggcctgctgcagtccaaccccgtctgcctctgccagctgctcgccggcggcgccgactcctacggaatcagcgtcgactacaagcgcgccatggcgctgcccggcgtctgccgcctcaacgcgccgcccctcagcgcctgcgcagcttttggagtccccgtggggccttcttcggcgccattaacaggagtgccctctccatccgctacaggaccactgatgcctgagaacccgccatccgcaacgccgtccaagtcgaagtcccacgccccgggccgcctcaacggccgcggcctcgtcgccctcgccgcgctgccgctggcgatcacggccgccgccatgttctagggcagcaagagttcgcggacgtgtggcattgtgccggtctcacacgcttggcccgatgagatcacattcttctccattcttgcctcacattctcattgctgtacacgagagattatttttctggttgatccatttccttgtcgcaattcccttacctgtgtgtaatctgctagagatggttgacagtctgtgtattacgtagatttgcattgctgctactaaattaattctttcgttatgtgtctcttcctcttatatataatactagcaagatgcccgtgcattgcacggaacattaagatgtattttttt

SEQ ID NO: 11852 - protein, 217 aa, Triticum aestivum
  peptide (1)..(217): Ceres Seq. ID no. 15174226
  misc_feature (70)..(149): Pfam Name: Pfam Description:  Protease inhibitor/seed storage/LTP family
  misc_feature (30)..(216): NCBI GI NO: 34909226 NR Description: P0432B10.23
  misc_feature (28)..(210): NCBI GI NO: 25553588 NR Description: OJ1656_E11.14
  misc_feature (36)..(197): NCBI GI NO: 28269449 NR Description: putative protease inhibitor
  misc_feature (37)..(210): NCBI GI NO: 21617892 NR Description: lipid-transfer protein-like protein
  misc_feature (37)..(210): NCBI GI NO: 15229756 NR Description: protease inhibitor/seed storage/lipid transfer
  misc_feature (63)..(208): NCBI GI NO: 25553596 NR Description: OJ1656_E11.27
  misc_feature (31)..(209): NCBI GI NO: 33146785 NR Description: unknown protein
  misc_feature (39)..(161): NCBI GI NO: 21618293 NR Description: unknown [Arabidopsis thaliana]
  misc_feature (41)..(161): NCBI GI NO: 18401329 NR Description: protease inhibitor/seed storage/lipid transfer
  misc_feature (38)..(217): NCBI GI NO: 28269454 NR Description: putative protease inhibitor
TRPCLQSIAIHHHLPPKSQANKHSIASMATLRRCSGLLLAAVALALAAGMAAAQGPAGAPAPAAGISSECMTAVLNMSDCLPYVESGSKTRHPDKACCPELDGLLQSNPVCLCQLLAGGADSYGISVDYKRAMALPGVCRLNAPPLSACAAFGVPVGPSSAPLTGVPSPSATGPLMPENPPSATPSKSKSHAPGRLNGRGLVALAALPLAITAAAMF

SEQ ID NO: 11853 - protein, 190 aa, Triticum aestivum
  peptide (1)..(190): Ceres Seq. ID no. 15174227
  misc_feature (43)..(122): Pfam Name: Pfam Description:  Protease inhibitor/seed storage/LTP family
  misc_feature (3)..(189): NCBI GI NO: 34909226 NR Description: P0432B10.23
  misc_feature (1)..(183): NCBI GI NO: 25553588 NR Description: OJ1656_E11.14
  misc_feature (9)..(170): NCBI GI NO: 28269449 NR Description: putative protease inhibitor
  misc_feature (10)..(183): NCBI GI NO: 21617892 NR Description: lipid-transfer protein-like protein
  misc_feature (10)..(183): NCBI GI NO: 15229756 NR Description: protease inhibitor/seed storage/lipid transfer
  misc_feature (36)..(181): NCBI GI NO: 25553596 NR Description: OJ1656_E11.27
  misc_feature (4)..(182): NCBI GI NO: 33146785 NR Description: unknown protein
  misc_feature (12)..(134): NCBI GI NO: 21618293 NR Description: unknown [Arabidopsis thaliana]
  misc_feature (14)..(134): NCBI GI NO: 18401329 NR Description: protease inhibitor/seed storage/lipid transfer
  misc_feature (11)..(190): NCBI GI NO: 28269454 NR Description: putative protease inhibitor
MATLRRCSGLLLAAVALALAAGMAAAQGPAGAPAPAAGISSECMTAVLNMSDCLPYVESGSKTRHPDKACCPELDGLLQSNPVCLCQLLAGGADSYGISVDYKRAMALPGVCRLNAPPLSACAAFGVPVGPSSAPLTGVPSPSATGPLMPENPPSATPSKSKSHAPGRLNGRGLVALAALPLAITAAAMF

SEQ ID NO: 11854 - protein, 176 aa, Triticum aestivum
  peptide (1)..(176): Ceres Seq. ID no. 15174228
STLPPVHSHTPPPSSQVPSEQTLDRFDGDSAAVLRAVARGGGAGAGGGDGGGAGAGRRAGAGGRDQLGVHDRGAQHVRLPAVRGEREQDAAPGQGLLPGAGRPAAVQPRLPLPAARRRRRLLRNQRRLQARHGAARRLPPQRAAPQRLRSFWSPRGAFFGAINRSALSIRYRTTDA

SEQ ID NO: 11855 - DNA, 780 bp, Triticum aestivum
  misc_feature (1)..(780): Ceres Seq. ID no. 15174240
gacattgcccgaccaaccaaagctcccaatccacgccgccgccgccgccgctgccgacgaaacaggtcataattctcggcgaccggcgaacgagggcaagatgcagatcttcgtgaagacgctgacggggaagacgatcacgctggaggtggagtcgtcggacacgatcgacaacgtcaaggccaagatccaggacaaggaggggatcccgccggaccagcagcggctcatcttcgccgggaagcagctggaggacgggcgcacgctggccgactacaacatccagaaggagtcgacgctgcacctggtcctccgcctgcgcggcggcgccaagaagcgcaagaagaagacctactcgacgcccaagaaggtcaagcacgagcgcgagaagaccccgctcgccgtgctcggctactacagggtggacgacgccacgggcaaggtggagaggctgcgcaaggagtgccccaacccggactgcggcgccggcaccttcatggcggcgcacgccgaccgccacgcctgcggcaagtgcggcctcacctacgcctacgcagaggcccagagcccagagatcgacagtgattgatcaggtggtctgattcgatgacggagttgattagcgccatgaattccgtgtacgtctggtaatgattttttcaatggatatttgtggttagaacaattattctggatatttttctcaattagtcatcagtaagcatgttttggtctgaattggaatgtgctttggcatgcaatcgtgacttgattggcgac

SEQ ID NO: 11856 - protein, 195 aa, Triticum aestivum
  peptide (1)..(195): Ceres Seq. ID no. 15174241
  misc_feature (34)..(107): Pfam Name: Pfam Description:  Ubiquitin family
  misc_feature (34)..(184): NCBI GI NO: 100598 NR Description: ubiquitin / ribosomal protein S27a.1 - barley
  misc_feature (34)..(184): NCBI GI NO: 100599 NR Description: ubiquitin / ribosomal protein S27a.2 - barley
  misc_feature (34)..(187): NCBI GI NO: 279636 NR Description: ubiquitin / ribosomal protein S27a - tomato
  misc_feature (34)..(184): NCBI GI NO: 82733 NR Description: ubiquitin / ribosomal protein S27a - maize
  misc_feature (34)..(184): NCBI GI NO: 34894792 NR Description: ubiquitin / ribosomal protein S27a
  misc_feature (34)..(187): NCBI GI NO: 25294255 NR Description: ubiquitin extension protein [imported] - potato
  misc_feature (34)..(187): NCBI GI NO: 25294256 NR Description: ubiquitin extension protein
  misc_feature (34)..(187): NCBI GI NO: 34581769 NR Description: ubiquitin extension protein [Cucumis sativus]
  misc_feature (34)..(189): NCBI GI NO: 541953 NR Description: ubiquitin/ribosomal protein S27a fusion protein -white lupine
  misc_feature (34)..(191): NCBI GI NO: 18407264 NR Description: ubiquitin extension protein
TLPDQPKLPIHAAAAAAADETGHNSRRPANEGKMQIFVKTLTGKTITLEVESSDTIDNVKAKIQDKEGIPPDQQRLIFAGKQLEDGRTLADYNIQKESTLHLVLRLRGGAKKRKKKTYSTPKKVKHEREKTPLAVLGYYRVDDATGKVERLRKECPNPDCGAGTFMAAHADRHACGKCGLTYAYAEAQSPEIDSD

SEQ ID NO: 11857 - protein, 162 aa, Triticum aestivum
  peptide (1)..(162): Ceres Seq. ID no. 15174242
  misc_feature (1)..(74): Pfam Name: Pfam Description:  Ubiquitin family
  misc_feature (1)..(151): NCBI GI NO: 100598 NR Description: ubiquitin / ribosomal protein S27a.1 - barley
  misc_feature (1)..(151): NCBI GI NO: 100599 NR Description: ubiquitin / ribosomal protein S27a.2 - barley
  misc_feature (1)..(154): NCBI GI NO: 279636 NR Description: ubiquitin / ribosomal protein S27a - tomato
  misc_feature (1)..(151): NCBI GI NO: 82733 NR Description: ubiquitin / ribosomal protein S27a - maize
  misc_feature (1)..(151): NCBI GI NO: 34894792 NR Description: ubiquitin / ribosomal protein S27a
  misc_feature (1)..(154): NCBI GI NO: 25294255 NR Description: ubiquitin extension protein [imported] - potato
  misc_feature (1)..(154): NCBI GI NO: 25294256 NR Description: ubiquitin extension protein
  misc_feature (1)..(154): NCBI GI NO: 34581769 NR Description: ubiquitin extension protein [Cucumis sativus]
  misc_feature (1)..(156): NCBI GI NO: 541953 NR Description: ubiquitin/ribosomal protein S27a fusion protein -white lupine
  misc_feature (1)..(158): NCBI GI NO: 18407264 NR Description: ubiquitin extension protein
MQIFVKTLTGKTITLEVESSDTIDNVKAKIQDKEGIPPDQQRLIFAGKQLEDGRTLADYNIQKESTLHLVLRLRGGAKKRKKKTYSTPKKVKHEREKTPLAVLGYYRVDDATGKVERLRKECPNPDCGAGTFMAAHADRHACGKCGLTYAYAEAQSPEIDSD

SEQ ID NO: 11858 - DNA, 981 bp, Triticum aestivum
  misc_feature (1)..(981): Ceres Seq. ID no. 15174247
atacatccatcgaggagccactccacacaggcaagcaagggtagtgagactcagaggttcaggcatggcagctccaagagcactcgccctcgccgtcctgctggcgatcgctgtcaccaacgccgaggccgcttccgtggtcgtcggcctggccaagtgcgccgactgcaccaggaggaacatcaaggccgaggaagctttcaagggtcttcaggtggcgatcaagtgcaagaacgtccacggcgactacgagagcaaggcagtgggtaccctcgaccgcaccggcgctttcagcgtgcccctggccgccgacctccacggcgccgactgcgtcgcgcagctccacagcgccgcctccagcgccccgtgccctggccaggagccgtctaagatcgtgccggtgtcggagggcaccaccttcggcgtcgtcgccggcgacaacattaccacaccttctgcagcagcgtcgccggagtgcgcgtccatgaccctgtgcgggccgatcaagaagcacatcatcgagcacttccatcacaagaagcccgtgccgcccaagccggagcccaagccccagccccaccctgactacggccccgtgcccaagcccgagcccaagccgcagccccacccggactaccaccccgtccctcccacgcccacctacggcggcggcggtggataccacggacaccactgagtccgatctaccaccgtcctgcccagcgctgaaatctcatcaccgggttcatgggcatgaactcatgatcggcgttgctatttatgatcggtttgcatgtgtgggtatcgttaggtcttctgccattcgctgcagagttgagagttcagaataacagatgtatgtgtgtcactgtgtcaaccgagtgtgaaggtgtgttgctttatcaagattttgtaatttcggtgcgtttaccgaagttattatgaatcaagtaatgtatttaaacaagtcgatttgtcaat

SEQ ID NO: 11859 - protein, 231 aa, Triticum aestivum
  peptide (1)..(231): Ceres Seq. ID no. 15174248
  misc_feature (167)..(220): Pfam Name: Pfam Description:  Extensin-like region
  misc_feature (31)..(228): NCBI GI NO: 6689616 NR Description: proline-rich protein [Zea mays]
  misc_feature (24)..(219): NCBI GI NO: 37531088 NR Description: putative proline-rich protein
  misc_feature (24)..(219): NCBI GI NO: 37531092 NR Description: putative proline-rich protein
  misc_feature (24)..(219): NCBI GI NO: 37531094 NR Description: putative proline-rich protein
  misc_feature (24)..(219): NCBI GI NO: 18676394 NR Description: proline-rich protein [Oryza sativa]
  misc_feature (24)..(210): NCBI GI NO: 37531090 NR Description: putative proline-rich protein
  misc_feature (29)..(226): NCBI GI NO: 37531064 NR Description: putative proline-rich protein
  misc_feature (28)..(219): NCBI GI NO: 7489265 NR Description: proline-rich protein GPP1 - potato
  misc_feature (28)..(221): NCBI GI NO: 6782442 NR Description: proline-rich protein [Arabidopsis thaliana]
  misc_feature (28)..(221): NCBI GI NO: 7620015 NR Description: proline-rich protein 4 [Arabidopsis thaliana]
YIHRGATPHRQARVVRLRGSGMAAPRALALAVLLAIAVTNAEAASVVVGLAKCADCTRRNIKAEEAFKGLQVAIKCKNVHGDYESKAVGTLDRTGAFSVPLAADLHGADCVAQLHSAASSAPCPGQEPSKIVPVSEGTTFGVVAGDNITTPSAAASPECASMTLCGPIKKHIIEHFHHKKPVPPKPEPKPQPHPDYGPVPKPEPKPQPHPDYHPVPPTPTYGGGGGYHGHH

SEQ ID NO: 11860 - protein, 210 aa, Triticum aestivum
  peptide (1)..(210): Ceres Seq. ID no. 15174249
  misc_feature (146)..(199): Pfam Name: Pfam Description:  Extensin-like region
  misc_feature (10)..(207): NCBI GI NO: 6689616 NR Description: proline-rich protein [Zea mays]
  misc_feature (3)..(198): NCBI GI NO: 37531088 NR Description: putative proline-rich protein
  misc_feature (3)..(198): NCBI GI NO: 37531092 NR Description: putative proline-rich protein
  misc_feature (3)..(198): NCBI GI NO: 37531094 NR Description: putative proline-rich protein
  misc_feature (3)..(198): NCBI GI NO: 18676394 NR Description: proline-rich protein [Oryza sativa]
  misc_feature (3)..(189): NCBI GI NO: 37531090 NR Description: putative proline-rich protein
  misc_feature (8)..(205): NCBI GI NO: 37531064 NR Description: putative proline-rich protein
  misc_feature (7)..(198): NCBI GI NO: 7489265 NR Description: proline-rich protein GPP1 - potato
  misc_feature (7)..(200): NCBI GI NO: 6782442 NR Description: proline-rich protein [Arabidopsis thaliana]
  misc_feature (7)..(200): NCBI GI NO: 7620015 NR Description: proline-rich protein 4 [Arabidopsis thaliana]
MAAPRALALAVLLAIAVTNAEAASVVVGLAKCADCTRRNIKAEEAFKGLQVAIKCKNVHGDYESKAVGTLDRTGAFSVPLAADLHGADCVAQLHSAASSAPCPGQEPSKIVPVSEGTTFGVVAGDNITTPSAAASPECASMTLCGPIKKHIIEHFHHKKPVPPKPEPKPQPHPDYGPVPKPEPKPQPHPDYHPVPPTPTYGGGGGYHGHH

SEQ ID NO: 11861 - protein, 129 aa, Triticum aestivum
  peptide (1)..(129): Ceres Seq. ID no. 15174250
  misc_feature (62)..(129): Pfam Name: Pfam Description:  Sperm histone P2
IHPSRSHSTQASKGSETQRFRHGSSKSTRPRRPAGDRCHQRRGRFRGRRPGQVRRLHQEEHQGRGSFQGSSGGDQVQERPRRLREQGSGYPRPHRRFQRAPGRRPPRRRLRRAAPQRRLQRPVPWPGAV

SEQ ID NO: 11862 - DNA, 1156 bp, Triticum aestivum
  misc_feature (1)..(1156): Ceres Seq. ID no. 15174281
gacgattagaaaacatcgggaaaccccctccccgtgctccaactaccccaagcgccgccactcccaccgtaccgcggcaatgccgacgccacgaaaccggaaggtccctgcccctgccccgccgcgccggcggcctccccgcctggagtaccgcgcaaaggacggcgcgtggtacggcgcgcgcatggcgctgcagggcgactcgctgcgcgtcatgttcgaggaattccgcgaggagttcgacgagtggcacgacccaaacacggccgacctcgcctccccgggcgacgtgaccgcgctccgcaccaggttccgcccggcgagcccgcccctcgaggacgcccgctgcggcgacctccgccgcggccagctgctctgcgtcctccgcgccatgtccaacggcgagcgcaagtactacgacgccatccttgattccgtgaaaagagcggctcacgtcaccgtgggcggcgaggagcggtgcgcgtgccgcttcacagtgcggtggacggacgggccgctccgcggcggcctggacgaggtcggcgtcgacgaggtctgctgcgtgcgggactcgccggtcaacgacccggtgctgagcgagttcctggaccgcgtgacgaggtcgttcggcttcggcgacggcgaggagaacgcgaaggcggtgcaggactcgccggtccaggagccgcggctaaacgagttcctggaccgcgtgacgaaatcgttcggctactgcaacggcgaggagaaaccgaaggcggcgcctcaggggaccggggccacgttgcccccgggcggcgagcagagcgcgacggcggcccctcaggcgaccggggccacgtcgctctgcggcggcgagggggagactgccttcataatcatcgactaggtcgcggcctgcactgcattcctgcgcttctgtttcgatgtatccatgtgcctgccctgctcgacgattggtgagggtatttcgtgccttcgcgttgtttcattcagttactgtctttgtcttccttgtttcgtgtctatgtctaatcttgttcggccccgaaatggacgccatcgttggtagtagtacttggtagtcggtgcgattatgtatctctgttcctgttgccatctttccctggaacctgaaagccatattatgcattgg

SEQ ID NO: 11863 - protein, 295 aa, Triticum aestivum
  peptide (1)..(295): Ceres Seq. ID no. 15174282
  misc_feature (46)..(207): NCBI GI NO: 7486059 NR Description: hypothetical protein F24A6
  misc_feature (46)..(207): NCBI GI NO: 30686844 NR Description: expressed protein [Arabidopsis thaliana]
TIRKHRETPSPCSNYPKRRHSHRTAAMPTPRNRKVPAPAPPRRRPPRLEYRAKDGAWYGARMALQGDSLRVMFEEFREEFDEWHDPNTADLASPGDVTALRTRFRPASPPLEDARCGDLRRGQLLCVLRAMSNGERKYYDAILDSVKRAAHVTVGGEERCACRFTVRWTDGPLRGGLDEVGVDEVCCVRDSPVNDPVLSEFLDRVTRSFGFGDGEENAKAVQDSPVQEPRLNEFLDRVTKSFGYCNGEEKPKAAPQGTGATLPPGGEQSATAAPQATGATSLCGGEGETAFIIID

SEQ ID NO: 11864 - protein, 269 aa, Triticum aestivum
  peptide (1)..(269): Ceres Seq. ID no. 15174283
  misc_feature (20)..(181): NCBI GI NO: 7486059 NR Description: hypothetical protein F24A6
  misc_feature (20)..(181): NCBI GI NO: 30686844 NR Description: expressed protein [Arabidopsis thaliana]
MPTPRNRKVPAPAPPRRRPPRLEYRAKDGAWYGARMALQGDSLRVMFEEFREEFDEWHDPNTADLASPGDVTALRTRFRPASPPLEDARCGDLRRGQLLCVLRAMSNGERKYYDAILDSVKRAAHVTVGGEERCACRFTVRWTDGPLRGGLDEVGVDEVCCVRDSPVNDPVLSEFLDRVTRSFGFGDGEENAKAVQDSPVQEPRLNEFLDRVTKSFGYCNGEEKPKAAPQGTGATLPPGGEQSATAAPQATGATSLCGGEGETAFIIID

SEQ ID NO: 11865 - protein, 234 aa, Triticum aestivum
  peptide (1)..(234): Ceres Seq. ID no. 15174284
  misc_feature (1)..(146): NCBI GI NO: 7486059 NR Description: hypothetical protein F24A6
  misc_feature (1)..(146): NCBI GI NO: 30686844 NR Description: expressed protein [Arabidopsis thaliana]
MALQGDSLRVMFEEFREEFDEWHDPNTADLASPGDVTALRTRFRPASPPLEDARCGDLRRGQLLCVLRAMSNGERKYYDAILDSVKRAAHVTVGGEERCACRFTVRWTDGPLRGGLDEVGVDEVCCVRDSPVNDPVLSEFLDRVTRSFGFGDGEENAKAVQDSPVQEPRLNEFLDRVTKSFGYCNGEEKPKAAPQGTGATLPPGGEQSATAAPQATGATSLCGGEGETAFIIID

SEQ ID NO: 11866 - DNA, 772 bp, Triticum aestivum
  misc_feature (1)..(772): Ceres Seq. ID no. 15174264
acacaccatctcagcccccatctcccctgcctctctccagcaaactcacgccccccaccaccgaagctcccaaccccacccgaagcggcagccatggcccccaaggcagacaagaagccggcggccgagagcaaggtggagaaggcggccgagaagacccccgcgggcaagaagcccaaggccgagaagcggctgccggcgggcaagacggcgtccaaggaggccggcggtgagggcaagacccggggccgcaagaagggcagcaaggcgaagaagggcgtggagacgtacaagatctacatcttcaaagtgctgaagcaggtgcaccccgacatcggcatctcctccaaggccatgtccatcatgaactccttcatcaacgacatcttcgagaagctcgccggggagtcggccaagctcgcccgctacaacaagaagcccaccatcacgtcccgggagatccagacctccgtccgcctcgtcctccccggggagctcgccaagcacgccgtctccgagggcaccaaggccgtcaccaagttcacctcctcctagactgacgacgcgccgcttgttgtgacagatgtggccgtctgctgtatctgtagtcgctgttgactctgcttatctccatctgcaagtagtggtagctgtagtgcgcgtgctgggtgatgattgccaacgctttgttggctggttggatgtaagaactgaacgtgttgcttttgcaaactgatgaaatctatctagaaaatgtcgcagttgtggtacc

SEQ ID NO: 11867 - protein, 184 aa, Triticum aestivum
  peptide (1)..(184): Ceres Seq. ID no. 15174265
  misc_feature (50)..(184): Pfam Name: Pfam Description:  Core histone H2A/H2B/H3/H4
  misc_feature (37)..(184): NCBI GI NO: 122033 NR Description: HISTONE H2B.2
  misc_feature (32)..(184): NCBI GI NO: 399854 NR Description: Histone H2B.2
  misc_feature (32)..(184): NCBI GI NO: 3913804 NR Description: Histone H2B.3
  misc_feature (32)..(184): NCBI GI NO: 122022 NR Description: Histone H2B
  misc_feature (32)..(184): NCBI GI NO: 34895900 NR Description: putative histone H2B
  misc_feature (32)..(184): NCBI GI NO: 34895838 NR Description: putative histone H2B
  misc_feature (32)..(184): NCBI GI NO: 34895896 NR Description: putative histone H2B
  misc_feature (59)..(184): NCBI GI NO: 34876159 NR Description: similar to Histone H2B 291B [Rattus norvegicus]
  misc_feature (57)..(184): NCBI GI NO: 34876364 NR Description: similar to CG31613-PA [Rattus norvegicus]
  misc_feature (29)..(184): NCBI GI NO: 37550648 NR Description: similar to Histone H2B.n (H2B/n) (H2B.2)
THHLSPHLPCLSPANSRPPPPKLPTPPEAAAMAPKADKKPAAESKVEKAAEKTPAGKKPKAEKRLPAGKTASKEAGGEGKTRGRKKGSKAKKGVETYKIYIFKVLKQVHPDIGISSKAMSIMNSFINDIFEKLAGESAKLARYNKKPTITSREIQTSVRLVLPGELAKHAVSEGTKAVTKFTSS

SEQ ID NO: 11868 - protein, 153 aa, Triticum aestivum
  peptide (1)..(153): Ceres Seq. ID no. 15174266
  misc_feature (19)..(153): Pfam Name: Pfam Description:  Core histone H2A/H2B/H3/H4
  misc_feature (6)..(153): NCBI GI NO: 122033 NR Description: HISTONE H2B.2
  misc_feature (1)..(153): NCBI GI NO: 399854 NR Description: Histone H2B.2
  misc_feature (1)..(153): NCBI GI NO: 3913804 NR Description: Histone H2B.3
  misc_feature (1)..(153): NCBI GI NO: 122022 NR Description: Histone H2B
  misc_feature (1)..(153): NCBI GI NO: 34895900 NR Description: putative histone H2B
  misc_feature (1)..(153): NCBI GI NO: 34895838 NR Description: putative histone H2B
  misc_feature (1)..(153): NCBI GI NO: 34895896 NR Description: putative histone H2B
  misc_feature (28)..(153): NCBI GI NO: 34876159 NR Description: similar to Histone H2B 291B [Rattus norvegicus]
  misc_feature (26)..(153): NCBI GI NO: 34876364 NR Description: similar to CG31613-PA [Rattus norvegicus]
  misc_feature (1)..(153): NCBI GI NO: 37550648 NR Description: similar to Histone H2B.n (H2B/n) (H2B.2)
MAPKADKKPAAESKVEKAAEKTPAGKKPKAEKRLPAGKTASKEAGGEGKTRGRKKGSKAKKGVETYKIYIFKVLKQVHPDIGISSKAMSIMNSFINDIFEKLAGESAKLARYNKKPTITSREIQTSVRLVLPGELAKHAVSEGTKAVTKFTSS

SEQ ID NO: 11869 - protein, 104 aa, Triticum aestivum
  peptide (1)..(104): Ceres Seq. ID no. 15174267
  misc_feature (9)..(59): Pfam Name: Pfam Description:  Extensin-like region
  misc_feature (17)..(104): NCBI GI NO: 25143299 NR Description: pre-mRNA splicing SR protein related (68
  misc_feature (13)..(104): NCBI GI NO: 23103422 NR Description: hypothetical protein [Azotobacter vinelandii]
  misc_feature (35)..(104): NCBI GI NO: 29250446 NR Description: GLP_39_87477_88058 [Giardia lamblia ATCC 50803]
  misc_feature (8)..(104): NCBI GI NO: 25143299 NR Description: pre-mRNA splicing SR protein related (68
  misc_feature (11)..(104): NCBI GI NO: 5821145 NR Description: RNA binding protein [Homo sapiens]
  misc_feature (13)..(104): NCBI GI NO: 5032119 NR Description: Ser/Arg-related nuclear matrix protein
  misc_feature (13)..(104): NCBI GI NO: 23274133 NR Description: Similar to serine/arginine repetitive matrix 1
  misc_feature (8)..(104): NCBI GI NO: 2429362 NR Description: proline rich protein [Santalum album]
  misc_feature (11)..(104): NCBI GI NO: 5821143 NR Description: RNA binding protein [Homo sapiens]
  misc_feature (42)..(104): NCBI GI NO: 31227421 NR Description: ENSANGP00000004917 [Anopheles gambiae]
HTISAPISPASLQQTHAPHHRSSQPHPKRQPWPPRQTRSRRPRARWRRRPRRPPRARSPRPRSGCRRARRRPRRPAVRARPGAARRAARRRRAWRRTRSTSSKC

SEQ ID NO: 11870 - DNA, 825 bp, Triticum aestivum
  misc_feature (1)..(825): Ceres Seq. ID no. 15174260
aatatggctaaagttgtcgagggtcatcgcaggttcatgggtttcaagaagacaatcttgctagatcgaaaactcatcgtcgacctagcagaccagtacaacaacggctcgttgcgatgggatgagttctctttgctgatcaaggctgcccacgcagggcggatgggatcagcctcaaagcggacagtgattcccgacagacccaaggaggaggactacttctacgcgaacccccaggagtgcctgcaagaccccgaccgcctacgcacgtcatgataaccgccgccacccctgtcaatatttccacccaccttataccattcttttcacagacgcagcagccgaaccagaggccaggttcgtcgttacttcgaagaaaccaaccgaaagaggggcggctcggctcgccataggtgtaaaactcggggagggggtgggcgtgggtgttgtatatcttggatgtagctgcctagctggtaaatactctacacgttatagaaatggagggcggtttattcgttcgttccacggaaaataatgaggagtcatactgaagatactcttgtatagaagatggtgatgatagagtctactaccacgaagaggaaaggtaaatttgagtgaggggagagatggctggacccacatgtctgtctctggctggtcttcttttggttgtgtaaaacatactagcagttgttcttctccgtagcctcccccgtgctccctccccgtcagtcaggcagggcttatttttttgtcaatcaaagttgctgagagttgtatactacagtgtttatattggatcgatgtggttacctgtgc

SEQ ID NO: 11871 - protein, 91 aa, Triticum aestivum
  peptide (1)..(91): Ceres Seq. ID no. 15174261
  misc_feature (1)..(83): NCBI GI NO: 15242375 NR Description: expressed protein [Arabidopsis thaliana]
  misc_feature (1)..(83): NCBI GI NO: 6041793 NR Description: putative auxin-independent growth promoter
  misc_feature (1)..(83): NCBI GI NO: 21618304 NR Description: unknown [Arabidopsis thaliana]
  misc_feature (1)..(83): NCBI GI NO: 30678517 NR Description: auxin-independent growth promoter -related
  misc_feature (1)..(82): NCBI GI NO: 15227586 NR Description: axi 1 protein from Nicotiana tabacum -related
  misc_feature (1)..(82): NCBI GI NO: 27754419 NR Description: putative axi 1 protein [Arabidopsis thaliana]
  misc_feature (1)..(82): NCBI GI NO: 8778398 NR Description: F16A14.24 [Arabidopsis thaliana]
  misc_feature (1)..(82): NCBI GI NO: 15223028 NR Description: growth regulator protein -related
  misc_feature (1)..(82): NCBI GI NO: 34902158 NR Description: Putative growth regulator protein
  misc_feature (1)..(82): NCBI GI NO: 19071634 NR Description: putative auxin independent growth-related protein
NMAKVVEGHRRFMGFKKTILLDRKLIVDLADQYNNGSLRWDEFSLLIKAAHAGRMGSASKRTVIPDRPKEEDYFYANPQECLQDPDRLRTS

SEQ ID NO: 11872 - protein, 90 aa, Triticum aestivum
  peptide (1)..(90): Ceres Seq. ID no. 15174262
  misc_feature (1)..(82): NCBI GI NO: 15242375 NR Description: expressed protein [Arabidopsis thaliana]
  misc_feature (1)..(82): NCBI GI NO: 6041793 NR Description: putative auxin-independent growth promoter
  misc_feature (1)..(82): NCBI GI NO: 21618304 NR Description: unknown [Arabidopsis thaliana]
  misc_feature (1)..(82): NCBI GI NO: 30678517 NR Description: auxin-independent growth promoter -related
  misc_feature (1)..(81): NCBI GI NO: 15227586 NR Description: axi 1 protein from Nicotiana tabacum -related
  misc_feature (1)..(81): NCBI GI NO: 27754419 NR Description: putative axi 1 protein [Arabidopsis thaliana]
  misc_feature (1)..(81): NCBI GI NO: 8778398 NR Description: F16A14.24 [Arabidopsis thaliana]
  misc_feature (1)..(81): NCBI GI NO: 15223028 NR Description: growth regulator protein -related
  misc_feature (1)..(81): NCBI GI NO: 34902158 NR Description: Putative growth regulator protein
  misc_feature (1)..(81): NCBI GI NO: 19071634 NR Description: putative auxin independent growth-related protein
MAKVVEGHRRFMGFKKTILLDRKLIVDLADQYNNGSLRWDEFSLLIKAAHAGRMGSASKRTVIPDRPKEEDYFYANPQECLQDPDRLRTS

SEQ ID NO: 11873 - protein, 79 aa, Triticum aestivum
  peptide (1)..(79): Ceres Seq. ID no. 15174263
  misc_feature (1)..(71): NCBI GI NO: 15242375 NR Description: expressed protein [Arabidopsis thaliana]
  misc_feature (1)..(71): NCBI GI NO: 6041793 NR Description: putative auxin-independent growth promoter
  misc_feature (1)..(71): NCBI GI NO: 21618304 NR Description: unknown [Arabidopsis thaliana]
  misc_feature (1)..(71): NCBI GI NO: 30678517 NR Description: auxin-independent growth promoter -related
  misc_feature (1)..(70): NCBI GI NO: 15227586 NR Description: axi 1 protein from Nicotiana tabacum -related
  misc_feature (1)..(70): NCBI GI NO: 27754419 NR Description: putative axi 1 protein [Arabidopsis thaliana]
  misc_feature (1)..(70): NCBI GI NO: 8778398 NR Description: F16A14.24 [Arabidopsis thaliana]
  misc_feature (1)..(70): NCBI GI NO: 15223028 NR Description: growth regulator protein -related
  misc_feature (1)..(70): NCBI GI NO: 34902158 NR Description: Putative growth regulator protein
  misc_feature (1)..(70): NCBI GI NO: 19071634 NR Description: putative auxin independent growth-related protein
MGFKKTILLDRKLIVDLADQYNNGSLRWDEFSLLIKAAHAGRMGSASKRTVIPDRPKEEDYFYANPQECLQDPDRLRTS

SEQ ID NO: 11874 - DNA, 705 bp, Triticum aestivum
  misc_feature (1)..(705): Ceres Seq. ID no. 15174197
attggagagtttgcttttgttcttcttagccgtgcttcaagcatccatctgattgagggcaagctgtatctacttcttcttggaaccacagcgcttagcttggtaacaacacccctgctattcaaaatgatcccagccgtggtccaccttggtgttcttttgagatggttttccgtcgatagcaatcaggtggagttgggcctaaaaggcgaagtcctccgcaatgatagcggcaagcgcataaatttgataatccaaggcccacacgactcatgacacacttggcacaccgcaagctacttttagtatggctttaagttaacgagctctgtaaagtgtttccgcatgtaacgaagagtttatagcgcgtatgcacggccgggcgggagttggaagcagaagaaatcagatctcgttcaaagtgtgtgagatcgacccttccccgcagcgacgactggaaatgcaaggggaggatttcgccagccttgtgagcagtggatgaagcgggcagtgagtgcactgctcgcggtgtgatccctctaatgagggttttctgtagtataagaatgtaatctgattgattgattgattggattagcgtgataggatttaggcttgaccggtataccactgtattaattccacaaaatgtgcagaacgccacctgatcatgaattttgctgtgcagtgagtttgccattgtcg

SEQ ID NO: 11875 - protein, 91 aa, Triticum aestivum
  peptide (1)..(91): Ceres Seq. ID no. 15174198
  misc_feature (1)..(91): NCBI GI NO: 25411916 NR Description: probable potassium/proton antiporter
  misc_feature (1)..(91): NCBI GI NO: 30680729 NR Description: K+ efflux antiporter, putative (KEA4)
  misc_feature (1)..(91): NCBI GI NO: 15239787 NR Description: K+ efflux antiporter, putative (KEA6)
  misc_feature (1)..(62): NCBI GI NO: 10177870 NR Description: potassium/proton antiporter-like protein
  misc_feature (1)..(62): NCBI GI NO: 18423310 NR Description: K+ efflux antiporter, putative (KEA5)
  misc_feature (20)..(69): NCBI GI NO: 34902264 NR Description: Putative potassium/proton antiporter-like protein
IGEFAFVLLSRASSIHLIEGKLYLLLLGTTALSLVTTPLLFKMIPAVVHLGVLLRWFSVDSNQVELGLKGEVLRNDSGKRINLIIQGPHDS

SEQ ID NO: 11876 - protein, 49 aa, Triticum aestivum
  peptide (1)..(49): Ceres Seq. ID no. 15174199
  misc_feature (1)..(49): NCBI GI NO: 25411916 NR Description: probable potassium/proton antiporter
  misc_feature (1)..(49): NCBI GI NO: 30680729 NR Description: K+ efflux antiporter, putative (KEA4)
  misc_feature (1)..(49): NCBI GI NO: 15239787 NR Description: K+ efflux antiporter, putative (KEA6)
  misc_feature (1)..(20): NCBI GI NO: 10177870 NR Description: potassium/proton antiporter-like protein
  misc_feature (1)..(20): NCBI GI NO: 18423310 NR Description: K+ efflux antiporter, putative (KEA5)
  misc_feature (1)..(27): NCBI GI NO: 34902264 NR Description: Putative potassium/proton antiporter-like protein
MIPAVVHLGVLLRWFSVDSNQVELGLKGEVLRNDSGKRINLIIQGPHDS

SEQ ID NO: 11877 - DNA, 756 bp, Triticum aestivum
  misc_feature (1)..(756): Ceres Seq. ID no. 15174168
ccagcaaacactcggcgacacacgacaaacagcaagtactagcaatcatctagccgattcttcccttgctgcagcatctgtagcttccttctcgccttcgttcaccttccgcggctgattaatggcaaccatgatgaccatgagctccttcgccggtgccgccgtcctgccgcgtggctcggccggccacttcggtgcccagtctctgccagcactgggccgacgcgccctcatcgtcagggcacaaaccgaaggcccgagtgcaccaccgccaaacacacccaaggcgagcacctcgatctgggacgcgctggcgttcgccggacccgcgccggagcgcatcaacgggcggctggccatggtgggtttcgtgactgcgcttgccgtggaagcaggccgtggagacgggctcctctcgcagctcggcagcggcaccgggcaggcgtggttcgcctactccgtggcggtgctgtctgtggcgtcgctggtgccactgctccagggcgagagcgctgagggcagagccggtgccatcatgaacgccaacgcggagctctggaacggccgcttcgccatgctcggcctcgccgcgctcgccgccaccgagatcatcaccggcgcgcccttcatcaacgtgtaaaactagctttgtcgtggaccggataacacaacctgtacctaggacatgtaaatgatgagaattgatcatcctcatattctttgtagtgcttatactaattaaagacagttcatacc

SEQ ID NO: 11878 - protein, 172 aa, Triticum aestivum
  peptide (1)..(172): Ceres Seq. ID no. 15174169
  misc_feature (49)..(163): Pfam Name: Pfam Description:  Chlorophyll A-B binding protein
  misc_feature (1)..(172): NCBI GI NO: 119286 NR Description: Low molecular mass early light-inducible proteinHV90
  misc_feature (1)..(172): NCBI GI NO: 4521272 NR Description: early light-inducible protein [Triticum aestivum]
  misc_feature (1)..(172): NCBI GI NO: 119285 NR Description: Low molecular mass early light-inducible proteinHV60
  misc_feature (43)..(172): NCBI GI NO: 28971959 NR Description: putative low molecular mass early light-inducedprotein
  misc_feature (1)..(172): NCBI GI NO: 14029814 NR Description: early light-inducible protein ELIP [Zea mays]
  misc_feature (43)..(172): NCBI GI NO: 28971958 NR Description: putative low molecular mass early light-inducedprotein
  misc_feature (43)..(172): NCBI GI NO: 34904610 NR Description: putative early light-inducible protein
  misc_feature (46)..(172): NCBI GI NO: 119284 NR Description: High molecular mass early light-inducible proteinHV58
  misc_feature (44)..(170): NCBI GI NO: 15228866 NR Description: early light-induced protein [Arabidopsis thaliana]
  misc_feature (43)..(166): NCBI GI NO: 28194659 NR Description: putative early light induced protein
MATMMTMSSFAGAAVLPRGSAGHFGAQSLPALGRRALIVRAQTEGPSAPPPNTPKASTSIWDALAFAGPAPERINGRLAMVGFVTALAVEAGRGDGLLSQLGSGTGQAWFAYSVAVLSVASLVPLLQGESAEGRAGAIMNANAELWNGRFAMLGLAALAATEIITGAPFINV

SEQ ID NO: 11879 - protein, 169 aa, Triticum aestivum
  peptide (1)..(169): Ceres Seq. ID no. 15174170
  misc_feature (46)..(160): Pfam Name: Pfam Description:  Chlorophyll A-B binding protein
  misc_feature (1)..(169): NCBI GI NO: 119286 NR Description: Low molecular mass early light-inducible proteinHV90
  misc_feature (1)..(169): NCBI GI NO: 4521272 NR Description: early light-inducible protein [Triticum aestivum]
  misc_feature (1)..(169): NCBI GI NO: 119285 NR Description: Low molecular mass early light-inducible proteinHV60
  misc_feature (40)..(169): NCBI GI NO: 28971959 NR Description: putative low molecular mass early light-inducedprotein
  misc_feature (1)..(169): NCBI GI NO: 14029814 NR Description: early light-inducible protein ELIP [Zea mays]
  misc_feature (40)..(169): NCBI GI NO: 28971958 NR Description: putative low molecular mass early light-inducedprotein
  misc_feature (40)..(169): NCBI GI NO: 34904610 NR Description: putative early light-inducible protein
  misc_feature (43)..(169): NCBI GI NO: 119284 NR Description: High molecular mass early light-inducible proteinHV58
  misc_feature (41)..(167): NCBI GI NO: 15228866 NR Description: early light-induced protein [Arabidopsis thaliana]
  misc_feature (40)..(163): NCBI GI NO: 28194659 NR Description: putative early light induced protein
MMTMSSFAGAAVLPRGSAGHFGAQSLPALGRRALIVRAQTEGPSAPPPNTPKASTSIWDALAFAGPAPERINGRLAMVGFVTALAVEAGRGDGLLSQLGSGTGQAWFAYSVAVLSVASLVPLLQGESAEGRAGAIMNANAELWNGRFAMLGLAALAATEIITGAPFINV

SEQ ID NO: 11880 - protein, 168 aa, Triticum aestivum
  peptide (1)..(168): Ceres Seq. ID no. 15174171
  misc_feature (45)..(159): Pfam Name: Pfam Description:  Chlorophyll A-B binding protein
  misc_feature (1)..(168): NCBI GI NO: 119286 NR Description: Low molecular mass early light-inducible proteinHV90
  misc_feature (1)..(168): NCBI GI NO: 4521272 NR Description: early light-inducible protein [Triticum aestivum]
  misc_feature (1)..(168): NCBI GI NO: 119285 NR Description: Low molecular mass early light-inducible proteinHV60
  misc_feature (39)..(168): NCBI GI NO: 28971959 NR Description: putative low molecular mass early light-inducedprotein
  misc_feature (1)..(168): NCBI GI NO: 14029814 NR Description: early light-inducible protein ELIP [Zea mays]
  misc_feature (39)..(168): NCBI GI NO: 28971958 NR Description: putative low molecular mass early light-inducedprotein
  misc_feature (39)..(168): NCBI GI NO: 34904610 NR Description: putative early light-inducible protein
  misc_feature (42)..(168): NCBI GI NO: 119284 NR Description: High molecular mass early light-inducible proteinHV58
  misc_feature (40)..(166): NCBI GI NO: 15228866 NR Description: early light-induced protein [Arabidopsis thaliana]
  misc_feature (39)..(162): NCBI GI NO: 28194659 NR Description: putative early light induced protein
MTMSSFAGAAVLPRGSAGHFGAQSLPALGRRALIVRAQTEGPSAPPPNTPKASTSIWDALAFAGPAPERINGRLAMVGFVTALAVEAGRGDGLLSQLGSGTGQAWFAYSVAVLSVASLVPLLQGESAEGRAGAIMNANAELWNGRFAMLGLAALAATEIITGAPFINV

SEQ ID NO: 11881 - DNA, 1020 bp, Triticum aestivum
  misc_feature (1)..(1020): Ceres Seq. ID no. 15174048
cccggttttgcccctgccaagtcaattgaccaggagagggacgcgttcgtgttccctgctcttcgtcgacgccgacggggggtctccacggcgacataccggcggacggcggcggatccctcccggtgaaggcgacgttgttacatttgcaaatgtcaaattctgtcatgaataccactcagaaagttgatccaacggaaccagctgctaagattgctcagcaagcctcacagttcaaacgatggggacgcaagcatccatttgttcgatatggccttccgctcatttctttgacagtgtttggtgcggttggtctagctcatctcatacagggaagcaaagaagtaacaaaggaaaaggaggacatggaatgggaggtcgtagagaaaacaaaagctctgagccgaacaggaccagtggaaggggcttataagcctaagaagctctcgctagaggacgaactgaaggctttgcagcaaaaggtggacataaacagctacgactacaagagaattcccaaacaaaatgaaaacaagtgaagtaaagcactgtttatcatgctaaggggtgggggattttcttaaaatccttgaagtagtttcttggtcctgtttcttcatgagttccttgggatgttgtccaagtgtcaaaatgagattgcggagacattatcatcagaactctgtgcttcgtcagccattagcagtagagagttagtcgaggatccttgtgaaggcttgaaccgtaggaataatctttgtagccatggccgatgggagataggcattttcacggtccaccaagtgagtctttttttagttgatcgaatactgccttctttaccatggggccaataaattgtaggtaacacagtactctgacgtgcgagcaatcaaattttgtatgccatttcttggaagctaattagctgtgtcacgatcactaaacaaaggggaggaaacaggaaagttcatatttcatatgtatattttgagactccgaagctcgtattcggctgac

SEQ ID NO: 11882 - protein, 128 aa, Triticum aestivum
  peptide (1)..(128): Ceres Seq. ID no. 15174049
  misc_feature (9)..(128): NCBI GI NO: 22328612 NR Description: kinesin like protein {Arabidopsis -related
  misc_feature (9)..(128): NCBI GI NO: 7428718 NR Description: probable kinesin - Arabidopsis thaliana
  misc_feature (9)..(62): NCBI GI NO: 26453208 NR Description: putative kinesin [Arabidopsis thaliana]
MSNSVMNTTQKVDPTEPAAKIAQQASQFKRWGRKHPFVRYGLPLISLTVFGAVGLAHLIQGSKEVTKEKEDMEWEVVEKTKALSRTGPVEGAYKPKKLSLEDELKALQQKVDINSYDYKRIPKQNENK

SEQ ID NO: 11883 - protein, 123 aa, Triticum aestivum
  peptide (1)..(123): Ceres Seq. ID no. 15174050
  misc_feature (4)..(123): NCBI GI NO: 22328612 NR Description: kinesin like protein {Arabidopsis -related
  misc_feature (4)..(123): NCBI GI NO: 7428718 NR Description: probable kinesin - Arabidopsis thaliana
  misc_feature (4)..(57): NCBI GI NO: 26453208 NR Description: putative kinesin [Arabidopsis thaliana]
MNTTQKVDPTEPAAKIAQQASQFKRWGRKHPFVRYGLPLISLTVFGAVGLAHLIQGSKEVTKEKEDMEWEVVEKTKALSRTGPVEGAYKPKKLSLEDELKALQQKVDINSYDYKRIPKQNENK

SEQ ID NO: 11884 - protein, 74 aa, Triticum aestivum
  peptide (1)..(74): Ceres Seq. ID no. 15174051
MLSKCQNEIAETLSSELCASSAISSRELVEDPCEGLNRRNNLCSHGRWEIGIFTVHQVSLFLVDRILPSLPWGQ

SEQ ID NO: 11885 - DNA, 1009 bp, Triticum aestivum
  misc_feature (1)..(1009): Ceres Seq. ID no. 15174082
attcttagcgacaacattccgtctcatcctccccagctcggtttttgggccattctaagccaccatgcctgcctccatcgccttcggtcggttcgatgactccttcagcttggcctctttcaaggcctacatcgccgagttcatctccaccctcatcttcgtcttcgccggcgtcggctctgccatcgcctactccaaggtgagcggcggcgcgccgcttgacccatccgggctgatcgccgtggccatctgccacgggttcgggctgttcgtcgcggtcgccgtcggcgccaacatctccggcggccatgtgaaccctgccgtcaccttcggcctcgccctcggcggccagatcaccatcctcaccggcatcttctactgggttgcccagctcctcggcgccatcgtcggcgccttcctcgtccagttctgcaccggcgtggcgacccctacacacgggctttccggcgtgggcgccttcgagggcgtcgtgatggagatcatcgtcaccttcgggctcgtctacaccgtgtacgccaccgccgccgaccccaagaaggggtccctcggcaccatcgctccaatcgccatcggcttcatcgtcggcgccaacatcctcgtcgccggccccttctccggcgggtccatgaaccctgcacgctccttcggccccgccgttgccagcggcgacttcaccaacatctggatctactgggccggcccgctcatcggcggtggcctcgccggcgtcgtctaccggtacctgtacatgtgcgacgaccacaccgccgtcgccggcaacgactactaagccagccatgggaagatcattcggtctttggtttccataatgtcttcggcaacataagaagtgcgtacgtggtggcactctcaggattgtctggatgatgtgaggaacgtcatgttgtttggttccgatcgaaagcccgcgaggctgtggcacttggatgatgcatgtttctgtatctgtactgtgatggatgttgtg

SEQ ID NO: 11886 - protein, 248 aa, Triticum aestivum
  peptide (1)..(248): Ceres Seq. ID no. 15174083
  misc_feature (12)..(231): Pfam Name: Pfam Description:  Major intrinsic protein
  misc_feature (1)..(248): NCBI GI NO: 4099408 NR Description: delta-type tonoplast intrinsic protein
  misc_feature (3)..(248): NCBI GI NO: 11276920 NR Description: aquaporin [imported] - Vernicia fordii
  misc_feature (3)..(248): NCBI GI NO: 7441289 NR Description: tonoplast intrinsic protein
  misc_feature (1)..(246): NCBI GI NO: 12006841 NR Description: putative delta TIP [Nicotiana glauca]
  misc_feature (3)..(244): NCBI GI NO: 7441258 NR Description: probable water channel protein delta-VM23 - radish
  misc_feature (3)..(248): NCBI GI NO: 15233320 NR Description: delta tonoplast integral protein (delta-TIP)
  misc_feature (3)..(248): NCBI GI NO: 17473872 NR Description: delta tonoplast intrinsic protein
  misc_feature (1)..(248): NCBI GI NO: 7441271 NR Description: aquaporin TIP18 - common sunflower
  misc_feature (3)..(248): NCBI GI NO: 11276919 NR Description: water channel protein MipK
  misc_feature (4)..(248): NCBI GI NO: 5911732 NR Description: delta tonoplast intrinsic protein
MPASIAFGRFDDSFSLASFKAYIAEFISTLIFVFAGVGSAIAYSKVSGGAPLDPSGLIAVAICHGFGLFVAVAVGANISGGHVNPAVTFGLALGGQITILTGIFYWVAQLLGAIVGAFLVQFCTGVATPTHGLSGVGAFEGVVMEIIVTFGLVYTVYATAADPKKGSLGTIAPIAIGFIVGANILVAGPFSGGSMNPARSFGPAVASGDFTNIWIYWAGPLIGGGLAGVVYRYLYMCDDHTAVAGNDY

SEQ ID NO: 11887 - DNA, 975 bp, Triticum aestivum
  misc_feature (1)..(975): Ceres Seq. ID no. 15174194
acaccagtcacactcacacgggttcagacacatcgcctcgcctcggcccgctgttcgccgccaccagctagctagtccagcgccaccgccaggcagcccacggccgcagcaatggcgcgtctcgccaccatcctcagcttcggggaccacgccgaggagggcgccggcgccttcacggagccgcaggaggactaccagcaagaacacgacgacgacgacgacgcggcgtcggacgccagcggcgacagcttcgagttcgcgttcgcgcggccgctggcgccggcgggcggggaggcgctggccgacgacctcttcgcgcacggccgcatcctcccggcctacccggtcttccaccgccgccaggcccacgacgacgacgcctcggcctcggccacctccgcgacggcgccgccctcgccggacacgtactgcgcgtgggcgccgcggtccgcgccggggtcgcccgcgcgcgaaccggccgccttccccaagagcgcgtccacgggcacgggcgaggccgcgcgccgcttccgcctgcgcgacatcctcggctccggcggccgctcccacagcgacggcaaggagaagttcctcttcctccagccgactcccgccaaacccaagtccaagacgagcgcattatccgccgcgtcggctccggccaacaagaagacttcgcagcagaagcagggcaagaagaagggcgcggccgccgctccgacggagatggacatggccaccgcgcacaggctcttctacagcaagcccggagccgcggccggccccggcggcgagaggacgacgacgacgacgaaaaagtcgtacctgccctaccggccggccatcgtcggcttcttcgccaccgcgcacgcgctgcgccccaagcaccacccctactagccatcacatcccatcccctgctccgctgctgccacgataaatctcatcaaattaaattagttcgttaattcgttc

SEQ ID NO: 11888 - protein, 312 aa, Triticum aestivum
  peptide (1)..(312): Ceres Seq. ID no. 15174195
  misc_feature (16)..(289): Pfam Name: Pfam Description:  APC basic domain
  misc_feature (16)..(312): NCBI GI NO: 5821151 NR Description: RNA binding protein [Homo sapiens]
  misc_feature (16)..(312): NCBI GI NO: 6634015 NR Description: KIAA0324 protein [Homo sapiens]
  misc_feature (16)..(312): NCBI GI NO: 7512967 NR Description: hypothetical protein KIAA0324 - human (fragment)
  misc_feature (19)..(300): NCBI GI NO: 5821151 NR Description: RNA binding protein [Homo sapiens]
  misc_feature (13)..(268): NCBI GI NO: 25143299 NR Description: pre-mRNA splicing SR protein related (68
  misc_feature (16)..(312): NCBI GI NO: 19923466 NR Description: splicing coactivator subunit SRm300
  misc_feature (19)..(300): NCBI GI NO: 6634015 NR Description: KIAA0324 protein [Homo sapiens]
  misc_feature (19)..(300): NCBI GI NO: 7512967 NR Description: hypothetical protein KIAA0324 - human (fragment)
  misc_feature (16)..(308): NCBI GI NO: 6649242 NR Description: splicing coactivator subunit SRm300 [Homo sapiens]
  misc_feature (19)..(300): NCBI GI NO: 6649242 NR Description: splicing coactivator subunit SRm300 [Homo sapiens]
HQSHSHGFRHIASPRPAVRRHQLASPAPPPGSPRPQQWRVSPPSSASGTTPRRAPAPSRSRRRTTSKNTTTTTTRRRTPAATASSSRSRGRWRRRAGRRWPTTSSRTAASSRPTRSSTAARPTTTTPRPRPPPRRRRPRRTRTARGRRGPRRGRPRANRPPSPRARPRARARPRAASACATSSAPAAAPTATARRSSSSSSRLPPNPSPRRAHYPPRRLRPTRRLRSRSRARRRARPPLRRRWTWPPRTGSSTASPEPRPAPAARGRRRRRKSRTCPTGRPSSASSPPRTRCAPSTTPTSHHIPSPAPLLPR

SEQ ID NO: 11889 - protein, 262 aa, Triticum aestivum
  peptide (1)..(262): Ceres Seq. ID no. 15174196
MARLATILSFGDHAEEGAGAFTEPQEDYQQEHDDDDDAASDASGDSFEFAFARPLAPAGGEALADDLFAHGRILPAYPVFHRRQAHDDDASASATSATAPPSPDTYCAWAPRSAPGSPAREPAAFPKSASTGTGEAARRFRLRDILGSGGRSHSDGKEKFLFLQPTPAKPKSKTSALSAASAPANKKTSQQKQGKKKGAAAAPTEMDMATAHRLFYSKPGAAAGPGGERTTTTTKKSYLPYRPAIVGFFATAHALRPKHHPY

SEQ ID NO: 11890 - DNA, 968 bp, Triticum aestivum
  misc_feature (1)..(968): Ceres Seq. ID no. 15173586
ctcttgagtttaccttattgcttctgttcttttgatgtttacgcaggagcagcggctcgtgcatggacagctaacacctgtacgcttctgaatatgagccagtaaaataccccggaaagaaataaaagttgtgcagctcccaagatcaatgagcagtaccaatcccccttccgcgaccagccatgttgccctcacacgccatccgctggagcatggatgcgggctctctgaatggcggtccagatgcagaggaactgactccacgagtttaaaaaacgggcttcttcaggcatcagctccatccatccccttgtgctgcctctgcccgatgtcgacgacggtgcaggagccgccgcacgtcctggccgtggacgacagcctcgtcgaccgcgtcgtcatctccaggctcctccgcagctccaagtacagagtgacgacggtggacagcgggaagaaggcgctggaggtgctgagcctgggccacgagagcgtgcagctgatcatcacggactactgcatgccggagatgaccggctacgacctgctgaagcgggtcaaggagtcggcagagctgcgcggcatcccggtggtgatcatgtcgtcggagaactcgccgtccaggatccgccggtgcctcgacgagggcgcggaggagttcctcatcaagccggtgcgcccctccgacgtctcccgcctctgcaaccgggccatcgccgccatgcccatgcggtagcaacggccggtcggtgccgtgctgctgatcggtgctagcctgctagcttgctaatccaatcctccctccctcctctgctgagttctcactgacgagatatccccatgtacatgcgtctgctgcagggttgcatcccatggtgaaatcaaaactgaatgaattccatgacaacccacggaatgtatgtattccttacttgccaatgtatgaaatccaccactaactgtgaaacagt

SEQ ID NO: 11891 - protein, 194 aa, Triticum aestivum
  peptide (1)..(194): Ceres Seq. ID no. 15173587
  misc_feature (69)..(179): Pfam Name: Pfam Description:  Response regulator receiver domain
  misc_feature (53)..(186): NCBI GI NO: 32488053 NR Description: OSJNBa0018M05.2
  misc_feature (36)..(186): NCBI GI NO: 11358972 NR Description: repsonse regulator ZmRR2 [imported] - maize
  misc_feature (69)..(188): NCBI GI NO: 11041692 NR Description: response regulator [Zea mays]
  misc_feature (69)..(188): NCBI GI NO: 32489852 NR Description: OSJNBb0065J09.12
  misc_feature (70)..(186): NCBI GI NO: 11358973 NR Description: response regulator Cip1 [imported] - maize
  misc_feature (36)..(113): NCBI GI NO: 12060388 NR Description: response regulator 6 [Zea mays]
  misc_feature (105)..(183): NCBI GI NO: 12060388 NR Description: response regulator 6 [Zea mays]
  misc_feature (68)..(188): NCBI GI NO: 34901288 NR Description: similar to response regulator
  misc_feature (115)..(183): NCBI GI NO: 12060384 NR Description: response regulator 4 [Zea mays]
  misc_feature (70)..(110): NCBI GI NO: 12060384 NR Description: response regulator 4 [Zea mays]
MSSTNPPSATSHVALTRHPLEHGCGLSEWRSRCRGTDSTSLKNGLLQASAPSIPLCCLCPMSTTVQEPPHVLAVDDSLVDRVVISRLLRSSKYRVTTVDSGKKALEVLSLGHESVQLIITDYCMPEMTGYDLLKRVKESAELRGIPVVIMSSENSPSRIRRCLDEGAEEFLIKPVRPSDVSRLCNRAIAAMPMR

SEQ ID NO: 11892 - protein, 134 aa, Triticum aestivum
  peptide (1)..(134): Ceres Seq. ID no. 15173588
  misc_feature (9)..(119): Pfam Name: Pfam Description:  Response regulator receiver domain
  misc_feature (1)..(126): NCBI GI NO: 32488053 NR Description: OSJNBa0018M05.2
  misc_feature (1)..(126): NCBI GI NO: 11358972 NR Description: repsonse regulator ZmRR2 [imported] - maize
  misc_feature (9)..(128): NCBI GI NO: 11041692 NR Description: response regulator [Zea mays]
  misc_feature (9)..(128): NCBI GI NO: 32489852 NR Description: OSJNBb0065J09.12
  misc_feature (10)..(126): NCBI GI NO: 11358973 NR Description: response regulator Cip1 [imported] - maize
  misc_feature (1)..(53): NCBI GI NO: 12060388 NR Description: response regulator 6 [Zea mays]
  misc_feature (45)..(123): NCBI GI NO: 12060388 NR Description: response regulator 6 [Zea mays]
  misc_feature (8)..(128): NCBI GI NO: 34901288 NR Description: similar to response regulator
  misc_feature (55)..(123): NCBI GI NO: 12060384 NR Description: response regulator 4 [Zea mays]
  misc_feature (10)..(50): NCBI GI NO: 12060384 NR Description: response regulator 4 [Zea mays]
MSTTVQEPPHVLAVDDSLVDRVVISRLLRSSKYRVTTVDSGKKALEVLSLGHESVQLIITDYCMPEMTGYDLLKRVKESAELRGIPVVIMSSENSPSRIRRCLDEGAEEFLIKPVRPSDVSRLCNRAIAAMPMR

SEQ ID NO: 11893 - DNA, 776 bp, Triticum aestivum
  misc_feature (1)..(776): Ceres Seq. ID no. 15174176
atcctacccagtgcaattgatcaccattaactacctctaattagttcttccttttacgtacgattcgagcagctttgagcgctaccaagtcgaccatctcgtccaacacgagcgccatcagctgcctgcagcagcacgaccagagcaaggcggcggcggcgaggccgatgacactcacgctcggagagccgcgggagaaggacggccgccaccagcagctcaacagcgccatgcagctccaccaccaccatcaggagcagcagcacttcatcacctcgctgctgcaccagaacaacaacggcaacggcaacaacaacatcctgtcgtgctcgtcggcgtgtgctccagcgggttgccgtctgccggggcggccaacggcgaggtctccgaccagaacaacaacagcaaccacggcggcggcaacaacaacaataacatgcatctctttgaggtggacttcatgtagacgaccgatcgacgcaggtgagcttggagatccctacatggagtcatggagtggtgaccagcctaagcctagcactgtaccaacagtgtcctttaattaatttgtgtgtaggtaaaaaaaaggagagcaaaaagaccttaagggtatagtccatagtctcaaagtgctgagatcagctagcaaaggctgtgcaacctagcatgcttgtgcttggctcaagcatgcgtatgcctttctttcaactttcttccctgcggtgctcctcctatagtgctgcaagcaagcatgcctttctgccattttctgttac

SEQ ID NO: 11894 - protein, 132 aa, Triticum aestivum
  peptide (1)..(132): Ceres Seq. ID no. 15174177
  misc_feature (1)..(71): NCBI GI NO: 5931784 NR Description: SBP-domain protein 4 [Zea mays]
  misc_feature (1)..(61): NCBI GI NO: 5931782 NR Description: SBP-domain protein 3 [Zea mays]
MTLTLGEPREKDGRHQQLNSAMQLHHHHQEQQHFITSLLHQNNNGNGNNNILSCSSACAPAGCRLPGRPTARSPTRTTTATTAAATTTITCISLRWTSCRRPIDAGELGDPYMESWSGDQPKPSTVPTVSFN

SEQ ID NO: 11895 - protein, 111 aa, Triticum aestivum
  peptide (1)..(111): Ceres Seq. ID no. 15174178
  misc_feature (1)..(50): NCBI GI NO: 5931784 NR Description: SBP-domain protein 4 [Zea mays]
  misc_feature (1)..(40): NCBI GI NO: 5931782 NR Description: SBP-domain protein 3 [Zea mays]
MQLHHHHQEQQHFITSLLHQNNNGNGNNNILSCSSACAPAGCRLPGRPTARSPTRTTTATTAAATTTITCISLRWTSCRRPIDAGELGDPYMESWSGDQPKPSTVPTVSFN

SEQ ID NO: 11896 - DNA, 933 bp, Triticum aestivum
  misc_feature (1)..(933): Ceres Seq. ID no. 15173668
atagcttggctagccagcactgtccatggccatggcatttcgcctcattatactcgcactagtaccgctgctggcgaccgtgctcgctgctccttcccttcctagcagcaatgacactgacctcgacgcgctgcttgcgttcaaggcgcagctgtccgacccactcggcgtcctccgcaacagttgggctaccaatgtgtccttctgccgctgggtaggcgtgtcatgcggccggcgccaaagccatcgcgtcaccgccctggagttgccgggcgtgcccctccatggtcagctcgcccctcaccttggaaacctctccttcctctctgttctcaacctcaccagctccaacctcgtcggctccatccccgccgacctcggccggctgcgtcgccttaggcggctcaatcttgcacacaacaacttgtctcactccattccatcgacctttgggaaccttacaggtctccaagttcttgatgtgagcggcaacatgctgtctggtcaaatcccaacggagatgcaaggattgcgcaaccttgcctacatagctctgcatgccaactacttgagtggtcagtgttggcaataatcttgtcttaaatgttttggtgtcacgtggtaagtttagttagctaggattaggaaggccgtgtagtttttggttagtcctccatgtaataggcgtgtccctatgtgtgctaaagcgcacgtagtacgagtccggtttggattagagtttagttggcgtgtctagtataggcaatactagtatgagtccgattagaatatagggtcagattaagatagagttgaacgtgagggcttggtcctgcgtgtatatatacacaggcagggctagttattgtaccgtgagtggagaaaaaccagaaaagaaataaagagaagagaggcacaacacgtgcctttggc

SEQ ID NO: 11897 - protein, 188 aa, Triticum aestivum
  peptide (1)..(188): Ceres Seq. ID no. 15173669
  misc_feature (1)..(184): NCBI GI NO: 37532306 NR Description: putative leucine rich repeat containing proteinkinase
  misc_feature (8)..(184): NCBI GI NO: 34899546 NR Description: putative protein kinase Xa21
  misc_feature (1)..(185): NCBI GI NO: 6979333 NR Description: leucine rich repeat containing protein kinase
  misc_feature (1)..(184): NCBI GI NO: 34904254 NR Description: Oryza sativa leucine rich repeat containing proteinkinase
  misc_feature (1)..(184): NCBI GI NO: 38605794 NR Description: OSJNBb0045P24.8
  misc_feature (1)..(185): NCBI GI NO: 34911420 NR Description: putative leucine rich repeat containing proteinkinase
  misc_feature (7)..(184): NCBI GI NO: 34911422 NR Description: putative leucine rich repeat containing proteinkinase
  misc_feature (1)..(185): NCBI GI NO: 37533650 NR Description: putative Receptor-like protein kinase
  misc_feature (3)..(185): NCBI GI NO: 30421165 NR Description: putative receptor kinase [Hordeum vulgare]
  misc_feature (1)..(184): NCBI GI NO: 15241369 NR Description: leucine-rich repeat transmembrane protein kinase
MAMAFRLIILALVPLLATVLAAPSLPSSNDTDLDALLAFKAQLSDPLGVLRNSWATNVSFCRWVGVSCGRRQSHRVTALELPGVPLHGQLAPHLGNLSFLSVLNLTSSNLVGSIPADLGRLRRLRRLNLAHNNLSHSIPSTFGNLTGLQVLDVSGNMLSGQIPTEMQGLRNLAYIALHANYLSGQCWQ

SEQ ID NO: 11898 - protein, 186 aa, Triticum aestivum
  peptide (1)..(186): Ceres Seq. ID no. 15173670
  misc_feature (1)..(182): NCBI GI NO: 37532306 NR Description: putative leucine rich repeat containing proteinkinase
  misc_feature (6)..(182): NCBI GI NO: 34899546 NR Description: putative protein kinase Xa21
  misc_feature (1)..(183): NCBI GI NO: 6979333 NR Description: leucine rich repeat containing protein kinase
  misc_feature (1)..(182): NCBI GI NO: 34904254 NR Description: Oryza sativa leucine rich repeat containing proteinkinase
  misc_feature (1)..(182): NCBI GI NO: 38605794 NR Description: OSJNBb0045P24.8
  misc_feature (1)..(183): NCBI GI NO: 34911420 NR Description: putative leucine rich repeat containing proteinkinase
  misc_feature (5)..(182): NCBI GI NO: 34911422 NR Description: putative leucine rich repeat containing proteinkinase
  misc_feature (1)..(183): NCBI GI NO: 37533650 NR Description: putative Receptor-like protein kinase
  misc_feature (1)..(183): NCBI GI NO: 30421165 NR Description: putative receptor kinase [Hordeum vulgare]
  misc_feature (1)..(182): NCBI GI NO: 15241369 NR Description: leucine-rich repeat transmembrane protein kinase
MAFRLIILALVPLLATVLAAPSLPSSNDTDLDALLAFKAQLSDPLGVLRNSWATNVSFCRWVGVSCGRRQSHRVTALELPGVPLHGQLAPHLGNLSFLSVLNLTSSNLVGSIPADLGRLRRLRRLNLAHNNLSHSIPSTFGNLTGLQVLDVSGNMLSGQIPTEMQGLRNLAYIALHANYLSGQCWQ

SEQ ID NO: 11899 - DNA, 619 bp, Triticum aestivum
  misc_feature (1)..(619): Ceres Seq. ID no. 15174172
cctgctaagggatggtcagattacagaacccctgtgaaggggctgtacctctgcggcagcggtgcgcacccaggcggcggggtgatgggtgccccgggccgcaatgctgctgccgtggttttggatgatctcaaggcaagatagatgcaattaatggaagatggaaatggcagctgacactagggtagcattttcaagcacaaggctgcaaaagcagcaccagtgtgtaatctcttgtacggaaatgcaaaccttgtcgttaagccatctggtagagaccattttgtcatgcatacttacatgataaaaaagatgagacatgagaagcattttctgaatgaattgttgcagctgttctcattttggctctcttatcggagggctcaaagggattaattctcagttatgcggttacatctattttcttctgtacgaagtagtttctcaatgcagtctgccgaaccttcaatttggttaaatgtgaagaggagtagagtttgcgaagtatagttagatattaactgtgagtgctatgctcatctgtacatttgaactgccatccagtaatctgtgtcgcctagcttgtctgcagacttgaactgcgacctaggtaccttat

SEQ ID NO: 11900 - protein, 47 aa, Triticum aestivum
  peptide (1)..(47): Ceres Seq. ID no. 15174173
  misc_feature (1)..(45): NCBI GI NO: 17979255 NR Description: AT5g49550/K6M13_10 [Arabidopsis thaliana]
  misc_feature (1)..(45): NCBI GI NO: 18423042 NR Description: amine oxidase-related [Arabidopsis thaliana]
  misc_feature (1)..(39): NCBI GI NO: 10177621 NR Description: phytoene dehydrogenase-like [Arabidopsis thaliana]
  misc_feature (1)..(44): NCBI GI NO: 13473167 NR Description: phytoene dehydrogenase [Mesorhizobium loti]
  misc_feature (1)..(45): NCBI GI NO: 15899171 NR Description: Phytoene dehydrogenase related protein
  misc_feature (1)..(45): NCBI GI NO: 15920768 NR Description: 517aa long conserved hypothetical protein
  misc_feature (1)..(43): NCBI GI NO: 22965404 NR Description: hypothetical protein [Rhodopseudomonas palustris]
  misc_feature (6)..(46): NCBI GI NO: 14249308 NR Description: hypothetical protein MGC13047 [Homo sapiens]
  misc_feature (6)..(46): NCBI GI NO: 22761240 NR Description: unnamed protein product [Homo sapiens]
  misc_feature (1)..(43): NCBI GI NO: 27381697 NR Description: blr6586 [Bradyrhizobium japonicum]
PAKGWSDYRTPVKGLYLCGSGAHPGGGVMGAPGRNAAAVVLDDLKAR

SEQ ID NO: 11901 - protein, 47 aa, Triticum aestivum
  peptide (1)..(47): Ceres Seq. ID no. 15174174
MEMAADTRVAFSSTRLQKQHQCVISCTEMQTLSLSHLVETILSCILT

SEQ ID NO: 11902 - protein, 46 aa, Triticum aestivum
  peptide (1)..(46): Ceres Seq. ID no. 15174175
MNCCSCSHFGSLIGGLKGINSQLCGYIYFLLYEVVSQCSLPNLQFG

SEQ ID NO: 11903 - DNA, 689 bp, Triticum aestivum
  misc_feature (1)..(689): Ceres Seq. ID no. 15173785
acctcccacaaccgctccgctacctcctcttcttgattcctgccactgtccgcctctcccgcccggccctcgccatggacggcgccgacagcatgcggttccagcggcaggcctcctgctcctgcgccccctccatgtcccgcggctacgtccgcagcggcttcgacctcgacgacgacgacttcgacggcttcgccgacgggcacttcgacaaggccggcgtcgtccagcacgggagggcgccgcccaccgccgcgtcgcgcgggtgcggcacgaagctgaggggcctgtggcggaagatcgtccgggagaagaagaggatactgctctgctccaccggctgcgtgcccgtcggcggggcctcggcggcggcgcgggagccctacgacgcgtacagctacgcgcagaacttcgacgacggcgcggcctgggtggagcccgacaacctctcgcgctccttctccgcgcgcttcgccgtcccctccagggtcctgcagcgggtcgccgtgtagacacgacacgacacgacccgccgccggcggctgcgaccgcggccgaccgtcgtttctttcttttgttttcgttctttgtttcttgttcttctcatctctgtctcagttttggagtcgtcaacaactgtgaaaaaggaatgttctttgcccgcctgtaaatggtagcccctcaatccc

SEQ ID NO: 11904 - protein, 222 aa, Triticum aestivum
  peptide (1)..(222): Ceres Seq. ID no. 15173786
  misc_feature (22)..(181): NCBI GI NO: 23018055 NR Description: hypothetical protein [Thermobifida fusca]
PPTTAPLPPLLDSCHCPPLPPGPRHGRRRQHAVPAAGLLLLRPLHVPRLRPQRLRPRRRRLRRLRRRALRQGRRRPAREGAAHRRVARVRHEAEGPVAEDRPGEEEDTALLHRLRARRRGLGGGAGALRRVQLRAELRRRRGLGGARQPLALLLRALRRPLQGPAAGRRVDTTRHDPPPAAATAADRRFFLLFSFFVSCSSHLCLSFGVVNNCEKGMFFARL

SEQ ID NO: 11905 - protein, 169 aa, Triticum aestivum
  peptide (1)..(169): Ceres Seq. ID no. 15173787
  misc_feature (48)..(169): NCBI GI NO: 34906222 NR Description: P0666G04.17
  misc_feature (22)..(90): NCBI GI NO: 34906222 NR Description: P0666G04.17
LPQPLRYLLFLIPATVRLSRPALAMDGADSMRFQRQASCSCAPSMSRGYVRSGFDLDDDDFDGFADGHFDKAGVVQHGRAPPTAASRGCGTKLRGLWRKIVREKKRILLCSTGCVPVGGASAAAREPYDAYSYAQNFDDGAAWVEPDNLSRSFSARFAVPSRVLQRVAV

SEQ ID NO: 11906 - protein, 145 aa, Triticum aestivum
  peptide (1)..(145): Ceres Seq. ID no. 15173788
  misc_feature (24)..(145): NCBI GI NO: 34906222 NR Description: P0666G04.17
  misc_feature (1)..(66): NCBI GI NO: 34906222 NR Description: P0666G04.17
MDGADSMRFQRQASCSCAPSMSRGYVRSGFDLDDDDFDGFADGHFDKAGVVQHGRAPPTAASRGCGTKLRGLWRKIVREKKRILLCSTGCVPVGGASAAAREPYDAYSYAQNFDDGAAWVEPDNLSRSFSARFAVPSRVLQRVAV

SEQ ID NO: 11907 - DNA, 1021 bp, Triticum aestivum
  misc_feature (1)..(1021): Ceres Seq. ID no. 15173688
catttaagcttaaacccatgtcccctaacccccccgtaggtctccgtcccgaattccccattccccatctccctccctctccatggccgccgccgccgcttccatggcccgcaggctgctctcccccaccacctcctcgccgtccaccgccatacgcctcctcatctcccgccgcatcgcctccgccccgtccatcccgcacgccccggccgcggcggcgagggagatgctgcgcccggcggccgtcgcctcctcgtcctccttcctcctccgcggcgccgggggcgccaggggaatggcgcggcggccggggggcgacgggtactcccccgcgcggggcgggggcgggggcggggccggaggggaccgcgcgcccacggagatggcgccgctgttccccgggtgcgactacaagcactggctgatcgtcatggacaagcccggcggcgagggcgcctccaagcaccagatgatcgactgctacgtccagaccctcgccaaggtcctcggaagcgaggaggaggccaagaggaagatttacaacgtctcgtgcgagcgctacttcgggttcgggtgtgagattgatgaggagacatccaacaagcttgaagggattcctggtgttctgtttgtactccccgattcctatgtggaccctgaacacaaggactatggagccgagctgtttgtgaatggggagattgtgcagagatcacccgagaggcagaggagggtggagcccgttccgcagagagcgtcggacaggccgaggtacaacgacaggacccggtacgcgcgccggagggagaaccagcagcagcagcagcagcgatgatccaccacacgaccgagctagaggcaacctgctgtgctgttttcatcccctcgacacagcaagtagctggtattgcttggttttagcaatccgtttcatgttgctactactctgttatgtgtatgtatttgacgacttggagcttgaaactaagaagcttgatagcataaaagaattttagagctg

SEQ ID NO: 11908 - protein, 250 aa, Triticum aestivum
  peptide (1)..(250): Ceres Seq. ID no. 15173689
  misc_feature (18)..(245): NCBI GI NO: 34897972 NR Description: putative plastid protein
  misc_feature (32)..(248): NCBI GI NO: 38344141 NR Description: OSJNBa0041A02.8
  misc_feature (78)..(243): NCBI GI NO: 2440029 NR Description: DAL1 protein [Arabidopsis thaliana]
  misc_feature (78)..(243): NCBI GI NO: 15226108 NR Description: plastid protein [Arabidopsis thaliana]
  misc_feature (78)..(243): NCBI GI NO: 25370552 NR Description: DAG protein homolog
  misc_feature (78)..(243): NCBI GI NO: 21617909 NR Description: plastid protein [Arabidopsis thaliana]
  misc_feature (17)..(245): NCBI GI NO: 15223247 NR Description: plastid protein -related [Arabidopsis thaliana]
  misc_feature (75)..(245): NCBI GI NO: 15226934 NR Description: expressed protein [Arabidopsis thaliana]
  misc_feature (18)..(250): NCBI GI NO: 38636775 NR Description: putative DAG protein
  misc_feature (20)..(243): NCBI GI NO: 18400602 NR Description: expressed protein [Arabidopsis thaliana]
MAAAAASMARRLLSPTTSSPSTAIRLLISRRIASAPSIPHAPAAAAREMLRPAAVASSSSFLLRGAGGARGMARRPGGDGYSPARGGGGGGAGGDRAPTEMAPLFPGCDYKHWLIVMDKPGGEGASKHQMIDCYVQTLAKVLGSEEEAKRKIYNVSCERYFGFGCEIDEETSNKLEGIPGVLFVLPDSYVDPEHKDYGAELFVNGEIVQRSPERQRRVEPVPQRASDRPRYNDRTRYARRRENQQQQQQR

SEQ ID NO: 11909 - protein, 243 aa, Triticum aestivum
  peptide (1)..(243): Ceres Seq. ID no. 15173690
  misc_feature (11)..(238): NCBI GI NO: 34897972 NR Description: putative plastid protein
  misc_feature (25)..(241): NCBI GI NO: 38344141 NR Description: OSJNBa0041A02.8
  misc_feature (71)..(236): NCBI GI NO: 2440029 NR Description: DAL1 protein [Arabidopsis thaliana]
  misc_feature (71)..(236): NCBI GI NO: 15226108 NR Description: plastid protein [Arabidopsis thaliana]
  misc_feature (71)..(236): NCBI GI NO: 25370552 NR Description: DAG protein homolog
  misc_feature (71)..(236): NCBI GI NO: 21617909 NR Description: plastid protein [Arabidopsis thaliana]
  misc_feature (10)..(238): NCBI GI NO: 15223247 NR Description: plastid protein -related [Arabidopsis thaliana]
  misc_feature (68)..(238): NCBI GI NO: 15226934 NR Description: expressed protein [Arabidopsis thaliana]
  misc_feature (11)..(243): NCBI GI NO: 38636775 NR Description: putative DAG protein
  misc_feature (13)..(236): NCBI GI NO: 18400602 NR Description: expressed protein [Arabidopsis thaliana]
MARRLLSPTTSSPSTAIRLLISRRIASAPSIPHAPAAAAREMLRPAAVASSSSFLLRGAGGARGMARRPGGDGYSPARGGGGGGAGGDRAPTEMAPLFPGCDYKHWLIVMDKPGGEGASKHQMIDCYVQTLAKVLGSEEEAKRKIYNVSCERYFGFGCEIDEETSNKLEGIPGVLFVLPDSYVDPEHKDYGAELFVNGEIVQRSPERQRRVEPVPQRASDRPRYNDRTRYARRRENQQQQQQR

SEQ ID NO: 11910 - protein, 202 aa, Triticum aestivum
  peptide (1)..(202): Ceres Seq. ID no. 15173691
  misc_feature (1)..(197): NCBI GI NO: 34897972 NR Description: putative plastid protein
  misc_feature (1)..(200): NCBI GI NO: 38344141 NR Description: OSJNBa0041A02.8
  misc_feature (30)..(195): NCBI GI NO: 2440029 NR Description: DAL1 protein [Arabidopsis thaliana]
  misc_feature (30)..(195): NCBI GI NO: 15226108 NR Description: plastid protein [Arabidopsis thaliana]
  misc_feature (30)..(195): NCBI GI NO: 25370552 NR Description: DAG protein homolog
  misc_feature (30)..(195): NCBI GI NO: 21617909 NR Description: plastid protein [Arabidopsis thaliana]
  misc_feature (1)..(197): NCBI GI NO: 15223247 NR Description: plastid protein -related [Arabidopsis thaliana]
  misc_feature (27)..(197): NCBI GI NO: 15226934 NR Description: expressed protein [Arabidopsis thaliana]
  misc_feature (1)..(202): NCBI GI NO: 38636775 NR Description: putative DAG protein
  misc_feature (1)..(195): NCBI GI NO: 18400602 NR Description: expressed protein [Arabidopsis thaliana]
MLRPAAVASSSSFLLRGAGGARGMARRPGGDGYSPARGGGGGGAGGDRAPTEMAPLFPGCDYKHWLIVMDKPGGEGASKHQMIDCYVQTLAKVLGSEEEAKRKIYNVSCERYFGFGCEIDEETSNKLEGIPGVLFVLPDSYVDPEHKDYGAELFVNGEIVQRSPERQRRVEPVPQRASDRPRYNDRTRYARRRENQQQQQQR

SEQ ID NO: 11911 - DNA, 658 bp, Triticum aestivum
  misc_feature (1)..(658): Ceres Seq. ID no. 15173842
tctccacatcaacgccagcaagaacaaatgatgcaactgatacaacaacttcagcagagaggattgaatcgccagcagattgcgcaggcgctgcagcgacttccccatcttaatgcccaacatctgaaccagcagcaacggcaacaacagcaagcatctccaaggatgccagcatctgcagcagggaagcccgcaaacacggcaggatcgcagccggcgacaccttcctcaggcggaaccgcggcgggtgcaaatgcgccgcatcaaggagggggaaattgcagccaacttattgggaagagaaagatacatgatttggtggcgcaggtggatccacagtgcgaggttgatccagaggtggaagatttgattctggagattgccgacgacttcattaacacagcggctgattttgcgtgcaggcttgcaaagcacaggaaatcgtcggttgtggaagccaaggatgtgctactgcacctgcagaagaattgtcacctgtccgctcctggtttctcacaggagaggatgtgaatgaatctgcagagaaattcagtgtaggctttggtagaattgtggcatttactttgaaaagcgtgaattgtatttgagatagatacttataccattataggtaaatgagaactgctatacggacgac

SEQ ID NO: 11912 - protein, 176 aa, Triticum aestivum
  peptide (1)..(176): Ceres Seq. ID no. 15173843
  misc_feature (99)..(166): Pfam Name: Pfam Description:  Transcription initiation factor TFIID subunit A
  misc_feature (5)..(174): NCBI GI NO: 9665128 NR Description: Unknown protein [Arabidopsis thaliana]
  misc_feature (5)..(174): NCBI GI NO: 18394483 NR Description: expressed protein [Arabidopsis thaliana]
  misc_feature (5)..(174): NCBI GI NO: 8778478 NR Description: F1L3.13 [Arabidopsis thaliana]
  misc_feature (37)..(160): NCBI GI NO: 34908268 NR Description: P0446B05.23
  misc_feature (18)..(174): NCBI GI NO: 19115201 NR Description: hypothetical protein [Schizosaccharomyces pombe]
  misc_feature (1)..(174): NCBI GI NO: 18398741 NR Description: conserved hypothetical protein
  misc_feature (58)..(176): NCBI GI NO: 3024710 NR Description: Transcription initiation factor TFIID 20/15 kDa subunits
  misc_feature (57)..(176): NCBI GI NO: 12841601 NR Description: unnamed protein product [Mus musculus]
  misc_feature (57)..(176): NCBI GI NO: 18044302 NR Description: TAF12 RNA polymerase II, TATA box binding protein
  misc_feature (40)..(171): NCBI GI NO: 21240668 NR Description: hypothetical protein [Dictyostelium discoideum]
SPHQRQQEQMMQLIQQLQQRGLNRQQIAQALQRLPHLNAQHLNQQQRQQQQASPRMPASAAGKPANTAGSQPATPSSGGTAAGANAPHQGGGNCSQLIGKRKIHDLVAQVDPQCEVDPEVEDLILEIADDFINTAADFACRLAKHRKSSVVEAKDVLLHLQKNCHLSAPGFSQERM

SEQ ID NO: 11913 - protein, 167 aa, Triticum aestivum
  peptide (1)..(167): Ceres Seq. ID no. 15173844
  misc_feature (90)..(157): Pfam Name: Pfam Description:  Transcription initiation factor TFIID subunit A
  misc_feature (1)..(165): NCBI GI NO: 9665128 NR Description: Unknown protein [Arabidopsis thaliana]
  misc_feature (1)..(165): NCBI GI NO: 18394483 NR Description: expressed protein [Arabidopsis thaliana]
  misc_feature (1)..(165): NCBI GI NO: 8778478 NR Description: F1L3.13 [Arabidopsis thaliana]
  misc_feature (28)..(151): NCBI GI NO: 34908268 NR Description: P0446B05.23
  misc_feature (9)..(165): NCBI GI NO: 19115201 NR Description: hypothetical protein [Schizosaccharomyces pombe]
  misc_feature (1)..(165): NCBI GI NO: 18398741 NR Description: conserved hypothetical protein
  misc_feature (49)..(167): NCBI GI NO: 3024710 NR Description: Transcription initiation factor TFIID 20/15 kDa subunits
  misc_feature (48)..(167): NCBI GI NO: 12841601 NR Description: unnamed protein product [Mus musculus]
  misc_feature (48)..(167): NCBI GI NO: 18044302 NR Description: TAF12 RNA polymerase II, TATA box binding protein
  misc_feature (31)..(162): NCBI GI NO: 21240668 NR Description: hypothetical protein [Dictyostelium discoideum]
MMQLIQQLQQRGLNRQQIAQALQRLPHLNAQHLNQQQRQQQQASPRMPASAAGKPANTAGSQPATPSSGGTAAGANAPHQGGGNCSQLIGKRKIHDLVAQVDPQCEVDPEVEDLILEIADDFINTAADFACRLAKHRKSSVVEAKDVLLHLQKNCHLSAPGFSQERM

SEQ ID NO: 11914 - protein, 166 aa, Triticum aestivum
  peptide (1)..(166): Ceres Seq. ID no. 15173845
  misc_feature (89)..(156): Pfam Name: Pfam Description:  Transcription initiation factor TFIID subunit A
  misc_feature (1)..(164): NCBI GI NO: 9665128 NR Description: Unknown protein [Arabidopsis thaliana]
  misc_feature (1)..(164): NCBI GI NO: 18394483 NR Description: expressed protein [Arabidopsis thaliana]
  misc_feature (1)..(164): NCBI GI NO: 8778478 NR Description: F1L3.13 [Arabidopsis thaliana]
  misc_feature (27)..(150): NCBI GI NO: 34908268 NR Description: P0446B05.23
  misc_feature (8)..(164): NCBI GI NO: 19115201 NR Description: hypothetical protein [Schizosaccharomyces pombe]
  misc_feature (1)..(164): NCBI GI NO: 18398741 NR Description: conserved hypothetical protein
  misc_feature (48)..(166): NCBI GI NO: 3024710 NR Description: Transcription initiation factor TFIID 20/15 kDa subunits
  misc_feature (47)..(166): NCBI GI NO: 12841601 NR Description: unnamed protein product [Mus musculus]
  misc_feature (47)..(166): NCBI GI NO: 18044302 NR Description: TAF12 RNA polymerase II, TATA box binding protein
  misc_feature (30)..(161): NCBI GI NO: 21240668 NR Description: hypothetical protein [Dictyostelium discoideum]
MQLIQQLQQRGLNRQQIAQALQRLPHLNAQHLNQQQRQQQQASPRMPASAAGKPANTAGSQPATPSSGGTAAGANAPHQGGGNCSQLIGKRKIHDLVAQVDPQCEVDPEVEDLILEIADDFINTAADFACRLAKHRKSSVVEAKDVLLHLQKNCHLSAPGFSQERM

SEQ ID NO: 11915 - protein, 121 aa, Triticum aestivum
  peptide (1)..(121): Ceres Seq. ID no. 15173846
  misc_feature (44)..(111): Pfam Name: Pfam Description:  Transcription initiation factor TFIID subunit A
  misc_feature (1)..(119): NCBI GI NO: 9665128 NR Description: Unknown protein [Arabidopsis thaliana]
  misc_feature (1)..(119): NCBI GI NO: 18394483 NR Description: expressed protein [Arabidopsis thaliana]
  misc_feature (1)..(119): NCBI GI NO: 8778478 NR Description: F1L3.13 [Arabidopsis thaliana]
  misc_feature (1)..(105): NCBI GI NO: 34908268 NR Description: P0446B05.23
  misc_feature (1)..(119): NCBI GI NO: 19115201 NR Description: hypothetical protein [Schizosaccharomyces pombe]
  misc_feature (1)..(119): NCBI GI NO: 18398741 NR Description: conserved hypothetical protein
  misc_feature (3)..(121): NCBI GI NO: 3024710 NR Description: Transcription initiation factor TFIID 20/15 kDa subunits
  misc_feature (2)..(121): NCBI GI NO: 12841601 NR Description: unnamed protein product [Mus musculus]
  misc_feature (2)..(121): NCBI GI NO: 18044302 NR Description: TAF12 RNA polymerase II, TATA box binding protein
  misc_feature (1)..(116): NCBI GI NO: 21240668 NR Description: hypothetical protein [Dictyostelium discoideum]
MPASAAGKPANTAGSQPATPSSGGTAAGANAPHQGGGNCSQLIGKRKIHDLVAQVDPQCEVDPEVEDLILEIADDFINTAADFACRLAKHRKSSVVEAKDVLLHLQKNCHLSAPGFSQERM

SEQ ID NO: 11916 - DNA, 636 bp, Triticum aestivum
  misc_feature (1)..(636): Ceres Seq. ID no. 15173826
gcagcgaagcgcccgaaccgattcgagtgacactcctcttttttacctccctccctccctcccaaagtccaaaccctagccggctagacctcgcgatccaatccacatctaacccacccgtagagatttcggcggccgatgtctccgctgtcgccgccgcggtctccacgccccctcttgtactagcagtcagccagcgacctccctcacagcctaaaaatccacgccgtagcgacgactcgagggtcggacggcaggcggccatgagcagcgcgttcagcgaggagatactcgccgacaagctcgccaagctcaacaacacgcagcagtgcatcgaaacgctgtcgcattggtgcatttaccatcggaaggatgcagagctaattgtccaaacatgggccaagcagttccataattctggaaatgaacagaaggtccctttcctttatctggctaatgacatcctacagaacagtaagcgcatctacaaagttgaatcctcgatgttgattttgtatttgaactaagttcatgcccatgattcggtggatttgccatgaatttggttaagcttgcagtgatgtggcctcctgtttggaaaaattgaatattctgcctatcagtggtttcaaactc

SEQ ID NO: 11917 - protein, 174 aa, Triticum aestivum
  peptide (1)..(174): Ceres Seq. ID no. 15173827
  misc_feature (88)..(160): NCBI GI NO: 30682987 NR Description: conserved hypothetical protein
  misc_feature (88)..(160): NCBI GI NO: 18424920 NR Description: expressed protein [Arabidopsis thaliana]
  misc_feature (88)..(160): NCBI GI NO: 30688588 NR Description: expressed protein [Arabidopsis thaliana]
  misc_feature (102)..(160): NCBI GI NO: 32492177 NR Description: OSJNBb0034I13.7
  misc_feature (90)..(174): NCBI GI NO: 24655920 NR Description: CG9018-PB [Drosophila melanogaster]
  misc_feature (90)..(160): NCBI GI NO: 29124544 NR Description: Similar to RIKEN cDNA 2610304G08 gene
  misc_feature (90)..(174): NCBI GI NO: 24655915 NR Description: CG9018-PA [Drosophila melanogaster]
  misc_feature (90)..(160): NCBI GI NO: 26375530 NR Description: unnamed protein product [Mus musculus]
  misc_feature (90)..(160): NCBI GI NO: 33876422 NR Description: Unknown (protein for IMAGE:2967326) [Homo sapiens]
  misc_feature (90)..(160): NCBI GI NO: 14603356 NR Description: Unknown (protein for MGC:19513) [Homo sapiens]
SEAPEPIRVTLLFFTSLPPSQSPNPSRLDLAIQSTSNPPVEISAADVSAVAAAVSTPPLVLAVSQRPPSQPKNPRRSDDSRVGRQAAMSSAFSEEILADKLAKLNNTQQCIETLSHWCIYHRKDAELIVQTWAKQFHNSGNEQKVPFLYLANDILQNSKRIYKVESSMLILYLN

SEQ ID NO: 11918 - protein, 87 aa, Triticum aestivum
  peptide (1)..(87): Ceres Seq. ID no. 15173828
  misc_feature (1)..(73): NCBI GI NO: 30682987 NR Description: conserved hypothetical protein
  misc_feature (1)..(73): NCBI GI NO: 18424920 NR Description: expressed protein [Arabidopsis thaliana]
  misc_feature (1)..(73): NCBI GI NO: 30688588 NR Description: expressed protein [Arabidopsis thaliana]
  misc_feature (15)..(73): NCBI GI NO: 32492177 NR Description: OSJNBb0034I13.7
  misc_feature (3)..(87): NCBI GI NO: 24655920 NR Description: CG9018-PB [Drosophila melanogaster]
  misc_feature (3)..(73): NCBI GI NO: 29124544 NR Description: Similar to RIKEN cDNA 2610304G08 gene
  misc_feature (3)..(87): NCBI GI NO: 24655915 NR Description: CG9018-PA [Drosophila melanogaster]
  misc_feature (3)..(73): NCBI GI NO: 26375530 NR Description: unnamed protein product [Mus musculus]
  misc_feature (3)..(73): NCBI GI NO: 33876422 NR Description: Unknown (protein for IMAGE:2967326) [Homo sapiens]
  misc_feature (3)..(73): NCBI GI NO: 14603356 NR Description: Unknown (protein for MGC:19513) [Homo sapiens]
MSSAFSEEILADKLAKLNNTQQCIETLSHWCIYHRKDAELIVQTWAKQFHNSGNEQKVPFLYLANDILQNSKRIYKVESSMLILYLN

SEQ ID NO: 11919 - DNA, 920 bp, Triticum aestivum
  misc_feature (1)..(920): Ceres Seq. ID no. 15173858
aaagtaaccgtagtggaatggggtggagtagtggtggctagagtgtgccgggttcgttgcggagctcgcgaccagctctgccaaaagcgatccatgtctctttgaccccccacaccccacccccgtatactcccttcccttctcccatcacacttccattcgagacacactcacccttcgacctgtccgcctctcctatataaacgcacgtccaccgctccctgttcctcatcctcgttcccttgcactgcgccaacaaacaattaactacactctcactagctagctaggctaggccggggagggagaaggaggcgccaagatgttgaggatgcagcagcaggtggagggcgtggtgggcggcggcatcatggcggaggcggaggaggcggcggtgtacgagcgggtggctcgcatggccagcggcaacgcggtggtcgtcttcagcgccagcggctgctgcatgtgccacgtcgtcaagcgcctcctgcttggcctgggggtcggccccaccgtctacgagttggaccagatgggcggcgccgggcgagagatccaggcggcgctggcgcagctgctgccccccggacccggcgccggccaccaccagcagccgccagtgcccgtggtgttcgtcggcgggaggctcctgggcggcgtggagaaggtgatggcgtgccacatcaacggcacgctcgtcccgctcctcaaggacgccggcgcgctctggctctgagccgcgagctgcattgctttgctgtctcgccggccggccggaactgatggtggtggtgatcaacgacggcgtttactttgtgtgttggtcgtcttttcttttcttgtgccgtgcctgtggctgtggctgtgcgttgcatggtgtgttgagcttcactggctagtgagatgtagatatagttagc

SEQ ID NO: 11920 - protein, 137 aa, Triticum aestivum
  peptide (1)..(137): Ceres Seq. ID no. 15173859
  misc_feature (37)..(129): Pfam Name: Pfam Description:  Glutaredoxin
  misc_feature (3)..(137): NCBI GI NO: 33146704 NR Description: glutaredoxin-like protein
  misc_feature (16)..(137): NCBI GI NO: 21740746 NR Description: OSJNBa0072K14.2
  misc_feature (28)..(137): NCBI GI NO: 15241297 NR Description: glutaredoxin protein family [Arabidopsis thaliana]
  misc_feature (14)..(137): NCBI GI NO: 15232836 NR Description: glutaredoxin protein family [Arabidopsis thaliana]
  misc_feature (32)..(137): NCBI GI NO: 21537203 NR Description: glutaredoxin-like protein [Arabidopsis thaliana]
  misc_feature (27)..(137): NCBI GI NO: 34914726 NR Description: P0560B06.28
  misc_feature (27)..(137): NCBI GI NO: 15234677 NR Description: glutaredoxin protein family [Arabidopsis thaliana]
  misc_feature (27)..(137): NCBI GI NO: 15234680 NR Description: glutaredoxin protein family [Arabidopsis thaliana]
  misc_feature (32)..(135): NCBI GI NO: 1532163 NR Description: similar to glutaredoxin encoded by GenBankAccession Number Z49699
  misc_feature (28)..(137): NCBI GI NO: 15637350 NR Description: glutaredoxin [Tilia platyphyllos]
MLRMQQQVEGVVGGGIMAEAEEAAVYERVARMASGNAVVVFSASGCCMCHVVKRLLLGLGVGPTVYELDQMGGAGREIQAALAQLLPPGPGAGHHQQPPVPVVFVGGRLLGGVEKVMACHINGTLVPLLKDAGALWL

SEQ ID NO: 11921 - protein, 134 aa, Triticum aestivum
  peptide (1)..(134): Ceres Seq. ID no. 15173860
  misc_feature (34)..(126): Pfam Name: Pfam Description:  Glutaredoxin
  misc_feature (1)..(134): NCBI GI NO: 33146704 NR Description: glutaredoxin-like protein
  misc_feature (13)..(134): NCBI GI NO: 21740746 NR Description: OSJNBa0072K14.2
  misc_feature (25)..(134): NCBI GI NO: 15241297 NR Description: glutaredoxin protein family [Arabidopsis thaliana]
  misc_feature (11)..(134): NCBI GI NO: 15232836 NR Description: glutaredoxin protein family [Arabidopsis thaliana]
  misc_feature (29)..(134): NCBI GI NO: 21537203 NR Description: glutaredoxin-like protein [Arabidopsis thaliana]
  misc_feature (24)..(134): NCBI GI NO: 34914726 NR Description: P0560B06.28
  misc_feature (24)..(134): NCBI GI NO: 15234677 NR Description: glutaredoxin protein family [Arabidopsis thaliana]
  misc_feature (24)..(134): NCBI GI NO: 15234680 NR Description: glutaredoxin protein family [Arabidopsis thaliana]
  misc_feature (29)..(132): NCBI GI NO: 1532163 NR Description: similar to glutaredoxin encoded by GenBankAccession Number Z49699
  misc_feature (25)..(134): NCBI GI NO: 15637350 NR Description: glutaredoxin [Tilia platyphyllos]
MQQQVEGVVGGGIMAEAEEAAVYERVARMASGNAVVVFSASGCCMCHVVKRLLLGLGVGPTVYELDQMGGAGREIQAALAQLLPPGPGAGHHQQPPVPVVFVGGRLLGGVEKVMACHINGTLVPLLKDAGALWL

SEQ ID NO: 11922 - protein, 121 aa, Triticum aestivum
  peptide (1)..(121): Ceres Seq. ID no. 15173861
  misc_feature (21)..(113): Pfam Name: Pfam Description:  Glutaredoxin
  misc_feature (1)..(121): NCBI GI NO: 33146704 NR Description: glutaredoxin-like protein
  misc_feature (1)..(121): NCBI GI NO: 21740746 NR Description: OSJNBa0072K14.2
  misc_feature (12)..(121): NCBI GI NO: 15241297 NR Description: glutaredoxin protein family [Arabidopsis thaliana]
  misc_feature (1)..(121): NCBI GI NO: 15232836 NR Description: glutaredoxin protein family [Arabidopsis thaliana]
  misc_feature (16)..(121): NCBI GI NO: 21537203 NR Description: glutaredoxin-like protein [Arabidopsis thaliana]
  misc_feature (11)..(121): NCBI GI NO: 34914726 NR Description: P0560B06.28
  misc_feature (11)..(121): NCBI GI NO: 15234677 NR Description: glutaredoxin protein family [Arabidopsis thaliana]
  misc_feature (11)..(121): NCBI GI NO: 15234680 NR Description: glutaredoxin protein family [Arabidopsis thaliana]
  misc_feature (16)..(119): NCBI GI NO: 1532163 NR Description: similar to glutaredoxin encoded by GenBankAccession Number Z49699
  misc_feature (12)..(121): NCBI GI NO: 15637350 NR Description: glutaredoxin [Tilia platyphyllos]
MAEAEEAAVYERVARMASGNAVVVFSASGCCMCHVVKRLLLGLGVGPTVYELDQMGGAGREIQAALAQLLPPGPGAGHHQQPPVPVVFVGGRLLGGVEKVMACHINGTLVPLLKDAGALWL

SEQ ID NO: 11923 - DNA, 738 bp, Triticum aestivum
  misc_feature (1)..(738): Ceres Seq. ID no. 15173940
ggccaaggccgtttgcaccttatttcgccttacacctcaccatcgacttacatacttctgttggccggagccacacgagctagcaccaccgacaaacaataccttgctgttctgagctcgccgtcccgatggcaagcaccaacatggcgtcggccacctccagattcatgctggcggcgggcatccccagcggctccaacggcggcgtgggcagccgcgtcagcttcgtcccgtccaaccggctcggctggaagctcgtggcccgcgccgaggaggagccgactgccgccgcaccggcggaaccagcaccggccgcggaggagaaaccggaagccgccgtggccaccaaagagcccgccaaagccaagccgccgccaaggggacccaagaggggaaccaaggtgaagattctgaggagggagtcctactggtacaacgggaccggatccgtcgtcacggttgatcaggatcccaacacccgttacccggtggtggtgcgtttcgccaaggtgaactacgccggcgtgtcgaccaacaactacgccctggacgagatcaaggaggttgctgcttaagcgaacgaggctagctgccatgtgctccatccaatgtttgtatcagtagctcgtcgagtgacgatgtgaatgttagcctctcacaaaccttatgtgtaatacctctgcgattatatgtatttgcctgcttcctcatggacctaataatctccttctgttgctt

SEQ ID NO: 11924 - protein, 148 aa, Triticum aestivum; identical to SEQ ID NO: 7172
  peptide (1)..(148): Ceres Seq. ID no. 15173941
  misc_feature (86)..(147): Pfam Name: Pfam Description:  Photosystem I reaction centre subunit IV / PsaE
  misc_feature (1)..(148): NCBI GI NO: 131176 NR Description: Photosystem I reaction center subunit IV
  misc_feature (1)..(146): NCBI GI NO: 34394725 NR Description: putative Photosystem I reaction center subunit IV
  misc_feature (6)..(148): NCBI GI NO: 24030202 NR Description: putative photosystem I subunit PSI-E protein
  misc_feature (6)..(148): NCBI GI NO: 30688100 NR Description: photosystem I subunit PSI-E - like protein
  misc_feature (6)..(146): NCBI GI NO: 15225331 NR Description: photosystem I reaction center subunit IV -related
  misc_feature (6)..(146): NCBI GI NO: 21555308 NR Description: Photosystem I reaction center subunit IV B
  misc_feature (1)..(146): NCBI GI NO: 2499966 NR Description: Photosystem I reaction center subunit IV A
  misc_feature (31)..(148): NCBI GI NO: 22091414 NR Description: putative photosystem I subunit PSI-E
  misc_feature (88)..(148): NCBI GI NO: 400867 NR Description: Photosystem I reaction center subunit IV

SEQ ID NO: 11925 - protein, 143 aa, Triticum aestivum; identical to SEQ ID NO: 7173
  peptide (1)..(143): Ceres Seq. ID no. 15173942
  misc_feature (81)..(142): Pfam Name: Pfam Description:  Photosystem I reaction centre subunit IV / PsaE
  misc_feature (1)..(143): NCBI GI NO: 131176 NR Description: Photosystem I reaction center subunit IV
  misc_feature (1)..(141): NCBI GI NO: 34394725 NR Description: putative Photosystem I reaction center subunit IV
  misc_feature (1)..(143): NCBI GI NO: 24030202 NR Description: putative photosystem I subunit PSI-E protein
  misc_feature (1)..(143): NCBI GI NO: 30688100 NR Description: photosystem I subunit PSI-E - like protein
  misc_feature (1)..(141): NCBI GI NO: 15225331 NR Description: photosystem I reaction center subunit IV -related
  misc_feature (1)..(141): NCBI GI NO: 21555308 NR Description: Photosystem I reaction center subunit IV B
  misc_feature (1)..(141): NCBI GI NO: 2499966 NR Description: Photosystem I reaction center subunit IV A
  misc_feature (26)..(143): NCBI GI NO: 22091414 NR Description: putative photosystem I subunit PSI-E
  misc_feature (83)..(143): NCBI GI NO: 400867 NR Description: Photosystem I reaction center subunit IV

SEQ ID NO: 11926 - protein, 135 aa, Triticum aestivum; identical to SEQ ID NO: 7174
  peptide (1)..(135): Ceres Seq. ID no. 15173943
  misc_feature (73)..(134): Pfam Name: Pfam Description:  Photosystem I reaction centre subunit IV / PsaE
  misc_feature (1)..(135): NCBI GI NO: 131176 NR Description: Photosystem I reaction center subunit IV
  misc_feature (1)..(133): NCBI GI NO: 34394725 NR Description: putative Photosystem I reaction center subunit IV
  misc_feature (1)..(135): NCBI GI NO: 24030202 NR Description: putative photosystem I subunit PSI-E protein
  misc_feature (1)..(135): NCBI GI NO: 30688100 NR Description: photosystem I subunit PSI-E - like protein
  misc_feature (1)..(133): NCBI GI NO: 15225331 NR Description: photosystem I reaction center subunit IV -related
  misc_feature (1)..(133): NCBI GI NO: 21555308 NR Description: Photosystem I reaction center subunit IV B
  misc_feature (1)..(133): NCBI GI NO: 2499966 NR Description: Photosystem I reaction center subunit IV A
  misc_feature (18)..(135): NCBI GI NO: 22091414 NR Description: putative photosystem I subunit PSI-E
  misc_feature (75)..(135): NCBI GI NO: 400867 NR Description: Photosystem I reaction center subunit IV

SEQ ID NO: 11927 - DNA, 726 bp, Triticum aestivum
  misc_feature (1)..(726): Ceres Seq. ID no. 15172609
ttggatgatggaaaaaccagcaagcagcaagcgtagttagaaaagttgccgtagcgcgccctacggagttgtacaaagtcagcaaccgttttggggcgcaagcataggcaacacaggactgatgacggggtggggcgcgcagtgaactggttttctaaaaagattggaagatccggccaaagaaggtgatagccctgttcattcgttcccatggttcgatccttcccagtaaaacgcggcgtgttcgaatgatgatcgcttttacgcgagaaagggggaccaccctctaagcctaagtattcctcaatgaccgatagcgtacaagtatcgagagggataggcggaggaaggacaaccctgaagccatggaggaggacgatgttgatgaggttgctgagatcagggctgcccacttcgaggagtcgatgaagtatgcgcgccggagcgtgagcgacgccgacatccgcaagtaccaggcctttgcccagactctgcagcagtctcgtggattcggcagcgagttccgtttccctgatcagccggctgcgggcgcttcctctgccgctgcggccgacccttttgcttccgctgctgcagcagctgacgatgatgatttatatagctaaatcctttcgcgttcgtagatgttgtgctccggtacgcagtacacggaagaactatgttcttaagttaatattgtgatgcacagttaatcgttctgcccgc

SEQ ID NO: 11928 - protein, 86 aa, Triticum aestivum
  peptide (1)..(86): Ceres Seq. ID no. 15172610
  misc_feature (1)..(86): NCBI GI NO: 37534770 NR Description: putative endoplasmic reticulum membrane fusionprotein
  misc_feature (1)..(86): NCBI GI NO: 18414193 NR Description: transitional endoplasmic reticulum ATPase -related
  misc_feature (1)..(86): NCBI GI NO: 11265361 NR Description: transitional endoplasmic reticulum ATPase -Arabidopsis thaliana
  misc_feature (1)..(86): NCBI GI NO: 15232776 NR Description: transitional endoplasmic reticulum ATPase -related
  misc_feature (1)..(86): NCBI GI NO: 15231775 NR Description: CDC48 - like protein [Arabidopsis thaliana]
  misc_feature (1)..(86): NCBI GI NO: 2492504 NR Description: Cell division cycle protein 48 homolog
  misc_feature (1)..(86): NCBI GI NO: 1705678 NR Description: CELL DIVISION CYCLE PROTEIN 48 HOMOLOG
  misc_feature (1)..(86): NCBI GI NO: 30013699 NR Description: CDC48-like protein [Mirabilis jalapa]
  misc_feature (1)..(86): NCBI GI NO: 38455496 NR Description: cell division cycle protein 48
  misc_feature (1)..(85): NCBI GI NO: 11265337 NR Description: hypothetical protein DKFZp434K0126
MEEDDVDEVAEIRAAHFEESMKYARRSVSDADIRKYQAFAQTLQQSRGFGSEFRFPDQPAAGASSAAAADPFASAAAAADDDDLYS

SEQ ID NO: 11929 - protein, 66 aa, Triticum aestivum
  peptide (1)..(66): Ceres Seq. ID no. 15172611
  misc_feature (1)..(66): NCBI GI NO: 37534770 NR Description: putative endoplasmic reticulum membrane fusionprotein
  misc_feature (1)..(66): NCBI GI NO: 18414193 NR Description: transitional endoplasmic reticulum ATPase -related
  misc_feature (1)..(66): NCBI GI NO: 11265361 NR Description: transitional endoplasmic reticulum ATPase -Arabidopsis thaliana
  misc_feature (1)..(66): NCBI GI NO: 15232776 NR Description: transitional endoplasmic reticulum ATPase -related
  misc_feature (1)..(66): NCBI GI NO: 15231775 NR Description: CDC48 - like protein [Arabidopsis thaliana]
  misc_feature (1)..(66): NCBI GI NO: 2492504 NR Description: Cell division cycle protein 48 homolog
  misc_feature (1)..(66): NCBI GI NO: 1705678 NR Description: CELL DIVISION CYCLE PROTEIN 48 HOMOLOG
  misc_feature (1)..(66): NCBI GI NO: 30013699 NR Description: CDC48-like protein [Mirabilis jalapa]
  misc_feature (1)..(66): NCBI GI NO: 38455496 NR Description: cell division cycle protein 48
  misc_feature (1)..(65): NCBI GI NO: 11265337 NR Description: hypothetical protein DKFZp434K0126
MKYARRSVSDADIRKYQAFAQTLQQSRGFGSEFRFPDQPAAGASSAAAADPFASAAAAADDDDLYS

SEQ ID NO: 11930 - DNA, 603 bp, Triticum aestivum
  misc_feature (1)..(603): Ceres Seq. ID no. 15172643
atcgatatctctccccgctccgctccccatcacgaacagctggtctatcaatggcggaggagaccgagaccgagaagccgctcttctctccgacagatgtctcgctccacgcatccacgaaggactgctgggtcgtcatccatggcaaggtgtacgatgtgaccaagttcttggaggaccaccccggcggagaggatgtcctgctccatgcatctgcctctggggatgctacggaggcttttgaagatgtgggacacagcacatcagccatcagcatgatgagcagctacctgatcggaagcatcgaggactatgtgcctcccagtgcaacgaaggacgccacagctattggcagtgatgtgctgccagattccagaacaatgcagaggaacaaaggctctcccgctccaaacacatttctggacttcgtgctccctttatgtatgcttggcatggcctttgcagcttggtactacctaacattcgtggccgagagctagtgaattcggacaagattcatatcattgcacatttttacgttaatagtgttgctgcatcgatacattgagggaacataaacttggtcacagaaccatttgcttt

SEQ ID NO: 11931 - protein, 165 aa, Triticum aestivum
  peptide (1)..(165): Ceres Seq. ID no. 15172644
  misc_feature (27)..(102): Pfam Name: Pfam Description:  Cytochrome b5-like Heme/Steroid binding domain
  misc_feature (17)..(148): NCBI GI NO: 40644254 NR Description: cytochrome b5
  misc_feature (24)..(158): NCBI GI NO: 1076621 NR Description: cytochrome b5 - common tobacco
  misc_feature (24)..(158): NCBI GI NO: 1345882 NR Description: CYTOCHROME B5
  misc_feature (27)..(165): NCBI GI NO: 15239718 NR Description: cytochrome b5, putative [Arabidopsis thaliana]
  misc_feature (23)..(158): NCBI GI NO: 25044825 NR Description: cytochrome b5 [Ananas comosus]
  misc_feature (24)..(158): NCBI GI NO: 1345925 NR Description: Cytochrome b5, seed isoform
  misc_feature (24)..(158): NCBI GI NO: 15225731 NR Description: cytochrome b5, putative [Arabidopsis thaliana]
  misc_feature (24)..(158): NCBI GI NO: 37536104 NR Description: putative cytochrome
  misc_feature (25)..(158): NCBI GI NO: 14719320 NR Description: cytochrome B5 [Oryza sativa]
  misc_feature (27)..(158): NCBI GI NO: 2647949 NR Description: cytochrome b5 [Olea europaea]
RYLSPLRSPSRTAGLSMAEETETEKPLFSPTDVSLHASTKDCWVVIHGKVYDVTKFLEDHPGGEDVLLHASASGDATEAFEDVGHSTSAISMMSSYLIGSIEDYVPPSATKDATAIGSDVLPDSRTMQRNKGSPAPNTFLDFVLPLCMLGMAFAAWYYLTFVAES

SEQ ID NO: 11932 - protein, 149 aa, Triticum aestivum
  peptide (1)..(149): Ceres Seq. ID no. 15172645
  misc_feature (11)..(86): Pfam Name: Pfam Description:  Cytochrome b5-like Heme/Steroid binding domain
  misc_feature (1)..(132): NCBI GI NO: 40644254 NR Description: cytochrome b5
  misc_feature (8)..(142): NCBI GI NO: 1076621 NR Description: cytochrome b5 - common tobacco
  misc_feature (8)..(142): NCBI GI NO: 1345882 NR Description: CYTOCHROME B5
  misc_feature (11)..(149): NCBI GI NO: 15239718 NR Description: cytochrome b5, putative [Arabidopsis thaliana]
  misc_feature (7)..(142): NCBI GI NO: 25044825 NR Description: cytochrome b5 [Ananas comosus]
  misc_feature (8)..(142): NCBI GI NO: 1345925 NR Description: Cytochrome b5, seed isoform
  misc_feature (8)..(142): NCBI GI NO: 15225731 NR Description: cytochrome b5, putative [Arabidopsis thaliana]
  misc_feature (8)..(142): NCBI GI NO: 37536104 NR Description: putative cytochrome
  misc_feature (9)..(142): NCBI GI NO: 14719320 NR Description: cytochrome B5 [Oryza sativa]
  misc_feature (11)..(142): NCBI GI NO: 2647949 NR Description: cytochrome b5 [Olea europaea]
MAEETETEKPLFSPTDVSLHASTKDCWVVIHGKVYDVTKFLEDHPGGEDVLLHASASGDATEAFEDVGHSTSAISMMSSYLIGSIEDYVPPSATKDATAIGSDVLPDSRTMQRNKGSPAPNTFLDFVLPLCMLGMAFAAWYYLTFVAES

SEQ ID NO: 11933 - DNA, 982 bp, Triticum aestivum
  misc_feature (1)..(982): Ceres Seq. ID no. 15172622
acgggcaatccacgccgcggattgggaaacggtgaccgacgaccccatccggccatcttattagtagcacctacggcacaaggcaacaacgcacgcctctcccagcgcccaaacactccgctcggctgctagctgcgcgtccatacaaacgcagttacgcgcacaagtacagaaccgccccctcctcttccgggaggccggccggccggccagcccgctcctcccctcccatccacctctgtccttagcatggtgagggacaccggcggcgccctgcagctgctggcggtgcttctcctcgtcctggcgtccgagctcgccaccttcagctgcggccacaggatccccagggcggacgtcgccgcctggaagcgcggggcgacgccgacgggacgcacggcgtccaccacgacgacgacgacggccactcgtgccggcggcgcggcggcggcggcgctcggcgactccaagaggctggtgccgcaggggccgaacccgctgcacaactagcgccgcgcaggttcttcctcgctcccatttttctcgcgcggaagaacgccggctatctagcgagcgactgagtagtgtgtggacgatacaatcacatatgcagtgatgtaactgtaattagctagcccattagatcgagctccggagattgcatccaaagaaatagtgtaaattacatgtacgatgtatcttcttcttcctccatgattttcactacttctttggagcaaagatctgaaacagcaggacaattattgattgactgattgattgattgggagcttgctgcagccctgtccctgcgagagcttggagcggtcaatggctgtcctcagtgtttaatttcggagggcgtttagggtcatttcgcgttggccaaggcgtggcaagcggacaagggcgccacgacaagcgggtgctttgtcacgccatggctaaaatatgattgatcctcactagcctttttgtttgc

SEQ ID NO: 11934 - protein, 86 aa, Triticum aestivum
  peptide (1)..(86): Ceres Seq. ID no. 15172623
  misc_feature (2)..(75): NCBI GI NO: 38346763 NR Description: OSJNBa0081C01.14
MVRDTGGALQLLAVLLLVLASELATFSCGHRIPRADVAAWKRGATPTGRTASTTTTTTATRAGGAAAAALGDSKRLVPQGPNPLHN

SEQ ID NO: 11935 - protein, 43 aa, Triticum aestivum
  peptide (1)..(43): Ceres Seq. ID no. 15172624
TGNPRRGLGNGDRRPHPAILLVAPTAQGNNARLSQRPNTPLGC

SEQ ID NO: 11936 - DNA, 863 bp, Triticum aestivum
  misc_feature (1)..(863): Ceres Seq. ID no. 12624376
aaagatcggtcttttcaacagtcagtgagtggtgaaagaaaacaaaagaggtttaactatggtgatggtgacgactcatcttcgtttcactcttcttctcgccgtcatcgggatcttcttctcctcttctcaggttcgcgcagccattgtcaggatcaaaccattctcctcgcctttcgctaccaatcttgcaacgctgcaatctcaaattggctacaacttcaccaacatcaacctccttcgccgtgccatgactcatgcttccttctctcgagagaacaacaaagccctcagtatctttgggttccatctcattgaaacctctgtttcccttcagcttctctccaaagatatcgatacctcctccaaagccttgacccgtttgatagcagaggtttcaaatgtggaatcctcgtgtgctcttgatgggaaccggttgggtttggagagggttatcagggtttctcccaagactgatgcgtccaactcggggatcgtttgtggtgggttcagggcaatctttggagctgttgctactgattctggaacggttgatgaggctattaaggttttctggaaagtacatggagctggagctgcaagacttgtgtctgtgctgtaaattagtgtatggtagtagtttgcttccgatggtaaaagttccaagagactcgtctttaaggcttatatctgtctctctttttttttctctcgtgttgtgtgatgagtcagtcactcagagtgaccgatgaccaaacataataatattggttgatgttatggaccaattgataaggtaccactgattgtttcaattttcaactaaagaggctgagagttagtaggttttgtgttgagaagct

SEQ ID NO: 11937 - protein, 187 aa, Triticum aestivum
  peptide (1)..(187): Ceres Seq. ID no. 12624377
  misc_feature (8)..(187): NCBI GI NO: 15221749 NR Description: putative ribonuclease III; protein id: At1g24450
  misc_feature (13)..(181): NCBI GI NO: 29126353 NR Description: hypothetical protein
MVMVTTHLRFTLLLAVIGIFFSSSQVRAAIVRIKPFSSPFATNLATLQSQIGYNFTNINLLRRAMTHASFSRENNKALSIFGFHLIETSVSLQLLSKDIDTSSKALTRLIAEVSNVESSCALDGNRLGLERVIRVSPKTDASNSGIVCGGFRAIFGAVATDSGTVDEAIKVFWKVHGAGAARLVSVL

SEQ ID NO: 11938 - protein, 185 aa, Triticum aestivum
  peptide (1)..(185): Ceres Seq. ID no. 12624378
  misc_feature (6)..(185): NCBI GI NO: 15221749 NR Description: putative ribonuclease III; protein id: At1g24450
  misc_feature (11)..(179): NCBI GI NO: 29126353 NR Description: hypothetical protein
MVTTHLRFTLLLAVIGIFFSSSQVRAAIVRIKPFSSPFATNLATLQSQIGYNFTNINLLRRAMTHASFSRENNKALSIFGFHLIETSVSLQLLSKDIDTSSKALTRLIAEVSNVESSCALDGNRLGLERVIRVSPKTDASNSGIVCGGFRAIFGAVATDSGTVDEAIKVFWKVHGAGAARLVSVL

SEQ ID NO: 11939 - protein, 123 aa, Triticum aestivum
  peptide (1)..(123): Ceres Seq. ID no. 12624379
  misc_feature (1)..(123): NCBI GI NO: 15221749 NR Description: putative ribonuclease III; protein id: At1g24450
  misc_feature (1)..(117): NCBI GI NO: 29126353 NR Description: hypothetical protein
MTHASFSRENNKALSIFGFHLIETSVSLQLLSKDIDTSSKALTRLIAEVSNVESSCALDGNRLGLERVIRVSPKTDASNSGIVCGGFRAIFGAVATDSGTVDEAIKVFWKVHGAGAARLVSVL

SEQ ID NO: 11940 - DNA, 1001 bp, Triticum aestivum
  misc_feature (1)..(1001): Ceres Seq. ID no. 13662009
acatttgaggtctgagaagaatctcaggaacagaacctattgtgtgtgtttcttgtttctctctctctctacaatggctgcttttgcgtgcactactcgtccgccgatttctctccggtcagagatgaggatcgcatcctcaacgaaagtttcactctccactcgacaaatgttctccgtgggaggattgaggactcgcgtctctctatcatcggtctccaagaattctagcgcttctcgattacgacgacgaggagggttcatcatctgtgaagctcaggacactgctacagggattccaatggtgaacgattcaacgtgggagtcactagtactcaaggctgatgagcctgttgttgtggacttttgggcaccatggtgtggaccctgcaaaatgattgatcccattgtcaacgaactagcacagcagtacactgggaagatcaagttcttcaaactaaacactgacgattctccggcgaccccgggaaagtacggtgtgagaagcataccaaccatcatgatcttcgttaagggagagaagaaggatacaatcatcggtgcagtgcctaaaaccacattagcaacaagcattgataaattcttgcagtgaagcatgtggatggatcactctcttttatttctctatagtcctgttcgtttaacgaacgctgcgttcgatatctgcgtctgaaatttgttcataagttgattaaatgaaatgaaaacaagagacgcagcgtcaaaaaaacgaagctttccggtgttgccgctgacgtcaaaaaaagtagcgaccattgttcctcatttctctctcctctctgcgactgaaatcagaaacgcggcgtcacctgttcttctctctttctctttggatacccttttttctctatgtgtatttggacttaacttatctactactccttctcatttagacatgtataatgataataatataatgttgggtttaagaaatcgtgtttatgatggtgactttatct

SEQ ID NO: 11941 - protein, 203 aa, Triticum aestivum
  peptide (1)..(203): Ceres Seq. ID no. 13662010
  misc_feature (25)..(203): NCBI GI NO: 11135407 NR Description: Thioredoxin M-type, chloroplast precursor (TRX-M)
  misc_feature (25)..(202): NCBI GI NO: 30678634 NR Description: thioredoxin M-type 1, chloroplast precursor
  misc_feature (25)..(202): NCBI GI NO: 15236327 NR Description: thioredoxin M-type 2, chloroplast precursor
  misc_feature (25)..(202): NCBI GI NO: 6539610 NR Description: thioredoxin m2 [Arabidopsis thaliana]
  misc_feature (25)..(202): NCBI GI NO: 21618235 NR Description: putative M-type thioredoxin [Arabidopsis thaliana]
  misc_feature (62)..(202): NCBI GI NO: 15594012 NR Description: putative thioredoxin m2 [Pisum sativum]
  misc_feature (37)..(202): NCBI GI NO: 6539614 NR Description: thioredoxin m4 [Arabidopsis thaliana]
  misc_feature (37)..(202): NCBI GI NO: 15232567 NR Description: thioredoxin M-type 4, chloroplast precursor
  misc_feature (48)..(202): NCBI GI NO: 1351239 NR Description: Thioredoxin M-type, chloroplast precursor (TRX-M)
  misc_feature (48)..(202): NCBI GI NO: 1388088 NR Description: thioredoxin m
HLRSEKNLRNRTYCVCFLFLSLSTMAAFACTTRPPISLRSEMRIASSTKVSLSTRQMFSVGGLRTRVSLSSVSKNSSASRLRRRGGFIICEAQDTATGIPMVNDSTWESLVLKADEPVVVDFWAPWCGPCKMIDPIVNELAQQYTGKIKFFKLNTDDSPATPGKYGVRSIPTIMIFVKGEKKDTIIGAVPKTTLATSIDKFLQ

SEQ ID NO: 11942 - protein, 179 aa, Triticum aestivum
  peptide (1)..(179): Ceres Seq. ID no. 13662011
  misc_feature (1)..(179): NCBI GI NO: 11135407 NR Description: Thioredoxin M-type, chloroplast precursor (TRX-M)
  misc_feature (1)..(178): NCBI GI NO: 30678634 NR Description: thioredoxin M-type 1, chloroplast precursor
  misc_feature (1)..(178): NCBI GI NO: 15236327 NR Description: thioredoxin M-type 2, chloroplast precursor
  misc_feature (1)..(178): NCBI GI NO: 6539610 NR Description: thioredoxin m2 [Arabidopsis thaliana]
  misc_feature (1)..(178): NCBI GI NO: 21618235 NR Description: putative M-type thioredoxin [Arabidopsis thaliana]
  misc_feature (38)..(178): NCBI GI NO: 15594012 NR Description: putative thioredoxin m2 [Pisum sativum]
  misc_feature (13)..(178): NCBI GI NO: 6539614 NR Description: thioredoxin m4 [Arabidopsis thaliana]
  misc_feature (13)..(178): NCBI GI NO: 15232567 NR Description: thioredoxin M-type 4, chloroplast precursor
  misc_feature (24)..(178): NCBI GI NO: 1351239 NR Description: Thioredoxin M-type, chloroplast precursor (TRX-M)
  misc_feature (24)..(178): NCBI GI NO: 1388088 NR Description: thioredoxin m
MAAFACTTRPPISLRSEMRIASSTKVSLSTRQMFSVGGLRTRVSLSSVSKNSSASRLRRRGGFIICEAQDTATGIPMVNDSTWESLVLKADEPVVVDFWAPWCGPCKMIDPIVNELAQQYTGKIKFFKLNTDDSPATPGKYGVRSIPTIMIFVKGEKKDTIIGAVPKTTLATSIDKFLQ

SEQ ID NO: 11943 - protein, 162 aa, Triticum aestivum
  peptide (1)..(162): Ceres Seq. ID no. 13662012
  misc_feature (1)..(162): NCBI GI NO: 11135407 NR Description: Thioredoxin M-type, chloroplast precursor (TRX-M)
  misc_feature (1)..(161): NCBI GI NO: 30678634 NR Description: thioredoxin M-type 1, chloroplast precursor
  misc_feature (1)..(161): NCBI GI NO: 15236327 NR Description: thioredoxin M-type 2, chloroplast precursor
  misc_feature (1)..(161): NCBI GI NO: 6539610 NR Description: thioredoxin m2 [Arabidopsis thaliana]
  misc_feature (1)..(161): NCBI GI NO: 21618235 NR Description: putative M-type thioredoxin [Arabidopsis thaliana]
  misc_feature (21)..(161): NCBI GI NO: 15594012 NR Description: putative thioredoxin m2 [Pisum sativum]
  misc_feature (1)..(161): NCBI GI NO: 6539614 NR Description: thioredoxin m4 [Arabidopsis thaliana]
  misc_feature (1)..(161): NCBI GI NO: 15232567 NR Description: thioredoxin M-type 4, chloroplast precursor
  misc_feature (7)..(161): NCBI GI NO: 1351239 NR Description: Thioredoxin M-type, chloroplast precursor (TRX-M)
  misc_feature (7)..(161): NCBI GI NO: 1388088 NR Description: thioredoxin m
MRIASSTKVSLSTRQMFSVGGLRTRVSLSSVSKNSSASRLRRRGGFIICEAQDTATGIPMVNDSTWESLVLKADEPVVVDFWAPWCGPCKMIDPIVNELAQQYTGKIKFFKLNTDDSPATPGKYGVRSIPTIMIFVKGEKKDTIIGAVPKTTLATSIDKFLQ

SEQ ID NO: 11944 - DNA, 866 bp, Triticum aestivum
  misc_feature (1)..(866): Ceres Seq. ID no. 14301765
atagatctctacttagcttctccgcgatacaagcccatttaaattcacatccaaccggatcgaggatttagggttcgcgaaaaaaatggcgcaacaacaatcgttgatctacagcttcgtcgctcgcgggacggtgatcctcgccgagttcactgatttcaaaggcaacttcacctccgtcgctgcacagtgcctccagaagctcccctcttccaacaacaagttcacctacacctgcgacggccacaccttcagttacctcgtcgaagatggattcacgtactgtgttgttgcggttgattctgctgggaggcagattccgatggcgtttttggagagagtgaaagaggattttagcaagagatatggtggtgggaaggctgctactgctcaggctaacagcttcaataaagagtttggctctaagctgaaagagcacatgcagtattgtatggatcaccctgatgagattagcaagcttgctaaggtgaaggctcaagtctctgaagttaaaggtgttatgatggaaaacatcgagaaggttcttgaccgtggtgagaaaattgagcttctggtggacaaaaccgagaaccttcgctctcaggcacaagacttcagaacaacggggacacagatgagaagaaagatgtggcttcagaacatgaagattaaactcatagttctcgccatcatcgtcgcactgattctcatcatcgtgctctcagtttgccatggcttcaagtgttaaagagccccatcaaagttaaaaaaactctcttgaaatctttttctcactcggtcttcgtaatctatatataatagcaaaccatttttattaatctgatgatgtcatcattttttataag

SEQ ID NO: 11945 - protein, 220 aa, Triticum aestivum
  peptide (1)..(220): Ceres Seq. ID no. 14301766
  misc_feature (128)..(216): Pfam Name: Pfam Description:  Synaptobrevin
  misc_feature (4)..(220): NCBI GI NO: 15220943 NR Description: synaptobrevin 7B -related, 3' partial
  misc_feature (4)..(220): NCBI GI NO: 15225796 NR Description: synaptobrevin -related [Arabidopsis thaliana]
  misc_feature (4)..(220): NCBI GI NO: 600710 NR Description: formerly called HAT24
  misc_feature (4)..(220): NCBI GI NO: 15220315 NR Description: synaptobrevin 7B -related [Arabidopsis thaliana]
  misc_feature (4)..(220): NCBI GI NO: 27805753 NR Description: Vesicle-associated membrane protein 725
  misc_feature (4)..(220): NCBI GI NO: 30685375 NR Description: synaptobrevin -related [Arabidopsis thaliana]
  misc_feature (4)..(220): NCBI GI NO: 29150380 NR Description: synaptobrevin-like protein
  misc_feature (4)..(220): NCBI GI NO: 27805765 NR Description: Putative vesicle-associated membrane protein 726
  misc_feature (4)..(195): NCBI GI NO: 33347409 NR Description: synptobrevin-related protein [Pyrus pyrifolia]
  misc_feature (4)..(220): NCBI GI NO: 30685571 NR Description: synaptobrevin -related [Arabidopsis thaliana]
MAQQQSLIYSFVARGTVILAEFTDFKGNFTSVAAQCLQKLPSSNNKFTYTCDGHTFSYLVEDGFTYCVVAVDSAGRQIPMAFLERVKEDFSKRYGGGKAATAQANSFNKEFGSKLKEHMQYCMDHPDEISKLAKVKAQVSEVKGVMMENIEKVLDRGEKIELLVDKTENLRSQAQDFRTTGTQMRRKMWLQNMKIKLIVLAIIVALILIIVLSVCHGFKC

SEQ ID NO: 11946 - protein, 141 aa, Triticum aestivum
  peptide (1)..(141): Ceres Seq. ID no. 14301767
  misc_feature (49)..(137): Pfam Name: Pfam Description:  Synaptobrevin
  misc_feature (1)..(141): NCBI GI NO: 15220943 NR Description: synaptobrevin 7B -related, 3' partial
  misc_feature (1)..(141): NCBI GI NO: 15225796 NR Description: synaptobrevin -related [Arabidopsis thaliana]
  misc_feature (1)..(141): NCBI GI NO: 600710 NR Description: formerly called HAT24
  misc_feature (1)..(141): NCBI GI NO: 15220315 NR Description: synaptobrevin 7B -related [Arabidopsis thaliana]
  misc_feature (1)..(141): NCBI GI NO: 27805753 NR Description: Vesicle-associated membrane protein 725
  misc_feature (1)..(141): NCBI GI NO: 30685375 NR Description: synaptobrevin -related [Arabidopsis thaliana]
  misc_feature (1)..(141): NCBI GI NO: 29150380 NR Description: synaptobrevin-like protein
  misc_feature (1)..(141): NCBI GI NO: 27805765 NR Description: Putative vesicle-associated membrane protein 726
  misc_feature (1)..(116): NCBI GI NO: 33347409 NR Description: synptobrevin-related protein [Pyrus pyrifolia]
  misc_feature (1)..(141): NCBI GI NO: 30685571 NR Description: synaptobrevin -related [Arabidopsis thaliana]
MAFLERVKEDFSKRYGGGKAATAQANSFNKEFGSKLKEHMQYCMDHPDEISKLAKVKAQVSEVKGVMMENIEKVLDRGEKIELLVDKTENLRSQAQDFRTTGTQMRRKMWLQNMKIKLIVLAIIVALILIIVLSVCHGFKC

SEQ ID NO: 11947 - DNA, 835 bp, Triticum aestivum
  misc_feature (1)..(835): Ceres Seq. ID no. 12624657
cccctttcccttggcgtgaaccaactttcaagtgcttccgttcttgcctcccgtgccgccgccgcctccaatcttgcctccgacctcgtcgtccggcctcgcggcgccggagcccggccggatggagtacccacggtcaccgggcgccccatatcatgcgccgccacctccaatgtcgtcgcttcgtccgcctacgccttcctcggcagttcatgccgtcgccgccccaactccttccgcagacgccatgaagaggaagcgacaggggaaccacctcatccaagggggcccagccgatgcagcaccaccctctttcgggcccgcttcggttcctcccgtcaaggccgccggcgggaggaagaagaccggctccaccagcccaaccggtgcatgtgcgaagtccccgaggaagaatgcaatcacagcaagaggtcgggctcctcctccgcctacggctggccacaacctccccattcacggcgactccaccggccacgcctaccatgtgttcgatgaaacgaccgggagccaaagtgtgccttccacatataccgaaatgttggccgagagtatagtggatttgagtgctcactctccgatcaatgtggatgatggcgatggtgctaggggcggcgatggtggcgacgatcttcacaacaatgaggattttgcttgatttctccatgactggtggtcatttgagcaacttttgttttgtttgatcgcgcatttataaggctaaacttgctacctcgtatgttgcgcttgattttgaatgtgatgaattagtatgatgatgaactagcgatgtttatataataaattttatgtattt

SEQ ID NO: 11948 - protein, 184 aa, Triticum aestivum
  peptide (1)..(184): Ceres Seq. ID no. 12624658
  misc_feature (1)..(117): Pfam Name: Pfam Description:  Extensin-like region
  misc_feature (1)..(113): NCBI GI NO: 15145797 NR Description: basic proline-rich protein [Sus scrofa]
  misc_feature (1)..(120): NCBI GI NO: 15240851 NR Description: putative protein; protein id: At5g07750.1
  misc_feature (1)..(113): NCBI GI NO: 15145793 NR Description: basic proline-rich protein [Sus scrofa]
  misc_feature (1)..(108): NCBI GI NO: 131000 NR Description: Acidic proline-rich protein PRP25 precursor
MEYPRSPGAPYHAPPPPMSSLRPPTPSSAVHAVAAPTPSADAMKRKRQGNHLIQGGPADAAPPSFGPASVPPVKAAGGRKKTGSTSPTGACAKSPRKNAITARGRAPPPPTAGHNLPIHGDSTGHAYHVFDETTGSQSVPSTYTEMLAESIVDLSAHSPINVDDGDGARGGDGGDDLHNNEDFA

SEQ ID NO: 11949 - protein, 171 aa, Triticum aestivum
  peptide (1)..(171): Ceres Seq. ID no. 12624659
PLSLGVNQLSSASVLASRAAAASNLASDLVVRPRGAGARPDGVPTVTGRPISCAATSNVVASSAYAFLGSSCRRRPNSFRRRHEEEATGEPPHPRGPSRCSTTLFRARFGSSRQGRRREEEDRLHQPNRCMCEVPEEECNHSKRSGSSSAYGWPQPPHSRRLHRPRLPCVR

SEQ ID NO: 11950 - protein, 167 aa, Triticum aestivum
  peptide (1)..(167): Ceres Seq. ID no. 12624660
  misc_feature (1)..(100): Pfam Name: Pfam Description:  Extensin-like region
  misc_feature (1)..(96): NCBI GI NO: 15145797 NR Description: basic proline-rich protein [Sus scrofa]
  misc_feature (1)..(103): NCBI GI NO: 15240851 NR Description: putative protein; protein id: At5g07750.1
  misc_feature (1)..(96): NCBI GI NO: 15145793 NR Description: basic proline-rich protein [Sus scrofa]
  misc_feature (1)..(91): NCBI GI NO: 131000 NR Description: Acidic proline-rich protein PRP25 precursor
MSSLRPPTPSSAVHAVAAPTPSADAMKRKRQGNHLIQGGPADAAPPSFGPASVPPVKAAGGRKKTGSTSPTGACAKSPRKNAITARGRAPPPPTAGHNLPIHGDSTGHAYHVFDETTGSQSVPSTYTEMLAESIVDLSAHSPINVDDGDGARGGDGGDDLHNNEDFA

SEQ ID NO: 11951 - DNA, 1533 bp, Triticum aestivum
  misc_feature (1)..(1533): Ceres Seq. ID no. 13583262
aaaaaacctagatgccacaccctatcccagccgcagccgccgccgccgtcgccgccgccgccgctgcaaccgccgccttcgattccgtgaaattggaggggaagacaattggatctgtctgccgcaggaggagtggggagaaatagaatgaaggcgcgacagttcctgaatgttgtgatggagaggtatggcactggcggtgccggtggcagcttgtatacggtcagtcgcatcgacgccaaggaacacctcttctaccgatccacggccgaagcacaggcagcagaaaaatcaaggttcgatatggagtgcccatcatcagccgttgtgccaccatggatggagaccatctcgcggatgcctccgtccaagctcagattcgagcggtccacctcagacaacaaaagactggatttcctgcccttccatgaacgaggcagcggtgctgcgagcaagatcctctgcgtggacgccgctggccacaccgccctatacgacatggacgccggttcggtccagccaattccatgcctcaacagtcccaaggggagcaggcccatcagcttctccaccaccaatcccgaagcctctgaccgtgaacgtgctgatgccttctacgttatgggaaggttcccttccagctatgacccctacaacttcgaggtactcatgtacagtaacccttctaatggcaggacgatgaaaggctggaattggctcaagctaccaacaccacctgcctatgctgacaattgcattgtcaattcccatgcgctgcttgaaattgaaggtgactcaattcttgttgtctcctccggagaagaaagccttggcacctactgcttcaacacagccagtcgcaagtggtttaaggctggctcctggacactgccattcctcagtcgtgctgtgcatgtaccagagctggacaacctcttatttggcattgccagcgatgcacccaaccacttttgtgcaatgggtatctcccgtcttctctcgaagaggtgtccacctttagtgtacagttggccacaccttgatctgcccgaggactggataatgcaagattgcagctttgtgtacttgggaaatgggaggttttgcatcaccaaagtctttgagtttggtctggacgaagacactggcaacacgactgatatgggtgctgtgatgtctggcgtggaggtagtgcatcacaagaagtctggactcatcatggtcaaccataggtccaaattctacaggttcttcagggatgacatccaatgtgtcttgtaaggtaacttggtgaaaggggagcaacacgggtttttccaggaggattggaattgtctgtcttcccctttccatcagtatctagtagctacaacttctgctatgttagtttttgggcagtagtgctcatttccttcagtatgttgtatcactatatttgctgccgttgctgtatacatagcttcttaggtgcttttattttattattagatggactagtatcttgatgaaattatgatatggtttataactggt

SEQ ID NO: 11952 - protein, 377 aa, Triticum aestivum
  peptide (1)..(377): Ceres Seq. ID no. 13583263
  misc_feature (100)..(348): NCBI GI NO: 37531434 NR Description: hypothetical protein
  misc_feature (65)..(376): NCBI GI NO: 34902348 NR Description: Hypothetical protein
  misc_feature (87)..(366): NCBI GI NO: 34907072 NR Description: OSJNBa0093F16.25
  misc_feature (51)..(355): NCBI GI NO: 15451604 NR Description: Hypothetical protein [Oryza sativa]
  misc_feature (3)..(364): NCBI GI NO: 34897052 NR Description: hypothetical protein
  misc_feature (3)..(355): NCBI GI NO: 38345446 NR Description: OSJNBa0042L16.1
  misc_feature (145)..(349): NCBI GI NO: 15451605 NR Description: Hypothetical protein [Oryza sativa]
  misc_feature (137)..(377): NCBI GI NO: 38344193 NR Description: OSJNBa0064G10.9
  misc_feature (64)..(366): NCBI GI NO: 28876026 NR Description: hypothetical protein
  misc_feature (3)..(164): NCBI GI NO: 34898928 NR Description: OJ1316_A04.17
MKARQFLNVVMERYGTGGAGGSLYTVSRIDAKEHLFYRSTAEAQAAEKSRFDMECPSSAVVPPWMETISRMPPSKLRFERSTSDNKRLDFLPFHERGSGAASKILCVDAAGHTALYDMDAGSVQPIPCLNSPKGSRPISFSTTNPEASDRERADAFYVMGRFPSSYDPYNFEVLMYSNPSNGRTMKGWNWLKLPTPPAYADNCIVNSHALLEIEGDSILVVSSGEESLGTYCFNTASRKWFKAGSWTLPFLSRAVHVPELDNLLFGIASDAPNHFCAMGISRLLSKRCPPLVYSWPHLDLPEDWIMQDCSFVYLGNGRFCITKVFEFGLDEDTGNTTDMGAVMSGVEVVHHKKSGLIMVNHRSKFYRFFRDDIQCVL

SEQ ID NO: 11953 - protein, 367 aa, Triticum aestivum
  peptide (1)..(367): Ceres Seq. ID no. 13583264
  misc_feature (90)..(338): NCBI GI NO: 37531434 NR Description: hypothetical protein
  misc_feature (55)..(366): NCBI GI NO: 34902348 NR Description: Hypothetical protein
  misc_feature (77)..(356): NCBI GI NO: 34907072 NR Description: OSJNBa0093F16.25
  misc_feature (41)..(345): NCBI GI NO: 15451604 NR Description: Hypothetical protein [Oryza sativa]
  misc_feature (1)..(354): NCBI GI NO: 34897052 NR Description: hypothetical protein
  misc_feature (1)..(345): NCBI GI NO: 38345446 NR Description: OSJNBa0042L16.1
  misc_feature (135)..(339): NCBI GI NO: 15451605 NR Description: Hypothetical protein [Oryza sativa]
  misc_feature (127)..(367): NCBI GI NO: 38344193 NR Description: OSJNBa0064G10.9
  misc_feature (54)..(356): NCBI GI NO: 28876026 NR Description: hypothetical protein
  misc_feature (1)..(154): NCBI GI NO: 34898928 NR Description: OJ1316_A04.17
MERYGTGGAGGSLYTVSRIDAKEHLFYRSTAEAQAAEKSRFDMECPSSAVVPPWMETISRMPPSKLRFERSTSDNKRLDFLPFHERGSGAASKILCVDAAGHTALYDMDAGSVQPIPCLNSPKGSRPISFSTTNPEASDRERADAFYVMGRFPSSYDPYNFEVLMYSNPSNGRTMKGWNWLKLPTPPAYADNCIVNSHALLEIEGDSILVVSSGEESLGTYCFNTASRKWFKAGSWTLPFLSRAVHVPELDNLLFGIASDAPNHFCAMGISRLLSKRCPPLVYSWPHLDLPEDWIMQDCSFVYLGNGRFCITKVFEFGLDEDTGNTTDMGAVMSGVEVVHHKKSGLIMVNHRSKFYRFFRDDIQCVL

SEQ ID NO: 11954 - protein, 325 aa, Triticum aestivum
  peptide (1)..(325): Ceres Seq. ID no. 13583265
  misc_feature (48)..(296): NCBI GI NO: 37531434 NR Description: hypothetical protein
  misc_feature (13)..(324): NCBI GI NO: 34902348 NR Description: Hypothetical protein
  misc_feature (35)..(314): NCBI GI NO: 34907072 NR Description: OSJNBa0093F16.25
  misc_feature (1)..(303): NCBI GI NO: 15451604 NR Description: Hypothetical protein [Oryza sativa]
  misc_feature (1)..(312): NCBI GI NO: 34897052 NR Description: hypothetical protein
  misc_feature (1)..(303): NCBI GI NO: 38345446 NR Description: OSJNBa0042L16.1
  misc_feature (93)..(297): NCBI GI NO: 15451605 NR Description: Hypothetical protein [Oryza sativa]
  misc_feature (85)..(325): NCBI GI NO: 38344193 NR Description: OSJNBa0064G10.9
  misc_feature (12)..(314): NCBI GI NO: 28876026 NR Description: hypothetical protein
  misc_feature (1)..(112): NCBI GI NO: 34898928 NR Description: OJ1316_A04.17
MECPSSAVVPPWMETISRMPPSKLRFERSTSDNKRLDFLPFHERGSGAASKILCVDAAGHTALYDMDAGSVQPIPCLNSPKGSRPISFSTTNPEASDRERADAFYVMGRFPSSYDPYNFEVLMYSNPSNGRTMKGWNWLKLPTPPAYADNCIVNSHALLEIEGDSILVVSSGEESLGTYCFNTASRKWFKAGSWTLPFLSRAVHVPELDNLLFGIASDAPNHFCAMGISRLLSKRCPPLVYSWPHLDLPEDWIMQDCSFVYLGNGRFCITKVFEFGLDEDTGNTTDMGAVMSGVEVVHHKKSGLIMVNHRSKFYRFFRDDIQCVL

SEQ ID NO: 11955 - DNA, 866 bp, Triticum aestivum
  misc_feature (1)..(866): Ceres Seq. ID no. 13596404
aaacactagccacactcgctgacagagtcactgggaagaggcgattcctcccaccaccaggttcccccaaatcgctcgcacccgccactaaccctagcgacatctgcgctcccaatcgctcggcctctcgccggagctccagatccgcggccgcttcctcccgcgctggtggtgaccttcccggatcggagccaagatgacggagtcgatggtgcggaacaagccggggatggcgagcgtcaaggacatgccggtgctgcaggacgggccgccgccgggcgggttcgcgcccgtgcgctacgcgcgccgcatccccaacaagggccccagcgccatcgccctcttcctcaccaccttcggcgccttctcctggggcatgtaccaggtcggacaggggaacaaggtccgccgtgcactcaaggaggagaaaattgctgcccgtagtgctatactgccgatgctccaagctgaagaggatgaaagatttgtcaaagaatggaagaagtatcttgaggaggaagcgaggatcatgaaaaatgttcctggatggaaagttggtgagagcgtgtacaattctgggaaatggatgcctcctgcaaccggtgagctgcgtccggaggtttggtaaggtccaaggtcttgcttcagcccatcgaggatggcatcgtgccttgagggcatgaataaggctttcagacctggatacccaaaatttgctacgaggaatacatacttgagcattcgtcgtgtatttcttctgttgacggaatttgaatggctaataattggacagagcaagccgactttggtctttatatgaaccatcttcttttgttgatgtaacgtgtctttgtattgctacggct

SEQ ID NO: 11956 - protein, 143 aa, Triticum aestivum
  peptide (1)..(143): Ceres Seq. ID no. 13596405
  misc_feature (16)..(139): Pfam Name: Pfam Description:  GRIM-19 protein
  misc_feature (1)..(143): NCBI GI NO: 18403216 NR Description: expressed protein [Arabidopsis thaliana]
  misc_feature (1)..(143): NCBI GI NO: 20260652 NR Description: unknown protein [Arabidopsis thaliana]
  misc_feature (1)..(142): NCBI GI NO: 15219769 NR Description: expressed protein [Arabidopsis thaliana]
  misc_feature (1)..(139): NCBI GI NO: 16973316 NR Description: F6 [Gossypium hirsutum]
  misc_feature (1)..(141): NCBI GI NO: 25406799 NR Description: hypothetical protein
  misc_feature (1)..(72): NCBI GI NO: 26451954 NR Description: unknown protein [Arabidopsis thaliana]
  misc_feature (1)..(142): NCBI GI NO: 34334020 NR Description: NADH:ubiquinone oxidoreductase B16.6 subunit
  misc_feature (20)..(138): NCBI GI NO: 27668839 NR Description: similar to genes associated with retinoid-IFN-induced mortality 19
  misc_feature (13)..(138): NCBI GI NO: 21361822 NR Description: cell death-regulatory protein GRIM19
  misc_feature (13)..(138): NCBI GI NO: 34809544 NR Description: GRIM19 protein [Homo sapiens]
MTESMVRNKPGMASVKDMPVLQDGPPPGGFAPVRYARRIPNKGPSAIALFLTTFGAFSWGMYQVGQGNKVRRALKEEKIAARSAILPMLQAEEDERFVKEWKKYLEEEARIMKNVPGWKVGESVYNSGKWMPPATGELRPEVW

SEQ ID NO: 11957 - protein, 139 aa, Triticum aestivum
  peptide (1)..(139): Ceres Seq. ID no. 13596406
  misc_feature (12)..(135): Pfam Name: Pfam Description:  GRIM-19 protein
  misc_feature (1)..(139): NCBI GI NO: 18403216 NR Description: expressed protein [Arabidopsis thaliana]
  misc_feature (1)..(139): NCBI GI NO: 20260652 NR Description: unknown protein [Arabidopsis thaliana]
  misc_feature (1)..(138): NCBI GI NO: 15219769 NR Description: expressed protein [Arabidopsis thaliana]
  misc_feature (1)..(135): NCBI GI NO: 16973316 NR Description: F6 [Gossypium hirsutum]
  misc_feature (1)..(137): NCBI GI NO: 25406799 NR Description: hypothetical protein
  misc_feature (1)..(68): NCBI GI NO: 26451954 NR Description: unknown protein [Arabidopsis thaliana]
  misc_feature (1)..(138): NCBI GI NO: 34334020 NR Description: NADH:ubiquinone oxidoreductase B16.6 subunit
  misc_feature (16)..(134): NCBI GI NO: 27668839 NR Description: similar to genes associated with retinoid-IFN-induced mortality 19
  misc_feature (9)..(134): NCBI GI NO: 21361822 NR Description: cell death-regulatory protein GRIM19
  misc_feature (9)..(134): NCBI GI NO: 34809544 NR Description: GRIM19 protein [Homo sapiens]
MVRNKPGMASVKDMPVLQDGPPPGGFAPVRYARRIPNKGPSAIALFLTTFGAFSWGMYQVGQGNKVRRALKEEKIAARSAILPMLQAEEDERFVKEWKKYLEEEARIMKNVPGWKVGESVYNSGKWMPPATGELRPEVW

SEQ ID NO: 11958 - protein, 132 aa, Triticum aestivum
  peptide (1)..(132): Ceres Seq. ID no. 13596407
  misc_feature (5)..(128): Pfam Name: Pfam Description:  GRIM-19 protein
  misc_feature (1)..(132): NCBI GI NO: 18403216 NR Description: expressed protein [Arabidopsis thaliana]
  misc_feature (1)..(132): NCBI GI NO: 20260652 NR Description: unknown protein [Arabidopsis thaliana]
  misc_feature (1)..(131): NCBI GI NO: 15219769 NR Description: expressed protein [Arabidopsis thaliana]
  misc_feature (1)..(128): NCBI GI NO: 16973316 NR Description: F6 [Gossypium hirsutum]
  misc_feature (1)..(130): NCBI GI NO: 25406799 NR Description: hypothetical protein
  misc_feature (1)..(61): NCBI GI NO: 26451954 NR Description: unknown protein [Arabidopsis thaliana]
  misc_feature (1)..(131): NCBI GI NO: 34334020 NR Description: NADH:ubiquinone oxidoreductase B16.6 subunit
  misc_feature (9)..(127): NCBI GI NO: 27668839 NR Description: similar to genes associated with retinoid-IFN-induced mortality 19
  misc_feature (2)..(127): NCBI GI NO: 21361822 NR Description: cell death-regulatory protein GRIM19
  misc_feature (2)..(127): NCBI GI NO: 34809544 NR Description: GRIM19 protein [Homo sapiens]
MASVKDMPVLQDGPPPGGFAPVRYARRIPNKGPSAIALFLTTFGAFSWGMYQVGQGNKVRRALKEEKIAARSAILPMLQAEEDERFVKEWKKYLEEEARIMKNVPGWKVGESVYNSGKWMPPATGELRPEVW

SEQ ID NO: 11959 - DNA, 1116 bp, Triticum aestivum
  misc_feature (1)..(1116): Ceres Seq. ID no. 12614847
cccaaattcctcctcctgcctgcctgctgccgcgagagtcctccactccacaacaaccttcgagaacgagcgcgcgcacggaggcggccgcgatctctcgcccaccaacccaccacccgcgccatggcttccaccaatggcggctttgtcagtcctcttgcagcggccgttccagttgaggcggttttgtttgacattgatggtaccttgtgcgactcggatcctcttcatcacatcgctttccaagaattgcttcttgcgattgggtacaacaatggtgtgcctattgacgacgagttcttcataaacaacatcgctggaagaagcgatgctgaagctgcccagaatttgttcccagactggcccctcgaaaaggggctgaaattcctagaggacaaagacgtcaaatacagaagtttggcgatggagcgcctagagcctgtaaagggccttcacaaagtggttcagtgggtgaaagatcacggctacaagcgtgccgcagtaaccaatgccccaaggatcaatgcagagctcatgatcaaacttcttggtctatcagacttcttccaggctgtcattgttggaggcgaatgtgagaagccaaaacccgccccctttccatacctgaaggccctcaaggagctcgaagtgtccgcagcacacaccttcatcttcgaggattccgcttcagggacacgcgcaggtgttgccgcgggaatgcccgtcgtcgccgtctcgacgaggaacccggagaagtccctacaggaagctggggccgcattgatcatcagtgactatgaagaccagaaactgtggaacgcgctcgaggagattgatagggaggaagcgaagctaaagactggtggggcgtgagacttttgatggggatgaacagttgattagaccactgcaaatttatccattcttattatttataagggattctacaccctgaagttattatggtaggatagtttgatatatgtttcttttggttctctagtagagaatcaaataaaaaactttagtgcccaacacatgagatttgtttggttgacgggacctatgaaaatggcatatctgtcaggctcattgcctaccagaattttgactgtt

SEQ ID NO: 11960 - protein, 290 aa, Triticum aestivum
  peptide (1)..(290): Ceres Seq. ID no. 12614848
  misc_feature (59)..(247): Pfam Name: Pfam Description:  haloacid dehalogenase-like hydrolase
  misc_feature (53)..(281): NCBI GI NO: 18404847 NR Description: expressed protein; protein id: At2g38740
  misc_feature (43)..(279): NCBI GI NO: 37536998 NR Description: putative beta-phosphoglucomutase
  misc_feature (42)..(288): NCBI GI NO: 34897820 NR Description: P0514G12.30
  misc_feature (88)..(281): NCBI GI NO: 25408616 NR Description: hypothetical protein At2g38740
  misc_feature (121)..(279): NCBI GI NO: 37700485 NR Description: putative beta-phosphoglucomutase [Oryza sativa]
  misc_feature (61)..(278): NCBI GI NO: 23127812 NR Description: hypothetical protein [Nostoc punctiforme]
  misc_feature (59)..(275): NCBI GI NO: 23042473 NR Description: hypothetical protein
  misc_feature (61)..(278): NCBI GI NO: 17228223 NR Description: hypothetical protein [Nostoc sp. PCC 7120]
  misc_feature (61)..(272): NCBI GI NO: 37521914 NR Description: hypothetical protein glr2345
  misc_feature (59)..(271): NCBI GI NO: 23039672 NR Description: hypothetical protein
PKFLLLPACCRESPPLHNNLRERARARRRPRSLAHQPTTRAMASTNGGFVSPLAAAVPVEAVLFDIDGTLCDSDPLHHIAFQELLLAIGYNNGVPIDDEFFINNIAGRSDAEAAQNLFPDWPLEKGLKFLEDKDVKYRSLAMERLEPVKGLHKVVQWVKDHGYKRAAVTNAPRINAELMIKLLGLSDFFQAVIVGGECEKPKPAPFPYLKALKELEVSAAHTFIFEDSASGTRAGVAAGMPVVAVSTRNPEKSLQEAGAALIISDYEDQKLWNALEEIDREEAKLKTGGA

SEQ ID NO: 11961 - protein, 249 aa, Triticum aestivum
  peptide (1)..(249): Ceres Seq. ID no. 12614849
  misc_feature (18)..(206): Pfam Name: Pfam Description:  haloacid dehalogenase-like hydrolase
  misc_feature (12)..(240): NCBI GI NO: 18404847 NR Description: expressed protein; protein id: At2g38740
  misc_feature (2)..(238): NCBI GI NO: 37536998 NR Description: putative beta-phosphoglucomutase
  misc_feature (1)..(247): NCBI GI NO: 34897820 NR Description: P0514G12.30
  misc_feature (47)..(240): NCBI GI NO: 25408616 NR Description: hypothetical protein At2g38740
  misc_feature (80)..(238): NCBI GI NO: 37700485 NR Description: putative beta-phosphoglucomutase [Oryza sativa]
  misc_feature (20)..(237): NCBI GI NO: 23127812 NR Description: hypothetical protein [Nostoc punctiforme]
  misc_feature (18)..(234): NCBI GI NO: 23042473 NR Description: hypothetical protein
  misc_feature (20)..(237): NCBI GI NO: 17228223 NR Description: hypothetical protein [Nostoc sp. PCC 7120]
  misc_feature (20)..(231): NCBI GI NO: 37521914 NR Description: hypothetical protein glr2345
  misc_feature (18)..(230): NCBI GI NO: 23039672 NR Description: hypothetical protein
MASTNGGFVSPLAAAVPVEAVLFDIDGTLCDSDPLHHIAFQELLLAIGYNNGVPIDDEFFINNIAGRSDAEAAQNLFPDWPLEKGLKFLEDKDVKYRSLAMERLEPVKGLHKVVQWVKDHGYKRAAVTNAPRINAELMIKLLGLSDFFQAVIVGGECEKPKPAPFPYLKALKELEVSAAHTFIFEDSASGTRAGVAAGMPVVAVSTRNPEKSLQEAGAALIISDYEDQKLWNALEEIDREEAKLKTGGA

SEQ ID NO: 11962 - protein, 149 aa, Triticum aestivum
  peptide (1)..(149): Ceres Seq. ID no. 12614850
  misc_feature (1)..(106): Pfam Name: Pfam Description:  haloacid dehalogenase-like hydrolase
  misc_feature (1)..(140): NCBI GI NO: 18404847 NR Description: expressed protein; protein id: At2g38740
  misc_feature (1)..(138): NCBI GI NO: 37536998 NR Description: putative beta-phosphoglucomutase
  misc_feature (1)..(147): NCBI GI NO: 34897820 NR Description: P0514G12.30
  misc_feature (1)..(140): NCBI GI NO: 25408616 NR Description: hypothetical protein At2g38740
  misc_feature (1)..(138): NCBI GI NO: 37700485 NR Description: putative beta-phosphoglucomutase [Oryza sativa]
  misc_feature (1)..(137): NCBI GI NO: 23127812 NR Description: hypothetical protein [Nostoc punctiforme]
  misc_feature (1)..(134): NCBI GI NO: 23042473 NR Description: hypothetical protein
  misc_feature (1)..(137): NCBI GI NO: 17228223 NR Description: hypothetical protein [Nostoc sp. PCC 7120]
  misc_feature (1)..(131): NCBI GI NO: 37521914 NR Description: hypothetical protein glr2345
  misc_feature (1)..(130): NCBI GI NO: 23039672 NR Description: hypothetical protein
MERLEPVKGLHKVVQWVKDHGYKRAAVTNAPRINAELMIKLLGLSDFFQAVIVGGECEKPKPAPFPYLKALKELEVSAAHTFIFEDSASGTRAGVAAGMPVVAVSTRNPEKSLQEAGAALIISDYEDQKLWNALEEIDREEAKLKTGGA

SEQ ID NO: 11963 - DNA, 1781 bp, Triticum aestivum
  misc_feature (1)..(1781): Ceres Seq. ID no. 14303615
tcactccgccactccggccccattcgacagagacatcaccggcagcaggttaataatggcgcttcgcgcggcggagctccggcgactcctcctcctccgcggcggggcggtcctcccgctcccgctcgcgtcgcgctgccggccggcgagcacggccgcccgtgacgacgagggagcagggggcaacgcctacgacgtgctcggggtgggagagacgagctcctccgcggagatcaaggcctccttccaccgcctcgccaaggagacccaccccgacgtcgctgccgccgccggttcccgacggttccttcagatcctcgcggcctacgagatcctatccgattcccagcgaagggcgcactatgatagcttcctgcgctcgcagaggctagttatacagaagcatcccaggccatcgcaatatgtatatccatatccatatagttcaggcattgtgatgcctagagaaagtaatgttgtcgagtggcttaaatggtacaggcttactgttgatgacattgttacaaaaaagagaatcgcgacgggttcaggttatttcgatagacttgagagtgaactgtactctgcagtccatgctgcatactatggccccgaggttgagtccatggatctccttcctgattgctttgaagccgaggagaggtctgtgtatgagacatctgagctattgcaccttgtatctggccgtgatctgcttggtattgtcagtctagtcgatagcgtccgagagcggtctgatgcttgtcgtgagaagctgacacattctggttctgcaacctgcggcgttagtccaaatgttgcagtaaacggggagaaatgttcaatacctaggcatgcagatattcacaagcaagagaatgaggatagtgacagtatcccatcagatgcctacaaggacattgaattgcagatatgtgagagagtagtggccactgcaaataggaggctcaagtgcaattgcattgacaattcagacatggaagatcacatacatgtatttcttgttccaaatgaggtggttgcacctgatgtgatgcaagagcatctcctccttggaacaatcactgggttagacaccagtggagaggaaggatcttgctgtgtctatgatggccatggaataaagacccatgtaattgttaagcacaggacactgatggttaaacacatgcactggtatcaatttggagatgaagtttcaccctgcgagtgtcgatgtagcagggctcggttgccacccagcaggttttggctttttgagccacggtgttatatgcatgacactggcggttggtacatcgagacatttgggagagacaagaaagggaggacaactccatcgccgagacattggcatggtgtcaatgaacattctgaaaaccatgctctttcatcatattctggcgtggcgcctggcgaagaaagtgaggtgccagtttaatggcatattaattttaccactagagcagtagacaacaggtggtggcacttgctggctgtgctatattcggcaagacaaggcaaagctggctgagctattattaacatcctaaggtagtatgccacttcgaaagtcattgcattctccgctgctataaaagtttggtttttagcatttctggagtgcctagggttaggtttatctatttcccttcccgcaaaaaaaaggtttatctgtttcccaaagtataatgagtttttttttcgacaaagggtggattcaaagtataatgagtacataaagtaatatgtctgatggc

SEQ ID NO: 11964 - protein, 486 aa, Triticum aestivum
  peptide (1)..(486): Ceres Seq. ID no. 14303616
  misc_feature (62)..(125): Pfam Name: Pfam Description:  DnaJ domain
  misc_feature (19)..(466): NCBI GI NO: 14488362 NR Description: putative heat shock protein
  misc_feature (243)..(466): NCBI GI NO: 17027260 NR Description: hypothetical protein, 5'-partial
  misc_feature (188)..(220): NCBI GI NO: 17027260 NR Description: hypothetical protein, 5'-partial
  misc_feature (62)..(394): NCBI GI NO: 15235570 NR Description: DnaJ protein family [Arabidopsis thaliana]
  misc_feature (20)..(143): NCBI GI NO: 34894012 NR Description: P0672D08.16
  misc_feature (64)..(129): NCBI GI NO: 7488763 NR Description: DnaJ protein homolog - kidney bean (fragment)
  misc_feature (58)..(124): NCBI GI NO: 22972332 NR Description: hypothetical protein [Chloroflexus aurantiacus]
  misc_feature (60)..(123): NCBI GI NO: 34912486 NR Description: heat shock protein-like
  misc_feature (64)..(124): NCBI GI NO: 16079600 NR Description: heat-shock protein [Bacillus subtilis]
  misc_feature (64)..(137): NCBI GI NO: 37521966 NR Description: similar to heat shock protein DnaJ
HSATPAPFDRDITGSRLIMALRAAELRRLLLLRGGAVLPLPLASRCRPASTAARDDEGAGGNAYDVLGVGETSSSAEIKASFHRLAKETHPDVAAAAGSRRFLQILAAYEILSDSQRRAHYDSFLRSQRLVIQKHPRPSQYVYPYPYSSGIVMPRESNVVEWLKWYRLTVDDIVTKKRIATGSGYFDRLESELYSAVHAAYYGPEVESMDLLPDCFEAEERSVYETSELLHLVSGRDLLGIVSLVDSVRERSDACREKLTHSGSATCGVSPNVAVNGEKCSIPRHADIHKQENEDSDSIPSDAYKDIELQICERVVATANRRLKCNCIDNSDMEDHIHVFLVPNEVVAPDVMQEHLLLGTITGLDTSGEEGSCCVYDGHGIKTHVIVKHRTLMVKHMHWYQFGDEVSPCECRCSRARLPPSRFWLFEPRCYMHDTGGWYIETFGRDKKGRTTPSPRHWHGVNEHSENHALSSYSGVAPGEESEVPV

SEQ ID NO: 11965 - protein, 468 aa, Triticum aestivum
  peptide (1)..(468): Ceres Seq. ID no. 14303617
  misc_feature (44)..(107): Pfam Name: Pfam Description:  DnaJ domain
  misc_feature (1)..(448): NCBI GI NO: 14488362 NR Description: putative heat shock protein
  misc_feature (225)..(448): NCBI GI NO: 17027260 NR Description: hypothetical protein, 5'-partial
  misc_feature (170)..(202): NCBI GI NO: 17027260 NR Description: hypothetical protein, 5'-partial
  misc_feature (44)..(376): NCBI GI NO: 15235570 NR Description: DnaJ protein family [Arabidopsis thaliana]
  misc_feature (2)..(125): NCBI GI NO: 34894012 NR Description: P0672D08.16
  misc_feature (46)..(111): NCBI GI NO: 7488763 NR Description: DnaJ protein homolog - kidney bean (fragment)
  misc_feature (40)..(106): NCBI GI NO: 22972332 NR Description: hypothetical protein [Chloroflexus aurantiacus]
  misc_feature (42)..(105): NCBI GI NO: 34912486 NR Description: heat shock protein-like
  misc_feature (46)..(106): NCBI GI NO: 16079600 NR Description: heat-shock protein [Bacillus subtilis]
  misc_feature (46)..(119): NCBI GI NO: 37521966 NR Description: similar to heat shock protein DnaJ
MALRAAELRRLLLLRGGAVLPLPLASRCRPASTAARDDEGAGGNAYDVLGVGETSSSAEIKASFHRLAKETHPDVAAAAGSRRFLQILAAYEILSDSQRRAHYDSFLRSQRLVIQKHPRPSQYVYPYPYSSGIVMPRESNVVEWLKWYRLTVDDIVTKKRIATGSGYFDRLESELYSAVHAAYYGPEVESMDLLPDCFEAEERSVYETSELLHLVSGRDLLGIVSLVDSVRERSDACREKLTHSGSATCGVSPNVAVNGEKCSIPRHADIHKQENEDSDSIPSDAYKDIELQICERVVATANRRLKCNCIDNSDMEDHIHVFLVPNEVVAPDVMQEHLLLGTITGLDTSGEEGSCCVYDGHGIKTHVIVKHRTLMVKHMHWYQFGDEVSPCECRCSRARLPPSRFWLFEPRCYMHDTGGWYIETFGRDKKGRTTPSPRHWHGVNEHSENHALSSYSGVAPGEESEVPV

SEQ ID NO: 11966 - protein, 334 aa, Triticum aestivum
  peptide (1)..(334): Ceres Seq. ID no. 14303618
  misc_feature (1)..(314): NCBI GI NO: 14488362 NR Description: putative heat shock protein
  misc_feature (91)..(314): NCBI GI NO: 17027260 NR Description: hypothetical protein, 5'-partial
  misc_feature (36)..(68): NCBI GI NO: 17027260 NR Description: hypothetical protein, 5'-partial
  misc_feature (1)..(242): NCBI GI NO: 15235570 NR Description: DnaJ protein family [Arabidopsis thaliana]
MPRESNVVEWLKWYRLTVDDIVTKKRIATGSGYFDRLESELYSAVHAAYYGPEVESMDLLPDCFEAEERSVYETSELLHLVSGRDLLGIVSLVDSVRERSDACREKLTHSGSATCGVSPNVAVNGEKCSIPRHADIHKQENEDSDSIPSDAYKDIELQICERVVATANRRLKCNCIDNSDMEDHIHVFLVPNEVVAPDVMQEHLLLGTITGLDTSGEEGSCCVYDGHGIKTHVIVKHRTLMVKHMHWYQFGDEVSPCECRCSRARLPPSRFWLFEPRCYMHDTGGWYIETFGRDKKGRTTPSPRHWHGVNEHSENHALSSYSGVAPGEESEVPV

SEQ ID NO: 11967 - DNA, 1391 bp, Triticum aestivum
  misc_feature (1)..(1391): Ceres Seq. ID no. 13503476
accaaagcattagcacgctcctccacagcccactgctctgcctgtttgtggctttgccgtttcctgttccccactcatcgtcggcgatacaatcttctcgtggattgtctcgtggaggcgggagcgatggggcgtccgtgcgtcggcgctctcctggcgtgcgccgccgttgcagcttcttgctgcggctgcttccagttccagggtgctgctgcggcggcgaccccgtcgttcggggacaacttcgacatcaccggcgccgaggaccacgtcaagacctcccccgacggccagacctggtacctctccctcgacaacaagacgggcgttgggttccagacgaagcagaagtacctgttcgggtggttcagcatgaagctcaagctcgtcgggaacgactccgccggcgtcgtcaccgcctactacatgtgctcggacctggacgcggcgccggagcgcgacgagctggacttcgagttcctgggcaaccgcaccggcgagccgtacatcatccagacgaacgtgtaccgcagcggcgtaggcgggcgggagatgcggcactcgctgtggttcgaccccaccgccgagttccacagctactccatcctctggaaccccaagcagatcgtgtttttcgtggacaaggtgccgatcagggagtaccgcaactcggacaagcccaacaggttcttcccgatcatgaagcccatgtacgtcttctccagcatctggaacgccgacgactgggccacgcgcggggggctggagaagacggactggaccaaggggcccttcgtctcctcctacagcgacttcaccgccgacgcctgcgcctgggccaccggcccggccccgccggcgtgcgcggccgccacggggaacagctggtgggaccagccgccggcgtgggcgctcgacgacggccagcgccgggactcgggctgggtggccaggaacctcgtgatatacgactactgcgacgaccgcaagaggttcccggccgtgccggaggagtgcgcgctcaggaccaagactagctagtagctcctcatggatgggccgccctaggtctcgcttcacatgcatcgttcttttttgggggttcgatcgagtacgtggtgtggtgtagctatcaattggtggatggatttttttttcttttctcttctcttgttttgtgatgatgagatgcacatgcggacgtgcatgtgcacggtgatgcggcattgattgcccggggtggctgtgctctcatgtgagtgatagccctttcggaggaaaatgatgacatttttgttccgatgccttccatgctgcacgacacgagcatggatgggccaaaacttcatagaaatggtcccacgtatacgcatgataatcggcttcgactt

SEQ ID NO: 11968 - protein, 346 aa, Triticum aestivum
  peptide (1)..(346): Ceres Seq. ID no. 13503477
  misc_feature (78)..(262): Pfam Name: Pfam Description:  Glycosyl hydrolases family 16
  misc_feature (41)..(346): NCBI GI NO: 27261026 NR Description: putative xyloglucan endotransglycosylase
  misc_feature (51)..(341): NCBI GI NO: 18391291 NR Description: xyloglucan endotransglycosylase, putative
  misc_feature (71)..(341): NCBI GI NO: 38605338 NR Description: Probable xyloglucan endotransglucosylase/hydrolaseprotein 8 precursor
  misc_feature (51)..(341): NCBI GI NO: 25313538 NR Description: protein T23J18.21
  misc_feature (41)..(210): NCBI GI NO: 33146647 NR Description: xyloglucan endotransglycosylase-like protein
  misc_feature (78)..(339): NCBI GI NO: 38605537 NR Description: Probable xyloglucan endotransglucosylase/hydrolaseprotein precursor
  misc_feature (78)..(339): NCBI GI NO: 3043422 NR Description: endoxyloglucan transferase [Cicer arietinum]
  misc_feature (78)..(339): NCBI GI NO: 3452719 NR Description: endo-xyloglucan transferase (EXGT)
  misc_feature (77)..(339): NCBI GI NO: 5070246 NR Description: xyloglucan endo-transglycosylase-like protein
  misc_feature (77)..(339): NCBI GI NO: 7447418 NR Description: probable endo-xyloglucan transferase - uplandcotton
TKALARSSTAHCSACLWLCRFLFPTHRRRYNLLVDCLVEAGAMGRPCVGALLACAAVAASCCGCFQFQGAAAAATPSFGDNFDITGAEDHVKTSPDGQTWYLSLDNKTGVGFQTKQKYLFGWFSMKLKLVGNDSAGVVTAYYMCSDLDAAPERDELDFEFLGNRTGEPYIIQTNVYRSGVGGREMRHSLWFDPTAEFHSYSILWNPKQIVFFVDKVPIREYRNSDKPNRFFPIMKPMYVFSSIWNADDWATRGGLEKTDWTKGPFVSSYSDFTADACAWATGPAPPACAAATGNSWWDQPPAWALDDGQRRDSGWVARNLVIYDYCDDRKRFPAVPEECALRTKTS

SEQ ID NO: 11969 - protein, 344 aa, Triticum aestivum
  peptide (1)..(344): Ceres Seq. ID no. 13503478
QSISTLLHSPLLCLFVALPFPVPHSSSAIQSSRGLSRGGGSDGASVRRRSPGVRRRCSFLLRLLPVPGCCCGGDPVVRGQLRHHRRRGPRQDLPRRPDLVPLPRQQDGRWVPDEAEVPVRVVQHEAQARRERLRRRRHRLLHVLGPGRGAGARRAGLRVPGQPHRRAVHHPDERVPQRRRRAGDAALAVVRPHRRVPQLLHPLEPQADRVFRGQGADQGVPQLGQAQQVLPDHEAHVRLLQHLERRRLGHARGAGEDGLDQGALRLLLQRLHRRRLRLGHRPGPAGVRGRHGEQLVGPAAGVGARRRPAPGLGLGGQEPRDIRLLRRPQEVPGRAGGVRAQDQD

SEQ ID NO: 11970 - protein, 304 aa, Triticum aestivum
  peptide (1)..(304): Ceres Seq. ID no. 13503479
  misc_feature (36)..(220): Pfam Name: Pfam Description:  Glycosyl hydrolases family 16
  misc_feature (1)..(304): NCBI GI NO: 27261026 NR Description: putative xyloglucan endotransglycosylase
  misc_feature (9)..(299): NCBI GI NO: 18391291 NR Description: xyloglucan endotransglycosylase, putative
  misc_feature (29)..(299): NCBI GI NO: 38605338 NR Description: Probable xyloglucan endotransglucosylase/hydrolaseprotein 8 precursor
  misc_feature (9)..(299): NCBI GI NO: 25313538 NR Description: protein T23J18.21
  misc_feature (1)..(168): NCBI GI NO: 33146647 NR Description: xyloglucan endotransglycosylase-like protein
  misc_feature (36)..(297): NCBI GI NO: 38605537 NR Description: Probable xyloglucan endotransglucosylase/hydrolaseprotein precursor
  misc_feature (36)..(297): NCBI GI NO: 3043422 NR Description: endoxyloglucan transferase [Cicer arietinum]
  misc_feature (36)..(297): NCBI GI NO: 3452719 NR Description: endo-xyloglucan transferase (EXGT)
  misc_feature (35)..(297): NCBI GI NO: 5070246 NR Description: xyloglucan endo-transglycosylase-like protein
  misc_feature (35)..(297): NCBI GI NO: 7447418 NR Description: probable endo-xyloglucan transferase - uplandcotton
MGRPCVGALLACAAVAASCCGCFQFQGAAAAATPSFGDNFDITGAEDHVKTSPDGQTWYLSLDNKTGVGFQTKQKYLFGWFSMKLKLVGNDSAGVVTAYYMCSDLDAAPERDELDFEFLGNRTGEPYIIQTNVYRSGVGGREMRHSLWFDPTAEFHSYSILWNPKQIVFFVDKVPIREYRNSDKPNRFFPIMKPMYVFSSIWNADDWATRGGLEKTDWTKGPFVSSYSDFTADACAWATGPAPPACAAATGNSWWDQPPAWALDDGQRRDSGWVARNLVIYDYCDDRKRFPAVPEECALRTKTS

SEQ ID NO: 11971 - DNA, 1392 bp, Triticum aestivum
  misc_feature (1)..(1392): Ceres Seq. ID no. 13598294
ctagaacatcctaatcgaaaaacaatccacatcaaccttccagttcgtccgtaagcctcagcgccggaagtaccgcgatcgagcgagcgagtttcccgggcccacactgatggctctggttccctcgggctcaggcagcgcgccggtgatcgccgaggtggagatgaacggcggcgccgaccagagcgccaccaccgtgcgagccaccgtcgtgcaggcctccaccgtcttctacgacacccccgccactctcgataaagcagagagattaatagcagaggctgctggatatggttcacagttggtggtgttcccggaagcttttgttggtggttatcctcgtggatccacctttggatttgggatcagtattagtatcactaatccaaaagacaagggaaagggtgaattccagaagtattatgcagccgccatagacgtgcctggtccagaggtcacactcttagctgctatggctgggaaatataaggtctttctggtaatgggtgtgattgagagagaaggttacacactatattgttcagtgctcttctttgaccctctaggtcggtacctgggtaagcaccgcaagctcatgccgacggcattagaacggataatatggggatttggagatggatcaacaattcctgtttatgacactccacttggaaagattggagcccttatttgctgggaaaataagatgccactcttgaggacagcactgtatggtaaaggtattgagatatactgcgctcccacggccgattcaaggccagtgtggcaagcttccatgacacacatcgccatggaggggggatgctttgtgctgtcggcgaaccagttctgccgcagacaggactaccctccgccgtccgagtacgcctttgccggtttaggagaagagccttccccagacaccgtcgtttgccctggaggcagcgttatcatttcgccgtcaggcgaagtcctggcaggtcccaactacgacggagaggcgctgatcacagccgaccttgacatgggagagatcgtccgggccaagtttgattttgacgtggtgggccactactctcggcctgaggtgctgagcttggtggtggatgaccagccgcaccgcccggtgtccttcacctctgccgctgagaaggctccggctgccaagagcgacgacaccgcaaagccctgacgaccttcagctcagtcacaagcagttgatttctatcgatggttctcttttttgtgtgaactgcgaaaagatttctgtcgatagcttaataaagccgatgaaatgtaggctcgggtcgcccgcatgtctgaccgacgcccctgtaactttggctgcttgtaaaaaaaatgccttccggaacaatcagccgaggtccgttc

SEQ ID NO: 11972 - protein, 360 aa, Triticum aestivum
  peptide (1)..(360): Ceres Seq. ID no. 13598295
  misc_feature (1)..(360): NCBI GI NO: 25290269 NR Description: nitrilase-like protein [imported] - rice
  misc_feature (1)..(357): NCBI GI NO: 37654214 NR Description: nitrilase 2 [Zea mays]
  misc_feature (1)..(352): NCBI GI NO: 7435980 NR Description: nitrilase (EC 3.5.5.1) 4B - common tobacco
  misc_feature (1)..(352): NCBI GI NO: 3914163 NR Description: NITRILASE 4
  misc_feature (1)..(346): NCBI GI NO: 37654216 NR Description: nitrilase 1 [Zea mays]
  misc_feature (1)..(345): NCBI GI NO: 15242205 NR Description: Nitrilase 4 (sp P46011) [Arabidopsis thaliana]
  misc_feature (1)..(345): NCBI GI NO: 21593970 NR Description: Nitrilase 4 (sp P46011) [Arabidopsis thaliana]
  misc_feature (20)..(359): NCBI GI NO: 25290266 NR Description: nitrilase (EC 3.5.5.1) 2
  misc_feature (20)..(359): NCBI GI NO: 15229932 NR Description: nitrilase 2 [Arabidopsis thaliana]
  misc_feature (20)..(359): NCBI GI NO: 25290267 NR Description: nitrilase (EC 3.5.5.1) 2
MALVPSGSGSAPVIAEVEMNGGADQSATTVRATVVQASTVFYDTPATLDKAERLIAEAAGYGSQLVVFPEAFVGGYPRGSTFGFGISISITNPKDKGKGEFQKYYAAAIDVPGPEVTLLAAMAGKYKVFLVMGVIEREGYTLYCSVLFFDPLGRYLGKHRKLMPTALERIIWGFGDGSTIPVYDTPLGKIGALICWENKMPLLRTALYGKGIEIYCAPTADSRPVWQASMTHIAMEGGCFVLSANQFCRRQDYPPPSEYAFAGLGEEPSPDTVVCPGGSVIISPSGEVLAGPNYDGEALITADLDMGEIVRAKFDFDVVGHYSRPEVLSLVVDDQPHRPVSFTSAAEKAPAAKSDDTAKP

SEQ ID NO: 11973 - protein, 342 aa, Triticum aestivum
  peptide (1)..(342): Ceres Seq. ID no. 13598296
  misc_feature (1)..(342): NCBI GI NO: 25290269 NR Description: nitrilase-like protein [imported] - rice
  misc_feature (1)..(339): NCBI GI NO: 37654214 NR Description: nitrilase 2 [Zea mays]
  misc_feature (1)..(334): NCBI GI NO: 7435980 NR Description: nitrilase (EC 3.5.5.1) 4B - common tobacco
  misc_feature (1)..(334): NCBI GI NO: 3914163 NR Description: NITRILASE 4
  misc_feature (1)..(328): NCBI GI NO: 37654216 NR Description: nitrilase 1 [Zea mays]
  misc_feature (1)..(327): NCBI GI NO: 15242205 NR Description: Nitrilase 4 (sp P46011) [Arabidopsis thaliana]
  misc_feature (1)..(327): NCBI GI NO: 21593970 NR Description: Nitrilase 4 (sp P46011) [Arabidopsis thaliana]
  misc_feature (2)..(341): NCBI GI NO: 25290266 NR Description: nitrilase (EC 3.5.5.1) 2
  misc_feature (2)..(341): NCBI GI NO: 15229932 NR Description: nitrilase 2 [Arabidopsis thaliana]
  misc_feature (2)..(341): NCBI GI NO: 25290267 NR Description: nitrilase (EC 3.5.5.1) 2
MNGGADQSATTVRATVVQASTVFYDTPATLDKAERLIAEAAGYGSQLVVFPEAFVGGYPRGSTFGFGISISITNPKDKGKGEFQKYYAAAIDVPGPEVTLLAAMAGKYKVFLVMGVIEREGYTLYCSVLFFDPLGRYLGKHRKLMPTALERIIWGFGDGSTIPVYDTPLGKIGALICWENKMPLLRTALYGKGIEIYCAPTADSRPVWQASMTHIAMEGGCFVLSANQFCRRQDYPPPSEYAFAGLGEEPSPDTVVCPGGSVIISPSGEVLAGPNYDGEALITADLDMGEIVRAKFDFDVVGHYSRPEVLSLVVDDQPHRPVSFTSAAEKAPAAKSDDTAKP

SEQ ID NO: 11974 - protein, 239 aa, Triticum aestivum
  peptide (1)..(239): Ceres Seq. ID no. 13598297
  misc_feature (1)..(239): NCBI GI NO: 25290269 NR Description: nitrilase-like protein [imported] - rice
  misc_feature (1)..(236): NCBI GI NO: 37654214 NR Description: nitrilase 2 [Zea mays]
  misc_feature (1)..(231): NCBI GI NO: 7435980 NR Description: nitrilase (EC 3.5.5.1) 4B - common tobacco
  misc_feature (1)..(231): NCBI GI NO: 3914163 NR Description: NITRILASE 4
  misc_feature (1)..(225): NCBI GI NO: 37654216 NR Description: nitrilase 1 [Zea mays]
  misc_feature (1)..(224): NCBI GI NO: 15242205 NR Description: Nitrilase 4 (sp P46011) [Arabidopsis thaliana]
  misc_feature (1)..(224): NCBI GI NO: 21593970 NR Description: Nitrilase 4 (sp P46011) [Arabidopsis thaliana]
  misc_feature (1)..(238): NCBI GI NO: 25290266 NR Description: nitrilase (EC 3.5.5.1) 2
  misc_feature (1)..(238): NCBI GI NO: 15229932 NR Description: nitrilase 2 [Arabidopsis thaliana]
  misc_feature (1)..(238): NCBI GI NO: 25290267 NR Description: nitrilase (EC 3.5.5.1) 2
MAGKYKVFLVMGVIEREGYTLYCSVLFFDPLGRYLGKHRKLMPTALERIIWGFGDGSTIPVYDTPLGKIGALICWENKMPLLRTALYGKGIEIYCAPTADSRPVWQASMTHIAMEGGCFVLSANQFCRRQDYPPPSEYAFAGLGEEPSPDTVVCPGGSVIISPSGEVLAGPNYDGEALITADLDMGEIVRAKFDFDVVGHYSRPEVLSLVVDDQPHRPVSFTSAAEKAPAAKSDDTAKP

SEQ ID NO: 11975 - DNA, 1255 bp, Triticum aestivum
  misc_feature (1)..(1255): Ceres Seq. ID no. 12614972
cgaaaaagcctgctctcacttgattgagcacactacacttttctgctcgcgcgcgacgccgcgtgcggacagtcagtctgtttccatccatctccaatggccgccatcgccaccaagtggacttccggccctgttccgttcacggacgtcgacgacggcacggtgccgaagcggccagccaaggaggagttcgggagcctcgtggcagcgctgccgcgcaagaatcaggccggcctggagctgcgcctgtaccagggcttctggctgccggaccactgggtggcgggcaccgtcgtcttccagcggcgcttcgtcccacgcgccgacgacgtgatcctcgccagctaccccaagtgcggcaccacgtggctcaaggcgctggccttcgccaccatgacgcgcgacgcgtacccggcgccggcgcagcacccgctcctccgcctcaacccgcacgactgcatcccgttcctggacgagatcttcgcggacgggcaggaggccaagctggagaggctcccgtcgccgcgcctcatgaacacgcacatgccgcacaccctgctccccgagtcggtcaccggcgcggacgtcgccggctgtaaggtcgtgtacgtctgcagggaccccaaggacatggtcgtgtcgctgtggcacttcctccggcgccggcagccggacctcccgttcgcggagctgttcgagcacgtctgcgacggcgccgtggccgtcggcccgatctgggaccacgtgctcagctactggcgcgcgagcctcgcgcggcctgacagggtgctcttcctcaggtacgaagacctgctgctggacacgggcaagcacgtgaggcggctggcggagttcatgggccggccgttctcgcccgccgaggagggcgccggcgccgtggaggcggtggtggagctgtgcagcttcgagaagatgaaggggctggaggtgaacaagaagggatcggcgggggcgtaccacgccatgccccgggactctttcttcaggaaaggggtcgccggcgactgggtgaaccacatgacgccggagatggcgacgcggctggatgaggtcgtccgtgacaagttccgcggcacggggctcgcggctccgtgatctggacaatctgcatgcgtgattcgattgtactgtatgcttggctgctggtgcccgttgatttagaataaagatgctgttctcggcacaatcactgcttacatcatcgaataaaggtttaactacgattgtcgattgc

SEQ ID NO: 11976 - protein, 339 aa, Triticum aestivum
  peptide (1)..(339): Ceres Seq. ID no. 12614973
  misc_feature (78)..(335): Pfam Name: Pfam Description:  Sulfotransferase domain
  misc_feature (10)..(322): NCBI GI NO: 34393650 NR Description: putative flavonol 3-sulfotransferase
  misc_feature (11)..(336): NCBI GI NO: 40253317 NR Description: putative flavonol 3-sulfotransferase
  misc_feature (1)..(336): NCBI GI NO: 40253319 NR Description: putative flavonol 3-sulfotransferase
  misc_feature (11)..(336): NCBI GI NO: 35215145 NR Description: putative flavonol 3'-sulfotransferase
  misc_feature (1)..(336): NCBI GI NO: 38346451 NR Description: OSJNBa0018J19.12
  misc_feature (27)..(335): NCBI GI NO: 37531912 NR Description: putative flavonol 3-sulfotransferase
  misc_feature (52)..(274): NCBI GI NO: 30349136 NR Description: STF-1 [Triticum monococcum]
  misc_feature (13)..(339): NCBI GI NO: 34894524 NR Description: putative steroid sulfotransferase
  misc_feature (35)..(336): NCBI GI NO: 34905060 NR Description: putative flavonol 4'-sulfotransferase
  misc_feature (10)..(336): NCBI GI NO: 38344441 NR Description: OSJNBa0038O10.13
MAAIATKWTSGPVPFTDVDDGTVPKRPAKEEFGSLVAALPRKNQAGLELRLYQGFWLPDHWVAGTVVFQRRFVPRADDVILASYPKCGTTWLKALAFATMTRDAYPAPAQHPLLRLNPHDCIPFLDEIFADGQEAKLERLPSPRLMNTHMPHTLLPESVTGADVAGCKVVYVCRDPKDMVVSLWHFLRRRQPDLPFAELFEHVCDGAVAVGPIWDHVLSYWRASLARPDRVLFLRYEDLLLDTGKHVRRLAEFMGRPFSPAEEGAGAVEAVVELCSFEKMKGLEVNKKGSAGAYHAMPRDSFFRKGVAGDWVNHMTPEMATRLDEVVRDKFRGTGLAAP

SEQ ID NO: 11977 - protein, 240 aa, Triticum aestivum
  peptide (1)..(240): Ceres Seq. ID no. 12614974
  misc_feature (1)..(236): Pfam Name: Pfam Description:  Sulfotransferase domain
  misc_feature (1)..(223): NCBI GI NO: 34393650 NR Description: putative flavonol 3-sulfotransferase
  misc_feature (1)..(237): NCBI GI NO: 40253317 NR Description: putative flavonol 3-sulfotransferase
  misc_feature (1)..(237): NCBI GI NO: 40253319 NR Description: putative flavonol 3-sulfotransferase
  misc_feature (1)..(237): NCBI GI NO: 35215145 NR Description: putative flavonol 3'-sulfotransferase
  misc_feature (1)..(237): NCBI GI NO: 38346451 NR Description: OSJNBa0018J19.12
  misc_feature (1)..(236): NCBI GI NO: 37531912 NR Description: putative flavonol 3-sulfotransferase
  misc_feature (1)..(175): NCBI GI NO: 30349136 NR Description: STF-1 [Triticum monococcum]
  misc_feature (1)..(240): NCBI GI NO: 34894524 NR Description: putative steroid sulfotransferase
  misc_feature (1)..(237): NCBI GI NO: 34905060 NR Description: putative flavonol 4'-sulfotransferase
  misc_feature (1)..(237): NCBI GI NO: 38344441 NR Description: OSJNBa0038O10.13
MTRDAYPAPAQHPLLRLNPHDCIPFLDEIFADGQEAKLERLPSPRLMNTHMPHTLLPESVTGADVAGCKVVYVCRDPKDMVVSLWHFLRRRQPDLPFAELFEHVCDGAVAVGPIWDHVLSYWRASLARPDRVLFLRYEDLLLDTGKHVRRLAEFMGRPFSPAEEGAGAVEAVVELCSFEKMKGLEVNKKGSAGAYHAMPRDSFFRKGVAGDWVNHMTPEMATRLDEVVRDKFRGTGLAAP

SEQ ID NO: 11978 - protein, 194 aa, Triticum aestivum
  peptide (1)..(194): Ceres Seq. ID no. 12614975
  misc_feature (1)..(190): Pfam Name: Pfam Description:  Sulfotransferase domain
  misc_feature (1)..(177): NCBI GI NO: 34393650 NR Description: putative flavonol 3-sulfotransferase
  misc_feature (1)..(191): NCBI GI NO: 40253317 NR Description: putative flavonol 3-sulfotransferase
  misc_feature (1)..(191): NCBI GI NO: 40253319 NR Description: putative flavonol 3-sulfotransferase
  misc_feature (1)..(191): NCBI GI NO: 35215145 NR Description: putative flavonol 3'-sulfotransferase
  misc_feature (1)..(191): NCBI GI NO: 38346451 NR Description: OSJNBa0018J19.12
  misc_feature (1)..(190): NCBI GI NO: 37531912 NR Description: putative flavonol 3-sulfotransferase
  misc_feature (1)..(129): NCBI GI NO: 30349136 NR Description: STF-1 [Triticum monococcum]
  misc_feature (1)..(194): NCBI GI NO: 34894524 NR Description: putative steroid sulfotransferase
  misc_feature (1)..(191): NCBI GI NO: 34905060 NR Description: putative flavonol 4'-sulfotransferase
  misc_feature (1)..(191): NCBI GI NO: 38344441 NR Description: OSJNBa0038O10.13
MNTHMPHTLLPESVTGADVAGCKVVYVCRDPKDMVVSLWHFLRRRQPDLPFAELFEHVCDGAVAVGPIWDHVLSYWRASLARPDRVLFLRYEDLLLDTGKHVRRLAEFMGRPFSPAEEGAGAVEAVVELCSFEKMKGLEVNKKGSAGAYHAMPRDSFFRKGVAGDWVNHMTPEMATRLDEVVRDKFRGTGLAAP

SEQ ID NO: 11979 - DNA, 1728 bp, Triticum aestivum
  misc_feature (1)..(1728): Ceres Seq. ID no. 13596013
attacctagagcatcctaatcgaaaaattgtcgattcccctcaaccctagccgccagcggcggccagattttgctagtaacaagtgcttattagcttcacctccccctccagctgccgccgcctgccatctccggcgacgagcagggcggagaaggagaactagccatggcctcggtggcgccggaggttgagaagaaggaggaggaggagcaggtggtgaacccgtgggaggtgtcggcggggaagggcggcatcgactacgacaagctggtcgaccagttcggctgccagcgcctggacgccccgctcatcgaccgcatcgcgcgactcaccggccgccccccgcaccgcttcctccgccgcggcctcttcttcgcccaccgggatttgaacgagatactggacatctacgagaagggggacaagttctacctctacacggggagagggccctcctcagaggcgttgcatctcggacacctcgtccccttcatgttcaccaaatatttgcaggatgctttcaaggttcctctggtgatacagctaactgatgatgagaagttcctgtggaaaaatttgacggtagaggaaagtaaaaggcttgcgcgtgaaaatgcaaaagacattatagcatgcggatttgatgttgaaaggacttttatattctctgattttaattttgttggcggtgccttttacgaaaacatggttaaagtggccagatgtgtgacatataataaagttgtcggaatatttggattcactccagaggatcacattggaaagattagctttcctcctgtgcaagcagttccatcattcccttcttcatttcccaaacacttttctggcaatgaccaactacggtgcctgataccttgtgcaatagaccaggatccttatttcaggatgacccgtgatgttgctccaagaattggttaccagaagccagcactgattgagtcaagatttttccctgcccttcagggggagaacacgaaaatgtcagctagtgatccaaattctgctatatatgtgaccgatagtactaaatatataaagacaaaggtgaataaatatgcattctcaggtggccaggactctgtagaacttcatagaaaacttggagctaaccttgaggttgatgtctcaattaagtacctgaacttcttccttgaagacgatgatgagctcgagcgcataaagaaggcgtacaaggaaggaaggatgctgacgggtgaagtgaagcagcttctggttacggttctttctgagatggttgaaaggcacaaaagagctagagctcgagttaccgaggagatggtcgacgccttcatggctgtgaggcctcttcccaacatgtttggctgagcattgggtgggaagttcataccctttctgtgtggattttattgaattccaggagcaacatatgaagtttcaggatttagttgtaactattaatgtcaacctggccgctcaatcctgtatggcagccactgattttgcaaaatcagcatgtgatatgtttgttttcaagcttgctcgatcactgcaaagatttctatttattggaattagggaacacacacgtgttttttttgaaaccgaggcaaaagatttgcctcgtatattaattaagaggggagagagtacaacacatggcagttacaactttgcttgtcagattgggacatacaacgtaaaaagactactctcgcggcatc

SEQ ID NO: 11980 - protein, 401 aa, Triticum aestivum
  peptide (1)..(401): Ceres Seq. ID no. 13596014
  misc_feature (7)..(400): NCBI GI NO: 15229319 NR Description: tryptophanyl-tRNA synthetase -related
  misc_feature (12)..(396): NCBI GI NO: 32709 NR Description: IFP53 [Homo sapiens]
  misc_feature (9)..(396): NCBI GI NO: 2851538 NR Description: TRYPTOPHANYL-TRNA SYNTHETASE
  misc_feature (12)..(396): NCBI GI NO: 135191 NR Description: Tryptophanyl-tRNA synthetase
  misc_feature (1)..(396): NCBI GI NO: 12835778 NR Description: unnamed protein product [Mus musculus]
  misc_feature (12)..(396): NCBI GI NO: 4759316 NR Description: tryptophanyl-tRNA synthetase
  misc_feature (15)..(396): NCBI GI NO: 34328206 NR Description: tryptophanyl-tRNA synthetase [Mus musculus]
  misc_feature (1)..(396): NCBI GI NO: 29144895 NR Description: tryptophanyl-tRNA synthetase [Mus musculus]
  misc_feature (9)..(396): NCBI GI NO: 7428462 NR Description: tryptophan-tRNA ligase (EC 6.1.1.2)
  misc_feature (1)..(396): NCBI GI NO: 37590880 NR Description: Unknown (protein for MGC:73274) [Danio rerio]
MASVAPEVEKKEEEEQVVNPWEVSAGKGGIDYDKLVDQFGCQRLDAPLIDRIARLTGRPPHRFLRRGLFFAHRDLNEILDIYEKGDKFYLYTGRGPSSEALHLGHLVPFMFTKYLQDAFKVPLVIQLTDDEKFLWKNLTVEESKRLARENAKDIIACGFDVERTFIFSDFNFVGGAFYENMVKVARCVTYNKVVGIFGFTPEDHIGKISFPPVQAVPSFPSSFPKHFSGNDQLRCLIPCAIDQDPYFRMTRDVAPRIGYQKPALIESRFFPALQGENTKMSASDPNSAIYVTDSTKYIKTKVNKYAFSGGQDSVELHRKLGANLEVDVSIKYLNFFLEDDDELERIKKAYKEGRMLTGEVKQLLVTVLSEMVERHKRARARVTEEMVDAFMAVRPLPNMFG

SEQ ID NO: 11981 - protein, 292 aa, Triticum aestivum
  peptide (1)..(292): Ceres Seq. ID no. 13596015
  misc_feature (1)..(291): NCBI GI NO: 15229319 NR Description: tryptophanyl-tRNA synthetase -related
  misc_feature (1)..(287): NCBI GI NO: 32709 NR Description: IFP53 [Homo sapiens]
  misc_feature (1)..(287): NCBI GI NO: 2851538 NR Description: TRYPTOPHANYL-TRNA SYNTHETASE
  misc_feature (1)..(287): NCBI GI NO: 135191 NR Description: Tryptophanyl-tRNA synthetase
  misc_feature (1)..(287): NCBI GI NO: 12835778 NR Description: unnamed protein product [Mus musculus]
  misc_feature (1)..(287): NCBI GI NO: 4759316 NR Description: tryptophanyl-tRNA synthetase
  misc_feature (1)..(287): NCBI GI NO: 34328206 NR Description: tryptophanyl-tRNA synthetase [Mus musculus]
  misc_feature (1)..(287): NCBI GI NO: 29144895 NR Description: tryptophanyl-tRNA synthetase [Mus musculus]
  misc_feature (1)..(287): NCBI GI NO: 7428462 NR Description: tryptophan-tRNA ligase (EC 6.1.1.2)
  misc_feature (1)..(287): NCBI GI NO: 37590880 NR Description: Unknown (protein for MGC:73274) [Danio rerio]
MFTKYLQDAFKVPLVIQLTDDEKFLWKNLTVEESKRLARENAKDIIACGFDVERTFIFSDFNFVGGAFYENMVKVARCVTYNKVVGIFGFTPEDHIGKISFPPVQAVPSFPSSFPKHFSGNDQLRCLIPCAIDQDPYFRMTRDVAPRIGYQKPALIESRFFPALQGENTKMSASDPNSAIYVTDSTKYIKTKVNKYAFSGGQDSVELHRKLGANLEVDVSIKYLNFFLEDDDELERIKKAYKEGRMLTGEVKQLLVTVLSEMVERHKRARARVTEEMVDAFMAVRPLPNMFG

SEQ ID NO: 11982 - protein, 221 aa, Triticum aestivum
  peptide (1)..(221): Ceres Seq. ID no. 13596016
  misc_feature (1)..(220): NCBI GI NO: 15229319 NR Description: tryptophanyl-tRNA synthetase -related
  misc_feature (1)..(216): NCBI GI NO: 32709 NR Description: IFP53 [Homo sapiens]
  misc_feature (1)..(216): NCBI GI NO: 2851538 NR Description: TRYPTOPHANYL-TRNA SYNTHETASE
  misc_feature (1)..(216): NCBI GI NO: 135191 NR Description: Tryptophanyl-tRNA synthetase
  misc_feature (1)..(216): NCBI GI NO: 12835778 NR Description: unnamed protein product [Mus musculus]
  misc_feature (1)..(216): NCBI GI NO: 4759316 NR Description: tryptophanyl-tRNA synthetase
  misc_feature (1)..(216): NCBI GI NO: 34328206 NR Description: tryptophanyl-tRNA synthetase [Mus musculus]
  misc_feature (1)..(216): NCBI GI NO: 29144895 NR Description: tryptophanyl-tRNA synthetase [Mus musculus]
  misc_feature (1)..(216): NCBI GI NO: 7428462 NR Description: tryptophan-tRNA ligase (EC 6.1.1.2)
  misc_feature (1)..(216): NCBI GI NO: 37590880 NR Description: Unknown (protein for MGC:73274) [Danio rerio]
MVKVARCVTYNKVVGIFGFTPEDHIGKISFPPVQAVPSFPSSFPKHFSGNDQLRCLIPCAIDQDPYFRMTRDVAPRIGYQKPALIESRFFPALQGENTKMSASDPNSAIYVTDSTKYIKTKVNKYAFSGGQDSVELHRKLGANLEVDVSIKYLNFFLEDDDELERIKKAYKEGRMLTGEVKQLLVTVLSEMVERHKRARARVTEEMVDAFMAVRPLPNMFG

SEQ ID NO: 11983 - DNA, 1122 bp, Triticum aestivum
  misc_feature (1)..(1122): Ceres Seq. ID no. 14301614
gaaatccccggcttaaacccacgccttcccttcctccccccgcctccgactgcgtccaagaaacccaatcccattcccacctgctgcggctgctccgggatcgaggcgcgcggcggcgatggcgatcgagaagaaggggatgtcggcgtacgaggcggagcgggagaggacggtggaggagaacaagcgcaagatggaggcgctcaacctgcgccacctctccgccgccgtcgccacctacgcccccaagaccccctcccccatgaagcacaagaggcgcaggatcatcgaggcggcgacccccgtcccgtcgccgcccaggaggtcccgccggctcgcccacctccccgaggtcaagtacgccgacgcctgcgcggaggtgggagaagatagtgagagagcgggaaggtggtctcctagaagacgaagtggcagcatctacttagcaggaggtggaggtggaccaatttccatgaaagctaggatggaggcagcaagcaaagcagaggagttagaatcacaacttgaccctgaatttccatccttcatgaagcggatgctacattcacatgtggtgcgagggttctggttgggtctcccaagccatttctgtgacacgtacctgccaaagaatgactgcactatcactttggtggatgagaaagatgaagagttcgagtccaaataccttgcctacaagaaggggctaagtggtggctgggctggttttgctctggatcatgtgattcgggatggagactcgacggtctttcagctgatcaagcctacaaccttcaaggtgcatatcatccgagctgctgttggtgatgatgacaacgaggaaatggagtgagcacaccgtgcagcttcactgctaagaactaacctatcagtggtagatggactagttaggagttgggtatggtttaagctttatctatctggatcgctggtgcggttatgcattttgttggtatgtccaccagtggcttacaagatggcaagtaggatttggggcgtggtgtaggcttttgtgtatcaggattacccgcgcagctatgtactaatatgttcccatgtccaccaatactgataatgagatcagatggcaagtaatcagcc

SEQ ID NO: 11984 - protein, 244 aa, Triticum aestivum
  peptide (1)..(244): Ceres Seq. ID no. 14301615
  misc_feature (1)..(241): NCBI GI NO: 15217278 NR Description: Unknown protein [Oryza sativa]
  misc_feature (10)..(244): NCBI GI NO: 9294620 NR Description: gene_id:MVI11.9~unknown protein
  misc_feature (60)..(243): NCBI GI NO: 30694114 NR Description: expressed protein [Arabidopsis thaliana]
  misc_feature (125)..(232): NCBI GI NO: 34904376 NR Description: unnamed protein product
  misc_feature (10)..(232): NCBI GI NO: 15237157 NR Description: transcriptional factor B3 family
MAIEKKGMSAYEAERERTVEENKRKMEALNLRHLSAAVATYAPKTPSPMKHKRRRIIEAATPVPSPPRRSRRLAHLPEVKYADACAEVGEDSERAGRWSPRRRSGSIYLAGGGGGPISMKARMEAASKAEELESQLDPEFPSFMKRMLHSHVVRGFWLGLPSHFCDTYLPKNDCTITLVDEKDEEFESKYLAYKKGLSGGWAGFALDHVIRDGDSTVFQLIKPTTFKVHIIRAAVGDDDNEEME

SEQ ID NO: 11985 - protein, 237 aa, Triticum aestivum
  peptide (1)..(237): Ceres Seq. ID no. 14301616
  misc_feature (1)..(234): NCBI GI NO: 15217278 NR Description: Unknown protein [Oryza sativa]
  misc_feature (3)..(237): NCBI GI NO: 9294620 NR Description: gene_id:MVI11.9~unknown protein
  misc_feature (53)..(236): NCBI GI NO: 30694114 NR Description: expressed protein [Arabidopsis thaliana]
  misc_feature (118)..(225): NCBI GI NO: 34904376 NR Description: unnamed protein product
  misc_feature (3)..(225): NCBI GI NO: 15237157 NR Description: transcriptional factor B3 family
MSAYEAERERTVEENKRKMEALNLRHLSAAVATYAPKTPSPMKHKRRRIIEAATPVPSPPRRSRRLAHLPEVKYADACAEVGEDSERAGRWSPRRRSGSIYLAGGGGGPISMKARMEAASKAEELESQLDPEFPSFMKRMLHSHVVRGFWLGLPSHFCDTYLPKNDCTITLVDEKDEEFESKYLAYKKGLSGGWAGFALDHVIRDGDSTVFQLIKPTTFKVHIIRAAVGDDDNEEME

SEQ ID NO: 11986 - protein, 219 aa, Triticum aestivum
  peptide (1)..(219): Ceres Seq. ID no. 14301617
  misc_feature (1)..(216): NCBI GI NO: 15217278 NR Description: Unknown protein [Oryza sativa]
  misc_feature (1)..(219): NCBI GI NO: 9294620 NR Description: gene_id:MVI11.9~unknown protein
  misc_feature (35)..(218): NCBI GI NO: 30694114 NR Description: expressed protein [Arabidopsis thaliana]
  misc_feature (100)..(207): NCBI GI NO: 34904376 NR Description: unnamed protein product
  misc_feature (1)..(207): NCBI GI NO: 15237157 NR Description: transcriptional factor B3 family
MEALNLRHLSAAVATYAPKTPSPMKHKRRRIIEAATPVPSPPRRSRRLAHLPEVKYADACAEVGEDSERAGRWSPRRRSGSIYLAGGGGGPISMKARMEAASKAEELESQLDPEFPSFMKRMLHSHVVRGFWLGLPSHFCDTYLPKNDCTITLVDEKDEEFESKYLAYKKGLSGGWAGFALDHVIRDGDSTVFQLIKPTTFKVHIIRAAVGDDDNEEME

SEQ ID NO: 11987 - DNA, 1004 bp, Triticum aestivum
  misc_feature (1)..(1004): Ceres Seq. ID no. 13654659
ctgtcctcgttgtcattattgatcttcgtcttggtcgccctcccttcgcctgcgctcgcgcagcagcaacccgccgctccctccggctggccgtcgtccgtcccgctcccggcgcccgcaaattcttcctcccccctcgacatggcgtcctgcccttcggtcaagaacatcctcgtgctggacgcggaggggaagcgcgtggccgtcaagtactatgccgatgactggccctccgcgtcctccaagctggctttcgagaagtcgctcttcgtgaagacccagaagaccagcgccagagcagaggctgatgtggtaatgttcgatggctacatcattgtgtacaagttcatccaagatctccatttttttgtaactggaggagatgaggagaatgagctcattttagcgtcagttcttcagggattttctgatgctgttggcattcttctcagaaacaatgtagacaaaaggaccgcacttgaaaatctggatctcatctttttgtgccttgacgaagttgttgatggagggattgttctggaaacagatggaaatgtgatagccgagaaggtgtcaggccatggattggaaggagctgggtcgttcactgagcagacgataagccaagccctagcgacagcaagagagcacttcgcgaggtctcttctgaagtagtgtgtgtaggcatctttcgggttggcgatgcgcccagcattgaactcgtgtgtttcctcttgtagcacagtgcacctagtttgcaagaaagaaagaaagagcgagaaaatgacttgaatctttgcacgtgagttcgttcgttcgtctattgttgtggtgctcgtcgacattttgtcgcagagatgtactccctccgttcgaaattacttgtcttgaaaatggatgtatctagaactaaaattccgaacggagggagtatgtgcggcctaagtgcctaactggttaccagattcccttctaaggtctgtataagaaacttgtgatggtgc

SEQ ID NO: 11988 - protein, 224 aa, Triticum aestivum
  peptide (1)..(224): Ceres Seq. ID no. 13654660
  misc_feature (53)..(198): Pfam Name: Pfam Description:  Clathrin adaptor complex small chain
  misc_feature (48)..(223): NCBI GI NO: 7678766 NR Description: zeta1-COP [Oryza sativa (japonica cultivar-group)]
  misc_feature (48)..(223): NCBI GI NO: 7380910 NR Description: nonclathrin coat protein zeta1-COP [Zea mays]
  misc_feature (19)..(213): NCBI GI NO: 34908112 NR Description: putative zeta1-COP
  misc_feature (50)..(224): NCBI GI NO: 7380908 NR Description: nonclathrin coat protein zeta2-COP [Zea mays]
  misc_feature (45)..(224): NCBI GI NO: 7259354 NR Description: nonclathrin coat protein zeta2-COP
  misc_feature (46)..(224): NCBI GI NO: 7259352 NR Description: nonclathrin coat protein zeta1-COP
  misc_feature (60)..(224): NCBI GI NO: 7259350 NR Description: nonclathrin coat protein zeta2-COP [Oryza sativa]
  misc_feature (51)..(224): NCBI GI NO: 7259348 NR Description: nonclathrin coat protein zeta1-COP [Glycine max]
  misc_feature (50)..(223): NCBI GI NO: 7259346 NR Description: nonclathrin coat protein zeta1-COP [Brassica rapa]
  misc_feature (50)..(223): NCBI GI NO: 30681014 NR Description: coatomer zeta subunit (zeta-coat protein) -related
LSSLSLLIFVLVALPSPALAQQQPAAPSGWPSSVPLPAPANSSSPLDMASCPSVKNILVLDAEGKRVAVKYYADDWPSASSKLAFEKSLFVKTQKTSARAEADVVMFDGYIIVYKFIQDLHFFVTGGDEENELILASVLQGFSDAVGILLRNNVDKRTALENLDLIFLCLDEVVDGGIVLETDGNVIAEKVSGHGLEGAGSFTEQTISQALATAREHFARSLLK

SEQ ID NO: 11989 - protein, 177 aa, Triticum aestivum
  peptide (1)..(177): Ceres Seq. ID no. 13654661
  misc_feature (6)..(151): Pfam Name: Pfam Description:  Clathrin adaptor complex small chain
  misc_feature (1)..(176): NCBI GI NO: 7678766 NR Description: zeta1-COP [Oryza sativa (japonica cultivar-group)]
  misc_feature (1)..(176): NCBI GI NO: 7380910 NR Description: nonclathrin coat protein zeta1-COP [Zea mays]
  misc_feature (1)..(166): NCBI GI NO: 34908112 NR Description: putative zeta1-COP
  misc_feature (3)..(177): NCBI GI NO: 7380908 NR Description: nonclathrin coat protein zeta2-COP [Zea mays]
  misc_feature (1)..(177): NCBI GI NO: 7259354 NR Description: nonclathrin coat protein zeta2-COP
  misc_feature (1)..(177): NCBI GI NO: 7259352 NR Description: nonclathrin coat protein zeta1-COP
  misc_feature (13)..(177): NCBI GI NO: 7259350 NR Description: nonclathrin coat protein zeta2-COP [Oryza sativa]
  misc_feature (4)..(177): NCBI GI NO: 7259348 NR Description: nonclathrin coat protein zeta1-COP [Glycine max]
  misc_feature (3)..(176): NCBI GI NO: 7259346 NR Description: nonclathrin coat protein zeta1-COP [Brassica rapa]
  misc_feature (3)..(176): NCBI GI NO: 30681014 NR Description: coatomer zeta subunit (zeta-coat protein) -related
MASCPSVKNILVLDAEGKRVAVKYYADDWPSASSKLAFEKSLFVKTQKTSARAEADVVMFDGYIIVYKFIQDLHFFVTGGDEENELILASVLQGFSDAVGILLRNNVDKRTALENLDLIFLCLDEVVDGGIVLETDGNVIAEKVSGHGLEGAGSFTEQTISQALATAREHFARSLLK

SEQ ID NO: 11990 - protein, 119 aa, Triticum aestivum
  peptide (1)..(119): Ceres Seq. ID no. 13654662
  misc_feature (1)..(93): Pfam Name: Pfam Description:  Clathrin adaptor complex small chain
  misc_feature (1)..(118): NCBI GI NO: 7678766 NR Description: zeta1-COP [Oryza sativa (japonica cultivar-group)]
  misc_feature (1)..(118): NCBI GI NO: 7380910 NR Description: nonclathrin coat protein zeta1-COP [Zea mays]
  misc_feature (1)..(108): NCBI GI NO: 34908112 NR Description: putative zeta1-COP
  misc_feature (1)..(119): NCBI GI NO: 7380908 NR Description: nonclathrin coat protein zeta2-COP [Zea mays]
  misc_feature (1)..(119): NCBI GI NO: 7259354 NR Description: nonclathrin coat protein zeta2-COP
  misc_feature (1)..(119): NCBI GI NO: 7259352 NR Description: nonclathrin coat protein zeta1-COP
  misc_feature (1)..(119): NCBI GI NO: 7259350 NR Description: nonclathrin coat protein zeta2-COP [Oryza sativa]
  misc_feature (1)..(119): NCBI GI NO: 7259348 NR Description: nonclathrin coat protein zeta1-COP [Glycine max]
  misc_feature (1)..(118): NCBI GI NO: 7259346 NR Description: nonclathrin coat protein zeta1-COP [Brassica rapa]
  misc_feature (1)..(118): NCBI GI NO: 30681014 NR Description: coatomer zeta subunit (zeta-coat protein) -related
MFDGYIIVYKFIQDLHFFVTGGDEENELILASVLQGFSDAVGILLRNNVDKRTALENLDLIFLCLDEVVDGGIVLETDGNVIAEKVSGHGLEGAGSFTEQTISQALATAREHFARSLLK

SEQ ID NO: 11991 - DNA, 1299 bp, Triticum aestivum
  misc_feature (1)..(1299): Ceres Seq. ID no. 13662173
attcattcattctccctcccctccttccttcctacctaatcctagaggagcatagctagggttcctccccgcagccgtcgcctcctctcctctcctcaccccgccgccgccggccaacgagatccagccagcgagatccgaccgacgccgtctccgtctccgtctccgcctcgccgccgccgcctgcttcggcatgtcgcattccaacgaagtaaggtacaccgcgcgctccatcacgcctccggcagacagggacagcggctccaagtcgcccccaccacggaggcgcgcggcttccaagtcgcctcccctgcctccccctccccctttccctcccaagggggtgcgcaccatctcgaggtcgcctccacctagtagtagaagacgcagcgtctcgaggtcccctccaccaaagaggcgcggcaggtccaggtccaggtccaggtccaggaacaggagccgctccaggagcagagacaaagacgatgtgaggaatcctggcaacaacctctatgtcactggactgtccacacggacgcaggaaactgacctggagaagttcttcagcaaagagggcaaggttaaagactgccgtgtcgttatcgatcctcgtacgaaagaatcacgtggctttgcgttcgtgaccatggagaatgttgaggatgcaaggcgctgcatcaagtacctgcaccgtactgtacttgaaggccgcctcatcagtgtggcaaaggcaaagagaactcgtgagaggacccctacccctggagaatactgtggtccgagaggcgggcgctcccgggtggagccgcggcggagccgttctccacgccgttccagcaggtcgtcgagggaccggtcaaggtcgccggccgcaaggagggacagggacagcagggacaggaagcgcgactgaatgaaacaaggcaaggggagaaacaaaatgatgctaaaatcacatatcgccgcgagttgtcgagtatgaatgtgtcttggattctttgttgctgaatgaatgtttgtttgatgaaggaggactctagtcagtatttctgctggatgctttctttagataagcagctgatttgtcttgtctttctgttttatcagaggagaggatttccctaacattcatttctttttaggttttgtgttgtgtatggacgatgaaggcgcatttcgtgtttttaaggtttctcgctatcgaatcggatgcgtctatttggttgtatgagcacctttgtcttgtcttggctggatgctaacattattattattattattatgtctgtgatggtatgc

SEQ ID NO: 11992 - protein, 239 aa, Triticum aestivum
  peptide (1)..(239): Ceres Seq. ID no. 13662174
  misc_feature (106)..(177): Pfam Name: a.k.a. RRM, RBD, or RNP domain Pfam Description: RNA recognition motif.
  misc_feature (1)..(239): NCBI GI NO: 40253470 NR Description: putative transformer-SR ribonucleoprotein
  misc_feature (55)..(234): NCBI GI NO: 11275253 NR Description: transformer-2-like protein - liverwort
  misc_feature (55)..(225): NCBI GI NO: 7489207 NR Description: transformer-SR ribonucleoprotein - common tobacco
  misc_feature (51)..(231): NCBI GI NO: 28973767 NR Description: putative transformer-SR ribonucleoprotein
  misc_feature (64)..(231): NCBI GI NO: 18390758 NR Description: transformer serine/arginine-rich ribonucleoprotein
  misc_feature (91)..(229): NCBI GI NO: 34902002 NR Description: putative transformer serine/arginine-richribonucleoprotein
  misc_feature (98)..(231): NCBI GI NO: 8778550 NR Description: F22G5.31 [Arabidopsis thaliana]
  misc_feature (64)..(179): NCBI GI NO: 30680096 NR Description: transformer serine/arginine-rich ribonucleoprotein
  misc_feature (59)..(235): NCBI GI NO: 40738429 NR Description: hypothetical protein AN6676.2
  misc_feature (61)..(209): NCBI GI NO: 16944647 NR Description: conserved hypothetical protein [Neurospora crassa]
MSHSNEVRYTARSITPPADRDSGSKSPPPRRRAASKSPPLPPPPPFPPKGVRTISRSPPPSSRRRSVSRSPPPKRRGRSRSRSRSRNRSRSRSRDKDDVRNPGNNLYVTGLSTRTQETDLEKFFSKEGKVKDCRVVIDPRTKESRGFAFVTMENVEDARRCIKYLHRTVLEGRLISVAKAKRTRERTPTPGEYCGPRGGRSRVEPRRSRSPRRSSRSSRDRSRSPAARRDRDSRDRKRD

SEQ ID NO: 11993 - DNA, 1610 bp, Triticum aestivum
  misc_feature (1)..(1610): Ceres Seq. ID no. 13596509
ataatctaatcaccaaataaaactagtactactcctcggagcagcagcactgcagcagtggtggtattaattaatcgaacccatcccagcggagaagaagaaaagaagaaggctctccttctcctttaagcttcgaatcatccttccttcccccctccccctccctccctcccacttcatctctccgcgacgaagcttccaaaacccccaaaaggatcccccaatcttcgcctctgcctccggcccgatcaagctctcagcagcggctgccgcgcggctcggcccgggatccatggagaggtacgagctgctcaaggacatcggcgccggcaacttcggcgtcgcgcggctgatgcgcaacaaggagaccaaggagctcgtcgccatgaagtacatcccacggggcctcaagattgacgagaatgtggcgagggagatcataaaccaccggtcgctgcggcaccccaacataatccgattcaaggaggtggtggtcacgccgacgcacctggcgattgtgatggagtacgcggcgggcggcgagctcttcgaccggatctgcaacgccgggaggttcagcgaggacgaggccaggtacttcttccagcagctcatctgcggcgtgagttactgccacttcatgcaaatttgccaccgggacctgaagctggagaacactctgctggacggcagcccggcgccccgcctcaagatctgcgacttcggttattcaaagtcgtcgttgctgcactcgaagcccaagtcgacggtcggcacgccggcgtacatcgccccggaggtgctctcccgccgggaatacgacggcaagacagccgatgtgtggtcttgtggagtgaccctttatgtgatgctagtcggcggttacccttttgaggatcctgatgaccccaagaacttcagaaagaccattgggagaataatgtcaatccaatacaaaataccggagtatgtccacgtatcccaagactgcaagcaactccttgccagtatttttgtcgcaaaccctgcaaagagaataacaatgagggagatcaggaaccacccttggttcttgaagaacttaccaagagagctcacggaagctgcccaagcaatgtactacaagagagacaacagcgccccgacctactcggtccagtccgtggaggggatcatgaagatcgtggaggaggcgcagaaaccgcctccttccaccactccggtggcgggtttcgggtgggcggaggaggacgagcaggaggatggcaagaagccagaggaggaagcggaggaggaagacgaagaaaatgagtatgagaagcagttgaatgaggtccgtgccagcggcgagttccacatcagctagctgatgggggtgcttcactggcgtgagaaggccacagaccggggataaaatttgtcatatagtttgtagtttgtgttttgttctcgagtttttctcttcattctcgtctccggttctgcaacagtgtaaattaccaaagtggttccgtcgctgtctttacaatgactgattaagctagcattgcggaaacataatgtatggaataaatcatcttattgagcatgttcttacaaaaaaaaaaaaa

SEQ ID NO: 11994 - protein, 357 aa, Triticum aestivum
  peptide (1)..(357): Ceres Seq. ID no. 15221902
  misc_feature (4)..(260): Pfam Name: Pfam Description:  Protein kinase domain
  misc_feature (1)..(357): NCBI GI NO: 19568098 NR Description: osmotic stress-activated protein kinase
  misc_feature (1)..(357): NCBI GI NO: 1362051 NR Description: protein kinase SPK-3 (EC 2.7.1.-) - soybean
  misc_feature (1)..(353): NCBI GI NO: 2129803 NR Description: probable serine/threonine-specific protein kinase
  misc_feature (1)..(357): NCBI GI NO: 1161254 NR Description: protein kinase [Glycine max]
  misc_feature (1)..(357): NCBI GI NO: 1362026 NR Description: probable serine/threonine-specific protein kinase
  misc_feature (1)..(353): NCBI GI NO: 7434329 NR Description: protein kinase PK1 (EC 2
  misc_feature (1)..(357): NCBI GI NO: 15220251 NR Description: serine/threonine protein kinase, putative
  misc_feature (1)..(353): NCBI GI NO: 15242858 NR Description: serine/threonine protein kinase, putative
  misc_feature (1)..(353): NCBI GI NO: 21593536 NR Description: serine/threonine-protein kinase
  misc_feature (1)..(357): NCBI GI NO: 34908656 NR Description: putative protein kinase SPK-3
MERYELLKDIGAGNFGVARLMRNKETKELVAMKYIPRGLKIDENVAREIINHRSLRHPNIIRFKEVVVTPTHLAIVMEYAAGGELFDRICNAGRFSEDEARYFFQQLICGVSYCHFMQICHRDLKLENTLLDGSPAPRLKICDFGYSKSSLLHSKPKSTVGTPAYIAPEVLSRREYDGKTADVWSCGVTLYVMLVGGYPFEDPDDPKNFRKTIGRIMSIQYKIPEYVHVSQDCKQLLASIFVANPAKRITMREIRNHPWFLKNLPRELTEAAQAMYYKRDNSAPTYSVQSVEGIMKIVEEAQKPPPSTTPVAGFGWAEEDEQEDGKKPEEEAEEEDEENEYEKQLNEVRASGEFHIS

SEQ ID NO: 11995 - protein, 337 aa, Triticum aestivum
  peptide (1)..(337): Ceres Seq. ID no. 15221903
  misc_feature (1)..(240): Pfam Name: Pfam Description:  Protein kinase domain
  misc_feature (1)..(337): NCBI GI NO: 19568098 NR Description: osmotic stress-activated protein kinase
  misc_feature (1)..(337): NCBI GI NO: 1362051 NR Description: protein kinase SPK-3 (EC 2.7.1.-) - soybean
  misc_feature (1)..(333): NCBI GI NO: 2129803 NR Description: probable serine/threonine-specific protein kinase
  misc_feature (1)..(337): NCBI GI NO: 1161254 NR Description: protein kinase [Glycine max]
  misc_feature (1)..(337): NCBI GI NO: 1362026 NR Description: probable serine/threonine-specific protein kinase
  misc_feature (1)..(333): NCBI GI NO: 7434329 NR Description: protein kinase PK1 (EC 2
  misc_feature (1)..(337): NCBI GI NO: 15220251 NR Description: serine/threonine protein kinase, putative
  misc_feature (1)..(333): NCBI GI NO: 15242858 NR Description: serine/threonine protein kinase, putative
  misc_feature (1)..(333): NCBI GI NO: 21593536 NR Description: serine/threonine-protein kinase
  misc_feature (1)..(337): NCBI GI NO: 34908656 NR Description: putative protein kinase SPK-3
MRNKETKELVAMKYIPRGLKIDENVAREIINHRSLRHPNIIRFKEVVVTPTHLAIVMEYAAGGELFDRICNAGRFSEDEARYFFQQLICGVSYCHFMQICHRDLKLENTLLDGSPAPRLKICDFGYSKSSLLHSKPKSTVGTPAYIAPEVLSRREYDGKTADVWSCGVTLYVMLVGGYPFEDPDDPKNFRKTIGRIMSIQYKIPEYVHVSQDCKQLLASIFVANPAKRITMREIRNHPWFLKNLPRELTEAAQAMYYKRDNSAPTYSVQSVEGIMKIVEEAQKPPPSTTPVAGFGWAEEDEQEDGKKPEEEAEEEDEENEYEKQLNEVRASGEFHIS

SEQ ID NO: 11996 - protein, 326 aa, Triticum aestivum
  peptide (1)..(326): Ceres Seq. ID no. 15221904
  misc_feature (1)..(229): Pfam Name: Pfam Description:  Protein kinase domain
  misc_feature (1)..(326): NCBI GI NO: 19568098 NR Description: osmotic stress-activated protein kinase
  misc_feature (1)..(326): NCBI GI NO: 1362051 NR Description: protein kinase SPK-3 (EC 2.7.1.-) - soybean
  misc_feature (1)..(322): NCBI GI NO: 2129803 NR Description: probable serine/threonine-specific protein kinase
  misc_feature (1)..(326): NCBI GI NO: 1161254 NR Description: protein kinase [Glycine max]
  misc_feature (1)..(326): NCBI GI NO: 1362026 NR Description: probable serine/threonine-specific protein kinase
  misc_feature (1)..(322): NCBI GI NO: 7434329 NR Description: protein kinase PK1 (EC 2
  misc_feature (1)..(326): NCBI GI NO: 15220251 NR Description: serine/threonine protein kinase, putative
  misc_feature (1)..(322): NCBI GI NO: 15242858 NR Description: serine/threonine protein kinase, putative
  misc_feature (1)..(322): NCBI GI NO: 21593536 NR Description: serine/threonine-protein kinase
  misc_feature (1)..(326): NCBI GI NO: 34908656 NR Description: putative protein kinase SPK-3
MKYIPRGLKIDENVAREIINHRSLRHPNIIRFKEVVVTPTHLAIVMEYAAGGELFDRICNAGRFSEDEARYFFQQLICGVSYCHFMQICHRDLKLENTLLDGSPAPRLKICDFGYSKSSLLHSKPKSTVGTPAYIAPEVLSRREYDGKTADVWSCGVTLYVMLVGGYPFEDPDDPKNFRKTIGRIMSIQYKIPEYVHVSQDCKQLLASIFVANPAKRITMREIRNHPWFLKNLPRELTEAAQAMYYKRDNSAPTYSVQSVEGIMKIVEEAQKPPPSTTPVAGFGWAEEDEQEDGKKPEEEAEEEDEENEYEKQLNEVRASGEFHIS

SEQ ID NO: 11997 - DNA, 759 bp, Triticum aestivum
  misc_feature (1)..(759): Ceres Seq. ID no. 12584578
gccagcgctgtacgagccgggcagccacacgcggatccagcgcgggttcggagtcgccctcgcctccgcccgcgaaccagctccgacgcctcaacctcggctcctcgtcgcagctcgccgtcttccacgccaaggtcgacgagatctcgctcctcgccgtcagcaccgccacagtccacaggcgtcagccccacgagcgctatatttttagatgaagcacatattcaagatcatcgcggtactggcggcaatctccgccgtctgggttgcgctccttgaaacctcgacagtccctcgcagttttacttggttgcttcccatctacttggtagtggcgcttggatgctatggcctttttatggttggatatgggctcatgttcttcccaacctgccctcaagaagtggtattactacagcaggatatcatggaggcaaaggatttcctatcaaaaagaggtgttgatgtgagctctgattgaggtcaataccaatgatttatgtttcgtgaccagtttgaagcttcctggatactggatagaaaaaattatgacatttcactgtgtctagatatttgttactaatgcagtctttgtgagtggcgtgttacagttctacattttgttagttcagtggatggtttgtcaggatattagttatgtcaggaaaacagtgtgagaatagctaaatagctaattaatggtttgttaacaagtccatcaatgttcagacatgtttgctatttaacaatctggttttc

SEQ ID NO: 11998 - protein, 92 aa, Triticum aestivum
  peptide (1)..(92): Ceres Seq. ID no. 12584579
ASAVRAGQPHADPARVRSRPRLRPRTSSDASTSAPRRSSPSSTPRSTRSRSSPSAPPQSTGVSPTSAIFLDEAHIQDHRGTGGNLRRLGCAP

SEQ ID NO: 11999 - protein, 89 aa, Triticum aestivum
  peptide (1)..(89): Ceres Seq. ID no. 12584580
  misc_feature (1)..(89): NCBI GI NO: 18402057 NR Description: expressed protein; protein id: At1g48140.1
  misc_feature (1)..(88): NCBI GI NO: 30315013 NR Description: unknown [Vitis vinifera]
  misc_feature (11)..(84): NCBI GI NO: 20138038 NR Description: Dolichol-phosphate mannosyltransferase subunit 3
MKHIFKIIAVLAAISAVWVALLETSTVPRSFTWLLPIYLVVALGCYGLFMVGYGLMFFPTCPQEVVLLQQDIMEAKDFLSKRGVDVSSD

SEQ ID NO: 12000 - protein, 70 aa, Triticum aestivum
  peptide (1)..(70): Ceres Seq. ID no. 12584581
QRCTSRAATRGSSAGSESPSPPPANQLRRLNLGSSSQLAVFHAKVDEISLLAVSTATVHRRQPHERYIFR

SEQ ID NO: 12001 - DNA, 1138 bp, Triticum aestivum
  misc_feature (1)..(1138): Ceres Seq. ID no. 13596017
gtcaataagtttttctccgccattttccccgtcctccgcgagaagcgcctcgaggtccccgtgtgcggctagctagatcggtggcgcctcccctccctcctcccccgcggaaggcgctcgcccccttcattcccggaaccgattctcgcaagggattcctcgctgctcggctcttcttgaggcatgcagagccagatcgtgtgccatgggtgcaggagcgttctactctaccccagaggggcccccagcgtgtgctgcgccgtgtgccacgccgtcaccagcgcgccgcctccaggaatggagatggctcagcttatatgcgtcggctgtcgaactttattgatgtatactcgcaatgcaactactgtcagatgctcatgttgtgatacagtcaaccttgccagaccagcaccgccagtgaatagtatagctcatgtgaactgtggccagtgccagacggtgttaatgtatccatacggagcatcttctgtcaaatgtgctatctgcaattttattacgaacatcggaatgaacaccgtgagacctttgccacctacaatgcatgcaccaaacggaatttcatatagtgtcccatcgacctctgcgccatccgctcaatcgcagaatgtaacggtggtcgtcgaaaacccaatgacagtagatgacaagggaaaattggtgagcaacgtcgtagtcggggttacgtccggcgggaaaaagtagcaaaacatgtcagcgcttgtaccaagtgatgccctgttctgtgtcttataatctggagttgggaacactttgtattatactcgtgtctggtgatcgaccgatcggtcgcatagaagaaaaccccgaagcgcgtaaacggactgcgccaacaaaaaaagagagtgcgggtgtggataatacggaaaaaaactgtattttgcttaccccctagattcttttgtatgtaaaatgtgggcactgtcagacctcactgcgtgatcaaatcctctctgtcctgtcctgtgtcctgtcctggaggggcctctcgttctggatgaataacagcaaataactttgcatatggctggccccacctgtcaatgattggtaattaaacgactgtaattattgtgatgaataattctttgaaggctgt

SEQ ID NO: 12002 - protein, 179 aa, Triticum aestivum
  peptide (1)..(179): Ceres Seq. ID no. 13596018
  misc_feature (1)..(178): NCBI GI NO: 17981378 NR Description: zinc finger protein LSD1 [Brassica oleracea]
  misc_feature (1)..(179): NCBI GI NO: 17981380 NR Description: zinc finger protein LSD2 [Brassica oleracea]
  misc_feature (1)..(178): NCBI GI NO: 30685083 NR Description: zinc-finger protein Lsd1 [Arabidopsis thaliana]
  misc_feature (1)..(178): NCBI GI NO: 30685085 NR Description: zinc-finger protein Lsd1 [Arabidopsis thaliana]
  misc_feature (1)..(119): NCBI GI NO: 30692719 NR Description: zinc-finger protein -related
  misc_feature (1)..(118): NCBI GI NO: 18398482 NR Description: zinc-finger protein -related
  misc_feature (1)..(115): NCBI GI NO: 34905200 NR Description: P0672D01.2
  misc_feature (1)..(114): NCBI GI NO: 29467531 NR Description: P0582D05.23
  misc_feature (1)..(73): NCBI GI NO: 25403154 NR Description: probable zinc-finger protein, 7043-7771
  misc_feature (43)..(175): NCBI GI NO: 29467531 NR Description: P0582D05.23
MQSQIVCHGCRSVLLYPRGAPSVCCAVCHAVTSAPPPGMEMAQLICVGCRTLLMYTRNATTVRCSCCDTVNLARPAPPVNSIAHVNCGQCQTVLMYPYGASSVKCAICNFITNIGMNTVRPLPPTMHAPNGISYSVPSTSAPSAQSQNVTVVVENPMTVDDKGKLVSNVVVGVTSGGKK

SEQ ID NO: 12003 - protein, 141 aa, Triticum aestivum
  peptide (1)..(141): Ceres Seq. ID no. 13596019
  misc_feature (1)..(140): NCBI GI NO: 17981378 NR Description: zinc finger protein LSD1 [Brassica oleracea]
  misc_feature (1)..(141): NCBI GI NO: 17981380 NR Description: zinc finger protein LSD2 [Brassica oleracea]
  misc_feature (1)..(140): NCBI GI NO: 30685083 NR Description: zinc-finger protein Lsd1 [Arabidopsis thaliana]
  misc_feature (1)..(140): NCBI GI NO: 30685085 NR Description: zinc-finger protein Lsd1 [Arabidopsis thaliana]
  misc_feature (1)..(81): NCBI GI NO: 30692719 NR Description: zinc-finger protein -related
  misc_feature (1)..(80): NCBI GI NO: 18398482 NR Description: zinc-finger protein -related
  misc_feature (1)..(77): NCBI GI NO: 34905200 NR Description: P0672D01.2
  misc_feature (1)..(76): NCBI GI NO: 29467531 NR Description: P0582D05.23
  misc_feature (1)..(35): NCBI GI NO: 25403154 NR Description: probable zinc-finger protein, 7043-7771
  misc_feature (5)..(137): NCBI GI NO: 29467531 NR Description: P0582D05.23
MEMAQLICVGCRTLLMYTRNATTVRCSCCDTVNLARPAPPVNSIAHVNCGQCQTVLMYPYGASSVKCAICNFITNIGMNTVRPLPPTMHAPNGISYSVPSTSAPSAQSQNVTVVVENPMTVDDKGKLVSNVVVGVTSGGKK

SEQ ID NO: 12004 - protein, 139 aa, Triticum aestivum
  peptide (1)..(139): Ceres Seq. ID no. 13596020
  misc_feature (1)..(138): NCBI GI NO: 17981378 NR Description: zinc finger protein LSD1 [Brassica oleracea]
  misc_feature (1)..(139): NCBI GI NO: 17981380 NR Description: zinc finger protein LSD2 [Brassica oleracea]
  misc_feature (1)..(138): NCBI GI NO: 30685083 NR Description: zinc-finger protein Lsd1 [Arabidopsis thaliana]
  misc_feature (1)..(138): NCBI GI NO: 30685085 NR Description: zinc-finger protein Lsd1 [Arabidopsis thaliana]
  misc_feature (1)..(79): NCBI GI NO: 30692719 NR Description: zinc-finger protein -related
  misc_feature (1)..(78): NCBI GI NO: 18398482 NR Description: zinc-finger protein -related
  misc_feature (1)..(75): NCBI GI NO: 34905200 NR Description: P0672D01.2
  misc_feature (1)..(74): NCBI GI NO: 29467531 NR Description: P0582D05.23
  misc_feature (1)..(33): NCBI GI NO: 25403154 NR Description: probable zinc-finger protein, 7043-7771
  misc_feature (3)..(135): NCBI GI NO: 29467531 NR Description: P0582D05.23
MAQLICVGCRTLLMYTRNATTVRCSCCDTVNLARPAPPVNSIAHVNCGQCQTVLMYPYGASSVKCAICNFITNIGMNTVRPLPPTMHAPNGISYSVPSTSAPSAQSQNVTVVVENPMTVDDKGKLVSNVVVGVTSGGKK

SEQ ID NO: 12005 - DNA, 1906 bp, Triticum aestivum
  misc_feature (1)..(1906): Ceres Seq. ID no. 15179739
ccccgccgcctcgtccacctgtcgccggcgcgccgccactgccaccgccagcgagattgcgacctgagaggtcccgcgtcgtcgtgctgttcccggctctaccttcgccgcggccaccatgatctgtgcaatctccggcgaggtgccggatgagccggtggtatcaaagaggtcggggctcctctttgagcggcggctcatcgagcgctacattgaggaccatggaaagtgtccagttacgaaggaggaactctccatggacgacatcgtgctggtgaagaccaacaaggtcgtgaggcccaggcctctgcaggctgcaagcattcccggactccttggaatctttcaaaacgagtgggatgctcttatgctttctaattttgctttggagcagcagcttcacacagcaagacaagaacttagtcatgcgttataccagcatgatgctgcctgccgtgttatagccagattaaagaaggaaagagatgagtctagagcacttttggctctagctgagagacagattcccgcttcgatggcaggagttgcacctgcagctgttgtttccaatggaaaaagagcaatggaggatgaaattggccctgatgggaagaagatacgccctggtatcaatcctgtcatgatcgatgaactaacagagtgtaataccatgctttctgcccagcgtaagaaacgacaggtaccaccaagtttggcatcaattgatgaactggagagatatactcagatctctagtcatccactccacaagacaaacaagccgggcattttgtctatggatatccatccgtcaaaggacatagttgcaactgggggtattgatacgaatgcagtgctatttgataggacatctggtcaaatcctgtgtacacttgctggtcactccaagaagataaccactttgaaatttgttccacgggatgagctcgtggtaactggatcagcagataagactgttcggatttggcaagggggtgaggagggaaactatagttgcatccatactttgaaagatcataccgctgaggtcgaagctgttactgtgcatgcgactcagaagtactttgtgaccgcggccaaggataatacttggtgcttctatgatatttcaactgggtcttgcctctcacaggttggcgaggcttcaggacaagagggatatacatctgcgtctttccacccagatggtcttatccttggaacaggaactactgaagctgttgtcaaaatttgggatgtgaaaactcagtccaatgttgcaaagtttgaggggcatgctggacctgtcactgctatgtccttctctgaaaatggttacttcctggcgactgctgctcttgatggtgtcaagctttgggatctaaggaaattgagaaattttaggactttctcgccatatgattcggatacgccgacaaattctgtggaatttgattttagcggtacctatcttgctgttgctggttcagatataagggtttaccaagtagccaacgtcaagacggaatggaatcttatcaagaccttgccagatttgtcaggaacagggaaagtgacctctgcgaagtttggcactgatgccaaatatatcgccgtcggctctatggaccgtaacctgaggatatttgggcctcctggagatgatcaaatggatgatgatgcaaaaccatcggccgagtgaggaaatgcagtgtacctggttttacttgtttgatgctccctgtgctctcttttggcagtgaatggatgggttgcgtatgaggaaaagcagggtcctcagggagcaatggcgtgggcgtccgccgatgtaaagacattattgtattgtaggcttcactaattttctaatgaggatataatttgttttgaagaggaatacaatccc

SEQ ID NO: 12006 - protein, 527 aa, Triticum aestivum
  peptide (1)..(527): Ceres Seq. ID no. 15179740
  misc_feature (299)..(336): Pfam Name: Pfam Description:  WD domain, G-beta repeat
  misc_feature (1)..(527): NCBI GI NO: 37535206 NR Description: putative WD-repeat containing protein
  misc_feature (1)..(525): NCBI GI NO: 18390401 NR Description: transducin / WD-40 repeat protein family
  misc_feature (1)..(506): NCBI GI NO: 30685651 NR Description: transducin / WD-40 repeat protein family
  misc_feature (1)..(506): NCBI GI NO: 30685653 NR Description: transducin / WD-40 repeat protein family
  misc_feature (1)..(285): NCBI GI NO: 25408261 NR Description: probable PRP19-like spliceosomal protein
  misc_feature (310)..(506): NCBI GI NO: 25408261 NR Description: probable PRP19-like spliceosomal protein
  misc_feature (107)..(285): NCBI GI NO: 25406791 NR Description: hypothetical protein
  misc_feature (336)..(446): NCBI GI NO: 25406791 NR Description: hypothetical protein
  misc_feature (461)..(525): NCBI GI NO: 25406791 NR Description: hypothetical protein
  misc_feature (1)..(32): NCBI GI NO: 25406791 NR Description: hypothetical protein
MICAISGEVPDEPVVSKRSGLLFERRLIERYIEDHGKCPVTKEELSMDDIVLVKTNKVVRPRPLQAASIPGLLGIFQNEWDALMLSNFALEQQLHTARQELSHALYQHDAACRVIARLKKERDESRALLALAERQIPASMAGVAPAAVVSNGKRAMEDEIGPDGKKIRPGINPVMIDELTECNTMLSAQRKKRQVPPSLASIDELERYTQISSHPLHKTNKPGILSMDIHPSKDIVATGGIDTNAVLFDRTSGQILCTLAGHSKKITTLKFVPRDELVVTGSADKTVRIWQGGEEGNYSCIHTLKDHTAEVEAVTVHATQKYFVTAAKDNTWCFYDISTGSCLSQVGEASGQEGYTSASFHPDGLILGTGTTEAVVKIWDVKTQSNVAKFEGHAGPVTAMSFSENGYFLATAALDGVKLWDLRKLRNFRTFSPYDSDTPTNSVEFDFSGTYLAVAGSDIRVYQVANVKTEWNLIKTLPDLSGTGKVTSAKFGTDAKYIAVGSMDRNLRIFGPPGDDQMDDDAKPSAE

SEQ ID NO: 12007 - protein, 481 aa, Triticum aestivum
  peptide (1)..(481): Ceres Seq. ID no. 15179741
  misc_feature (253)..(290): Pfam Name: Pfam Description:  WD domain, G-beta repeat
  misc_feature (1)..(481): NCBI GI NO: 37535206 NR Description: putative WD-repeat containing protein
  misc_feature (1)..(479): NCBI GI NO: 18390401 NR Description: transducin / WD-40 repeat protein family
  misc_feature (1)..(460): NCBI GI NO: 30685651 NR Description: transducin / WD-40 repeat protein family
  misc_feature (1)..(460): NCBI GI NO: 30685653 NR Description: transducin / WD-40 repeat protein family
  misc_feature (1)..(239): NCBI GI NO: 25408261 NR Description: probable PRP19-like spliceosomal protein
  misc_feature (264)..(460): NCBI GI NO: 25408261 NR Description: probable PRP19-like spliceosomal protein
  misc_feature (61)..(239): NCBI GI NO: 25406791 NR Description: hypothetical protein
  misc_feature (290)..(400): NCBI GI NO: 25406791 NR Description: hypothetical protein
  misc_feature (415)..(479): NCBI GI NO: 25406791 NR Description: hypothetical protein
  misc_feature (1)..(464): NCBI GI NO: 28278498 NR Description: Similar to nuclear matrix protein NMP200 related tosplicing factor PRP19
MDDIVLVKTNKVVRPRPLQAASIPGLLGIFQNEWDALMLSNFALEQQLHTARQELSHALYQHDAACRVIARLKKERDESRALLALAERQIPASMAGVAPAAVVSNGKRAMEDEIGPDGKKIRPGINPVMIDELTECNTMLSAQRKKRQVPPSLASIDELERYTQISSHPLHKTNKPGILSMDIHPSKDIVATGGIDTNAVLFDRTSGQILCTLAGHSKKITTLKFVPRDELVVTGSADKTVRIWQGGEEGNYSCIHTLKDHTAEVEAVTVHATQKYFVTAAKDNTWCFYDISTGSCLSQVGEASGQEGYTSASFHPDGLILGTGTTEAVVKIWDVKTQSNVAKFEGHAGPVTAMSFSENGYFLATAALDGVKLWDLRKLRNFRTFSPYDSDTPTNSVEFDFSGTYLAVAGSDIRVYQVANVKTEWNLIKTLPDLSGTGKVTSAKFGTDAKYIAVGSMDRNLRIFGPPGDDQMDDDAKPSAE

SEQ ID NO: 12008 - protein, 444 aa, Triticum aestivum
  peptide (1)..(444): Ceres Seq. ID no. 15179742
  misc_feature (216)..(253): Pfam Name: Pfam Description:  WD domain, G-beta repeat
  misc_feature (1)..(444): NCBI GI NO: 37535206 NR Description: putative WD-repeat containing protein
  misc_feature (1)..(442): NCBI GI NO: 18390401 NR Description: transducin / WD-40 repeat protein family
  misc_feature (1)..(423): NCBI GI NO: 30685651 NR Description: transducin / WD-40 repeat protein family
  misc_feature (1)..(423): NCBI GI NO: 30685653 NR Description: transducin / WD-40 repeat protein family
  misc_feature (1)..(202): NCBI GI NO: 25408261 NR Description: probable PRP19-like spliceosomal protein
  misc_feature (227)..(423): NCBI GI NO: 25408261 NR Description: probable PRP19-like spliceosomal protein
  misc_feature (24)..(202): NCBI GI NO: 25406791 NR Description: hypothetical protein
  misc_feature (253)..(363): NCBI GI NO: 25406791 NR Description: hypothetical protein
  misc_feature (378)..(442): NCBI GI NO: 25406791 NR Description: hypothetical protein
  misc_feature (1)..(427): NCBI GI NO: 28278498 NR Description: Similar to nuclear matrix protein NMP200 related tosplicing factor PRP19
MLSNFALEQQLHTARQELSHALYQHDAACRVIARLKKERDESRALLALAERQIPASMAGVAPAAVVSNGKRAMEDEIGPDGKKIRPGINPVMIDELTECNTMLSAQRKKRQVPPSLASIDELERYTQISSHPLHKTNKPGILSMDIHPSKDIVATGGIDTNAVLFDRTSGQILCTLAGHSKKITTLKFVPRDELVVTGSADKTVRIWQGGEEGNYSCIHTLKDHTAEVEAVTVHATQKYFVTAAKDNTWCFYDISTGSCLSQVGEASGQEGYTSASFHPDGLILGTGTTEAVVKIWDVKTQSNVAKFEGHAGPVTAMSFSENGYFLATAALDGVKLWDLRKLRNFRTFSPYDSDTPTNSVEFDFSGTYLAVAGSDIRVYQVANVKTEWNLIKTLPDLSGTGKVTSAKFGTDAKYIAVGSMDRNLRIFGPPGDDQMDDDAKPSAE

SEQ ID NO: 12009 - DNA, 1798 bp, Triticum aestivum
  misc_feature (1)..(1798): Ceres Seq. ID no. 13596021
cacacaaacccgcaaaaacaatccatcccccaaaaccccaccgccccgcggcggcggcggcggcgtcgcgatggacccttcctcggccggcgctggcggcaactcgctgccgtcggtcggccccgacgggcagaagcggcgcgtgtgctacttctacgactcggaggtgggcaactactactacgggcagggccacccgatgaagccgcaccgcatccgcatgacccactcgctgctggcgcagtacggcctcctcgaccagatgcaggtgctgcgccccaaccccgcccgcgaccgcgacctctgccgcttccacgccgacgactacatctccttcctccgctccgtcacgcccgagacgcagcaggaccagatccgggccctcaagcgcttcaacgtcggcgaggactgccccgtcttcgacggcctctacagcttctgccagacctacgcgggggcctccgtcggcggcgccgtcaagctcaaccacggccttgacatcgccatcaactggtcggggggcctgcaccacgcgaagaagtgcgaggcctcagggttctgctacgtcaacgacatcgtactcgccatactcgagctcctcaagcaccaccagcgagttctctatgtcgatattgatatccaccatggtgacggagttgaggaggcattctacacgacagacagggttatgacagtctcattccacaagtttggggattatttcccaggtacaggggatgtccgtgatattgggcattcaaaaggaaagtattactcccttaatgtccctctggatgatgggattgacgacgaaagctaccagtccctgtttaagcctataatggccaaagttatggaggttttccagcctggtgcagttgtttttcaatgtggcgccgattcgttatctggggataggttgggttgcttcaatctttcgatcagaggtcatgcagaatgcgtgaagtacatgaggtctttcaatgttccattgttgcttcttggcggtggtggctataccataagaaatgtcgcacgatgttggtgttatgagacaggagttgcacttggccaagagctcgaggataagatgcctgtcaatgagtactatgaatacttcggtccagattacactcttcatgtggcaccaagtaacatggagaacaaaaatacacgctacgaactggataatataagaaccaaacttcttgacaatctttcaaaacttcgacatgcccctagcgttcagtttcaagagcgacctcctgatactgagttccctgagccgggtgaagatgaagacgatcaggatgaaaggcatgatgaccctgattctgatatggaaatggattatcacacacctttggaagactcagcaaggagaatcactattcaaggtacaagagttaagagagaatcagctggagctgagacaaaagatcagcaggatggtagcagagtaacaggtgaacatagaggaccagaacctatggcagaagacatgggtccctccaagcaagctcatgtcgacgctaatgccatgaccgtggatgagcccggaattgtcaagaccgaatcaggaagctctaccaagttgcctgacccaccagccatctaccagaagccatgattgtaagcattcggaccgtgcggcttcttgcatgtgtttttgacagtaaaaagacgaagtgacgagtggtagctcgagtgtctgacccatgtatacatgtagcatggattattaagctgtaatatgtatagtcgattaaatgagccgcgaggcagaattttcttggcc

SEQ ID NO: 12010 - protein, 542 aa, Triticum aestivum
  peptide (1)..(542): Ceres Seq. ID no. 13596022
  misc_feature (24)..(542): NCBI GI NO: 14550104 NR Description: histone deacetylase HDA101 [Zea mays]
  misc_feature (24)..(542): NCBI GI NO: 3023947 NR Description: Probable histone deacetylase (RPD3 homolog)
  misc_feature (24)..(509): NCBI GI NO: 12698880 NR Description: histone deacetylase HD1 [Oryza sativa]
  misc_feature (32)..(529): NCBI GI NO: 15233694 NR Description: Histone deacetylase [Arabidopsis thaliana]
  misc_feature (32)..(529): NCBI GI NO: 2318131 NR Description: histone deacetylase [Arabidopsis thaliana]
  misc_feature (32)..(534): NCBI GI NO: 9022439 NR Description: histone deacetylase
  misc_feature (43)..(506): NCBI GI NO: 13128860 NR Description: histone deacetylase 1
  misc_feature (43)..(506): NCBI GI NO: 30583783 NR Description: Homo sapiens histone deacetylase 1
  misc_feature (43)..(503): NCBI GI NO: 19526271 NR Description: histone deacetylase [Takifugu rubripes]
  misc_feature (43)..(506): NCBI GI NO: 6680193 NR Description: histone deacetylase 1 [Mus musculus]
TQTRKNNPSPKTPPPRGGGGGVAMDPSSAGAGGNSLPSVGPDGQKRRVCYFYDSEVGNYYYGQGHPMKPHRIRMTHSLLAQYGLLDQMQVLRPNPARDRDLCRFHADDYISFLRSVTPETQQDQIRALKRFNVGEDCPVFDGLYSFCQTYAGASVGGAVKLNHGLDIAINWSGGLHHAKKCEASGFCYVNDIVLAILELLKHHQRVLYVDIDIHHGDGVEEAFYTTDRVMTVSFHKFGDYFPGTGDVRDIGHSKGKYYSLNVPLDDGIDDESYQSLFKPIMAKVMEVFQPGAVVFQCGADSLSGDRLGCFNLSIRGHAECVKYMRSFNVPLLLLGGGGYTIRNVARCWCYETGVALGQELEDKMPVNEYYEYFGPDYTLHVAPSNMENKNTRYELDNIRTKLLDNLSKLRHAPSVQFQERPPDTEFPEPGEDEDDQDERHDDPDSDMEMDYHTPLEDSARRITIQGTRVKRESAGAETKDQQDGSRVTGEHRGPEPMAEDMGPSKQAHVDANAMTVDEPGIVKTESGSSTKLPDPPAIYQKP

SEQ ID NO: 12011 - protein, 519 aa, Triticum aestivum
  peptide (1)..(519): Ceres Seq. ID no. 13596023
  misc_feature (1)..(519): NCBI GI NO: 14550104 NR Description: histone deacetylase HDA101 [Zea mays]
  misc_feature (1)..(519): NCBI GI NO: 3023947 NR Description: Probable histone deacetylase (RPD3 homolog)
  misc_feature (1)..(486): NCBI GI NO: 12698880 NR Description: histone deacetylase HD1 [Oryza sativa]
  misc_feature (9)..(506): NCBI GI NO: 15233694 NR Description: Histone deacetylase [Arabidopsis thaliana]
  misc_feature (9)..(506): NCBI GI NO: 2318131 NR Description: histone deacetylase [Arabidopsis thaliana]
  misc_feature (9)..(511): NCBI GI NO: 9022439 NR Description: histone deacetylase
  misc_feature (20)..(483): NCBI GI NO: 13128860 NR Description: histone deacetylase 1
  misc_feature (20)..(483): NCBI GI NO: 30583783 NR Description: Homo sapiens histone deacetylase 1
  misc_feature (20)..(480): NCBI GI NO: 19526271 NR Description: histone deacetylase [Takifugu rubripes]
  misc_feature (20)..(483): NCBI GI NO: 6680193 NR Description: histone deacetylase 1 [Mus musculus]
MDPSSAGAGGNSLPSVGPDGQKRRVCYFYDSEVGNYYYGQGHPMKPHRIRMTHSLLAQYGLLDQMQVLRPNPARDRDLCRFHADDYISFLRSVTPETQQDQIRALKRFNVGEDCPVFDGLYSFCQTYAGASVGGAVKLNHGLDIAINWSGGLHHAKKCEASGFCYVNDIVLAILELLKHHQRVLYVDIDIHHGDGVEEAFYTTDRVMTVSFHKFGDYFPGTGDVRDIGHSKGKYYSLNVPLDDGIDDESYQSLFKPIMAKVMEVFQPGAVVFQCGADSLSGDRLGCFNLSIRGHAECVKYMRSFNVPLLLLGGGGYTIRNVARCWCYETGVALGQELEDKMPVNEYYEYFGPDYTLHVAPSNMENKNTRYELDNIRTKLLDNLSKLRHAPSVQFQERPPDTEFPEPGEDEDDQDERHDDPDSDMEMDYHTPLEDSARRITIQGTRVKRESAGAETKDQQDGSRVTGEHRGPEPMAEDMGPSKQAHVDANAMTVDEPGIVKTESGSSTKLPDPPAIYQKP

SEQ ID NO: 12012 - protein, 476 aa, Triticum aestivum
  peptide (1)..(476): Ceres Seq. ID no. 13596024
  misc_feature (1)..(476): NCBI GI NO: 14550104 NR Description: histone deacetylase HDA101 [Zea mays]
  misc_feature (1)..(476): NCBI GI NO: 3023947 NR Description: Probable histone deacetylase (RPD3 homolog)
  misc_feature (1)..(443): NCBI GI NO: 12698880 NR Description: histone deacetylase HD1 [Oryza sativa]
  misc_feature (1)..(463): NCBI GI NO: 15233694 NR Description: Histone deacetylase [Arabidopsis thaliana]
  misc_feature (1)..(463): NCBI GI NO: 2318131 NR Description: histone deacetylase [Arabidopsis thaliana]
  misc_feature (1)..(468): NCBI GI NO: 9022439 NR Description: histone deacetylase
  misc_feature (1)..(440): NCBI GI NO: 13128860 NR Description: histone deacetylase 1
  misc_feature (1)..(440): NCBI GI NO: 30583783 NR Description: Homo sapiens histone deacetylase 1
  misc_feature (1)..(437): NCBI GI NO: 19526271 NR Description: histone deacetylase [Takifugu rubripes]
  misc_feature (1)..(440): NCBI GI NO: 6680193 NR Description: histone deacetylase 1 [Mus musculus]
MKPHRIRMTHSLLAQYGLLDQMQVLRPNPARDRDLCRFHADDYISFLRSVTPETQQDQIRALKRFNVGEDCPVFDGLYSFCQTYAGASVGGAVKLNHGLDIAINWSGGLHHAKKCEASGFCYVNDIVLAILELLKHHQRVLYVDIDIHHGDGVEEAFYTTDRVMTVSFHKFGDYFPGTGDVRDIGHSKGKYYSLNVPLDDGIDDESYQSLFKPIMAKVMEVFQPGAVVFQCGADSLSGDRLGCFNLSIRGHAECVKYMRSFNVPLLLLGGGGYTIRNVARCWCYETGVALGQELEDKMPVNEYYEYFGPDYTLHVAPSNMENKNTRYELDNIRTKLLDNLSKLRHAPSVQFQERPPDTEFPEPGEDEDDQDERHDDPDSDMEMDYHTPLEDSARRITIQGTRVKRESAGAETKDQQDGSRVTGEHRGPEPMAEDMGPSKQAHVDANAMTVDEPGIVKTESGSSTKLPDPPAIYQKP

SEQ ID NO: 12013 - DNA, 1584 bp, Triticum aestivum
  misc_feature (1)..(1584): Ceres Seq. ID no. 13596025
ttwcctaraacatyctaattgaaaaaagtgacaaggaaatcaagaacagctcaagaccatggaggcaccgagaaatcacggcgcgccatgcctgctccttctgctggcactagctgcccaatggtgcagtgtctcgacggcgagctgcagcttcacgatatccaactactgcactcacaccatctggccggggacgatggccggcgcgggcacgccgcagctgcccacgacggggttcaggctagaccccgggcagaccgtgcggatcccggcgccggccggttggtccggccggatatgggcgcgcacggggtgcaacttcagcaccgacggctcaggcgcggccgccggcgcggtcgcgtgccagaccggcgactgcggtggtggacacatggagtgcggcggcacgggcgggaagccgccagcgacgctcttcgagatcacgctggggaagggcggccccgccgaccaggacttctatgacgtgagcctcgtcgacgggtacaacctgcccgtcgtcgccgtcccgcgggcgcggcagggcagctgcaatgccaccggctgcgccgccgacctcaacctctcatgtcccaaggagctgcaggtggccggcggcaatggtggcggcccggtggcatgccagagcgcgtgcgaggcgttcacgcaggacaagtactgctgcagtggcgcctacgcgacgccagacacctgcagcccgacggcctactcgtccgtcttcaagtcggcgtgcccgcgggcctacagctacgcctacgacgacggcagcagcctcttcacctgcaacgccgtcgactacaccatcgcgttctgcctccctccagccgggttgaacatgcctgctgatgctaacggtgctcctcctgctgacaacaatggtggtggaagcgcatacgtgccgcccccgacaggcaacagcggggctgggagcgtctaccagccaccccctgcaggtaacaatggtgccggaagtgcctaccagccgcctccaacaggcaacaatggcgtcggaagtgcctaccagacacctccgactggcaccaatggcattggaagcacctacgagacacccttggctagcagcaatggcgtcggaagtgccttccagccgcccctgacgggcgacgacaatggcgtgagaagcgcctaccagccggggatgaccccgtcgtcggcgagcacgcgatacggtcagctatggtttctgctacctgcagcgctcgtgttctttaaatgatcaatctccatgaaaggccagccagtgtttcatgtcgagccggccttcgagcttccgaatacatgagggattggatgatcttaggcgcggaagaaagaagaggctcgaagcagagtacatccaagcatagatcttgtaggagtttctgacagattcacagtagtcgcaacttaaaaccctcctgtattcagtaactagatagtactggtggtgcagattgggggagatgtaaatattggcttctttcatgtagaccaacaatgaaatctactccagtagtacaaattgtatactcattaattccattattaataaggaatggtatactc

SEQ ID NO: 12014 - protein, 398 aa, Triticum aestivum
  peptide (1)..(398): Ceres Seq. ID no. 15221740
  misc_feature (36)..(258): Pfam Name: Pfam Description:  Thaumatin family
  misc_feature (1)..(315): NCBI GI NO: 34905146 NR Description: putative pathogenesis-related protein
  misc_feature (24)..(258): NCBI GI NO: 15238593 NR Description: thaumatin-like protein, putative
  misc_feature (4)..(379): NCBI GI NO: 37531036 NR Description: putative thaumatin-like protein
  misc_feature (24)..(324): NCBI GI NO: 21592749 NR Description: putative thaumatin-like protein
  misc_feature (24)..(324): NCBI GI NO: 18420282 NR Description: thaumatin-like protein, putative
  misc_feature (31)..(324): NCBI GI NO: 7442168 NR Description: pathogenesis-related protein F20M13
  misc_feature (13)..(261): NCBI GI NO: 30692042 NR Description: thaumatin family [Arabidopsis thaliana]
  misc_feature (13)..(262): NCBI GI NO: 37531042 NR Description: putative thaumatin-like protein
  misc_feature (12)..(275): NCBI GI NO: 15233437 NR Description: thaumatin family [Arabidopsis thaliana]
  misc_feature (31)..(261): NCBI GI NO: 7442169 NR Description: pathogenesis-related protein F20M13
MEAPRNHGAPCLLLLLALAAQWCSVSTASCSFTISNYCTHTIWPGTMAGAGTPQLPTTGFRLDPGQTVRIPAPAGWSGRIWARTGCNFSTDGSGAAAGAVACQTGDCGGGHMECGGTGGKPPATLFEITLGKGGPADQDFYDVSLVDGYNLPVVAVPRARQGSCNATGCAADLNLSCPKELQVAGGNGGGPVACQSACEAFTQDKYCCSGAYATPDTCSPTAYSSVFKSACPRAYSYAYDDGSSLFTCNAVDYTIAFCLPPAGLNMPADANGAPPADNNGGGSAYVPPPTGNSGAGSVYQPPPAGNNGAGSAYQPPPTGNNGVGSAYQTPPTGTNGIGSTYETPLASSNGVGSAFQPPLTGDDNGVRSAYQPGMTPSSASTRYGQLWFLLPAALVFFK

SEQ ID NO: 12015 - protein, 352 aa, Triticum aestivum
  peptide (1)..(352): Ceres Seq. ID no. 15221741
  misc_feature (1)..(212): Pfam Name: Pfam Description:  Thaumatin family
  misc_feature (1)..(269): NCBI GI NO: 34905146 NR Description: putative pathogenesis-related protein
  misc_feature (1)..(212): NCBI GI NO: 15238593 NR Description: thaumatin-like protein, putative
  misc_feature (1)..(333): NCBI GI NO: 37531036 NR Description: putative thaumatin-like protein
  misc_feature (1)..(278): NCBI GI NO: 21592749 NR Description: putative thaumatin-like protein
  misc_feature (1)..(278): NCBI GI NO: 18420282 NR Description: thaumatin-like protein, putative
  misc_feature (1)..(278): NCBI GI NO: 7442168 NR Description: pathogenesis-related protein F20M13
  misc_feature (1)..(215): NCBI GI NO: 30692042 NR Description: thaumatin family [Arabidopsis thaliana]
  misc_feature (1)..(216): NCBI GI NO: 37531042 NR Description: putative thaumatin-like protein
  misc_feature (1)..(229): NCBI GI NO: 15233437 NR Description: thaumatin family [Arabidopsis thaliana]
  misc_feature (1)..(215): NCBI GI NO: 7442169 NR Description: pathogenesis-related protein F20M13
MAGAGTPQLPTTGFRLDPGQTVRIPAPAGWSGRIWARTGCNFSTDGSGAAAGAVACQTGDCGGGHMECGGTGGKPPATLFEITLGKGGPADQDFYDVSLVDGYNLPVVAVPRARQGSCNATGCAADLNLSCPKELQVAGGNGGGPVACQSACEAFTQDKYCCSGAYATPDTCSPTAYSSVFKSACPRAYSYAYDDGSSLFTCNAVDYTIAFCLPPAGLNMPADANGAPPADNNGGGSAYVPPPTGNSGAGSVYQPPPAGNNGAGSAYQPPPTGNNGVGSAYQTPPTGTNGIGSTYETPLASSNGVGSAFQPPLTGDDNGVRSAYQPGMTPSSASTRYGQLWFLLPAALVFFK

SEQ ID NO: 12016 - protein, 287 aa, Triticum aestivum
  peptide (1)..(287): Ceres Seq. ID no. 15221742
  misc_feature (1)..(147): Pfam Name: Pfam Description:  Thaumatin family
  misc_feature (1)..(204): NCBI GI NO: 34905146 NR Description: putative pathogenesis-related protein
  misc_feature (1)..(147): NCBI GI NO: 15238593 NR Description: thaumatin-like protein, putative
  misc_feature (1)..(268): NCBI GI NO: 37531036 NR Description: putative thaumatin-like protein
  misc_feature (1)..(213): NCBI GI NO: 21592749 NR Description: putative thaumatin-like protein
  misc_feature (1)..(213): NCBI GI NO: 18420282 NR Description: thaumatin-like protein, putative
  misc_feature (1)..(213): NCBI GI NO: 7442168 NR Description: pathogenesis-related protein F20M13
  misc_feature (1)..(150): NCBI GI NO: 30692042 NR Description: thaumatin family [Arabidopsis thaliana]
  misc_feature (1)..(151): NCBI GI NO: 37531042 NR Description: putative thaumatin-like protein
  misc_feature (1)..(164): NCBI GI NO: 15233437 NR Description: thaumatin family [Arabidopsis thaliana]
  misc_feature (1)..(150): NCBI GI NO: 7442169 NR Description: pathogenesis-related protein F20M13
MECGGTGGKPPATLFEITLGKGGPADQDFYDVSLVDGYNLPVVAVPRARQGSCNATGCAADLNLSCPKELQVAGGNGGGPVACQSACEAFTQDKYCCSGAYATPDTCSPTAYSSVFKSACPRAYSYAYDDGSSLFTCNAVDYTIAFCLPPAGLNMPADANGAPPADNNGGGSAYVPPPTGNSGAGSVYQPPPAGNNGAGSAYQPPPTGNNGVGSAYQTPPTGTNGIGSTYETPLASSNGVGSAFQPPLTGDDNGVRSAYQPGMTPSSASTRYGQLWFLLPAALVFFK

SEQ ID NO: 12017 - DNA, 1338 bp, Triticum aestivum
  misc_feature (1)..(1338): Ceres Seq. ID no. 13596408
ttacctagaacatcctaatcgaaaaaatttactcccaaaccaagccaaacgaaccagcgccgcagcccgcagcgcacccatcccaccaaacaaacagctagcaggcgaggcgacccgctccgacctcgagccgatgccgacgccgtacagcgcggcggcgctgcagcagcaccagcgtctggtctcctcctccggcggcctggcggcgacgggggcccacaggtgcggcgagcacgacgggacggtgccgccggaggtggcgcggcaccacgagcacgcggcgccgggggggcgctgctgctgctcggcggtggtgcagcgcgtggcggcgccggcggcggacgtgtgggccgtggtccggcgcttcgaccagccgcaggcgtacaagagcttcgtgcgcagctgcgcgctgctggacggcgacggcggcgtgggcacgctgcgcgaggtgcgcgtggtgtcgggcctccccgcggcgtccagccgggagcggctggagatcctggacgacgagcggcacgtgctgagcttcagcgtggtgggcggcgagcaccggctccgcaactaccggtcggtgaccacggtgcacccggcgccgggggagagcgcgtcggcgacgctggtggtggagtcgtacgtggtggacgtgccccccgggaacacccccgaggacacccgcgtcttcgtggacaccatcgtcaagtgcaacctccagtccctcgcccgcaccgccgagaagctcgccggccggggggcggcctacggcgcgctgccgtgatcgatcgatccgaccggaacccgcagtcgccggcccgcgcctccctccggtggtcaactcgagcccggccctcccggctcggccgcaggggcgtttcggtaaaatcgcgcaccgattttccgattaatgaatccaaatccatggtggtggtggtgcgcgggtggtggcgaccgattatttttctcttgttctttctggcgtgaaggcgaggggtcggtgggtcggttcggaccggtcggtgcgctttcgcggctggcccctcgctgtttctccttatcgcgagacacacccccctgtagtagtggtagctctagtttttgttcgttcccctttgtttgatctcgggtaagatgatgataagatttgacaggaattgaggagtaaaaactagcttcgaccgatgcaaggctcatcgacatctctgtatatatacttttagtttcccgttccattgtgtgtgttgtcatcatcaccattttggtcgtgacatttcatcaatcaaatttacaagatgttcaacgaggcacaacggaccagagccgtcacggtcttgttggacc

SEQ ID NO: 12018 - protein, 258 aa, Triticum aestivum
  peptide (1)..(258): Ceres Seq. ID no. 13596409
  misc_feature (100)..(242): Pfam Name: Pfam Description:  Pathogenesis-related protein Bet v I family
  misc_feature (48)..(248): NCBI GI NO: 34907924 NR Description: B1088C09.9
  misc_feature (87)..(248): NCBI GI NO: 18404709 NR Description: expressed protein [Arabidopsis thaliana]
  misc_feature (82)..(246): NCBI GI NO: 15239114 NR Description: expressed protein [Arabidopsis thaliana]
  misc_feature (82)..(245): NCBI GI NO: 18405351 NR Description: Bet v I allergen family [Arabidopsis thaliana]
  misc_feature (82)..(245): NCBI GI NO: 25348262 NR Description: hypothetical protein At2g40330
  misc_feature (77)..(244): NCBI GI NO: 15225245 NR Description: Bet v I allergen family [Arabidopsis thaliana]
  misc_feature (86)..(250): NCBI GI NO: 18378830 NR Description: expressed protein [Arabidopsis thaliana]
  misc_feature (86)..(250): NCBI GI NO: 21593547 NR Description: unknown [Arabidopsis thaliana]
  misc_feature (86)..(250): NCBI GI NO: 25348264 NR Description: hypothetical protein F6F3
  misc_feature (54)..(258): NCBI GI NO: 37537066 NR Description: unknown protein
YLEHPNRKNLLPNQAKRTSAAARSAPIPPNKQLAGEATRSDLEPMPTPYSAAALQQHQRLVSSSGGLAATGAHRCGEHDGTVPPEVARHHEHAAPGGRCCCSAVVQRVAAPAADVWAVVRRFDQPQAYKSFVRSCALLDGDGGVGTLREVRVVSGLPAASSRERLEILDDERHVLSFSVVGGEHRLRNYRSVTTVHPAPGESASATLVVESYVVDVPPGNTPEDTRVFVDTIVKCNLQSLARTAEKLAGRGAAYGALP

SEQ ID NO: 12019 - protein, 214 aa, Triticum aestivum
  peptide (1)..(214): Ceres Seq. ID no. 13596410
  misc_feature (56)..(198): Pfam Name: Pfam Description:  Pathogenesis-related protein Bet v I family
  misc_feature (4)..(204): NCBI GI NO: 34907924 NR Description: B1088C09.9
  misc_feature (43)..(204): NCBI GI NO: 18404709 NR Description: expressed protein [Arabidopsis thaliana]
  misc_feature (38)..(202): NCBI GI NO: 15239114 NR Description: expressed protein [Arabidopsis thaliana]
  misc_feature (38)..(201): NCBI GI NO: 18405351 NR Description: Bet v I allergen family [Arabidopsis thaliana]
  misc_feature (38)..(201): NCBI GI NO: 25348262 NR Description: hypothetical protein At2g40330
  misc_feature (33)..(200): NCBI GI NO: 15225245 NR Description: Bet v I allergen family [Arabidopsis thaliana]
  misc_feature (42)..(206): NCBI GI NO: 18378830 NR Description: expressed protein [Arabidopsis thaliana]
  misc_feature (42)..(206): NCBI GI NO: 21593547 NR Description: unknown [Arabidopsis thaliana]
  misc_feature (42)..(206): NCBI GI NO: 25348264 NR Description: hypothetical protein F6F3
  misc_feature (10)..(214): NCBI GI NO: 37537066 NR Description: unknown protein
MPTPYSAAALQQHQRLVSSSGGLAATGAHRCGEHDGTVPPEVARHHEHAAPGGRCCCSAVVQRVAAPAADVWAVVRRFDQPQAYKSFVRSCALLDGDGGVGTLREVRVVSGLPAASSRERLEILDDERHVLSFSVVGGEHRLRNYRSVTTVHPAPGESASATLVVESYVVDVPPGNTPEDTRVFVDTIVKCNLQSLARTAEKLAGRGAAYGALP

SEQ ID NO: 12020 - DNA, 1082 bp, Triticum aestivum
  misc_feature (1)..(1082): Ceres Seq. ID no. 12592832
actctccaccgatcccctcacccccaccggcggcgcacagctcgacgacccgcgcgatcctgcggaggcggcagtcatggtgcacgtcaacttctaccgcaactatgggaagaccttcaagaagccaaggcgtccgtatgagaaggagcgtcttgacgctgagctgaagctggttggggagtacggtctgcgggccaagcgtgagctctatcgtgtgcagtacgccctcagccgcatccgaaatgctgccagggagctgctcaccctggatgagaagaacccccgccgtatctttgagggtgcagcgctcctgcgccgcatgaaccgctacggtcttctcactgaggaacagaacaagcttgattacgtgcttgccctcactgttgacaacttcctccagcgccgtctccagaccatcgtcttcaagaatggcatggccaagtcaatccatcatgctcgtgtcctcatcagacagcgccacatcagggttggaaagcagctcgtcaacattccttctttcatggtgagggtggacactgagaaacacgtcgacttctcgctcaccagccccctgggtggtggccaacctggaagagtgaagcggaagaaccagaagaaggcctcaggtggtggtggtgacgacggcgaggaggaggaagactaagcgctcagcctcgacccgcataacttccgttgcagaaatgttgagattgccttgtggaacttgcaacgtgaaatgattcaaactttggttcgttcttagaaacttagtggtgtagagctttcgttgcttcagctatcgattctaaaattaaacttatggttgtcagttttgcttggttagtgaccaccgagcataagaagtgaactcagtgaggctgcttcgttttttgtgaaccaaacgtatcttgttatcggtttgacagccctggttctgagttattttactctgcatgaagtgttactgttgtccttgctatccttctcttttgtctggttggctaggttggtgtgtcgaccgaatgatcacaataagtgctatatagtactctttccaaggctataattccaattgtagtatt

SEQ ID NO: 12021 - protein, 220 aa, Triticum aestivum
  peptide (1)..(220): Ceres Seq. ID no. 12592833
  misc_feature (31)..(133): Pfam Name: Pfam Description:  Ribosomal protein S4/S9 N-terminal domain
  misc_feature (26)..(218): NCBI GI NO: 15242498 NR Description: 40S ribosomal protein S9-like
  misc_feature (26)..(219): NCBI GI NO: 15242241 NR Description: 40S ribosomal protein - like; protein id:At5g15200
  misc_feature (26)..(219): NCBI GI NO: 6440857 NR Description: 40S ribosomal protein S9 [Chlamydomonas sp. HS-5]
  misc_feature (33)..(220): NCBI GI NO: 40741183 NR Description: RS9_PODAN 40S ribosomal protein S9 (S7)
  misc_feature (35)..(220): NCBI GI NO: 24661707 NR Description: Ribosomal protein S9 CG3395-PA
  misc_feature (33)..(219): NCBI GI NO: 1710780 NR Description: 40S ribosomal protein S9 (S7)
  misc_feature (37)..(220): NCBI GI NO: 14141193 NR Description: ribosomal protein S9; 40S ribosomal protein S9
  misc_feature (37)..(219): NCBI GI NO: 15294029 NR Description: 40S ribosomal protein S9 [Ictalurus punctatus]
  misc_feature (37)..(220): NCBI GI NO: 13592067 NR Description: ribosomal protein S9 [Rattus norvegicus]
  misc_feature (37)..(220): NCBI GI NO: 27735416 NR Description: Similar to ribosomal protein S9 [Xenopus laevis]
LSTDPLTPTGGAQLDDPRDPAEAAVMVHVNFYRNYGKTFKKPRRPYEKERLDAELKLVGEYGLRAKRELYRVQYALSRIRNAARELLTLDEKNPRRIFEGAALLRRMNRYGLLTEEQNKLDYVLALTVDNFLQRRLQTIVFKNGMAKSIHHARVLIRQRHIRVGKQLVNIPSFMVRVDTEKHVDFSLTSPLGGGQPGRVKRKNQKKASGGGGDDGEEEED

SEQ ID NO: 12022 - protein, 195 aa, Triticum aestivum
  peptide (1)..(195): Ceres Seq. ID no. 12592834
  misc_feature (6)..(108): Pfam Name: Pfam Description:  Ribosomal protein S4/S9 N-terminal domain
  misc_feature (1)..(193): NCBI GI NO: 15242498 NR Description: 40S ribosomal protein S9-like
  misc_feature (1)..(194): NCBI GI NO: 15242241 NR Description: 40S ribosomal protein - like; protein id:At5g15200
  misc_feature (1)..(194): NCBI GI NO: 6440857 NR Description: 40S ribosomal protein S9 [Chlamydomonas sp. HS-5]
  misc_feature (8)..(195): NCBI GI NO: 40741183 NR Description: RS9_PODAN 40S ribosomal protein S9 (S7)
  misc_feature (10)..(195): NCBI GI NO: 24661707 NR Description: Ribosomal protein S9 CG3395-PA
  misc_feature (8)..(194): NCBI GI NO: 1710780 NR Description: 40S ribosomal protein S9 (S7)
  misc_feature (12)..(195): NCBI GI NO: 14141193 NR Description: ribosomal protein S9; 40S ribosomal protein S9
  misc_feature (12)..(194): NCBI GI NO: 15294029 NR Description: 40S ribosomal protein S9 [Ictalurus punctatus]
  misc_feature (12)..(195): NCBI GI NO: 13592067 NR Description: ribosomal protein S9 [Rattus norvegicus]
  misc_feature (12)..(195): NCBI GI NO: 27735416 NR Description: Similar to ribosomal protein S9 [Xenopus laevis]
MVHVNFYRNYGKTFKKPRRPYEKERLDAELKLVGEYGLRAKRELYRVQYALSRIRNAARELLTLDEKNPRRIFEGAALLRRMNRYGLLTEEQNKLDYVLALTVDNFLQRRLQTIVFKNGMAKSIHHARVLIRQRHIRVGKQLVNIPSFMVRVDTEKHVDFSLTSPLGGGQPGRVKRKNQKKASGGGGDDGEEEED

SEQ ID NO: 12023 - protein, 114 aa, Triticum aestivum
  peptide (1)..(114): Ceres Seq. ID no. 12592835
  misc_feature (28)..(75): Pfam Name: Pfam Description:  S4 domain
  misc_feature (1)..(112): NCBI GI NO: 15242498 NR Description: 40S ribosomal protein S9-like
  misc_feature (1)..(113): NCBI GI NO: 15242241 NR Description: 40S ribosomal protein - like; protein id:At5g15200
  misc_feature (1)..(113): NCBI GI NO: 6440857 NR Description: 40S ribosomal protein S9 [Chlamydomonas sp. HS-5]
  misc_feature (1)..(114): NCBI GI NO: 40741183 NR Description: RS9_PODAN 40S ribosomal protein S9 (S7)
  misc_feature (1)..(114): NCBI GI NO: 24661707 NR Description: Ribosomal protein S9 CG3395-PA
  misc_feature (1)..(113): NCBI GI NO: 1710780 NR Description: 40S ribosomal protein S9 (S7)
  misc_feature (1)..(114): NCBI GI NO: 14141193 NR Description: ribosomal protein S9; 40S ribosomal protein S9
  misc_feature (1)..(113): NCBI GI NO: 15294029 NR Description: 40S ribosomal protein S9 [Ictalurus punctatus]
  misc_feature (1)..(114): NCBI GI NO: 13592067 NR Description: ribosomal protein S9 [Rattus norvegicus]
  misc_feature (1)..(114): NCBI GI NO: 27735416 NR Description: Similar to ribosomal protein S9 [Xenopus laevis]
MNRYGLLTEEQNKLDYVLALTVDNFLQRRLQTIVFKNGMAKSIHHARVLIRQRHIRVGKQLVNIPSFMVRVDTEKHVDFSLTSPLGGGQPGRVKRKNQKKASGGGGDDGEEEED

SEQ ID NO: 12024 - DNA, 869 bp, Triticum aestivum
  misc_feature (1)..(869): Ceres Seq. ID no. 12587306
acccccatcccacatccaagacaagaagcgcctggagcttgccatggctgccaatccagatcgggaggtgtgccaccgggcagggagaggagggaagatgctgctgccggtgatggccgtcttggcggcggtggtgctggcgtcgctgccgtcggcggcggtggcgaccaactacacggtgggcgacgagaaggggtggaaccccaaggtggactacacctcctgggtgaagaagcaccgccccttctacaagggcgactggctcctgttcgagtaccagaatgggcggtcggacgtggtgcaggtggacgaggtcgggtacgacaactgcgacaaggagagcgccatcagcagccacagcaaggggaccagctacgcgttccagctcaaggaggccaaggactacttcttcatctgcagctacggctactgctactccggcatgaagctcgccgtcaccgccaagaagggccccgcctcttcctcccccgactccggctcatcctcctcctcctcctcctcgccggccgccaagtcatcctccaaatccgccgccccccccatcgccgcccgcaacgccgctcccctcgccgccgccgtgggcgccgcggccatgctactcaggatgctctgatcagttgatctggcttgcaattccgttctccattaagtccagtttggctcagatcttgtcagattttctcttctctgttaatttattcctccccctcctccttggttaagcttaaacattggttcttgtgcgcttgattgttccattttcctttttcttattttgtcgattttgatccgaatggtgtctggtcgatggttgtagtcgaggtgccaaattaaagattttaagtgtg

SEQ ID NO: 12025 - protein, 213 aa, Triticum aestivum
  peptide (1)..(213): Ceres Seq. ID no. 12587307
  misc_feature (12)..(132): NCBI GI NO: 3023382 NR Description: Forkhead box protein G1A
TPIPHPRQEAPGACHGCQSRSGGVPPGRERREDAAAGDGRLGGGGAGVAAVGGGGDQLHGGRREGVEPQGGLHLLGEEAPPLLQGRLAPVRVPEWAVGRGAGGRGRVRQLRQGERHQQPQQGDQLRVPAQGGQGLLLHLQLRLLLLRHEARRHRQEGPRLFLPRLRLILLLLLLAGRQVILQIRRPPHRRPQRRSPRRRRGRRGHATQDALIS

SEQ ID NO: 12026 - protein, 210 aa, Triticum aestivum
  peptide (1)..(210): Ceres Seq. ID no. 12587308
  misc_feature (66)..(148): Pfam Name: Pfam Description:  Plastocyanin-like domain
  misc_feature (23)..(210): NCBI GI NO: 38175738 NR Description: blue copper-binding protein-like
  misc_feature (23)..(210): NCBI GI NO: 34915266 NR Description: contains EST AU197337
  misc_feature (38)..(190): NCBI GI NO: 13236660 NR Description: putative blue copper-binding protein
  misc_feature (34)..(198): NCBI GI NO: 38346158 NR Description: OSJNBa0079A21.5
  misc_feature (38)..(205): NCBI GI NO: 4104058 NR Description: blue copper-binding protein homolog
  misc_feature (37)..(173): NCBI GI NO: 15232035 NR Description: putative lamin; protein id: At3g01070
  misc_feature (37)..(173): NCBI GI NO: 21594180 NR Description: putative lamin [Arabidopsis thaliana]
  misc_feature (32)..(199): NCBI GI NO: 38636764 NR Description: putative blue copper binding protein
  misc_feature (40)..(163): NCBI GI NO: 25282797 NR Description: blue copper-binding protein lamin - wild cabbage
  misc_feature (37)..(171): NCBI GI NO: 15242279 NR Description: putative protein; protein id: At5g15350
PPSHIQDKKRLELAMAANPDREVCHRAGRGGKMLLPVMAVLAAVVLASLPSAAVATNYTVGDEKGWNPKVDYTSWVKKHRPFYKGDWLLFEYQNGRSDVVQVDEVGYDNCDKESAISSHSKGTSYAFQLKEAKDYFFICSYGYCYSGMKLAVTAKKGPASSSPDSGSSSSSSSSPAAKSSSKSAAPPIAARNAAPLAAAVGAAAMLLRML

SEQ ID NO: 12027 - protein, 196 aa, Triticum aestivum
  peptide (1)..(196): Ceres Seq. ID no. 12587309
  misc_feature (52)..(134): Pfam Name: Pfam Description:  Plastocyanin-like domain
  misc_feature (9)..(196): NCBI GI NO: 38175738 NR Description: blue copper-binding protein-like
  misc_feature (9)..(196): NCBI GI NO: 34915266 NR Description: contains EST AU197337
  misc_feature (24)..(176): NCBI GI NO: 13236660 NR Description: putative blue copper-binding protein
  misc_feature (20)..(184): NCBI GI NO: 38346158 NR Description: OSJNBa0079A21.5
  misc_feature (24)..(191): NCBI GI NO: 4104058 NR Description: blue copper-binding protein homolog
  misc_feature (23)..(159): NCBI GI NO: 15232035 NR Description: putative lamin; protein id: At3g01070
  misc_feature (23)..(159): NCBI GI NO: 21594180 NR Description: putative lamin [Arabidopsis thaliana]
  misc_feature (18)..(185): NCBI GI NO: 38636764 NR Description: putative blue copper binding protein
  misc_feature (26)..(149): NCBI GI NO: 25282797 NR Description: blue copper-binding protein lamin - wild cabbage
  misc_feature (23)..(157): NCBI GI NO: 15242279 NR Description: putative protein; protein id: At5g15350
MAANPDREVCHRAGRGGKMLLPVMAVLAAVVLASLPSAAVATNYTVGDEKGWNPKVDYTSWVKKHRPFYKGDWLLFEYQNGRSDVVQVDEVGYDNCDKESAISSHSKGTSYAFQLKEAKDYFFICSYGYCYSGMKLAVTAKKGPASSSPDSGSSSSSSSSPAAKSSSKSAAPPIAARNAAPLAAAVGAAAMLLRML

SEQ ID NO: 12028 - DNA, 1039 bp, Triticum aestivum
  misc_feature (1)..(1039): Ceres Seq. ID no. 13596425
atcgcccccacctttttcatcgcactctacgagacccgcagcctcgtctcttcctcctctcacccgacccgatctcctcctaggtttcgctccccaccaccgcggaacgaaccggaaatggcggcgcggcacctcagatccggcctcccgctcctccaagcccgcctcgcggctaacgaatccgcggccgtcgctcaggtgtcgagggggcttgcaacggaggcggataagcctaaggagaacaagatcaaggttccaaaagctctgtatggtggcacgggcaactacgctagtgcgttgttccttgcagcagccaactcaaattcgttggaaaaagttgaatctgagattctcgatgttgtaggggcagccaagaagagccctatgttttctcaattcatgaaggacacatcagtgcctaaagaaaccagggtgaaggctataactgaaatattctctgaagccgggtttactgacatcacaaagaaattcttgtctgcactggcatccaatggaagactgaaatatgttgaacgcattgctgagagatttgttgatttgaccatggcacataggggggaggtgaaagttgttgtcaggactgttgttccacttcctgagaaggaggagaaagaacttaaggagaccttgcgtgatatccttgggaaagacaaaaccatcttggttgaacaaaagattgaccagagtatcatgggaggactggtgattgaatttgggcagaaggtgtttgacatgtcgatcaggactagggcgaagcaaatggaggcgttcttgaggcaaccctttgacatctaactgcctttcggatccagtgcagtggctgtgctgctgaaggttccctcgtgaaataaaagctttcctttacaagagaacggcactctgttttattttgtcttgtgggttaggaagaagcccactgaacaatctttaatttcctttctaccgaaaaaaacatggataaaaacatgaagagaggtcatggaaagtttttaattcaagtgtttgtaattttcggtcg

SEQ ID NO: 12029 - protein, 271 aa, Triticum aestivum
  peptide (1)..(271): Ceres Seq. ID no. 15221869
  misc_feature (93)..(265): Pfam Name: OSCP Pfam Description: ATP synthase delta
  misc_feature (65)..(270): NCBI GI NO: 114682 NR Description: ATP synthase delta chain, mitochondrial precursor
  misc_feature (42)..(271): NCBI GI NO: 23507246 NR Description: oligomycin sensitivity conferring protein
  misc_feature (65)..(270): NCBI GI NO: 4774163 NR Description: F1-ATP synthase delta subunit [Ipomoea batatas]
  misc_feature (42)..(271): NCBI GI NO: 23507248 NR Description: oligomycin sensitivity conferring protein
  misc_feature (42)..(270): NCBI GI NO: 14190495 NR Description: AT5g13450/T22N19_100 [Arabidopsis thaliana]
  misc_feature (42)..(270): NCBI GI NO: 15240628 NR Description: delta subunit of mitochondrial F1-ATPase
  misc_feature (42)..(270): NCBI GI NO: 1655482 NR Description: delta subunit of mitochondrial F1-ATPase
  misc_feature (56)..(267): NCBI GI NO: 27806307 NR Description: ATP synthase
  misc_feature (56)..(267): NCBI GI NO: 4502303 NR Description: ATP synthase
  misc_feature (56)..(266): NCBI GI NO: 20302061 NR Description: ATP synthase
IAPTFFIALYETRSLVSSSSHPTRSPPRFRSPPPRNEPEMAARHLRSGLPLLQARLAANESAAVAQVSRGLATEADKPKENKIKVPKALYGGTGNYASALFLAAANSNSLEKVESEILDVVGAAKKSPMFSQFMKDTSVPKETRVKAITEIFSEAGFTDITKKFLSALASNGRLKYVERIAERFVDLTMAHRGEVKVVVRTVVPLPEKEEKELKETLRDILGKDKTILVEQKIDQSIMGGLVIEFGQKVFDMSIRTRAKQMEAFLRQPFDI

SEQ ID NO: 12030 - protein, 232 aa, Triticum aestivum
  peptide (1)..(232): Ceres Seq. ID no. 15221870
  misc_feature (54)..(226): Pfam Name: OSCP Pfam Description: ATP synthase delta
  misc_feature (26)..(231): NCBI GI NO: 114682 NR Description: ATP synthase delta chain, mitochondrial precursor
  misc_feature (3)..(232): NCBI GI NO: 23507246 NR Description: oligomycin sensitivity conferring protein
  misc_feature (26)..(231): NCBI GI NO: 4774163 NR Description: F1-ATP synthase delta subunit [Ipomoea batatas]
  misc_feature (3)..(232): NCBI GI NO: 23507248 NR Description: oligomycin sensitivity conferring protein
  misc_feature (3)..(231): NCBI GI NO: 14190495 NR Description: AT5g13450/T22N19_100 [Arabidopsis thaliana]
  misc_feature (3)..(231): NCBI GI NO: 15240628 NR Description: delta subunit of mitochondrial F1-ATPase
  misc_feature (3)..(231): NCBI GI NO: 1655482 NR Description: delta subunit of mitochondrial F1-ATPase
  misc_feature (17)..(228): NCBI GI NO: 27806307 NR Description: ATP synthase
  misc_feature (17)..(228): NCBI GI NO: 4502303 NR Description: ATP synthase
  misc_feature (17)..(227): NCBI GI NO: 20302061 NR Description: ATP synthase
MAARHLRSGLPLLQARLAANESAAVAQVSRGLATEADKPKENKIKVPKALYGGTGNYASALFLAAANSNSLEKVESEILDVVGAAKKSPMFSQFMKDTSVPKETRVKAITEIFSEAGFTDITKKFLSALASNGRLKYVERIAERFVDLTMAHRGEVKVVVRTVVPLPEKEEKELKETLRDILGKDKTILVEQKIDQSIMGGLVIEFGQKVFDMSIRTRAKQMEAFLRQPFDI

SEQ ID NO: 12031 - protein, 143 aa, Triticum aestivum
  peptide (1)..(143): Ceres Seq. ID no. 15221871
  misc_feature (1)..(137): Pfam Name: OSCP Pfam Description: ATP synthase delta
  misc_feature (1)..(142): NCBI GI NO: 114682 NR Description: ATP synthase delta chain, mitochondrial precursor
  misc_feature (1)..(143): NCBI GI NO: 23507246 NR Description: oligomycin sensitivity conferring protein
  misc_feature (1)..(142): NCBI GI NO: 4774163 NR Description: F1-ATP synthase delta subunit [Ipomoea batatas]
  misc_feature (1)..(143): NCBI GI NO: 23507248 NR Description: oligomycin sensitivity conferring protein
  misc_feature (1)..(142): NCBI GI NO: 14190495 NR Description: AT5g13450/T22N19_100 [Arabidopsis thaliana]
  misc_feature (1)..(142): NCBI GI NO: 15240628 NR Description: delta subunit of mitochondrial F1-ATPase
  misc_feature (1)..(142): NCBI GI NO: 1655482 NR Description: delta subunit of mitochondrial F1-ATPase
  misc_feature (1)..(139): NCBI GI NO: 27806307 NR Description: ATP synthase
  misc_feature (1)..(139): NCBI GI NO: 4502303 NR Description: ATP synthase
  misc_feature (1)..(138): NCBI GI NO: 20302061 NR Description: ATP synthase
MFSQFMKDTSVPKETRVKAITEIFSEAGFTDITKKFLSALASNGRLKYVERIAERFVDLTMAHRGEVKVVVRTVVPLPEKEEKELKETLRDILGKDKTILVEQKIDQSIMGGLVIEFGQKVFDMSIRTRAKQMEAFLRQPFDI

SEQ ID NO: 12032 - DNA, 1407 bp, Triticum aestivum
  misc_feature (1)..(1407): Ceres Seq. ID no. 13596030
aaaataaaaagaatccccgcagcctcctcctatctcctcctcgcgcacacgccaagcgaccgaatcgccgccgcagccgcctagggcttcgccgccgtcgcagatccctacttccggccgtctgctgcgggtcctccgtgttcgtggctgctgtgccggcgccgacagaaatttccctgccgtcagattttgtgagtgttcgagcttctgcaatgggtggaagcaactatgatgacgactgggtgttgcccggtgctgacatcactcttgttcttgttggaaaacttggctatggcaagagtgcaactggcaatagtatccttggacgggaagcatttgtatcagaatactctcatgccagtgtgacaaacacttgtcagatgggaagcaccatgctgacggatggccgcaccatcaatgttattgatacaccaggattatttgacatgaccgtaactcctgaggatgctggcaaagaaattgttaagtgcatgaacatggctaaagatgggatacatgctgtgttgatggttttttctgctacgtctcgattttctcgagaagattctagtacaattgagactatcaaagtgttttttggagagaaaatcgttgatcacttggtcttagttttcacttatggagatttagttggtgaaaatttattgaagaacatgttaagtaatgccccagactatctgcagaaagttgttcagctatgcaaaaatagagtggttctttttgataacaagaccaaggaccctaggattcgaactaagcagctcgaaacgttgcttgatgtggttgattctgttagtgcaaataatggaggaaacccatttacagatcaaatgctcactcgccttaaggaggtgcatgatagagagaaggaggttcatgatgctctcggatattcagaggaccaaatatctgaattgaagaaggagatccacagaactcgggatgaacagcttgcaaacattactgccatggtggaggaaaagctgaatatcacggtggagaagctgcaagttcaactcatggaagaacagaatgcaaggctggaagcagagagggtggcggcggaggccaggctgaaatccgacgaggagatccgcaagctcaaggagaggctcgagaaggctcaggaggaaaacgaggagttccggaggctggcggcgaacaagtgcaccattctgtaaacagtagtctcttgggaaagagttgtcggatgtcttgttaataggagggggtgaacttaagtctgtctagtagcaacagatatactgtacttggttgcatcgtctcgtatattggtagaacttgaatgcttggggagtcggataactatatgttagtgacagttatacttgtcgtctcgtatattagtagcacttgcgacttgcg

SEQ ID NO: 12033 - protein, 399 aa, Triticum aestivum
  peptide (1)..(399): Ceres Seq. ID no. 13596031
  misc_feature (88)..(290): Pfam Name: Pfam Description:  AIG1 family
  misc_feature (77)..(389): NCBI GI NO: 38346576 NR Description: OSJNBa0064D20.7
  misc_feature (71)..(399): NCBI GI NO: 4097585 NR Description: NTGP4 [Nicotiana tabacum]
  misc_feature (71)..(396): NCBI GI NO: 24417378 NR Description: unknown [Arabidopsis thaliana]
  misc_feature (71)..(396): NCBI GI NO: 18399081 NR Description: expressed protein [Arabidopsis thaliana]
  misc_feature (71)..(396): NCBI GI NO: 25373414 NR Description: hypothetical protein F12G12
  misc_feature (111)..(396): NCBI GI NO: 12324509 NR Description: AIG1-like protein, 5' partial; 1-1205
  misc_feature (89)..(399): NCBI GI NO: 15217731 NR Description: AIG1 [Arabidopsis thaliana]
  misc_feature (75)..(399): NCBI GI NO: 15234871 NR Description: AIG1-related protein [Arabidopsis thaliana]
  misc_feature (89)..(399): NCBI GI NO: 10092442 NR Description: disease resistance protein AIG1; 916-2572
  misc_feature (78)..(385): NCBI GI NO: 15217724 NR Description: AIG1-related protein [Arabidopsis thaliana]
NKKNPRSLLLSPPRAHAKRPNRRRSRLGLRRRRRSLLPAVCCGSSVFVAAVPAPTEISLPSDFVSVRASAMGGSNYDDDWVLPGADITLVLVGKLGYGKSATGNSILGREAFVSEYSHASVTNTCQMGSTMLTDGRTINVIDTPGLFDMTVTPEDAGKEIVKCMNMAKDGIHAVLMVFSATSRFSREDSSTIETIKVFFGEKIVDHLVLVFTYGDLVGENLLKNMLSNAPDYLQKVVQLCKNRVVLFDNKTKDPRIRTKQLETLLDVVDSVSANNGGNPFTDQMLTRLKEVHDREKEVHDALGYSEDQISELKKEIHRTRDEQLANITAMVEEKLNITVEKLQVQLMEEQNARLEAERVAAEARLKSDEEIRKLKERLEKAQEENEEFRRLAANKCTIL

SEQ ID NO: 12034 - protein, 329 aa, Triticum aestivum
  peptide (1)..(329): Ceres Seq. ID no. 13596032
  misc_feature (18)..(220): Pfam Name: Pfam Description:  AIG1 family
  misc_feature (7)..(319): NCBI GI NO: 38346576 NR Description: OSJNBa0064D20.7
  misc_feature (1)..(329): NCBI GI NO: 4097585 NR Description: NTGP4 [Nicotiana tabacum]
  misc_feature (1)..(326): NCBI GI NO: 24417378 NR Description: unknown [Arabidopsis thaliana]
  misc_feature (1)..(326): NCBI GI NO: 18399081 NR Description: expressed protein [Arabidopsis thaliana]
  misc_feature (1)..(326): NCBI GI NO: 25373414 NR Description: hypothetical protein F12G12
  misc_feature (41)..(326): NCBI GI NO: 12324509 NR Description: AIG1-like protein, 5' partial; 1-1205
  misc_feature (19)..(329): NCBI GI NO: 15217731 NR Description: AIG1 [Arabidopsis thaliana]
  misc_feature (5)..(329): NCBI GI NO: 15234871 NR Description: AIG1-related protein [Arabidopsis thaliana]
  misc_feature (19)..(329): NCBI GI NO: 10092442 NR Description: disease resistance protein AIG1; 916-2572
  misc_feature (8)..(315): NCBI GI NO: 15217724 NR Description: AIG1-related protein [Arabidopsis thaliana]
MGGSNYDDDWVLPGADITLVLVGKLGYGKSATGNSILGREAFVSEYSHASVTNTCQMGSTMLTDGRTINVIDTPGLFDMTVTPEDAGKEIVKCMNMAKDGIHAVLMVFSATSRFSREDSSTIETIKVFFGEKIVDHLVLVFTYGDLVGENLLKNMLSNAPDYLQKVVQLCKNRVVLFDNKTKDPRIRTKQLETLLDVVDSVSANNGGNPFTDQMLTRLKEVHDREKEVHDALGYSEDQISELKKEIHRTRDEQLANITAMVEEKLNITVEKLQVQLMEEQNARLEAERVAAEARLKSDEEIRKLKERLEKAQEENEEFRRLAANKCTIL

SEQ ID NO: 12035 - protein, 273 aa, Triticum aestivum
  peptide (1)..(273): Ceres Seq. ID no. 13596033
  misc_feature (1)..(164): Pfam Name: Pfam Description:  AIG1 family
  misc_feature (1)..(263): NCBI GI NO: 38346576 NR Description: OSJNBa0064D20.7
  misc_feature (1)..(273): NCBI GI NO: 4097585 NR Description: NTGP4 [Nicotiana tabacum]
  misc_feature (1)..(270): NCBI GI NO: 24417378 NR Description: unknown [Arabidopsis thaliana]
  misc_feature (1)..(270): NCBI GI NO: 18399081 NR Description: expressed protein [Arabidopsis thaliana]
  misc_feature (1)..(270): NCBI GI NO: 25373414 NR Description: hypothetical protein F12G12
  misc_feature (1)..(270): NCBI GI NO: 12324509 NR Description: AIG1-like protein, 5' partial; 1-1205
  misc_feature (1)..(273): NCBI GI NO: 15217731 NR Description: AIG1 [Arabidopsis thaliana]
  misc_feature (1)..(273): NCBI GI NO: 15234871 NR Description: AIG1-related protein [Arabidopsis thaliana]
  misc_feature (1)..(273): NCBI GI NO: 10092442 NR Description: disease resistance protein AIG1; 916-2572
  misc_feature (1)..(259): NCBI GI NO: 15217724 NR Description: AIG1-related protein [Arabidopsis thaliana]
MGSTMLTDGRTINVIDTPGLFDMTVTPEDAGKEIVKCMNMAKDGIHAVLMVFSATSRFSREDSSTIETIKVFFGEKIVDHLVLVFTYGDLVGENLLKNMLSNAPDYLQKVVQLCKNRVVLFDNKTKDPRIRTKQLETLLDVVDSVSANNGGNPFTDQMLTRLKEVHDREKEVHDALGYSEDQISELKKEIHRTRDEQLANITAMVEEKLNITVEKLQVQLMEEQNARLEAERVAAEARLKSDEEIRKLKERLEKAQEENEEFRRLAANKCTIL

SEQ ID NO: 12036 - DNA, 1080 bp, Triticum aestivum
  misc_feature (1)..(1080): Ceres Seq. ID no. 13583327
  misc_feature (544)..(544): n is a, c, t, g, unknown, or other
taatcgaaaacattttcatcccgcgggacgcgccatgaagaccagctcctcgtcgcaggcgctcttcccggccgcctcgtcgctgtgcaccccgtacctcctcctcgtgcccctcggcctcctcgccgcggtggtcgtcatccccagcctcggctcctcccacgtccgctccgacggcctcggcgtgctctgccccagcctcggcaccgatggctactccgtcgcgtcgggagccgagaaggtcgtctccacggcggcggcggcggcgcagccggagttccggctgctcggcggggtgctgaccacgccgaagcggcgcgagcggcgggacatcgtgcggctggcgtacgcgctgcagccgccggtgccggcgtacgcgcgggtggacgtgcgcttcgtgttctgcggcgtggacgacccggtggaccggatgctggtggcgctggaggccgcgcggcacggcgacgtcctcctgctcaactgcaccgagaacatgaacgacggcaagacccaccagtatttctcctccgtgccgcgggtgttngcgggcgcgccctacgactacgtgatgaagaccgacgacgacacgtacctgcgcgtggccgccatggccgaggagctccggcccaagccccgcgacgacgtctacctcggctacggcttcgccgtcggcgacgaccccatgcagttcatgcacggcatggggtacgtcgtctcgtgggacgtcgcgacctgggtgtccgccaacgaggagatcctccggcacaacgacacccacggccccgagggcctcctcttcggcaagtggctcaacatcgggcgccggggcaagaaccggtacagcctcaggccaaggatgtacgacctcaactgggacatggacaacttccggccggacaccgtcgccgtgcacatgatcaaggacaaccgccggtgggcggctgccttcagatacttcaacgtcaccgccgggatcaggccgtccaacctgtaccacttgccctgatcgatcaaggggtttatattttccatttcttaagtaaactcgccgtgacgtggttgattgtgccacgaaagtgc

SEQ ID NO: 12037 - protein, 334 aa, Triticum aestivum
  peptide (1)..(334): Ceres Seq. ID no. 13583328
  misc_feature (108)..(279): Pfam Name: Pfam Description:  Galactosyltransferase
  misc_feature (76)..(334): NCBI GI NO: 15242148 NR Description: expressed protein [Arabidopsis thaliana]
  misc_feature (76)..(334): NCBI GI NO: 21537037 NR Description: unknown [Arabidopsis thaliana]
  misc_feature (95)..(330): NCBI GI NO: 18092341 NR Description: hypothetical protein [Zea mays]
  misc_feature (81)..(330): NCBI GI NO: 14719291 NR Description: unknown [Zea mays]
  misc_feature (181)..(181): Xaa is any aa, unknown or other
NRKHFHPAGRAMKTSSSSQALFPAASSLCTPYLLLVPLGLLAAVVVIPSLGSSHVRSDGLGVLCPSLGTDGYSVASGAEKVVSTAAAAAQPEFRLLGGVLTTPKRRERRDIVRLAYALQPPVPAYARVDVRFVFCGVDDPVDRMLVALEAARHGDVLLLNCTENMNDGKTHQYFSSVPRVXAGAPYDYVMKTDDDTYLRVAAMAEELRPKPRDDVYLGYGFAVGDDPMQFMHGMGYVVSWDVATWVSANEEILRHNDTHGPEGLLFGKWLNIGRRGKNRYSLRPRMYDLNWDMDNFRPDTVAVHMIKDNRRWAAAFRYFNVTAGIRPSNLYHLP

SEQ ID NO: 12038 - protein, 323 aa, Triticum aestivum
  peptide (1)..(323): Ceres Seq. ID no. 13583329
  misc_feature (97)..(268): Pfam Name: Pfam Description:  Galactosyltransferase
  misc_feature (65)..(323): NCBI GI NO: 15242148 NR Description: expressed protein [Arabidopsis thaliana]
  misc_feature (65)..(323): NCBI GI NO: 21537037 NR Description: unknown [Arabidopsis thaliana]
  misc_feature (84)..(319): NCBI GI NO: 18092341 NR Description: hypothetical protein [Zea mays]
  misc_feature (70)..(319): NCBI GI NO: 14719291 NR Description: unknown [Zea mays]
  misc_feature (170)..(170): Xaa is any aa, unknown or other
MKTSSSSQALFPAASSLCTPYLLLVPLGLLAAVVVIPSLGSSHVRSDGLGVLCPSLGTDGYSVASGAEKVVSTAAAAAQPEFRLLGGVLTTPKRRERRDIVRLAYALQPPVPAYARVDVRFVFCGVDDPVDRMLVALEAARHGDVLLLNCTENMNDGKTHQYFSSVPRVXAGAPYDYVMKTDDDTYLRVAAMAEELRPKPRDDVYLGYGFAVGDDPMQFMHGMGYVVSWDVATWVSANEEILRHNDTHGPEGLLFGKWLNIGRRGKNRYSLRPRMYDLNWDMDNFRPDTVAVHMIKDNRRWAAAFRYFNVTAGIRPSNLYHLP

SEQ ID NO: 12039 - protein, 191 aa, Triticum aestivum
  peptide (1)..(191): Ceres Seq. ID no. 13583330
  misc_feature (1)..(136): Pfam Name: Pfam Description:  Galactosyltransferase
  misc_feature (1)..(191): NCBI GI NO: 15242148 NR Description: expressed protein [Arabidopsis thaliana]
  misc_feature (1)..(191): NCBI GI NO: 21537037 NR Description: unknown [Arabidopsis thaliana]
  misc_feature (1)..(187): NCBI GI NO: 18092341 NR Description: hypothetical protein [Zea mays]
  misc_feature (1)..(187): NCBI GI NO: 14719291 NR Description: unknown [Zea mays]
  misc_feature (38)..(38): Xaa is any aa, unknown or other
MLVALEAARHGDVLLLNCTENMNDGKTHQYFSSVPRVXAGAPYDYVMKTDDDTYLRVAAMAEELRPKPRDDVYLGYGFAVGDDPMQFMHGMGYVVSWDVATWVSANEEILRHNDTHGPEGLLFGKWLNIGRRGKNRYSLRPRMYDLNWDMDNFRPDTVAVHMIKDNRRWAAAFRYFNVTAGIRPSNLYHLP

SEQ ID NO: 12040 - DNA, 1780 bp, Triticum aestivum
  misc_feature (1)..(1780): Ceres Seq. ID no. 13596458
acaggatactctccccccctccccactgccgcaccaacacgccagtctcggcgacgccaaaccctcgcccgctctccagaaacccccctatggccgccaccggcgctgccgcgcccgcgcccgcggccgtgcagccgccgcggcagttcaagctcgacccgcagagcgagctccgcgtggaggtgctcccggacgcgaccctccgcgtgcgcctcgtctccggcacggcggagatcttcggcaccgagctcccgcccgagggctggctcaccatcccgccccgctccaagatcgccattttcacgtggcacggcgcgacggtggagctggacggggtcagcgagagcgagtacacgtccgacgagacgccgatggtaatttatgtcaacacgcatgcgattctcgatgcacggagggcgagggcgagggcagcgcagggaggcgacttggaggcctcacagggacctagagtgattgttgtggggccaactgattctggaaaaagcactctgtgcaaaatgctccttagctgggctgccaaactgggatggaagcctacatatgtggatttagatattggccagggttccataaccatacctggatgtatttctgctacaccaatagagaaacccatagatatagttgatgggattcctttggagatgccgcttgcatacttttatggccatccaaatccaagtattaatccagatgtttacaaagcgctcatgagagagctagctcaaacattagagacacagttctctgggaatgctgaatctagggcggccggtatggttattaacacaatggggtgggttgaaggccttggctatgagttacttcttaatgcaattgacatcttcaaggctaatgtagtgctggtattgggacaggagaagctctggaagatgttaaaagatgcagtacaaagtaagcccaatatcgatgtcgtaaaacttcataaatctgagggtgttgtcctaaggaattcaaaatatcgtcaaaagactaggagctttcgtatcaaggagtacttttatgggattgcaaacgatctggcaccacattcaaatgtagtcaactttagtgatgtttctgttttcagaattggtagtggacatcaagctccacggtcagctttaccaattggtgcagagcctgtggcagatcccactcggcttgttgctgtcaacatcagcactgatatggtccacacagtgcttgctgtttcttatgcgaaggaacctgatgaaataatttcgagcaacgttgccggattcatccatgtcacagatgttgacatccaaaggaagaagctgacgtacatcgcgccttgcccaggagacctgccaagcaggctgttaatcgcgagctccctgacatggtacgagcaggcttgacccggttcgaggttggacattgtaggtaggtaaccagatggctgatgacatgttgtaacgccgaaatggatactctgtgcatttgataactggaacactgctggtaaagctgaaaagctgaatgggttggacgatatctcaggcatcttgctgcgaagctttctgctgacttgcttatgctttctatgctgctgtggcggcgaagatacaaatagttaggtcaatgaaagattggtgtgctcttttgtacgctgttgggaactaagatatactagaagacgagtcctttggcctcttctcaactgtatccagatataaacatcggaactagttattactagaagaacgtccgtgcgttgcaatggggccacatt

SEQ ID NO: 12041 - protein, 467 aa, Triticum aestivum
  peptide (1)..(467): Ceres Seq. ID no. 13596459
  misc_feature (25)..(465): NCBI GI NO: 15229328 NR Description: expressed protein [Arabidopsis thaliana]
  misc_feature (47)..(464): NCBI GI NO: 15242523 NR Description: ATP/GTP-binding protein -related
  misc_feature (47)..(464): NCBI GI NO: 10176985 NR Description: ATP/GTP-binding protein-like
  misc_feature (44)..(465): NCBI GI NO: 5803029 NR Description: ATP/GTP-binding protein [Homo sapiens]
  misc_feature (44)..(465): NCBI GI NO: 19527056 NR Description: ATP/GTP-binding protein [Mus musculus]
  misc_feature (47)..(462): NCBI GI NO: 17553760 NR Description: ATP GTP-binding protein like (47.6 kD)
  misc_feature (47)..(465): NCBI GI NO: 19922174 NR Description: CG5970-PA [Drosophila melanogaster]
  misc_feature (47)..(462): NCBI GI NO: 39590654 NR Description: Hypothetical protein CBG09862
  misc_feature (47)..(462): NCBI GI NO: 39580303 NR Description: Hypothetical protein CBG23604
  misc_feature (47)..(382): NCBI GI NO: 19114653 NR Description: putative cleaveage/polyadenylation factor
RILSPPPHCRTNTPVSATPNPRPLSRNPPMAATGAAAPAPAAVQPPRQFKLDPQSELRVEVLPDATLRVRLVSGTAEIFGTELPPEGWLTIPPRSKIAIFTWHGATVELDGVSESEYTSDETPMVIYVNTHAILDARRARARAAQGGDLEASQGPRVIVVGPTDSGKSTLCKMLLSWAAKLGWKPTYVDLDIGQGSITIPGCISATPIEKPIDIVDGIPLEMPLAYFYGHPNPSINPDVYKALMRELAQTLETQFSGNAESRAAGMVINTMGWVEGLGYELLLNAIDIFKANVVLVLGQEKLWKMLKDAVQSKPNIDVVKLHKSEGVVLRNSKYRQKTRSFRIKEYFYGIANDLAPHSNVVNFSDVSVFRIGSGHQAPRSALPIGAEPVADPTRLVAVNISTDMVHTVLAVSYAKEPDEIISSNVAGFIHVTDVDIQRKKLTYIAPCPGDLPSRLLIASSLTWYEQA

SEQ ID NO: 12042 - protein, 438 aa, Triticum aestivum
  peptide (1)..(438): Ceres Seq. ID no. 13596460
  misc_feature (1)..(436): NCBI GI NO: 15229328 NR Description: expressed protein [Arabidopsis thaliana]
  misc_feature (18)..(435): NCBI GI NO: 15242523 NR Description: ATP/GTP-binding protein -related
  misc_feature (18)..(435): NCBI GI NO: 10176985 NR Description: ATP/GTP-binding protein-like
  misc_feature (15)..(436): NCBI GI NO: 5803029 NR Description: ATP/GTP-binding protein [Homo sapiens]
  misc_feature (15)..(436): NCBI GI NO: 19527056 NR Description: ATP/GTP-binding protein [Mus musculus]
  misc_feature (18)..(433): NCBI GI NO: 17553760 NR Description: ATP GTP-binding protein like (47.6 kD)
  misc_feature (18)..(436): NCBI GI NO: 19922174 NR Description: CG5970-PA [Drosophila melanogaster]
  misc_feature (18)..(433): NCBI GI NO: 39590654 NR Description: Hypothetical protein CBG09862
  misc_feature (18)..(433): NCBI GI NO: 39580303 NR Description: Hypothetical protein CBG23604
  misc_feature (18)..(353): NCBI GI NO: 19114653 NR Description: putative cleaveage/polyadenylation factor
MAATGAAAPAPAAVQPPRQFKLDPQSELRVEVLPDATLRVRLVSGTAEIFGTELPPEGWLTIPPRSKIAIFTWHGATVELDGVSESEYTSDETPMVIYVNTHAILDARRARARAAQGGDLEASQGPRVIVVGPTDSGKSTLCKMLLSWAAKLGWKPTYVDLDIGQGSITIPGCISATPIEKPIDIVDGIPLEMPLAYFYGHPNPSINPDVYKALMRELAQTLETQFSGNAESRAAGMVINTMGWVEGLGYELLLNAIDIFKANVVLVLGQEKLWKMLKDAVQSKPNIDVVKLHKSEGVVLRNSKYRQKTRSFRIKEYFYGIANDLAPHSNVVNFSDVSVFRIGSGHQAPRSALPIGAEPVADPTRLVAVNISTDMVHTVLAVSYAKEPDEIISSNVAGFIHVTDVDIQRKKLTYIAPCPGDLPSRLLIASSLTWYEQA

SEQ ID NO: 12043 - protein, 344 aa, Triticum aestivum
  peptide (1)..(344): Ceres Seq. ID no. 13596461
  misc_feature (1)..(342): NCBI GI NO: 15229328 NR Description: expressed protein [Arabidopsis thaliana]
  misc_feature (1)..(341): NCBI GI NO: 15242523 NR Description: ATP/GTP-binding protein -related
  misc_feature (1)..(341): NCBI GI NO: 10176985 NR Description: ATP/GTP-binding protein-like
  misc_feature (1)..(342): NCBI GI NO: 5803029 NR Description: ATP/GTP-binding protein [Homo sapiens]
  misc_feature (1)..(342): NCBI GI NO: 19527056 NR Description: ATP/GTP-binding protein [Mus musculus]
  misc_feature (1)..(339): NCBI GI NO: 17553760 NR Description: ATP GTP-binding protein like (47.6 kD)
  misc_feature (1)..(342): NCBI GI NO: 19922174 NR Description: CG5970-PA [Drosophila melanogaster]
  misc_feature (1)..(339): NCBI GI NO: 39590654 NR Description: Hypothetical protein CBG09862
  misc_feature (1)..(339): NCBI GI NO: 39580303 NR Description: Hypothetical protein CBG23604
  misc_feature (1)..(259): NCBI GI NO: 19114653 NR Description: putative cleaveage/polyadenylation factor
MVIYVNTHAILDARRARARAAQGGDLEASQGPRVIVVGPTDSGKSTLCKMLLSWAAKLGWKPTYVDLDIGQGSITIPGCISATPIEKPIDIVDGIPLEMPLAYFYGHPNPSINPDVYKALMRELAQTLETQFSGNAESRAAGMVINTMGWVEGLGYELLLNAIDIFKANVVLVLGQEKLWKMLKDAVQSKPNIDVVKLHKSEGVVLRNSKYRQKTRSFRIKEYFYGIANDLAPHSNVVNFSDVSVFRIGSGHQAPRSALPIGAEPVADPTRLVAVNISTDMVHTVLAVSYAKEPDEIISSNVAGFIHVTDVDIQRKKLTYIAPCPGDLPSRLLIASSLTWYEQA

SEQ ID NO: 12044 - DNA, 986 bp, Triticum aestivum
  misc_feature (1)..(986): Ceres Seq. ID no. 13596426
cccgatacagctccccccatccaaaacccaccgaagtaaaaccgacgagacaaggaccaaacaccaaaatgctctcatccaccgctctccggccgctgtcgccggcgacggcaacgacgcccgcgtacccagccaccgctactgctactgctaccgccaccgtcacctcggccacgcccgggcgacgctcggttgcggtgcgcgtgctgcgggactacggctcgatcccgaagcgggagcccttcagctccagccgcagcatcctcgacgagttcttcaagcaggagaagcctctcgtccagcgcaccaaggaccacatcacagattattgcacgacccttgagggtgatgattgctgcagctgctgggatgcctattttgaactcaacaaactcgagcaagagctaccgcaagaagaaatttcaaggatggtgaaggactcgcggtcagacccgaggtaccttataagcagcatccaccaccggtcagacctacggaagaagatggccgagaaagctcacaattcggcgccatcaaactccccggggcaaacagcgaagccgaggcctttccccgtccccgacgggctgccgaaaacgcaggaagagatcgacgaggatgaggaggccctcatgccggagtctccttacacgaggctgctcagaaggatggggaggtttcccgactggtatacccctcgcccagaccatgagaccgactgaatcacgccatgaaccagccttgccttccagatgtacagcctgaagctctgttctcctggcatcgagcatggaaccttggattgcctgttgcctgcttagttggtttttgctgagtggataaatggaactatgtaatggtgcgtatgtttttgtggtgtttagttcttcgctttagattcagataacaccctttttgccgttttcgtatgatatctgctatgtatatctgtatatatatgtttgggaatagagttcttgactgcc

SEQ ID NO: 12045 - protein, 239 aa, Triticum aestivum
  peptide (1)..(239): Ceres Seq. ID no. 13596427
  misc_feature (75)..(239): NCBI GI NO: 18397956 NR Description: expressed protein [Arabidopsis thaliana]
RYSSPHPKPTEVKPTRQGPNTKMLSSTALRPLSPATATTPAYPATATATATATVTSATPGRRSVAVRVLRDYGSIPKREPFSSSRSILDEFFKQEKPLVQRTKDHITDYCTTLEGDDCCSCWDAYFELNKLEQELPQEEISRMVKDSRSDPRYLISSIHHRSDLRKKMAEKAHNSAPSNSPGQTAKPRPFPVPDGLPKTQEEIDEDEEALMPESPYTRLLRRMGRFPDWYTPRPDHETD

SEQ ID NO: 12046 - protein, 217 aa, Triticum aestivum
  peptide (1)..(217): Ceres Seq. ID no. 13596428
  misc_feature (53)..(217): NCBI GI NO: 18397956 NR Description: expressed protein [Arabidopsis thaliana]
MLSSTALRPLSPATATTPAYPATATATATATVTSATPGRRSVAVRVLRDYGSIPKREPFSSSRSILDEFFKQEKPLVQRTKDHITDYCTTLEGDDCCSCWDAYFELNKLEQELPQEEISRMVKDSRSDPRYLISSIHHRSDLRKKMAEKAHNSAPSNSPGQTAKPRPFPVPDGLPKTQEEIDEDEEALMPESPYTRLLRRMGRFPDWYTPRPDHETD

SEQ ID NO: 12047 - DNA, 656 bp, Triticum aestivum
  misc_feature (1)..(656): Ceres Seq. ID no. 13583388
cctaatcgaaaaaatcaaggaaaaaacttttaaaaaaagagcacaaaatcgttcctcattctccatctactccaccaaacctcaatccccatctctctccccctaggctctccttcgccgtcggtcgggctccctctccgacacgccgccgtcgatacatccacccgaggcatggcgacggcgttcaaggcgttcgtgaacagccccgtcggccccaagaccacccacttctggggccccgtcgctaactggggcttcgtcctcgcgggtttggttgacttgaacaagcctcctgagatgatatctggcaatatgacagccgccatgtgtgtgtattctgggctctttatgaggttcgcgtggatggtacagccccggaactacttgctcctggcatgccatgcctccaacgaaaccgttcagctctatcatttatctcgctgtgctagggctcaggggtatctggattccaagaaagagccggaggcccaacagtaaagggtgtggtgtttctgaagtcggaggagccttgactccgcagccagcctttcaataagtaaaatttgtttctgaagctttgcaatgcccttcatgagaaaaaacctatacagtggaaatttctatttctatgatactcatgcctgcaatgtggcctt

SEQ ID NO: 12048 - protein, 108 aa, Triticum aestivum
  peptide (1)..(108): Ceres Seq. ID no. 13583389
  misc_feature (1)..(105): Pfam Name: UPF0041 Pfam Description: Uncharacterised protein family
  misc_feature (1)..(105): NCBI GI NO: 15241266 NR Description: expressed protein [Arabidopsis thaliana]
  misc_feature (17)..(104): NCBI GI NO: 17554512 NR Description: Uncharacterised protein family (UPF0041)
  misc_feature (17)..(104): NCBI GI NO: 39591631 NR Description: Hypothetical protein CBG18071
  misc_feature (17)..(85): NCBI GI NO: 4929727 NR Description: CGI-129 protein [Homo sapiens]
  misc_feature (17)..(85): NCBI GI NO: 7706369 NR Description: brain protein 44-like; HSPC040 protein
  misc_feature (17)..(85): NCBI GI NO: 12852262 NR Description: unnamed protein product [Mus musculus]
  misc_feature (17)..(85): NCBI GI NO: 9055178 NR Description: brain protein 44-like
  misc_feature (1)..(84): NCBI GI NO: 19075237 NR Description: conserved hypothetical protein
  misc_feature (17)..(95): NCBI GI NO: 20983406 NR Description: similar to Brain protein 44-like protein
  misc_feature (17)..(85): NCBI GI NO: 12852283 NR Description: unnamed protein product [Mus musculus]
MATAFKAFVNSPVGPKTTHFWGPVANWGFVLAGLVDLNKPPEMISGNMTAAMCVYSGLFMRFAWMVQPRNYLLLACHASNETVQLYHLSRCARAQGYLDSKKEPEAQQ

SEQ ID NO: 12049 - protein, 66 aa, Triticum aestivum
  peptide (1)..(66): Ceres Seq. ID no. 13583390
  misc_feature (1)..(63): Pfam Name: UPF0041 Pfam Description: Uncharacterised protein family
  misc_feature (1)..(63): NCBI GI NO: 15241266 NR Description: expressed protein [Arabidopsis thaliana]
  misc_feature (1)..(62): NCBI GI NO: 17554512 NR Description: Uncharacterised protein family (UPF0041)
  misc_feature (1)..(62): NCBI GI NO: 39591631 NR Description: Hypothetical protein CBG18071
  misc_feature (1)..(43): NCBI GI NO: 4929727 NR Description: CGI-129 protein [Homo sapiens]
  misc_feature (1)..(43): NCBI GI NO: 7706369 NR Description: brain protein 44-like; HSPC040 protein
  misc_feature (1)..(43): NCBI GI NO: 12852262 NR Description: unnamed protein product [Mus musculus]
  misc_feature (1)..(43): NCBI GI NO: 9055178 NR Description: brain protein 44-like
  misc_feature (1)..(42): NCBI GI NO: 19075237 NR Description: conserved hypothetical protein
  misc_feature (1)..(53): NCBI GI NO: 20983406 NR Description: similar to Brain protein 44-like protein
  misc_feature (1)..(43): NCBI GI NO: 12852283 NR Description: unnamed protein product [Mus musculus]
MISGNMTAAMCVYSGLFMRFAWMVQPRNYLLLACHASNETVQLYHLSRCARAQGYLDSKKEPEAQQ

SEQ ID NO: 12050 - protein, 61 aa, Triticum aestivum
  peptide (1)..(61): Ceres Seq. ID no. 13583391
  misc_feature (1)..(58): Pfam Name: UPF0041 Pfam Description: Uncharacterised protein family
  misc_feature (1)..(58): NCBI GI NO: 15241266 NR Description: expressed protein [Arabidopsis thaliana]
  misc_feature (1)..(57): NCBI GI NO: 17554512 NR Description: Uncharacterised protein family (UPF0041)
  misc_feature (1)..(57): NCBI GI NO: 39591631 NR Description: Hypothetical protein CBG18071
  misc_feature (1)..(38): NCBI GI NO: 4929727 NR Description: CGI-129 protein [Homo sapiens]
  misc_feature (1)..(38): NCBI GI NO: 7706369 NR Description: brain protein 44-like; HSPC040 protein
  misc_feature (1)..(38): NCBI GI NO: 12852262 NR Description: unnamed protein product [Mus musculus]
  misc_feature (1)..(38): NCBI GI NO: 9055178 NR Description: brain protein 44-like
  misc_feature (1)..(37): NCBI GI NO: 19075237 NR Description: conserved hypothetical protein
  misc_feature (1)..(48): NCBI GI NO: 20983406 NR Description: similar to Brain protein 44-like protein
  misc_feature (1)..(38): NCBI GI NO: 12852283 NR Description: unnamed protein product [Mus musculus]
MTAAMCVYSGLFMRFAWMVQPRNYLLLACHASNETVQLYHLSRCARAQGYLDSKKEPEAQQ

SEQ ID NO: 12051 - DNA, 1774 bp, Triticum aestivum
  misc_feature (1)..(1774): Ceres Seq. ID no. 14316039
ggagggttcttgcagtattatcgctatccagctcgtgagtcggctatcgtcaatggcggcctctgcaaagatcgccacggagtttctcaaggatccactgatctggttgttcctcgcctcgctggctttcgtcattctgcagaggcggcggctgggcagcgcgccatttcctccgggtccgaagccgctgccagtcatcggcaacatgacgttagtggaccagctgacccaccgcggcctagcggcgctagcgaagcactacggcgggctgctgcaccttcgcctcggcaggctccacgtcttcgcggtgtcgacgccggagtacgcgcgcgaggtgctgcacgtgcaggacgccgccttctcgaaccgcccggccaccatcgccgtcgtctacctcacctacggccgctccgacatggcgttcgcgcacaacggcgcctactggcgccagatgcgcaagctctgcgtcaccaagatcttcagccgccgccgcgccgagacgtggctcgccgtgcgcgacgggtacggggcgctggcccgcgccgtcggcaggcgcagcggcgaggccgtcaacctcggcgagctcatcttcaacctcaccgtcggtgtcatcttccgcgccgccttcagcacccgcgacgaggatgggctcgacgagttcatcgccatcctccaggagttctccagcctcctaggattgttccacatcggtgacttcttcccgtggctcggctgggtgggccggcggggcttcaaccgccgcctccgcacggggcgcggcgctctcgataaatttatcgacaggatcatcgacgagcacatgaggaggggcaagaacgccgccgaccccgacgccgacttggtagacggcctgctcgcgtttctcgccgaggcaaacccaatcagcgggaagcacagagaggacgccctccgcttcacccgcgataacgtcagggccatgattatggacatgttgtttggtgggccagagacagtggggtccatgaccgagtgggcgatggcagagatgatgcgtagcccagacgacctacgacggctgcagcaggagctcgccaatgtgctggggctcgaccgtaccgtggatgagcccgacctcgacaagctccctttcctcagatgtgtcgtcaaggagacgctccgcatgcacccgcccatcccactgctcctccacgagtctgctaaagactgcgtcgtcggtggctactttgtgcccaaaggctcccgcgtgttggtgaatgcatgggcgatcaaccgtgaccccggggcctggaaggacggcgacacgttccgaccttcgcggttcatgcccggcgagcgagaggccgccgggctggacctcaagggtggctgctacgagttcttgccgtttgggtccggacggcgctcctgccctgcgcaggggcttggccaacatgcggtggagttcgctgtcgcgcagctcgcgcacggattcaactgggagctgcccgatggcatgaagcccgcggagcttgacatgggtgacatctttggcctcaccgcattacgtgccacgcggctctacgccgtgccaccacaccacgcctcacatgccccatgtaagtattgcctcacatgccccatgtaagtatcgcaccagacttgttccttgtaaccgttggtccgttcattgtgtaccccgatctgcttggtttgttttggacttgatctccgagtcctaattcgcaagaagagactttctatcaataaagagcacggtcatagatgtggatcc

SEQ ID NO: 12052 - protein, 541 aa, Triticum aestivum
  peptide (1)..(541): Ceres Seq. ID no. 14316040
  misc_feature (57)..(520): Pfam Name: Pfam Description:  Cytochrome P450
  misc_feature (24)..(541): NCBI GI NO: 27476080 NR Description: Hypothetical protein
  misc_feature (18)..(524): NCBI GI NO: 12578893 NR Description: ferulate-5-hydroxylase [Arabidopsis thaliana]
  misc_feature (18)..(524): NCBI GI NO: 12578901 NR Description: ferulate-5-hydroxylase [Arabidopsis thaliana]
  misc_feature (18)..(524): NCBI GI NO: 15234332 NR Description: cytochrome P450 84A1 / ferulate-5-hydroxylase
  misc_feature (32)..(524): NCBI GI NO: 5731998 NR Description: aldehyde 5-hydroxylase [Liquidambar styraciflua]
  misc_feature (31)..(524): NCBI GI NO: 10197650 NR Description: cytochrome p450-dependent monooxygenase
  misc_feature (31)..(524): NCBI GI NO: 10197652 NR Description: cytochrome p450-dependent monooxygenase
  misc_feature (29)..(524): NCBI GI NO: 10197654 NR Description: cytochrome p450-dependent monooxygenase
  misc_feature (36)..(524): NCBI GI NO: 6688937 NR Description: ferulate-5-hydroxylase
  misc_feature (33)..(524): NCBI GI NO: 5002354 NR Description: ferulate-5-hydroxylase
EGSCSIIAIQLVSRLSSMAASAKIATEFLKDPLIWLFLASLAFVILQRRRLGSAPFPPGPKPLPVIGNMTLVDQLTHRGLAALAKHYGGLLHLRLGRLHVFAVSTPEYAREVLHVQDAAFSNRPATIAVVYLTYGRSDMAFAHNGAYWRQMRKLCVTKIFSRRRAETWLAVRDGYGALARAVGRRSGEAVNLGELIFNLTVGVIFRAAFSTRDEDGLDEFIAILQEFSSLLGLFHIGDFFPWLGWVGRRGFNRRLRTGRGALDKFIDRIIDEHMRRGKNAADPDADLVDGLLAFLAEANPISGKHREDALRFTRDNVRAMIMDMLFGGPETVGSMTEWAMAEMMRSPDDLRRLQQELANVLGLDRTVDEPDLDKLPFLRCVVKETLRMHPPIPLLLHESAKDCVVGGYFVPKGSRVLVNAWAINRDPGAWKDGDTFRPSRFMPGEREAAGLDLKGGCYEFLPFGSGRRSCPAQGLGQHAVEFAVAQLAHGFNWELPDGMKPAELDMGDIFGLTALRATRLYAVPPHHASHAPCKYCLTCPM

SEQ ID NO: 12053 - protein, 524 aa, Triticum aestivum
  peptide (1)..(524): Ceres Seq. ID no. 14316041
  misc_feature (40)..(503): Pfam Name: Pfam Description:  Cytochrome P450
  misc_feature (7)..(524): NCBI GI NO: 27476080 NR Description: Hypothetical protein
  misc_feature (1)..(507): NCBI GI NO: 12578893 NR Description: ferulate-5-hydroxylase [Arabidopsis thaliana]
  misc_feature (1)..(507): NCBI GI NO: 12578901 NR Description: ferulate-5-hydroxylase [Arabidopsis thaliana]
  misc_feature (1)..(507): NCBI GI NO: 15234332 NR Description: cytochrome P450 84A1 / ferulate-5-hydroxylase
  misc_feature (15)..(507): NCBI GI NO: 5731998 NR Description: aldehyde 5-hydroxylase [Liquidambar styraciflua]
  misc_feature (14)..(507): NCBI GI NO: 10197650 NR Description: cytochrome p450-dependent monooxygenase
  misc_feature (14)..(507): NCBI GI NO: 10197652 NR Description: cytochrome p450-dependent monooxygenase
  misc_feature (12)..(507): NCBI GI NO: 10197654 NR Description: cytochrome p450-dependent monooxygenase
  misc_feature (19)..(507): NCBI GI NO: 6688937 NR Description: ferulate-5-hydroxylase
  misc_feature (16)..(507): NCBI GI NO: 5002354 NR Description: ferulate-5-hydroxylase
MAASAKIATEFLKDPLIWLFLASLAFVILQRRRLGSAPFPPGPKPLPVIGNMTLVDQLTHRGLAALAKHYGGLLHLRLGRLHVFAVSTPEYAREVLHVQDAAFSNRPATIAVVYLTYGRSDMAFAHNGAYWRQMRKLCVTKIFSRRRAETWLAVRDGYGALARAVGRRSGEAVNLGELIFNLTVGVIFRAAFSTRDEDGLDEFIAILQEFSSLLGLFHIGDFFPWLGWVGRRGFNRRLRTGRGALDKFIDRIIDEHMRRGKNAADPDADLVDGLLAFLAEANPISGKHREDALRFTRDNVRAMIMDMLFGGPETVGSMTEWAMAEMMRSPDDLRRLQQELANVLGLDRTVDEPDLDKLPFLRCVVKETLRMHPPIPLLLHESAKDCVVGGYFVPKGSRVLVNAWAINRDPGAWKDGDTFRPSRFMPGEREAAGLDLKGGCYEFLPFGSGRRSCPAQGLGQHAVEFAVAQLAHGFNWELPDGMKPAELDMGDIFGLTALRATRLYAVPPHHASHAPCKYCLTCPM

SEQ ID NO: 12054 - protein, 473 aa, Triticum aestivum
  peptide (1)..(473): Ceres Seq. ID no. 14316042
  misc_feature (1)..(452): Pfam Name: Pfam Description:  Cytochrome P450
  misc_feature (1)..(473): NCBI GI NO: 27476080 NR Description: Hypothetical protein
  misc_feature (1)..(456): NCBI GI NO: 12578893 NR Description: ferulate-5-hydroxylase [Arabidopsis thaliana]
  misc_feature (1)..(456): NCBI GI NO: 12578901 NR Description: ferulate-5-hydroxylase [Arabidopsis thaliana]
  misc_feature (1)..(456): NCBI GI NO: 15234332 NR Description: cytochrome P450 84A1 / ferulate-5-hydroxylase
  misc_feature (1)..(456): NCBI GI NO: 5731998 NR Description: aldehyde 5-hydroxylase [Liquidambar styraciflua]
  misc_feature (1)..(456): NCBI GI NO: 10197650 NR Description: cytochrome p450-dependent monooxygenase
  misc_feature (1)..(456): NCBI GI NO: 10197652 NR Description: cytochrome p450-dependent monooxygenase
  misc_feature (1)..(456): NCBI GI NO: 10197654 NR Description: cytochrome p450-dependent monooxygenase
  misc_feature (1)..(456): NCBI GI NO: 6688937 NR Description: ferulate-5-hydroxylase
  misc_feature (1)..(456): NCBI GI NO: 5002354 NR Description: ferulate-5-hydroxylase
MTLVDQLTHRGLAALAKHYGGLLHLRLGRLHVFAVSTPEYAREVLHVQDAAFSNRPATIAVVYLTYGRSDMAFAHNGAYWRQMRKLCVTKIFSRRRAETWLAVRDGYGALARAVGRRSGEAVNLGELIFNLTVGVIFRAAFSTRDEDGLDEFIAILQEFSSLLGLFHIGDFFPWLGWVGRRGFNRRLRTGRGALDKFIDRIIDEHMRRGKNAADPDADLVDGLLAFLAEANPISGKHREDALRFTRDNVRAMIMDMLFGGPETVGSMTEWAMAEMMRSPDDLRRLQQELANVLGLDRTVDEPDLDKLPFLRCVVKETLRMHPPIPLLLHESAKDCVVGGYFVPKGSRVLVNAWAINRDPGAWKDGDTFRPSRFMPGEREAAGLDLKGGCYEFLPFGSGRRSCPAQGLGQHAVEFAVAQLAHGFNWELPDGMKPAELDMGDIFGLTALRATRLYAVPPHHASHAPCKYCLTCPM

SEQ ID NO: 12055 - DNA, 1748 bp, Triticum aestivum
  misc_feature (1)..(1748): Ceres Seq. ID no. 13596034
atacaatttctccattcgtctcctactctcctctcccatccctcgccccccctcctcgccgcaagctctaatccccccaagattagctccaacgaacacgaattactgtggattagtgcgaggctttggccgcggcaaatctggggcggggcggttggaagagtcgcggccgaattgtttggtcgagcagatgatgacggcgaacgcgaaactccagaagcaggcgctgctgccgccgcgtagcccgttcccgacggcagcgtcgccgtccccgtacgcagaccatggcccgatcgcccggccacagggcgccacgcaccaccgctttggccatggccacggccatgggcatcaccagcgcacgtcgtctgagagcatcattgaggagcagccgtcgtggctcgacgacctgctcgacgagcctgagacgcccgtgcgccgcgcggggcaccgcaggtcgtcgagcgactcttttgctctgttcgacggaagcgctgcctccggcgcatttgccaatggttttgatgagattgggggaggagggcaggccgcgccatggggtggcgtgcaggagtactatgccaagccaagctcatacgggaggccgcagggccggccgtgggaacaaggcatgccgaatttggcaggttacaggccagggccgccggtgctggtgagggagaagctgggtgggcatcacgggccactgagtgcgtcgagggatcatgaacatgccatggacaaaagagctcttgatgaacttggggcagagaggaaggatggtgtgctgccaaagtatgcacaatcggaggcggacaccaagcgtgctaaacagcaatatgctcagaggtctcgtgttcgaaaactccagtatattgccgagcttgagggtaaagtccaatcattacagtcagaagggatagaagtgtctgctgaaatggagtttcttactcaacaaaatataatgctagacttggaaaacaaagccttgaagcaaaggctggagagtatagcacaggagcaagtaattaaacgtgttcaacaggagatgtttgagcgggaaattggtcgtctaaggtcattgtatcagcagcagcaacagacaccacagcctcctactcttggtcgtagtaacagcagagaccttgactcgcagtttgcaagcatgtctttgaaacaaaaagaccccaactctgggcgtgacgccgtctctgggcctcttcgtacttagttctttcagcctttttttctcgtgagttccaaaccactcctagaccactcttttgtggctgtgaattcgcgtcaagaatccttcaaggaatgcatcaggaaaggagcagcacatttggaattgtgcccctatcacttggtgaataactctggaaaggctaataactgtggatctgatcttcattctttgggaatatgcacctggtggtcatcctcagctcactgccattgttgatgctcgaccagtcggaggtgtttagtgttttatttgtagctctggatgctgttcgtgcatccctgtaccatttcggatcctagggttctaatttgttcctgtggtcttgtttctctatgttgtcttcttcatgcatcttagtcataatctgcattgcttcgtcagtggaatgtggagcactagttagcatctgatacagatgtttttaaatgtgccacatccttgagaactcatttgttttatcgttggtgattcaataaggtagtgcaaataaggtattagc

SEQ ID NO: 12056 - protein, 409 aa, Triticum aestivum
  peptide (1)..(409): Ceres Seq. ID no. 15221743
  misc_feature (281)..(329): Pfam Name: Pfam Description:  bZIP transcription factor
  misc_feature (264)..(404): NCBI GI NO: 28393180 NR Description: putative bZIP family transcription factor
  misc_feature (73)..(167): NCBI GI NO: 28393180 NR Description: putative bZIP family transcription factor
  misc_feature (264)..(376): NCBI GI NO: 30696210 NR Description: bZIP family transcription factor
  misc_feature (73)..(167): NCBI GI NO: 30696210 NR Description: bZIP family transcription factor
  misc_feature (264)..(376): NCBI GI NO: 25404190 NR Description: hypothetical protein T18I24.3
  misc_feature (73)..(167): NCBI GI NO: 25404190 NR Description: hypothetical protein T18I24.3
  misc_feature (246)..(370): NCBI GI NO: 18399693 NR Description: bZIP family transcription factor
  misc_feature (101)..(164): NCBI GI NO: 18399693 NR Description: bZIP family transcription factor
  misc_feature (246)..(370): NCBI GI NO: 25403436 NR Description: protein F15O4.49 [imported] - Arabidopsis thaliana
  misc_feature (117)..(164): NCBI GI NO: 25403436 NR Description: protein F15O4.49 [imported] - Arabidopsis thaliana
YNFSIRLLLSSPIPRPPSSPQALIPPRLAPTNTNYCGLVRGFGRGKSGAGRLEESRPNCLVEQMMTANAKLQKQALLPPRSPFPTAASPSPYADHGPIARPQGATHHRFGHGHGHGHHQRTSSESIIEEQPSWLDDLLDEPETPVRRAGHRRSSSDSFALFDGSAASGAFANGFDEIGGGGQAAPWGGVQEYYAKPSSYGRPQGRPWEQGMPNLAGYRPGPPVLVREKLGGHHGPLSASRDHEHAMDKRALDELGAERKDGVLPKYAQSEADTKRAKQQYAQRSRVRKLQYIAELEGKVQSLQSEGIEVSAEMEFLTQQNIMLDLENKALKQRLESIAQEQVIKRVQQEMFEREIGRLRSLYQQQQQTPQPPTLGRSNSRDLDSQFASMSLKQKDPNSGRDAVSGPLRT

SEQ ID NO: 12057 - protein, 346 aa, Triticum aestivum
  peptide (1)..(346): Ceres Seq. ID no. 15221744
  misc_feature (218)..(266): Pfam Name: Pfam Description:  bZIP transcription factor
  misc_feature (201)..(341): NCBI GI NO: 28393180 NR Description: putative bZIP family transcription factor
  misc_feature (10)..(104): NCBI GI NO: 28393180 NR Description: putative bZIP family transcription factor
  misc_feature (201)..(313): NCBI GI NO: 30696210 NR Description: bZIP family transcription factor
  misc_feature (10)..(104): NCBI GI NO: 30696210 NR Description: bZIP family transcription factor
  misc_feature (201)..(313): NCBI GI NO: 25404190 NR Description: hypothetical protein T18I24.3
  misc_feature (10)..(104): NCBI GI NO: 25404190 NR Description: hypothetical protein T18I24.3
  misc_feature (183)..(307): NCBI GI NO: 18399693 NR Description: bZIP family transcription factor
  misc_feature (38)..(101): NCBI GI NO: 18399693 NR Description: bZIP family transcription factor
  misc_feature (183)..(307): NCBI GI NO: 25403436 NR Description: protein F15O4.49 [imported] - Arabidopsis thaliana
  misc_feature (54)..(101): NCBI GI NO: 25403436 NR Description: protein F15O4.49 [imported] - Arabidopsis thaliana
MMTANAKLQKQALLPPRSPFPTAASPSPYADHGPIARPQGATHHRFGHGHGHGHHQRTSSESIIEEQPSWLDDLLDEPETPVRRAGHRRSSSDSFALFDGSAASGAFANGFDEIGGGGQAAPWGGVQEYYAKPSSYGRPQGRPWEQGMPNLAGYRPGPPVLVREKLGGHHGPLSASRDHEHAMDKRALDELGAERKDGVLPKYAQSEADTKRAKQQYAQRSRVRKLQYIAELEGKVQSLQSEGIEVSAEMEFLTQQNIMLDLENKALKQRLESIAQEQVIKRVQQEMFEREIGRLRSLYQQQQQTPQPPTLGRSNSRDLDSQFASMSLKQKDPNSGRDAVSGPLRT

SEQ ID NO: 12058 - protein, 345 aa, Triticum aestivum
  peptide (1)..(345): Ceres Seq. ID no. 15221745
  misc_feature (217)..(265): Pfam Name: Pfam Description:  bZIP transcription factor
  misc_feature (200)..(340): NCBI GI NO: 28393180 NR Description: putative bZIP family transcription factor
  misc_feature (9)..(103): NCBI GI NO: 28393180 NR Description: putative bZIP family transcription factor
  misc_feature (200)..(312): NCBI GI NO: 30696210 NR Description: bZIP family transcription factor
  misc_feature (9)..(103): NCBI GI NO: 30696210 NR Description: bZIP family transcription factor
  misc_feature (200)..(312): NCBI GI NO: 25404190 NR Description: hypothetical protein T18I24.3
  misc_feature (9)..(103): NCBI GI NO: 25404190 NR Description: hypothetical protein T18I24.3
  misc_feature (182)..(306): NCBI GI NO: 18399693 NR Description: bZIP family transcription factor
  misc_feature (37)..(100): NCBI GI NO: 18399693 NR Description: bZIP family transcription factor
  misc_feature (182)..(306): NCBI GI NO: 25403436 NR Description: protein F15O4.49 [imported] - Arabidopsis thaliana
  misc_feature (53)..(100): NCBI GI NO: 25403436 NR Description: protein F15O4.49 [imported] - Arabidopsis thaliana
MTANAKLQKQALLPPRSPFPTAASPSPYADHGPIARPQGATHHRFGHGHGHGHHQRTSSESIIEEQPSWLDDLLDEPETPVRRAGHRRSSSDSFALFDGSAASGAFANGFDEIGGGGQAAPWGGVQEYYAKPSSYGRPQGRPWEQGMPNLAGYRPGPPVLVREKLGGHHGPLSASRDHEHAMDKRALDELGAERKDGVLPKYAQSEADTKRAKQQYAQRSRVRKLQYIAELEGKVQSLQSEGIEVSAEMEFLTQQNIMLDLENKALKQRLESIAQEQVIKRVQQEMFEREIGRLRSLYQQQQQTPQPPTLGRSNSRDLDSQFASMSLKQKDPNSGRDAVSGPLRT

SEQ ID NO: 12059 - DNA, 2179 bp, Triticum aestivum
  misc_feature (1)..(2179): Ceres Seq. ID no. 14303627
acacccagcaaccaccaccacccgtctcctctcctctcctctcctcctcgtcttcctccttcggcctcctcctttgcagctaacggaaccgaagaaagcctttcgttgacatggctgctttcatcctcttcctctgcttgctcgtgccgctcgtcctcgcgtgcgccgtccgcgccaggaagggcgccgccgggcgggcgtcgtcgggcggcggcggcaaaaagggcggcaccagcctgccgctgccgccggggtcgatggggtggccgtacgtgggcgagaccacgcagctctactcctccaagaaccccaacgtcttcttcgccaggaagcggaacaagtacgggcccatcttcaagacgcacatcctcgggtgcccctgcgtcatggtgtccagcccggaggccgccaagttcgtgctcgtcactcaggcgcacctcttcaagcctaccttcccggccagcaaggagcggatgctgggcccccaggccatcttcttccagcagggggactaccatgcccacctccgccgtctcgtctcacgcgccttctctcccgaggccatccgcggttccgtccctgccatcgaggctatcgccctccgctccctcggctcctgggaagacctgcaagtcaacaccttccaagagatgaagacttacgctctgaatgtggcattgctgtccatcttcggcgaggaggagatgcagtacatcgaggagctgaagcagtgctacctgacgctggagaaggggtacaactcgatgccggtgaacctgccgggcacgctgttccacaaggccatgaaggcccgaaagcggctgggcgccattgtggcccacatcatctccgcccggcgcgagcgcgagcgcgggagcgacctcctgggctccttcatggacggccgcgaggcgctcaccgacgaccagatcgccgacaacgccatcggcgtcatcttcgccgcgcgcgacaccaccgccagcgtgctcacgtggatggtcaagttcctcggcgacaaccccgccgtcctcaaagccgtcaccgaagagcacgctgagatcgcgagggagaaggcgttgtccggcgagccactgtcgtgggccgacacgcggcggatgcggatgacgggccgggtgatccaggagacgatgcgggtggcgtccatcctctccttcaccttcagggaggccgtggaggacgtggagtaccaagggtacctgattcccaagggctggaaagtgcttcccctgttccggaacatccaccacaaccccgaccacttcccctcccctgaaaagttcgatccttcacgattcgaggtggcccccaagcccaacacgttcatgccgttcgggaacgggacccactcgtgccccggcaacgagctggccaagctggagatgctcgtcctctgccaccacctcgccaccaagtacagatggtccacctccaagtccgagagcggcgtccagttcggccccttcgccctccccatcaacggcctccccatgaccttcacccgcaaggacgacaagaacaaagcctgagccatccatccatccatccatccatcgcctcctcctcgttcccaaagggaaatcaacagcgcgatagaggcgacggcgtggcacatgcgagcgagctggatcggctccgtccgtgtccgtgccggtcgccgtcggaggggacacttgtagccgtgggcgccgcggcgggagcgggagcgggctggcggaggccgatcggagagagcacgggccgtcaaagtcctttgtacagattcttcagccaggaccatgacggctgggcgagacaagaccaagaaaaatcccactcttcaaaaacacacacacgtaggcattctcagctagggagatccggcgccacaaagaagtggcgccgaactgtaaaaccaaccattttttatccttttttccttcagatttttatttttttggcaacacctatactagtataggaggaggagagaagacagcagactgacaggccctgattgggatgtaagataggctgcccgcctgaaagcaggctggcagctaggccgaataatcaatggatcgatcgctcgcggcaaagggccaaaaggaggcccccgggagagcgacccctctgtattgtttgttacacgtcaatgcagctggaaatggctttcttgtgg

SEQ ID NO: 12060 - protein, 478 aa, Triticum aestivum
  peptide (1)..(478): Ceres Seq. ID no. 14303628
  misc_feature (46)..(467): Pfam Name: Pfam Description:  Cytochrome P450
  misc_feature (39)..(474): NCBI GI NO: 18415271 NR Description: cytochrome P450 family [Arabidopsis thaliana]
  misc_feature (6)..(472): NCBI GI NO: 30694740 NR Description: cytochrome P450 family [Arabidopsis thaliana]
  misc_feature (39)..(443): NCBI GI NO: 7430728 NR Description: cytochrome P450 - Arabidopsis thaliana
  misc_feature (6)..(443): NCBI GI NO: 30694744 NR Description: cytochrome P450 family [Arabidopsis thaliana]
  misc_feature (10)..(471): NCBI GI NO: 18402179 NR Description: cytochrome P450, putative [Arabidopsis thaliana]
  misc_feature (43)..(470): NCBI GI NO: 15227033 NR Description: cytochrome p450 family [Arabidopsis thaliana]
  misc_feature (10)..(444): NCBI GI NO: 9294629 NR Description: cytochrome P450 [Arabidopsis thaliana]
  misc_feature (45)..(471): NCBI GI NO: 15225685 NR Description: ent-kaurenoic acid oxidase / cytochrome P450 CYP88A
  misc_feature (45)..(471): NCBI GI NO: 13021856 NR Description: ent-kaurenoic acid hydroxylase
  misc_feature (1)..(474): NCBI GI NO: 18419825 NR Description: rotundifolia3 (rot3) [Arabidopsis thaliana]
MAAFILFLCLLVPLVLACAVRARKGAAGRASSGGGGKKGGTSLPLPPGSMGWPYVGETTQLYSSKNPNVFFARKRNKYGPIFKTHILGCPCVMVSSPEAAKFVLVTQAHLFKPTFPASKERMLGPQAIFFQQGDYHAHLRRLVSRAFSPEAIRGSVPAIEAIALRSLGSWEDLQVNTFQEMKTYALNVALLSIFGEEEMQYIEELKQCYLTLEKGYNSMPVNLPGTLFHKAMKARKRLGAIVAHIISARRERERGSDLLGSFMDGREALTDDQIADNAIGVIFAARDTTASVLTWMVKFLGDNPAVLKAVTEEHAEIAREKALSGEPLSWADTRRMRMTGRVIQETMRVASILSFTFREAVEDVEYQGYLIPKGWKVLPLFRNIHHNPDHFPSPEKFDPSRFEVAPKPNTFMPFGNGTHSCPGNELAKLEMLVLCHHLATKYRWSTSKSESGVQFGPFALPINGLPMTFTRKDDKNKA

SEQ ID NO: 12061 - protein, 429 aa, Triticum aestivum
  peptide (1)..(429): Ceres Seq. ID no. 14303629
  misc_feature (1)..(418): Pfam Name: Pfam Description:  Cytochrome P450
  misc_feature (1)..(425): NCBI GI NO: 18415271 NR Description: cytochrome P450 family [Arabidopsis thaliana]
  misc_feature (1)..(423): NCBI GI NO: 30694740 NR Description: cytochrome P450 family [Arabidopsis thaliana]
  misc_feature (1)..(394): NCBI GI NO: 7430728 NR Description: cytochrome P450 - Arabidopsis thaliana
  misc_feature (1)..(394): NCBI GI NO: 30694744 NR Description: cytochrome P450 family [Arabidopsis thaliana]
  misc_feature (1)..(422): NCBI GI NO: 18402179 NR Description: cytochrome P450, putative [Arabidopsis thaliana]
  misc_feature (1)..(421): NCBI GI NO: 15227033 NR Description: cytochrome p450 family [Arabidopsis thaliana]
  misc_feature (1)..(395): NCBI GI NO: 9294629 NR Description: cytochrome P450 [Arabidopsis thaliana]
  misc_feature (1)..(422): NCBI GI NO: 15225685 NR Description: ent-kaurenoic acid oxidase / cytochrome P450 CYP88A
  misc_feature (1)..(422): NCBI GI NO: 13021856 NR Description: ent-kaurenoic acid hydroxylase
  misc_feature (1)..(425): NCBI GI NO: 18419825 NR Description: rotundifolia3 (rot3) [Arabidopsis thaliana]
MGWPYVGETTQLYSSKNPNVFFARKRNKYGPIFKTHILGCPCVMVSSPEAAKFVLVTQAHLFKPTFPASKERMLGPQAIFFQQGDYHAHLRRLVSRAFSPEAIRGSVPAIEAIALRSLGSWEDLQVNTFQEMKTYALNVALLSIFGEEEMQYIEELKQCYLTLEKGYNSMPVNLPGTLFHKAMKARKRLGAIVAHIISARRERERGSDLLGSFMDGREALTDDQIADNAIGVIFAARDTTASVLTWMVKFLGDNPAVLKAVTEEHAEIAREKALSGEPLSWADTRRMRMTGRVIQETMRVASILSFTFREAVEDVEYQGYLIPKGWKVLPLFRNIHHNPDHFPSPEKFDPSRFEVAPKPNTFMPFGNGTHSCPGNELAKLEMLVLCHHLATKYRWSTSKSESGVQFGPFALPINGLPMTFTRKDDKNKA

SEQ ID NO: 12062 - protein, 386 aa, Triticum aestivum
  peptide (1)..(386): Ceres Seq. ID no. 14303630
  misc_feature (1)..(375): Pfam Name: Pfam Description:  Cytochrome P450
  misc_feature (1)..(382): NCBI GI NO: 18415271 NR Description: cytochrome P450 family [Arabidopsis thaliana]
  misc_feature (1)..(380): NCBI GI NO: 30694740 NR Description: cytochrome P450 family [Arabidopsis thaliana]
  misc_feature (1)..(351): NCBI GI NO: 7430728 NR Description: cytochrome P450 - Arabidopsis thaliana
  misc_feature (1)..(351): NCBI GI NO: 30694744 NR Description: cytochrome P450 family [Arabidopsis thaliana]
  misc_feature (1)..(379): NCBI GI NO: 18402179 NR Description: cytochrome P450, putative [Arabidopsis thaliana]
  misc_feature (1)..(378): NCBI GI NO: 15227033 NR Description: cytochrome p450 family [Arabidopsis thaliana]
  misc_feature (1)..(352): NCBI GI NO: 9294629 NR Description: cytochrome P450 [Arabidopsis thaliana]
  misc_feature (1)..(379): NCBI GI NO: 15225685 NR Description: ent-kaurenoic acid oxidase / cytochrome P450 CYP88A
  misc_feature (1)..(379): NCBI GI NO: 13021856 NR Description: ent-kaurenoic acid hydroxylase
  misc_feature (1)..(382): NCBI GI NO: 18419825 NR Description: rotundifolia3 (rot3) [Arabidopsis thaliana]
MVSSPEAAKFVLVTQAHLFKPTFPASKERMLGPQAIFFQQGDYHAHLRRLVSRAFSPEAIRGSVPAIEAIALRSLGSWEDLQVNTFQEMKTYALNVALLSIFGEEEMQYIEELKQCYLTLEKGYNSMPVNLPGTLFHKAMKARKRLGAIVAHIISARRERERGSDLLGSFMDGREALTDDQIADNAIGVIFAARDTTASVLTWMVKFLGDNPAVLKAVTEEHAEIAREKALSGEPLSWADTRRMRMTGRVIQETMRVASILSFTFREAVEDVEYQGYLIPKGWKVLPLFRNIHHNPDHFPSPEKFDPSRFEVAPKPNTFMPFGNGTHSCPGNELAKLEMLVLCHHLATKYRWSTSKSESGVQFGPFALPINGLPMTFTRKDDKNKA

SEQ ID NO: 12063 - DNA, 1577 bp, Triticum aestivum
  misc_feature (1)..(1577): Ceres Seq. ID no. 13596512
ccttccccttctcctctccaactgctagatctagagtagccccgttaaagcccaaacaaaaaccccgccgcgagatctgcgcatctcgccacaccaccaccacgacggccatggcggcgccgcgcgtcctcctcctcctcgccgccgcggccatcctcgccgtcgcctccctcggggacgcttcgggcgagggcccccgcgggcgcaagctgctggtgctcgtcgacgatctggccgtccgctcatcccactcggccttcttcggctcgcttcaggcccgcgggctagatctggagttccgcctcgccgacgaccccaagctctcgctccaccgctacggtcagtacctctacgacggcctcgtcctcttcgccccatcgaccccgcgtttcggcggatcggtggaccagaatgctgttctggagtttatcgatgctgggcacgatatgattctggcagcagatcattcggcttcagatctgatccgcggcatcgcgacggagtgtggggttgactttgatgaggacccggaagcaatggttattgaccacatcaattatgcctccagtgaggttgaaggtgaccacaccttgattgctggcgatgacctgattcagtcagatgtgatattgggatccaaaaagattgaggctcctgttctgttccgagggattgcgcatgcggctaatccatccaacagcttggttttaaaggttctatctgcctcgccatcagcgtattcagcaaacccggaggctaagctggcatccgttccatctctcacagggtcggccatatcactggtttctgttatgcaggctaggaataatgctcgtgtgttaatatctggatcactggatttgtttagcaacaggttcctaaagtctggtgtgcagaaggctggcagcaaaatgagccatgacaaagctggaaatgaacaatttgtgacagagacgagcaaatgggtcttccatgagaggggtcatctgaaggcagtgaatgtgatgcaccataaggttggggagacaaatgagcctagcatgtaccgcatcaatgatgacttggaatactcagttgagatatatgaatggtctggtacaagttggaagccatatgttgctgatgatgttcagattcagtttttcatgatgagcccttatgttctgaaaaatatgtcaactgacaaatcggctgtatattcagcatccttcaaagttccagatgtttatggagttttccagttcaaggttgagtaccaaaggcttggatacactggcctctctcttgcaaagcagattccagtccgtccatacaggcatgacgagtatgagaggttcataacttcagcgtttccatactatgctgcctcattttcaacaatgggagccttcttcatattctcagttgcgtacctgtatcacaaatagatagctcatcaagtagtggaagtaaatcaaggcggtgatggaattgtgatgtcataagcatggtgatcttaggtgcaattttatggaaccatctttttgtagcgccaatctgtagtacctttatttttaagaaatgggcttctccctgcc

SEQ ID NO: 12064 - protein, 474 aa, Triticum aestivum
  peptide (1)..(474): Ceres Seq. ID no. 15221911
  misc_feature (61)..(474): Pfam Name: Pfam Description:  Dolichyl-diphosphooligosaccharide- proteinglycosyltransferase 48kD subunit
  misc_feature (37)..(474): NCBI GI NO: 38175467 NR Description: putative dolichyl-di-phosphooligosaccharide-protein
  misc_feature (61)..(474): NCBI GI NO: 18425101 NR Description: dolichyl-di-phosphooligosaccharide- proteinglycotransferase
  misc_feature (61)..(474): NCBI GI NO: 21553942 NR Description: dolichyl-di-phosphooligosaccharide- proteinglycotransferase
  misc_feature (61)..(474): NCBI GI NO: 14334506 NR Description: putative dolichyl-di-phosphooligosaccharide-proteinglycotransferase
  misc_feature (61)..(474): NCBI GI NO: 8843726 NR Description: dolichyl-di-phosphooligosaccharide- proteinglycotransferase
  misc_feature (39)..(474): NCBI GI NO: 27728696 NR Description: dolichyl-diphosphooligosaccharide-- proteinglycotransferase
  misc_feature (52)..(474): NCBI GI NO: 20070197 NR Description: dolichyl-diphosphooligosaccharide- proteinglycosyltransferase
  misc_feature (52)..(474): NCBI GI NO: 21104416 NR Description: dolichyl-diphosphooligosaccharide- proteinglycosyltransferase
  misc_feature (52)..(474): NCBI GI NO: 30584753 NR Description: Homo sapiens dolichyl-diphosphooligosaccharide- protein glycosyltransferase
  misc_feature (40)..(474): NCBI GI NO: 6681153 NR Description: dolichyl-di-phosphooligosaccharide- proteinglycotransferase
FPFSSPTARSRVAPLKPKQKPRREICASRHTTTTTAMAAPRVLLLLAAAAILAVASLGDASGEGPRGRKLLVLVDDLAVRSSHSAFFGSLQARGLDLEFRLADDPKLSLHRYGQYLYDGLVLFAPSTPRFGGSVDQNAVLEFIDAGHDMILAADHSASDLIRGIATECGVDFDEDPEAMVIDHINYASSEVEGDHTLIAGDDLIQSDVILGSKKIEAPVLFRGIAHAANPSNSLVLKVLSASPSAYSANPEAKLASVPSLTGSAISLVSVMQARNNARVLISGSLDLFSNRFLKSGVQKAGSKMSHDKAGNEQFVTETSKWVFHERGHLKAVNVMHHKVGETNEPSMYRINDDLEYSVEIYEWSGTSWKPYVADDVQIQFFMMSPYVLKNMSTDKSAVYSASFKVPDVYGVFQFKVEYQRLGYTGLSLAKQIPVRPYRHDEYERFITSAFPYYAASFSTMGAFFIFSVAYLYHK

SEQ ID NO: 12065 - protein, 438 aa, Triticum aestivum
  peptide (1)..(438): Ceres Seq. ID no. 15221912
  misc_feature (25)..(438): Pfam Name: Pfam Description:  Dolichyl-diphosphooligosaccharide- proteinglycosyltransferase 48kD subunit
  misc_feature (1)..(438): NCBI GI NO: 38175467 NR Description: putative dolichyl-di-phosphooligosaccharide-protein
  misc_feature (25)..(438): NCBI GI NO: 18425101 NR Description: dolichyl-di-phosphooligosaccharide- proteinglycotransferase
  misc_feature (25)..(438): NCBI GI NO: 21553942 NR Description: dolichyl-di-phosphooligosaccharide- proteinglycotransferase
  misc_feature (25)..(438): NCBI GI NO: 14334506 NR Description: putative dolichyl-di-phosphooligosaccharide-proteinglycotransferase
  misc_feature (25)..(438): NCBI GI NO: 8843726 NR Description: dolichyl-di-phosphooligosaccharide- proteinglycotransferase
  misc_feature (3)..(438): NCBI GI NO: 27728696 NR Description: dolichyl-diphosphooligosaccharide-- proteinglycotransferase
  misc_feature (16)..(438): NCBI GI NO: 20070197 NR Description: dolichyl-diphosphooligosaccharide- proteinglycosyltransferase
  misc_feature (16)..(438): NCBI GI NO: 21104416 NR Description: dolichyl-diphosphooligosaccharide- proteinglycosyltransferase
  misc_feature (16)..(438): NCBI GI NO: 30584753 NR Description: Homo sapiens dolichyl-diphosphooligosaccharide- protein glycosyltransferase
  misc_feature (4)..(438): NCBI GI NO: 6681153 NR Description: dolichyl-di-phosphooligosaccharide- proteinglycotransferase
MAAPRVLLLLAAAAILAVASLGDASGEGPRGRKLLVLVDDLAVRSSHSAFFGSLQARGLDLEFRLADDPKLSLHRYGQYLYDGLVLFAPSTPRFGGSVDQNAVLEFIDAGHDMILAADHSASDLIRGIATECGVDFDEDPEAMVIDHINYASSEVEGDHTLIAGDDLIQSDVILGSKKIEAPVLFRGIAHAANPSNSLVLKVLSASPSAYSANPEAKLASVPSLTGSAISLVSVMQARNNARVLISGSLDLFSNRFLKSGVQKAGSKMSHDKAGNEQFVTETSKWVFHERGHLKAVNVMHHKVGETNEPSMYRINDDLEYSVEIYEWSGTSWKPYVADDVQIQFFMMSPYVLKNMSTDKSAVYSASFKVPDVYGVFQFKVEYQRLGYTGLSLAKQIPVRPYRHDEYERFITSAFPYYAASFSTMGAFFIFSVAYLYHK

SEQ ID NO: 12066 - protein, 326 aa, Triticum aestivum
  peptide (1)..(326): Ceres Seq. ID no. 15221913
  misc_feature (1)..(326): Pfam Name: Pfam Description:  Dolichyl-diphosphooligosaccharide- proteinglycosyltransferase 48kD subunit
  misc_feature (1)..(326): NCBI GI NO: 38175467 NR Description: putative dolichyl-di-phosphooligosaccharide-protein
  misc_feature (1)..(326): NCBI GI NO: 18425101 NR Description: dolichyl-di-phosphooligosaccharide- proteinglycotransferase
  misc_feature (1)..(326): NCBI GI NO: 21553942 NR Description: dolichyl-di-phosphooligosaccharide- proteinglycotransferase
  misc_feature (1)..(326): NCBI GI NO: 14334506 NR Description: putative dolichyl-di-phosphooligosaccharide-proteinglycotransferase
  misc_feature (1)..(326): NCBI GI NO: 8843726 NR Description: dolichyl-di-phosphooligosaccharide- proteinglycotransferase
  misc_feature (1)..(326): NCBI GI NO: 27728696 NR Description: dolichyl-diphosphooligosaccharide-- proteinglycotransferase
  misc_feature (1)..(326): NCBI GI NO: 20070197 NR Description: dolichyl-diphosphooligosaccharide- proteinglycosyltransferase
  misc_feature (1)..(326): NCBI GI NO: 21104416 NR Description: dolichyl-diphosphooligosaccharide- proteinglycosyltransferase
  misc_feature (1)..(326): NCBI GI NO: 30584753 NR Description: Homo sapiens dolichyl-diphosphooligosaccharide- protein glycosyltransferase
  misc_feature (1)..(326): NCBI GI NO: 6681153 NR Description: dolichyl-di-phosphooligosaccharide- proteinglycotransferase
MILAADHSASDLIRGIATECGVDFDEDPEAMVIDHINYASSEVEGDHTLIAGDDLIQSDVILGSKKIEAPVLFRGIAHAANPSNSLVLKVLSASPSAYSANPEAKLASVPSLTGSAISLVSVMQARNNARVLISGSLDLFSNRFLKSGVQKAGSKMSHDKAGNEQFVTETSKWVFHERGHLKAVNVMHHKVGETNEPSMYRINDDLEYSVEIYEWSGTSWKPYVADDVQIQFFMMSPYVLKNMSTDKSAVYSASFKVPDVYGVFQFKVEYQRLGYTGLSLAKQIPVRPYRHDEYERFITSAFPYYAASFSTMGAFFIFSVAYLYHK

SEQ ID NO: 12067 - DNA, 613 bp, Triticum aestivum
  misc_feature (1)..(613): Ceres Seq. ID no. 13654722
  misc_feature (578)..(578): n is a, c, t, g, unknown, or other
  misc_feature (579)..(579): n is a, c, t, g, unknown, or other
  misc_feature (577)..(577): n is a, c, t, g, unknown, or other
  misc_feature (581)..(581): n is a, c, t, g, unknown, or other
acaataaccacaaccacagccagcaagatctagtcaaagaaacacatcaatccagagcgtccaccagagtcactaacttgtccagccgcagcaatggcggtgcggtggccatcgcccgccgtggccgcgttgtggatcggcgcgagcctcctagtcctgtgcacgctcatggcgtcgtcggcgtcagcccaggcgccgccgccacaggtgcgtaaggtgcccaagggcagcaacctggtggtgatcaagccgggggtcgggaagcgcaacagcaagttcacctgcaccgacaccaagaagaagcggcccgggtgcgaggccacctgccccagccgctgccccaaagagtgcctcgtcctctgcccatcctgcatgaccttctgcctgtgtgacttctacgcgggggcgtcgtgcggcgacccgcgcttcaccggcggcgacggcaacaacttctacttccacggcaagaagaaccaggacttctgcatcctctccgacgacgacctccacatcaacgcgcacttcatcggcaaccacaaccccgcgacgagccgcgacttcacctggatccaggccnnngntgtcatgttcgcccaccaccgcctccacctcg

SEQ ID NO: 12068 - protein, 173 aa, Triticum aestivum
  peptide (1)..(173): Ceres Seq. ID no. 13654723
  misc_feature (9)..(172): NCBI GI NO: 34905936 NR Description: similar to root cap protein
  misc_feature (16)..(172): NCBI GI NO: 34905930 NR Description: similar to root cap protein
  misc_feature (20)..(172): NCBI GI NO: 4514635 NR Description: root cap protein 1 [Zea mays]
  misc_feature (9)..(172): NCBI GI NO: 34905940 NR Description: similar to root cap protein
  misc_feature (15)..(172): NCBI GI NO: 34905934 NR Description: similar to root cap protein
  misc_feature (8)..(172): NCBI GI NO: 21741738 NR Description: OSJNBa0073L04.18
  misc_feature (15)..(172): NCBI GI NO: 4514637 NR Description: root cap protein 2 [Zea mays]
  misc_feature (36)..(172): NCBI GI NO: 30685319 NR Description: late embryogenesis abundant protein -related
  misc_feature (36)..(172): NCBI GI NO: 11994465 NR Description: contains similarity to late embryogenesis abundantprotein~gene_id:MLD14
  misc_feature (49)..(170): NCBI GI NO: 7484468 NR Description: late embryonic abundant protein EMB7
  misc_feature (162)..(162): Xaa is any aa, unknown or other
  misc_feature (163)..(163): Xaa is any aa, unknown or other
MAVRWPSPAVAALWIGASLLVLCTLMASSASAQAPPPQVRKVPKGSNLVVIKPGVGKRNSKFTCTDTKKKRPGCEATCPSRCPKECLVLCPSCMTFCLCDFYAGASCGDPRFTGGDGNNFYFHGKKNQDFCILSDDDLHINAHFIGNHNPATSRDFTWIQAXXVMFAHHRLHL

SEQ ID NO: 12069 - protein, 148 aa, Triticum aestivum
  peptide (1)..(148): Ceres Seq. ID no. 13654724
  misc_feature (1)..(147): NCBI GI NO: 34905936 NR Description: similar to root cap protein
  misc_feature (1)..(147): NCBI GI NO: 34905930 NR Description: similar to root cap protein
  misc_feature (1)..(147): NCBI GI NO: 4514635 NR Description: root cap protein 1 [Zea mays]
  misc_feature (1)..(147): NCBI GI NO: 34905940 NR Description: similar to root cap protein
  misc_feature (1)..(147): NCBI GI NO: 34905934 NR Description: similar to root cap protein
  misc_feature (1)..(147): NCBI GI NO: 21741738 NR Description: OSJNBa0073L04.18
  misc_feature (1)..(147): NCBI GI NO: 4514637 NR Description: root cap protein 2 [Zea mays]
  misc_feature (11)..(147): NCBI GI NO: 30685319 NR Description: late embryogenesis abundant protein -related
  misc_feature (11)..(147): NCBI GI NO: 11994465 NR Description: contains similarity to late embryogenesis abundantprotein~gene_id:MLD14
  misc_feature (24)..(145): NCBI GI NO: 7484468 NR Description: late embryonic abundant protein EMB7
  misc_feature (137)..(137): Xaa is any aa, unknown or other
  misc_feature (138)..(138): Xaa is any aa, unknown or other
MASSASAQAPPPQVRKVPKGSNLVVIKPGVGKRNSKFTCTDTKKKRPGCEATCPSRCPKECLVLCPSCMTFCLCDFYAGASCGDPRFTGGDGNNFYFHGKKNQDFCILSDDDLHINAHFIGNHNPATSRDFTWIQAXXVMFAHHRLHL

SEQ ID NO: 12070 - DNA, 1074 bp, Triticum aestivum
  misc_feature (1)..(1074): Ceres Seq. ID no. 13582893
aaacataccacgcctccccgccaccttcggaacgccacagcgcacagcccatccccatccccatccaccaccgcgcgctctccgacggccatcgaacgccatggcgctcctcctcccccgcacggcgcggctcgcgctcctctccgccggccctcgagcctactcctccaccgtcggcgcggcgggaacagcggcgccggcgccgtacggtggcggggcgcccgcgccggcgccgatgccgaaggccgcggagttcgtggtgtccaaggtggacgatctgatgaactgggcccggcggggctcgatctggcccatgacgttcggcctcgcgtgctgcgccgtggagatgatgcacgccggcgccgcccgctacgacttcgaccgcttcggcgtcatcttccgcccctcgccgcgccagtccgactgcatgatcgtcgccggcacgctcaccaacaagatggcgcccgcgctccgcaaggtttatgaccagatgccagagcctcggtgggtgatctcgatgggcagctgcgccaatggcggcggatactaccactactcatactccgtcgtgcgtgggtgcgaccggatcgttcccgtggacatctacgtccctgggtgccctccaacagctgaagctctcctgtatggcgttctccagttgcagaagaagatcaacaggcgcaaggatttccttcactggtgggagaagtgaattagcactttggaccatcaggttcatgaggatgcagctcttctacgtattgttgggacgttgggttctttcgtttctgtttggtggaataagcgaagcatgtgcttcctggtccgtggtaattggtaagtaagtagcttgtgtcttgtgtgtgctgggtgggttcctaccttgcttcacaggccatgaaaaagctacgtactggtggttgtggttgaacaggtgatgcttatggtttaccccagtctgtactggtatattgtatatctgtacagtacatgctggtggttgaacagttgatgcttctggaattgtatgtgttctatgcaattgtgataatgtacactgttggggttgtgtgt

SEQ ID NO: 12071 - protein, 236 aa, Triticum aestivum
  peptide (1)..(236): Ceres Seq. ID no. 13582894
  misc_feature (114)..(221): Pfam Name: Pfam Description:  NADH ubiquinone oxidoreductase, 20 Kd subunit
  misc_feature (37)..(236): NCBI GI NO: 34910678 NR Description: putative NADH dehydrogenase
  misc_feature (28)..(236): NCBI GI NO: 1171866 NR Description: NADH-ubiquinone oxidoreductase 20 kDa subunit
  misc_feature (28)..(236): NCBI GI NO: 15239782 NR Description: NADH dehydrogenase (ubiquinone)
  misc_feature (34)..(236): NCBI GI NO: 11277624 NR Description: NADH2 dehydrogenase (ubiquinone) (EC 1
  misc_feature (26)..(236): NCBI GI NO: 9652180 NR Description: NADH-ubiquinone oxidoreductase subunit PSST
  misc_feature (65)..(236): NCBI GI NO: 9652190 NR Description: NADH-ubiquinone oxidoreductase subunit PSST
  misc_feature (35)..(234): NCBI GI NO: 2499328 NR Description: NADH-ubiquinone oxidoreductase 20 kDa subunit
  misc_feature (26)..(236): NCBI GI NO: 34862315 NR Description: similar to NADH dehydrogenase
  misc_feature (76)..(236): NCBI GI NO: 34328788 NR Description: NADH:ubiquinone oxidoreductase subunit 10
  misc_feature (79)..(236): NCBI GI NO: 11466592 NR Description: NADH dehydrogenase subunit 10 [Rhodomonas salina]
NIPRLPATFGTPQRTAHPHPHPPPRALRRPSNAMALLLPRTARLALLSAGPRAYSSTVGAAGTAAPAPYGGGAPAPAPMPKAAEFVVSKVDDLMNWARRGSIWPMTFGLACCAVEMMHAGAARYDFDRFGVIFRPSPRQSDCMIVAGTLTNKMAPALRKVYDQMPEPRWVISMGSCANGGGYYHYSYSVVRGCDRIVPVDIYVPGCPPTAEALLYGVLQLQKKINRRKDFLHWWEK

SEQ ID NO: 12072 - protein, 203 aa, Triticum aestivum
  peptide (1)..(203): Ceres Seq. ID no. 13582895
  misc_feature (81)..(188): Pfam Name: Pfam Description:  NADH ubiquinone oxidoreductase, 20 Kd subunit
  misc_feature (4)..(203): NCBI GI NO: 34910678 NR Description: putative NADH dehydrogenase
  misc_feature (1)..(203): NCBI GI NO: 1171866 NR Description: NADH-ubiquinone oxidoreductase 20 kDa subunit
  misc_feature (1)..(203): NCBI GI NO: 15239782 NR Description: NADH dehydrogenase (ubiquinone)
  misc_feature (1)..(203): NCBI GI NO: 11277624 NR Description: NADH2 dehydrogenase (ubiquinone) (EC 1
  misc_feature (1)..(203): NCBI GI NO: 9652180 NR Description: NADH-ubiquinone oxidoreductase subunit PSST
  misc_feature (32)..(203): NCBI GI NO: 9652190 NR Description: NADH-ubiquinone oxidoreductase subunit PSST
  misc_feature (2)..(201): NCBI GI NO: 2499328 NR Description: NADH-ubiquinone oxidoreductase 20 kDa subunit
  misc_feature (1)..(203): NCBI GI NO: 34862315 NR Description: similar to NADH dehydrogenase
  misc_feature (43)..(203): NCBI GI NO: 34328788 NR Description: NADH:ubiquinone oxidoreductase subunit 10
  misc_feature (46)..(203): NCBI GI NO: 11466592 NR Description: NADH dehydrogenase subunit 10 [Rhodomonas salina]
MALLLPRTARLALLSAGPRAYSSTVGAAGTAAPAPYGGGAPAPAPMPKAAEFVVSKVDDLMNWARRGSIWPMTFGLACCAVEMMHAGAARYDFDRFGVIFRPSPRQSDCMIVAGTLTNKMAPALRKVYDQMPEPRWVISMGSCANGGGYYHYSYSVVRGCDRIVPVDIYVPGCPPTAEALLYGVLQLQKKINRRKDFLHWWEK

SEQ ID NO: 12073 - protein, 161 aa, Triticum aestivum
  peptide (1)..(161): Ceres Seq. ID no. 13582896
KHTTPPRHLRNATAHSPSPSPSTTARSPTAIERHGAPPPPHGAARAPLRRPSSLLLHRRRGGNSGAGAVRWRGARAGADAEGRGVRGVQGGRSDELGPAGLDLAHDVRPRVLRRGDDARRRRPLRLRPLRRHLPPLAAPVRLHDRRRHAHQQDGARAPQGL

SEQ ID NO: 12074 - DNA, 1712 bp, Triticum aestivum
  misc_feature (1)..(1712): Ceres Seq. ID no. 15169670
tttccttcttctccccaccccgcgcggcgcctcctctcctctcttcccctcccccctcgccgccgccgccgccgccagcgcctcctccaccaccgctcgtcctcctatacacaggtgcggaggaggagatgttggtgctcttcgagacgcccgcggggttcgccctcttcaaggtgctggacgaggggaagctcagcagcgtcgaggatctgtggaaggactttgcctcgtcggacaaagcaaggaaggtggttgagctgaaggctttcaacaagtttgaaaatacttctgatgctctttcagccgcaactttgctgattgatagcaagcccagcaagggtctgcgcaagttcctgcagaagcactgtgatggtgaaacattggctgttgctgattccaaacttgggaatgccatcaaagaaaagctgcaaattgattgccttcacaactctgctgttatggaactgatgagagggctgaggaaccagctcactgaacttatgtctggactagctgagcatgatctaggtccaatgagcctaggattgtcccacagcttgtctaggtataaactcaagttcagccctgaaaaggttgatactatgatcattcaggccattggcttgttggatgatcttgacaaggagcttaacacttacgctatgagggtccgtgaatggtacggttggcactttccggagctcacaaaaattgttgcagataacatccattatgcgaaagctgtgaagatgatgggcaatcgtgttaatgcagttaaccttgacttctctgagatacttccagaagaagtggaagcagagctgaaggaggcagctgtaatttccatgggaacagaagtcaatgatcttgacctctcaaacattagggaactgtgtgatcaagtcctggctctttctgagtacagagcccagctctatgactatctaaaaagtagaatgaataccattgctcccaacttgactgcacttgttggtgaacttgttggcgctcgccttatttcccatggtggtagtttgatgaatctggcgaagcagcctggcagcacgattcagattctgggggcagagaaggccttattcagagctctgaagacaaagcatgctacaccaaagtatggtctcatctatcatgcatcattaattggacaggcggctcccaagcacaagggaaagatctctcgttcgcttgctgctaagagtgcacttgccataagatatgacgcccttgctgacggtgacgataactccatgggtcttgaaagcaggatcaagcttgaaacacggctccgagttcttgagggtaaagaacttgggaggtctgctggttctacgaaaggaaagcccaagatagaagcgtatgaaaaggaccggaagggtggtggtgctctgatcactcccgctaaaacttacaactcagcagcagatcttgtgcttggacaaaccactgaagaaacgccaaagaagtcagaagttgcttcaaagaagaggaagcaccaagaggaagaacctactgcggaggcagctgaagaggatggcgagcaggagaaagagaagtccaagaagaagaagaagaaatccaaggacatcgaggagacccccgcagccgtcaccgacgctagcgagaagaagaagaaaaagaagagcaaggaggccgaggagacccctgcagccgacgccgacggcgagaagaag

SEQ ID NO: 12075 - protein, 570 aa, Triticum aestivum
  peptide (1)..(570): Ceres Seq. ID no. 15169671
  misc_feature (293)..(441): Pfam Name: Pfam Description:  Putative snoRNA binding domain
  misc_feature (43)..(521): NCBI GI NO: 3288883 NR Description: SAR DNA binding protein [Oryza sativa]
  misc_feature (43)..(569): NCBI GI NO: 13623892 NR Description: MAR-binding protein [Nicotiana tabacum]
  misc_feature (43)..(569): NCBI GI NO: 7451353 NR Description: SAR DNA-binding protein-1 - garden pea
  misc_feature (43)..(569): NCBI GI NO: 7451352 NR Description: SAR DNA-binding protein 2 - garden pea
  misc_feature (43)..(569): NCBI GI NO: 15229884 NR Description: SAR DNA-binding protein, putative
  misc_feature (43)..(569): NCBI GI NO: 33945887 NR Description: SAR DNA-binding protein-like protein
  misc_feature (43)..(569): NCBI GI NO: 15240445 NR Description: SAR DNA-binding protein, putative
  misc_feature (43)..(474): NCBI GI NO: 2811028 NR Description: Hypothetical protein At5g27120
  misc_feature (43)..(464): NCBI GI NO: 25083410 NR Description: SAR DNA-binding protein - like
  misc_feature (43)..(561): NCBI GI NO: 39794520 NR Description: Unknown (protein for MGC:75641)
SFFSPPRAAPPLLSSPPPSPPPPPPAPPPPPLVLLYTGAEEEMLVLFETPAGFALFKVLDEGKLSSVEDLWKDFASSDKARKVVELKAFNKFENTSDALSAATLLIDSKPSKGLRKFLQKHCDGETLAVADSKLGNAIKEKLQIDCLHNSAVMELMRGLRNQLTELMSGLAEHDLGPMSLGLSHSLSRYKLKFSPEKVDTMIIQAIGLLDDLDKELNTYAMRVREWYGWHFPELTKIVADNIHYAKAVKMMGNRVNAVNLDFSEILPEEVEAELKEAAVISMGTEVNDLDLSNIRELCDQVLALSEYRAQLYDYLKSRMNTIAPNLTALVGELVGARLISHGGSLMNLAKQPGSTIQILGAEKALFRALKTKHATPKYGLIYHASLIGQAAPKHKGKISRSLAAKSALAIRYDALADGDDNSMGLESRIKLETRLRVLEGKELGRSAGSTKGKPKIEAYEKDRKGGGALITPAKTYNSAADLVLGQTTEETPKKSEVASKKRKHQEEEPTAEAAEEDGEQEKEKSKKKKKKSKDIEETPAAVTDASEKKKKKKSKEAEETPAADADGEKK

SEQ ID NO: 12076 - protein, 528 aa, Triticum aestivum
  peptide (1)..(528): Ceres Seq. ID no. 15169672
  misc_feature (251)..(399): Pfam Name: Pfam Description:  Putative snoRNA binding domain
  misc_feature (1)..(479): NCBI GI NO: 3288883 NR Description: SAR DNA binding protein [Oryza sativa]
  misc_feature (1)..(527): NCBI GI NO: 13623892 NR Description: MAR-binding protein [Nicotiana tabacum]
  misc_feature (1)..(527): NCBI GI NO: 7451353 NR Description: SAR DNA-binding protein-1 - garden pea
  misc_feature (1)..(527): NCBI GI NO: 7451352 NR Description: SAR DNA-binding protein 2 - garden pea
  misc_feature (1)..(527): NCBI GI NO: 15229884 NR Description: SAR DNA-binding protein, putative
  misc_feature (1)..(527): NCBI GI NO: 33945887 NR Description: SAR DNA-binding protein-like protein
  misc_feature (1)..(527): NCBI GI NO: 15240445 NR Description: SAR DNA-binding protein, putative
  misc_feature (1)..(432): NCBI GI NO: 2811028 NR Description: Hypothetical protein At5g27120
  misc_feature (1)..(422): NCBI GI NO: 25083410 NR Description: SAR DNA-binding protein - like
  misc_feature (1)..(519): NCBI GI NO: 39794520 NR Description: Unknown (protein for MGC:75641)
MLVLFETPAGFALFKVLDEGKLSSVEDLWKDFASSDKARKVVELKAFNKFENTSDALSAATLLIDSKPSKGLRKFLQKHCDGETLAVADSKLGNAIKEKLQIDCLHNSAVMELMRGLRNQLTELMSGLAEHDLGPMSLGLSHSLSRYKLKFSPEKVDTMIIQAIGLLDDLDKELNTYAMRVREWYGWHFPELTKIVADNIHYAKAVKMMGNRVNAVNLDFSEILPEEVEAELKEAAVISMGTEVNDLDLSNIRELCDQVLALSEYRAQLYDYLKSRMNTIAPNLTALVGELVGARLISHGGSLMNLAKQPGSTIQILGAEKALFRALKTKHATPKYGLIYHASLIGQAAPKHKGKISRSLAAKSALAIRYDALADGDDNSMGLESRIKLETRLRVLEGKELGRSAGSTKGKPKIEAYEKDRKGGGALITPAKTYNSAADLVLGQTTEETPKKSEVASKKRKHQEEEPTAEAAEEDGEQEKEKSKKKKKKSKDIEETPAAVTDASEKKKKKKSKEAEETPAADADGEKK

SEQ ID NO: 12077 - protein, 418 aa, Triticum aestivum
  peptide (1)..(418): Ceres Seq. ID no. 15169673
  misc_feature (141)..(289): Pfam Name: Pfam Description:  Putative snoRNA binding domain
  misc_feature (1)..(369): NCBI GI NO: 3288883 NR Description: SAR DNA binding protein [Oryza sativa]
  misc_feature (1)..(417): NCBI GI NO: 13623892 NR Description: MAR-binding protein [Nicotiana tabacum]
  misc_feature (1)..(417): NCBI GI NO: 7451353 NR Description: SAR DNA-binding protein-1 - garden pea
  misc_feature (1)..(417): NCBI GI NO: 7451352 NR Description: SAR DNA-binding protein 2 - garden pea
  misc_feature (1)..(417): NCBI GI NO: 15229884 NR Description: SAR DNA-binding protein, putative
  misc_feature (1)..(417): NCBI GI NO: 33945887 NR Description: SAR DNA-binding protein-like protein
  misc_feature (1)..(417): NCBI GI NO: 15240445 NR Description: SAR DNA-binding protein, putative
  misc_feature (1)..(322): NCBI GI NO: 2811028 NR Description: Hypothetical protein At5g27120
  misc_feature (1)..(312): NCBI GI NO: 25083410 NR Description: SAR DNA-binding protein - like
  misc_feature (1)..(409): NCBI GI NO: 39794520 NR Description: Unknown (protein for MGC:75641)
MELMRGLRNQLTELMSGLAEHDLGPMSLGLSHSLSRYKLKFSPEKVDTMIIQAIGLLDDLDKELNTYAMRVREWYGWHFPELTKIVADNIHYAKAVKMMGNRVNAVNLDFSEILPEEVEAELKEAAVISMGTEVNDLDLSNIRELCDQVLALSEYRAQLYDYLKSRMNTIAPNLTALVGELVGARLISHGGSLMNLAKQPGSTIQILGAEKALFRALKTKHATPKYGLIYHASLIGQAAPKHKGKISRSLAAKSALAIRYDALADGDDNSMGLESRIKLETRLRVLEGKELGRSAGSTKGKPKIEAYEKDRKGGGALITPAKTYNSAADLVLGQTTEETPKKSEVASKKRKHQEEEPTAEAAEEDGEQEKEKSKKKKKKSKDIEETPAAVTDASEKKKKKKSKEAEETPAADADGEKK

SEQ ID NO: 12078 - DNA, 1470 bp, Triticum aestivum
  misc_feature (1)..(1470): Ceres Seq. ID no. 12613795
agcggcgttccagtgtgtgtgtgtcacccacgacacgacgcctcccctaaacctccgcgtcgccattcccccctccagcccgccgcgatggccggaggcggcggcaagccgttcggggacaacgtgttcgccggccacgcggccgccggcgccgcggcgatcagcgcctccgcggtcgccgtccaccccctcgacaccgtcaagagcctcctccagttgagcgcggcggggcagaagcagaagatggagatccgccatgcggtggaccggctcatgcacgtctccggccctgcaggtctttacagtggcattggatggtcaatattaggtaaactgcctggtttgggagcgcgttttgggacctatgagcttttaacagccttctataaagatggcagggaggacaaccatgttaattattctgaggcaatgttggctggcataactgctggtgctgtagaggcatttgtgtgcacaccatttgaacttctcaaacttcggtcccaagttggttctgccatacctatgaaagctacgaaccctgctaatgttgtacaggagtcgtttccactgctttccaagctattacctggtcatgtccctgacatgagagtatggaatggcagtgtcagtctgttgtccaatctttccccaaagcatcctgacatgatgggtgccctgaaacagcacccatggatgctgactggctctgggaagcccccgttaccctctgatgttcaggtgccttcgagagtgatagcacttgaaggatggggtgctttatggagaggacttaggccaggggtagcccgagactgtgtctttagtggaatgttcttttcttgttggcaattcatacatacagcgatgcttacttggtagtctgttaacatgaaccctgaacccaggaatttagaagaagcaggtcctgtaccccctttagcttctagtcttgctgcaggcttctctggagttgtagcagctgctgcttcacatacttttgatactgccaaaagtcgttcacagtgcactgtgatacctaagtatatagcaatggagaggaggtttcttaaatggagagcaccaggaatgtggatagagagagtgacgggaacatcacctgctgataggaatgttctatttcgtggcattggactacggatggcgcgcagtggaatcgcatcttttgtacttgttgggtcctactatttagccgtagatcagctcttgtagatggcagtcagagaaatcattaatgaaattcaaacacctaaactatgtggtacctttttcgtctgaacaaccagagaagaggtaactatgtggtaactttttcgtctcttccagtcttaattggagttgagtgctccaggatagaattttggttactaatgtaaatgtttataacaaacagaattgaaggttcgcctttggttttgttgcttgtgttgaagagatattaagtgtttt

SEQ ID NO: 12079 - protein, 293 aa, Triticum aestivum
  peptide (1)..(293): Ceres Seq. ID no. 12613796
  misc_feature (35)..(293): NCBI GI NO: 38344448 NR Description: OSJNBa0038O10.20
  misc_feature (43)..(293): NCBI GI NO: 18414359 NR Description: mitochondrial carrier protein family
  misc_feature (131)..(293): NCBI GI NO: 25343854 NR Description: hypothetical protein dl3547c
  misc_feature (91)..(140): NCBI GI NO: 25343854 NR Description: hypothetical protein dl3547c
  misc_feature (43)..(85): NCBI GI NO: 25343854 NR Description: hypothetical protein dl3547c
  misc_feature (131)..(275): NCBI GI NO: 7485091 NR Description: hypothetical protein - Arabidopsis thaliana
  misc_feature (91)..(140): NCBI GI NO: 7485091 NR Description: hypothetical protein - Arabidopsis thaliana
  misc_feature (43)..(85): NCBI GI NO: 7485091 NR Description: hypothetical protein - Arabidopsis thaliana
  misc_feature (49)..(177): NCBI GI NO: 3378495 NR Description: Mitochondrial carrier protein [Ribes nigrum]
  misc_feature (37)..(169): NCBI GI NO: 40746736 NR Description: hypothetical protein AN1299.2
SGVPVCVCHPRHDASPKPPRRHSPLQPAAMAGGGGKPFGDNVFAGHAAAGAAAISASAVAVHPLDTVKSLLQLSAAGQKQKMEIRHAVDRLMHVSGPAGLYSGIGWSILGKLPGLGARFGTYELLTAFYKDGREDNHVNYSEAMLAGITAGAVEAFVCTPFELLKLRSQVGSAIPMKATNPANVVQESFPLLSKLLPGHVPDMRVWNGSVSLLSNLSPKHPDMMGALKQHPWMLTGSGKPPLPSDVQVPSRVIALEGWGALWRGLRPGVARDCVFSGMFFSCWQFIHTAMLTW

SEQ ID NO: 12080 - protein, 264 aa, Triticum aestivum
  peptide (1)..(264): Ceres Seq. ID no. 12613797
  misc_feature (6)..(264): NCBI GI NO: 38344448 NR Description: OSJNBa0038O10.20
  misc_feature (14)..(264): NCBI GI NO: 18414359 NR Description: mitochondrial carrier protein family
  misc_feature (102)..(264): NCBI GI NO: 25343854 NR Description: hypothetical protein dl3547c
  misc_feature (62)..(111): NCBI GI NO: 25343854 NR Description: hypothetical protein dl3547c
  misc_feature (14)..(56): NCBI GI NO: 25343854 NR Description: hypothetical protein dl3547c
  misc_feature (102)..(246): NCBI GI NO: 7485091 NR Description: hypothetical protein - Arabidopsis thaliana
  misc_feature (62)..(111): NCBI GI NO: 7485091 NR Description: hypothetical protein - Arabidopsis thaliana
  misc_feature (14)..(56): NCBI GI NO: 7485091 NR Description: hypothetical protein - Arabidopsis thaliana
  misc_feature (20)..(148): NCBI GI NO: 3378495 NR Description: Mitochondrial carrier protein [Ribes nigrum]
  misc_feature (8)..(140): NCBI GI NO: 40746736 NR Description: hypothetical protein AN1299.2
MAGGGGKPFGDNVFAGHAAAGAAAISASAVAVHPLDTVKSLLQLSAAGQKQKMEIRHAVDRLMHVSGPAGLYSGIGWSILGKLPGLGARFGTYELLTAFYKDGREDNHVNYSEAMLAGITAGAVEAFVCTPFELLKLRSQVGSAIPMKATNPANVVQESFPLLSKLLPGHVPDMRVWNGSVSLLSNLSPKHPDMMGALKQHPWMLTGSGKPPLPSDVQVPSRVIALEGWGALWRGLRPGVARDCVFSGMFFSCWQFIHTAMLTW

SEQ ID NO: 12081 - protein, 212 aa, Triticum aestivum
  peptide (1)..(212): Ceres Seq. ID no. 12613798
  misc_feature (1)..(212): NCBI GI NO: 38344448 NR Description: OSJNBa0038O10.20
  misc_feature (1)..(212): NCBI GI NO: 18414359 NR Description: mitochondrial carrier protein family
  misc_feature (50)..(212): NCBI GI NO: 25343854 NR Description: hypothetical protein dl3547c
  misc_feature (10)..(59): NCBI GI NO: 25343854 NR Description: hypothetical protein dl3547c
  misc_feature (50)..(194): NCBI GI NO: 7485091 NR Description: hypothetical protein - Arabidopsis thaliana
  misc_feature (10)..(59): NCBI GI NO: 7485091 NR Description: hypothetical protein - Arabidopsis thaliana
  misc_feature (1)..(96): NCBI GI NO: 3378495 NR Description: Mitochondrial carrier protein [Ribes nigrum]
  misc_feature (1)..(88): NCBI GI NO: 40746736 NR Description: hypothetical protein AN1299.2
  misc_feature (1)..(103): NCBI GI NO: 21358457 NR Description: CG1907-PA [Drosophila melanogaster]
  misc_feature (1)..(137): NCBI GI NO: 28193150 NR Description: unnamed protein product [Homo sapiens]
MEIRHAVDRLMHVSGPAGLYSGIGWSILGKLPGLGARFGTYELLTAFYKDGREDNHVNYSEAMLAGITAGAVEAFVCTPFELLKLRSQVGSAIPMKATNPANVVQESFPLLSKLLPGHVPDMRVWNGSVSLLSNLSPKHPDMMGALKQHPWMLTGSGKPPLPSDVQVPSRVIALEGWGALWRGLRPGVARDCVFSGMFFSCWQFIHTAMLTW

SEQ ID NO: 12082 - DNA, 1597 bp, Triticum aestivum
  misc_feature (1)..(1597): Ceres Seq. ID no. 14302251
acgcaagtgcaccgaacgacggtcgtcgtggcctgttcgggctcgcaaatccccacacgccactcctcctcgtccccgtagaaaaggacacgcgtagccttcgtccacggctccacgaggcagaggcagcagccgcggcactcgagcaagcaagcttttgtactctgctccagtcatccgtcgtctccctttccgccgagatgcagcgccggctcccggcgctcctccgccgcgcagcgggcgcggggcccgcgcgccggtggctctccgcctcgtcctccctcctcttcgacgacacccaggagcagttcaaggagagcgtgcaccggttcgcgcaggagcacatcgcgccgcacgccgccgccatcgacgcctccaaccacttccccaaggagaagaatctgtggaagctcatgggggacttcaacctgcacggcctcacctcgccagaggagtacggagggctcgggctcggttacatgtaccactgcatcgccatggaggagatcagcagggcgtccgggtcggtcggcctttcctacggtgcacactcaaatctctgcatcaaccagctggtccgtcatggcagccctgcccaaaaggaaaagtatttgccgaagcttatcagtggggagcatattggggcattggcgatgagtgaaccaaactctggctctgatgttgtcagtatgaagtgcaaagctgagaaagtagatggcggctatgtcattaacgggaacaagatgtggtgcacaaatggtccgtctgctcagacattggttgtttacgcgaaaacagatataactgctggatcgaaaggaataactgcattcataattgagaagggaatgcccgggttcagtactgcccagaagttggacaaacttggcatgcgaggaagtgacacatgtgagcttgtctttgagaactgctttgtgcctcaagagaatgttcttggtgaagaagggaaaggtgtttatgtcatgatgtctggtcttgatctggaaagacttgtattagctgggggccctattgggctcatgcaggcatgccttgatgttgttcttccttatgttcgacaaagggagcaatttggccgtccgattggtgaatttcagttcttacaggggaaaatggcagatatgtacacctccttgcaatcatcaagatcatttgtatactcagttgccagggactgtgataatggcaaagttgaccgtaaggattgtgcaggagtgatcctctttgctgctgaaagggcaacacaagttgcacttgaggcaatccagtgtcttggtggcaatggatacataaatgagtacccaactggccgtctcctgagagatgcaaaactgtttgagattggagctggcactagtgagatcagaagaatgataattggtcgtgaactgttcaaagaggactgagattattcttctggaagccagctatcagtgcatattctaacttgaggaggtgagcaggattagaccattagtgaactgtccctgatgttcaatgtttgatgatgttctatccaatccttctcatacttctgtacatgtccaacattcttgcaaataaagttcaatcttct

SEQ ID NO: 12083 - protein, 474 aa, Triticum aestivum
  peptide (1)..(474): Ceres Seq. ID no. 14302252
  misc_feature (322)..(471): Pfam Name: Pfam Description:  Acyl-CoA dehydrogenase, C-terminal domain
  misc_feature (89)..(473): NCBI GI NO: 5869965 NR Description: Isovaleryl-CoA Dehydrogenase
  misc_feature (89)..(473): NCBI GI NO: 5869967 NR Description: auxin binding protein
  misc_feature (85)..(474): NCBI GI NO: 15230664 NR Description: isovaleryl-CoA-dehydrogenase precursor (IVD)
  misc_feature (85)..(474): NCBI GI NO: 17064982 NR Description: isovaleryl-CoA-dehydrogenase precursor (IVD)
  misc_feature (85)..(474): NCBI GI NO: 25090618 NR Description: Isovaleryl-CoA dehydrogenase
  misc_feature (91)..(473): NCBI GI NO: 25453061 NR Description: Isovaleryl-CoA dehydrogenase 2
  misc_feature (91)..(472): NCBI GI NO: 25453062 NR Description: Isovaleryl-CoA dehydrogenase 1
  misc_feature (89)..(471): NCBI GI NO: 22963587 NR Description: hypothetical protein [Rhodopseudomonas palustris]
  misc_feature (88)..(473): NCBI GI NO: 23056088 NR Description: hypothetical protein [Geobacter metallireducens]
  misc_feature (101)..(473): NCBI GI NO: 23500935 NR Description: isovaleryl-CoA dehydrogenase [Brucella suis 1330]
ASAPNDGRRGLFGLANPHTPLLLVPVEKDTRSLRPRLHEAEAAAAALEQASFCTLLQSSVVSLSAEMQRRLPALLRRAAGAGPARRWLSASSSLLFDDTQEQFKESVHRFAQEHIAPHAAAIDASNHFPKEKNLWKLMGDFNLHGLTSPEEYGGLGLGYMYHCIAMEEISRASGSVGLSYGAHSNLCINQLVRHGSPAQKEKYLPKLISGEHIGALAMSEPNSGSDVVSMKCKAEKVDGGYVINGNKMWCTNGPSAQTLVVYAKTDITAGSKGITAFIIEKGMPGFSTAQKLDKLGMRGSDTCELVFENCFVPQENVLGEEGKGVYVMMSGLDLERLVLAGGPIGLMQACLDVVLPYVRQREQFGRPIGEFQFLQGKMADMYTSLQSSRSFVYSVARDCDNGKVDRKDCAGVILFAAERATQVALEAIQCLGGNGYINEYPTGRLLRDAKLFEIGAGTSEIRRMIIGRELFKED

SEQ ID NO: 12084 - protein, 408 aa, Triticum aestivum
  peptide (1)..(408): Ceres Seq. ID no. 14302253
  misc_feature (256)..(405): Pfam Name: Pfam Description:  Acyl-CoA dehydrogenase, C-terminal domain
  misc_feature (23)..(407): NCBI GI NO: 5869965 NR Description: Isovaleryl-CoA Dehydrogenase
  misc_feature (23)..(407): NCBI GI NO: 5869967 NR Description: auxin binding protein
  misc_feature (19)..(408): NCBI GI NO: 15230664 NR Description: isovaleryl-CoA-dehydrogenase precursor (IVD)
  misc_feature (19)..(408): NCBI GI NO: 17064982 NR Description: isovaleryl-CoA-dehydrogenase precursor (IVD)
  misc_feature (19)..(408): NCBI GI NO: 25090618 NR Description: Isovaleryl-CoA dehydrogenase
  misc_feature (25)..(407): NCBI GI NO: 25453061 NR Description: Isovaleryl-CoA dehydrogenase 2
  misc_feature (25)..(406): NCBI GI NO: 25453062 NR Description: Isovaleryl-CoA dehydrogenase 1
  misc_feature (23)..(405): NCBI GI NO: 22963587 NR Description: hypothetical protein [Rhodopseudomonas palustris]
  misc_feature (22)..(407): NCBI GI NO: 23056088 NR Description: hypothetical protein [Geobacter metallireducens]
  misc_feature (35)..(407): NCBI GI NO: 23500935 NR Description: isovaleryl-CoA dehydrogenase [Brucella suis 1330]
MQRRLPALLRRAAGAGPARRWLSASSSLLFDDTQEQFKESVHRFAQEHIAPHAAAIDASNHFPKEKNLWKLMGDFNLHGLTSPEEYGGLGLGYMYHCIAMEEISRASGSVGLSYGAHSNLCINQLVRHGSPAQKEKYLPKLISGEHIGALAMSEPNSGSDVVSMKCKAEKVDGGYVINGNKMWCTNGPSAQTLVVYAKTDITAGSKGITAFIIEKGMPGFSTAQKLDKLGMRGSDTCELVFENCFVPQENVLGEEGKGVYVMMSGLDLERLVLAGGPIGLMQACLDVVLPYVRQREQFGRPIGEFQFLQGKMADMYTSLQSSRSFVYSVARDCDNGKVDRKDCAGVILFAAERATQVALEAIQCLGGNGYINEYPTGRLLRDAKLFEIGAGTSEIRRMIIGRELFKED

SEQ ID NO: 12085 - protein, 337 aa, Triticum aestivum
  peptide (1)..(337): Ceres Seq. ID no. 14302254
  misc_feature (185)..(334): Pfam Name: Pfam Description:  Acyl-CoA dehydrogenase, C-terminal domain
  misc_feature (1)..(336): NCBI GI NO: 5869965 NR Description: Isovaleryl-CoA Dehydrogenase
  misc_feature (1)..(336): NCBI GI NO: 5869967 NR Description: auxin binding protein
  misc_feature (1)..(337): NCBI GI NO: 15230664 NR Description: isovaleryl-CoA-dehydrogenase precursor (IVD)
  misc_feature (1)..(337): NCBI GI NO: 17064982 NR Description: isovaleryl-CoA-dehydrogenase precursor (IVD)
  misc_feature (1)..(337): NCBI GI NO: 25090618 NR Description: Isovaleryl-CoA dehydrogenase
  misc_feature (1)..(336): NCBI GI NO: 25453061 NR Description: Isovaleryl-CoA dehydrogenase 2
  misc_feature (1)..(335): NCBI GI NO: 25453062 NR Description: Isovaleryl-CoA dehydrogenase 1
  misc_feature (1)..(334): NCBI GI NO: 22963587 NR Description: hypothetical protein [Rhodopseudomonas palustris]
  misc_feature (1)..(336): NCBI GI NO: 23056088 NR Description: hypothetical protein [Geobacter metallireducens]
  misc_feature (1)..(336): NCBI GI NO: 23500935 NR Description: isovaleryl-CoA dehydrogenase [Brucella suis 1330]
MGDFNLHGLTSPEEYGGLGLGYMYHCIAMEEISRASGSVGLSYGAHSNLCINQLVRHGSPAQKEKYLPKLISGEHIGALAMSEPNSGSDVVSMKCKAEKVDGGYVINGNKMWCTNGPSAQTLVVYAKTDITAGSKGITAFIIEKGMPGFSTAQKLDKLGMRGSDTCELVFENCFVPQENVLGEEGKGVYVMMSGLDLERLVLAGGPIGLMQACLDVVLPYVRQREQFGRPIGEFQFLQGKMADMYTSLQSSRSFVYSVARDCDNGKVDRKDCAGVILFAAERATQVALEAIQCLGGNGYINEYPTGRLLRDAKLFEIGAGTSEIRRMIIGRELFKED

SEQ ID NO: 12086 - DNA, 1717 bp, Triticum aestivum
  misc_feature (1)..(1717): Ceres Seq. ID no. 13596035
cccaaacccaaacacaggcccatcatctcctggtcccgacctcgcactccccatcccagcatccaactccagctccacctcgccgccgcccccaccatgtacggcgtcggcgtcggcggcggcggaggcgggttcaacgcgccgtccacggcctccgggcggcgcaaaaaccaggaggacgacgacgacgaggaggaggaggagaccggcgacggccgcgtcctcgaggcgtgggagcgcgcctacgccgacgaccgctcgtgggaggcgctgcaggaggacgagtccggcctgctccgccccatcgacaccaagaacctcgtccactcgcagtaccgccgccgcctcctgctccgctccgcggccgccgcggcccgcatccagaagggcctcatccgctacctctacatcgtcatcgacctctccaaggcagcttcagaaatggattatcgccctagtcgaatggctgttgttgctaagtgtgctgaggcattcataagggaattcttcgatcagaatcccttgagccatgttgggttagtgacaattaaagatggcatttctcatcgacttacggagattggagggagtccagagtcacagattaacgcattgatgggcaagcttgagtgttctggtgattcatctctgcagaatgctctagaacttgtcaatggttacttgaaccagattccttcctatggtcacaaggaagtattatttttgtactccgcactgaatacatgtgatcctggtgatatcatggagacaatagaaaaatgcaagaaatccaaagttagatgttcggttattgggcttgctgcagaaattttcatttgcaagcatctctgtgaagagactggtggatcatatacggttgcactagacgagtcccacttcaaggaattgctgcttgaacatgctcctccaccacctgccattgcagagtatgctgcagctaatttgattaagatgggttttccacagaggggagcagaggatcttatctccatctgctcttgtcataagaaaattaaatctggtgctgaaggttacatatgtcccagatgcaaagttaatgtctgtgagcttccgacggagtgccgaacatgtggtctaacacttgttagttctccacatctggcacgatcctatcaccatctcttccctgtagcgccatttgatgaggtgacgttcaaattaggtcaaaagggaggacaaaattgttttggctgccagcagagtctcattaacaccggtggccagtctaatatccatgtctgctgtccaaaatgcaagcaccacttctgcttcgactgtgatatttacatccatgagagcttgcataactgccccggttgcgagagtcagtgcagttcatctcggtagagacgccgccatcatgtgcattgttcaggtgttgatccttttttttgagtcggagctacgcattgttgtaagctttctggtgccctgacgttgatgacagtattgctggacaatcgaacggtgtacagataacacctggcatccttttgttggcacctcttgttagattgtgctagctagttaagctattgatgcagttagaggtggaggtgctgagagtagagcgttgcgttgagaagagacttgaggaatgtacgacgtgaagaatggaaacctggtagctcttgctgttttttctgaagcaagatcaatatatgttattttcttc

SEQ ID NO: 12087 - protein, 462 aa, Triticum aestivum
  peptide (1)..(462): Ceres Seq. ID no. 13596036
  misc_feature (59)..(397): Pfam Name: Pfam Description:  Ssl1-like
  misc_feature (52)..(456): NCBI GI NO: 30679101 NR Description: basic transcripion factor 2, 44kD subunit -related
  misc_feature (49)..(461): NCBI GI NO: 28828471 NR Description: similar to Homo sapiens (Human)
  misc_feature (55)..(461): NCBI GI NO: 19075300 NR Description: tfiih subunit p47 [Schizosaccharomyces pombe]
  misc_feature (78)..(461): NCBI GI NO: 3327882 NR Description: SSL1 [Schizosaccharomyces pombe]
  misc_feature (63)..(454): NCBI GI NO: 6681762 NR Description: general transcription factor IIH
  misc_feature (63)..(454): NCBI GI NO: 627651 NR Description: transcription factor BTF2 chain p44 - human
  misc_feature (63)..(454): NCBI GI NO: 40353046 NR Description: Unknown (protein for MGC:75049) [Homo sapiens]
  misc_feature (63)..(454): NCBI GI NO: 34853502 NR Description: similar to general transcription factor IIHpolypeptide 2
  misc_feature (63)..(454): NCBI GI NO: 16740713 NR Description: Gtf2h2 protein [Mus musculus]
  misc_feature (63)..(454): NCBI GI NO: 28278887 NR Description: Similar to general transcription factor IIH
PKPKHRPIISWSRPRTPHPSIQLQLHLAAAPTMYGVGVGGGGGGFNAPSTASGRRKNQEDDDDEEEEETGDGRVLEAWERAYADDRSWEALQEDESGLLRPIDTKNLVHSQYRRRLLLRSAAAAARIQKGLIRYLYIVIDLSKAASEMDYRPSRMAVVAKCAEAFIREFFDQNPLSHVGLVTIKDGISHRLTEIGGSPESQINALMGKLECSGDSSLQNALELVNGYLNQIPSYGHKEVLFLYSALNTCDPGDIMETIEKCKKSKVRCSVIGLAAEIFICKHLCEETGGSYTVALDESHFKELLLEHAPPPPAIAEYAAANLIKMGFPQRGAEDLISICSCHKKIKSGAEGYICPRCKVNVCELPTECRTCGLTLVSSPHLARSYHHLFPVAPFDEVTFKLGQKGGQNCFGCQQSLINTGGQSNIHVCCPKCKHHFCFDCDIYIHESLHNCPGCESQCSSSR

SEQ ID NO: 12088 - protein, 430 aa, Triticum aestivum
  peptide (1)..(430): Ceres Seq. ID no. 13596037
  misc_feature (27)..(365): Pfam Name: Pfam Description:  Ssl1-like
  misc_feature (20)..(424): NCBI GI NO: 30679101 NR Description: basic transcripion factor 2, 44kD subunit -related
  misc_feature (17)..(429): NCBI GI NO: 28828471 NR Description: similar to Homo sapiens (Human)
  misc_feature (23)..(429): NCBI GI NO: 19075300 NR Description: tfiih subunit p47 [Schizosaccharomyces pombe]
  misc_feature (46)..(429): NCBI GI NO: 3327882 NR Description: SSL1 [Schizosaccharomyces pombe]
  misc_feature (31)..(422): NCBI GI NO: 6681762 NR Description: general transcription factor IIH
  misc_feature (31)..(422): NCBI GI NO: 627651 NR Description: transcription factor BTF2 chain p44 - human
  misc_feature (31)..(422): NCBI GI NO: 40353046 NR Description: Unknown (protein for MGC:75049) [Homo sapiens]
  misc_feature (31)..(422): NCBI GI NO: 34853502 NR Description: similar to general transcription factor IIHpolypeptide 2
  misc_feature (31)..(422): NCBI GI NO: 16740713 NR Description: Gtf2h2 protein [Mus musculus]
  misc_feature (31)..(422): NCBI GI NO: 28278887 NR Description: Similar to general transcription factor IIH
MYGVGVGGGGGGFNAPSTASGRRKNQEDDDDEEEEETGDGRVLEAWERAYADDRSWEALQEDESGLLRPIDTKNLVHSQYRRRLLLRSAAAAARIQKGLIRYLYIVIDLSKAASEMDYRPSRMAVVAKCAEAFIREFFDQNPLSHVGLVTIKDGISHRLTEIGGSPESQINALMGKLECSGDSSLQNALELVNGYLNQIPSYGHKEVLFLYSALNTCDPGDIMETIEKCKKSKVRCSVIGLAAEIFICKHLCEETGGSYTVALDESHFKELLLEHAPPPPAIAEYAAANLIKMGFPQRGAEDLISICSCHKKIKSGAEGYICPRCKVNVCELPTECRTCGLTLVSSPHLARSYHHLFPVAPFDEVTFKLGQKGGQNCFGCQQSLINTGGQSNIHVCCPKCKHHFCFDCDIYIHESLHNCPGCESQCSSSR

SEQ ID NO: 12089 - protein, 315 aa, Triticum aestivum
  peptide (1)..(315): Ceres Seq. ID no. 13596038
  misc_feature (1)..(250): Pfam Name: Pfam Description:  Ssl1-like
  misc_feature (1)..(309): NCBI GI NO: 30679101 NR Description: basic transcripion factor 2, 44kD subunit -related
  misc_feature (1)..(314): NCBI GI NO: 28828471 NR Description: similar to Homo sapiens (Human)
  misc_feature (1)..(314): NCBI GI NO: 19075300 NR Description: tfiih subunit p47 [Schizosaccharomyces pombe]
  misc_feature (1)..(314): NCBI GI NO: 3327882 NR Description: SSL1 [Schizosaccharomyces pombe]
  misc_feature (1)..(307): NCBI GI NO: 6681762 NR Description: general transcription factor IIH
  misc_feature (1)..(307): NCBI GI NO: 627651 NR Description: transcription factor BTF2 chain p44 - human
  misc_feature (1)..(307): NCBI GI NO: 40353046 NR Description: Unknown (protein for MGC:75049) [Homo sapiens]
  misc_feature (1)..(307): NCBI GI NO: 34853502 NR Description: similar to general transcription factor IIHpolypeptide 2
  misc_feature (1)..(307): NCBI GI NO: 16740713 NR Description: Gtf2h2 protein [Mus musculus]
  misc_feature (1)..(307): NCBI GI NO: 28278887 NR Description: Similar to general transcription factor IIH
MDYRPSRMAVVAKCAEAFIREFFDQNPLSHVGLVTIKDGISHRLTEIGGSPESQINALMGKLECSGDSSLQNALELVNGYLNQIPSYGHKEVLFLYSALNTCDPGDIMETIEKCKKSKVRCSVIGLAAEIFICKHLCEETGGSYTVALDESHFKELLLEHAPPPPAIAEYAAANLIKMGFPQRGAEDLISICSCHKKIKSGAEGYICPRCKVNVCELPTECRTCGLTLVSSPHLARSYHHLFPVAPFDEVTFKLGQKGGQNCFGCQQSLINTGGQSNIHVCCPKCKHHFCFDCDIYIHESLHNCPGCESQCSSSR

SEQ ID NO: 12090 - DNA, 1489 bp, Triticum aestivum
  misc_feature (1)..(1489): Ceres Seq. ID no. 13595870
atctccatcaactccttccccaagccgcaacctgccgcaaatctccgcctcccctccccttccgacccgcccaggccgcagcagagcgccatgtcgtcctcccctacccccgcgccagacgccggcgccgccgcgatggccgtcgacgactcgtcggagaccgaccagctcgactccatgtccacggaggacatcgtccgggccacccgcctcctcgacaacgaggtccgcgtcctcaaggacgagctgcagcggaacaacctggagctcgagaacgtcaaggacaagatcaaggagaaccaggagaagataaagctcaacaagcagctgccctacctcgtcggcaacatcgtcgagattttggaaatgaaccctgaagatgaggctgaagaggatggtgctaatatagatctggactcacagaggaaaggaaaatgtgttgttcttaagacatccacaagacagactatattccttcctgtgatcgggctagttgaccctgacaacctcaagcctggtgatttggttggagtcaacaaggacagctacttgatattagacacgctaccttcggagtatgactctcgagtaaaggcaatggaggtagatgaaaagcctacggaggattataatgacattggcggccttgagaaagagattcaggaactcgttgaagctatagtgttgccaatgacacacaaggagcaatttcagaagttgggaatccgtcccccgaaaggagttcttttatatggaccacctgggacgggaaagacgttgatggctcgtgcatgtgctgcacaaaccaatgcaacctttctgaaacttgctggtccgcagctagtccagatgttcatcggtgatggggcaaagcttgtccgagatgcctttgagttggcaaaggagaaggccccctgcatcatttttattgatgagattgatgcaattggaacaaagcgttttgacagtgaagtgagtggtgacagagaagtgcaacgaactatgttggagttgctgaatcagctagatggatttagcagtgatgagaggataaaggtgatagctgcaaccaatcgtgcagatattctcgatcctgctttactccgttctggtcgcctggacagaaagattgagttccctcatccgacggaagaagcaagagctcggattttgcaaattcactcaagaaagatgaacgtacatcctgatgtcaactttgaggagctggctcgttcaactgatgatttcaacggtgcacaactgaaggctgtttgtgtggaagctggcatgcttgctctacgcagggacgctacagaggtgatccatgaagatttcaacgaaggcattatccaagtgcaagcaaagaagaagtccagcttgaattattacgcttagtttcccttgagtaatcagaacgcttggtcctgtgatggccgctgtttgtaacactcggctaccatttttatttggagtatagtttaagtctcgg

SEQ ID NO: 12091 - protein, 464 aa, Triticum aestivum
  peptide (1)..(464): Ceres Seq. ID no. 15221675
  misc_feature (247)..(434): Pfam Name: AAA Pfam Description: ATPase family associated with various cellular activities
  misc_feature (33)..(464): NCBI GI NO: 17297989 NR Description: 26S proteasome regulatory particle triple-A ATPase subunit5a
  misc_feature (33)..(464): NCBI GI NO: 1174613 NR Description: 26S PROTEASE REGULATORY SUBUNIT 6A HOMOLOG
  misc_feature (43)..(464): NCBI GI NO: 12697589 NR Description: Tat binding protein like protein [Brassica rapa]
  misc_feature (43)..(464): NCBI GI NO: 3024434 NR Description: 26S PROTEASE REGULATORY SUBUNIT 6A HOMOLOG
  misc_feature (43)..(464): NCBI GI NO: 15230005 NR Description: 26S proteasome AAA-ATPase subunit RPT5a
  misc_feature (43)..(464): NCBI GI NO: 1729860 NR Description: 26S PROTEASE REGULATORY SUBUNIT 6A HOMOLOG
  misc_feature (43)..(464): NCBI GI NO: 23197864 NR Description: 26S proteasome AAA-ATPase subunit RPT5a
  misc_feature (43)..(464): NCBI GI NO: 5669047 NR Description: 19S proteasome regulatory complex subunit S6A
  misc_feature (43)..(464): NCBI GI NO: 15217431 NR Description: 26S protease regulatory subunit 6A
  misc_feature (46)..(464): NCBI GI NO: 3024431 NR Description: 26S protease regulatory subunit 6A homolog
ISINSFPKPQPAANLRLPSPSDPPRPQQSAMSSSPTPAPDAGAAAMAVDDSSETDQLDSMSTEDIVRATRLLDNEVRVLKDELQRNNLELENVKDKIKENQEKIKLNKQLPYLVGNIVEILEMNPEDEAEEDGANIDLDSQRKGKCVVLKTSTRQTIFLPVIGLVDPDNLKPGDLVGVNKDSYLILDTLPSEYDSRVKAMEVDEKPTEDYNDIGGLEKEIQELVEAIVLPMTHKEQFQKLGIRPPKGVLLYGPPGTGKTLMARACAAQTNATFLKLAGPQLVQMFIGDGAKLVRDAFELAKEKAPCIIFIDEIDAIGTKRFDSEVSGDREVQRTMLELLNQLDGFSSDERIKVIAATNRADILDPALLRSGRLDRKIEFPHPTEEARARILQIHSRKMNVHPDVNFEELARSTDDFNGAQLKAVCVEAGMLALRRDATEVIHEDFNEGIIQVQAKKKSSLNYYA

SEQ ID NO: 12092 - protein, 434 aa, Triticum aestivum
  peptide (1)..(434): Ceres Seq. ID no. 15221676
  misc_feature (217)..(404): Pfam Name: AAA Pfam Description: ATPase family associated with various cellular activities
  misc_feature (3)..(434): NCBI GI NO: 17297989 NR Description: 26S proteasome regulatory particle triple-A ATPase subunit5a
  misc_feature (3)..(434): NCBI GI NO: 1174613 NR Description: 26S PROTEASE REGULATORY SUBUNIT 6A HOMOLOG
  misc_feature (13)..(434): NCBI GI NO: 12697589 NR Description: Tat binding protein like protein [Brassica rapa]
  misc_feature (13)..(434): NCBI GI NO: 3024434 NR Description: 26S PROTEASE REGULATORY SUBUNIT 6A HOMOLOG
  misc_feature (13)..(434): NCBI GI NO: 15230005 NR Description: 26S proteasome AAA-ATPase subunit RPT5a
  misc_feature (13)..(434): NCBI GI NO: 1729860 NR Description: 26S PROTEASE REGULATORY SUBUNIT 6A HOMOLOG
  misc_feature (13)..(434): NCBI GI NO: 23197864 NR Description: 26S proteasome AAA-ATPase subunit RPT5a
  misc_feature (13)..(434): NCBI GI NO: 5669047 NR Description: 19S proteasome regulatory complex subunit S6A
  misc_feature (13)..(434): NCBI GI NO: 15217431 NR Description: 26S protease regulatory subunit 6A
  misc_feature (16)..(434): NCBI GI NO: 3024431 NR Description: 26S protease regulatory subunit 6A homolog
MSSSPTPAPDAGAAAMAVDDSSETDQLDSMSTEDIVRATRLLDNEVRVLKDELQRNNLELENVKDKIKENQEKIKLNKQLPYLVGNIVEILEMNPEDEAEEDGANIDLDSQRKGKCVVLKTSTRQTIFLPVIGLVDPDNLKPGDLVGVNKDSYLILDTLPSEYDSRVKAMEVDEKPTEDYNDIGGLEKEIQELVEAIVLPMTHKEQFQKLGIRPPKGVLLYGPPGTGKTLMARACAAQTNATFLKLAGPQLVQMFIGDGAKLVRDAFELAKEKAPCIIFIDEIDAIGTKRFDSEVSGDREVQRTMLELLNQLDGFSSDERIKVIAATNRADILDPALLRSGRLDRKIEFPHPTEEARARILQIHSRKMNVHPDVNFEELARSTDDFNGAQLKAVCVEAGMLALRRDATEVIHEDFNEGIIQVQAKKKSSLNYYA

SEQ ID NO: 12093 - protein, 419 aa, Triticum aestivum
  peptide (1)..(419): Ceres Seq. ID no. 15221677
  misc_feature (202)..(389): Pfam Name: AAA Pfam Description: ATPase family associated with various cellular activities
  misc_feature (1)..(419): NCBI GI NO: 17297989 NR Description: 26S proteasome regulatory particle triple-A ATPase subunit5a
  misc_feature (1)..(419): NCBI GI NO: 1174613 NR Description: 26S PROTEASE REGULATORY SUBUNIT 6A HOMOLOG
  misc_feature (1)..(419): NCBI GI NO: 12697589 NR Description: Tat binding protein like protein [Brassica rapa]
  misc_feature (1)..(419): NCBI GI NO: 3024434 NR Description: 26S PROTEASE REGULATORY SUBUNIT 6A HOMOLOG
  misc_feature (1)..(419): NCBI GI NO: 15230005 NR Description: 26S proteasome AAA-ATPase subunit RPT5a
  misc_feature (1)..(419): NCBI GI NO: 1729860 NR Description: 26S PROTEASE REGULATORY SUBUNIT 6A HOMOLOG
  misc_feature (1)..(419): NCBI GI NO: 23197864 NR Description: 26S proteasome AAA-ATPase subunit RPT5a
  misc_feature (1)..(419): NCBI GI NO: 5669047 NR Description: 19S proteasome regulatory complex subunit S6A
  misc_feature (1)..(419): NCBI GI NO: 15217431 NR Description: 26S protease regulatory subunit 6A
  misc_feature (1)..(419): NCBI GI NO: 3024431 NR Description: 26S protease regulatory subunit 6A homolog
MAVDDSSETDQLDSMSTEDIVRATRLLDNEVRVLKDELQRNNLELENVKDKIKENQEKIKLNKQLPYLVGNIVEILEMNPEDEAEEDGANIDLDSQRKGKCVVLKTSTRQTIFLPVIGLVDPDNLKPGDLVGVNKDSYLILDTLPSEYDSRVKAMEVDEKPTEDYNDIGGLEKEIQELVEAIVLPMTHKEQFQKLGIRPPKGVLLYGPPGTGKTLMARACAAQTNATFLKLAGPQLVQMFIGDGAKLVRDAFELAKEKAPCIIFIDEIDAIGTKRFDSEVSGDREVQRTMLELLNQLDGFSSDERIKVIAATNRADILDPALLRSGRLDRKIEFPHPTEEARARILQIHSRKMNVHPDVNFEELARSTDDFNGAQLKAVCVEAGMLALRRDATEVIHEDFNEGIIQVQAKKKSSLNYYA

SEQ ID NO: 12094 - DNA, 640 bp, Triticum aestivum
  misc_feature (1)..(640): Ceres Seq. ID no. 12584637
aaaattacccgaccaattcggccattcccacttgccctaagaacaaggcgaaaaagtagcgcaccacaccaatggcgactcctggggatggcgaggacgcgccgccgccgccgccggtgagcgcggcgggggctggaggcagcttgatcgcgaagctgcgggagcaatggaggagcacgaaagagcacgcggagacgtacccgtacgtgtggggctcctacatcctcgtctacggcgggctcggcgcgtacatcacctggcgatggtgcaagctccgccgcaccgaggaccgcgtccgcgccctccaggcccgcctccgccagctcgccgccgccgaggagtcgcagggcgcttccgctgctaccccacctcctcccctgcagcagcccccgccgccgacgacgactgggccgggcaagcccccctccccgccgtgaagagtaaggccccttaggcaacttcttgacatgaaatgttacagaacaatccctgcatcgttcgagatcgaggcattccttgcctctgtttactctatgatcctggacctaaagaaacggtgggatctcgccccccaaaaagttggaaggtcaattctgtgtccatactggagatcattctggagaaggtttaaattgttgtg

SEQ ID NO: 12095 - protein, 121 aa, Triticum aestivum
  peptide (1)..(121): Ceres Seq. ID no. 12584638
  misc_feature (2)..(121): NCBI GI NO: 34908496 NR Description: P0489B03.24
  misc_feature (1)..(98): NCBI GI NO: 18415932 NR Description: expressed protein; protein id: At5g09270
MATPGDGEDAPPPPPVSAAGAGGSLIAKLREQWRSTKEHAETYPYVWGSYILVYGGLGAYITWRWCKLRRTEDRVRALQARLRQLAAAEESQGASAATPPPPLQQPPPPTTTGPGKPPSPP

SEQ ID NO: 12096 - protein, 95 aa, Triticum aestivum
  peptide (1)..(95): Ceres Seq. ID no. 12584639
MEEHERARGDVPVRVGLLHPRLRRARRVHHLAMVQAPPHRGPRPRPPGPPPPARRRRGVAGRFRCYPTSSPAAAPAADDDWAGQAPLPAVKSKAP

SEQ ID NO: 12097 - protein, 63 aa, Triticum aestivum
  peptide (1)..(63): Ceres Seq. ID no. 12584640
MVQAPPHRGPRPRPPGPPPPARRRRGVAGRFRCYPTSSPAAAPAADDDWAGQAPLPAVKSKAP

SEQ ID NO: 12098 - DNA, 2092 bp, Triticum aestivum
  misc_feature (1)..(2092): Ceres Seq. ID no. 13590645
ctctctccacaccacaagccgccgccaccgcccgctgggaggggaatagaaatcgtgtgtatcgtagggttgcgcgaatcgccgtctccagcaaccaatccccaaccctcgagctatctaactatcccgatcccgatctcctaccatggtgtccgatgccagcaagaagaaagccgcgcagaagaaggccgccgccgccgcaaagaggggagccaagtccagcgccgctgcctcgtcctcgtcggcgtcgtcagcggccgataaggccgccaatggcatagcggcccttaacttatccgatcggacatgtaccggggtcctggcttcgcatccgctctcccgtgatatccacattgagtccctttcattaacatttcatggacatgaccttattgtggattcagaattggagcttaactacgggaggcggtatggtttgctcggcttaaatggttgtgggaaatctacccttctcaccgcaataggctgcagggaactccccattcctgaacacatggacatacatcatcttactcgtgagattgaggcttctgacatgtctgcgctgcaagctgttatctgttgtgatgaagaaagagtgaagttggaaaaggaagctgaaattttggctgcacaggatgatggtggcggtgaagctttggatcttgtatatgagcggttagaagcaatggatgcatcaactgctgaaaagcgtgctgctgagatattgtttggtctaggttttgacaagcaaatgcaagcaaagccaacacgagatttttctgggggttggcgtatgaggattgcattggcaagggcgctgttcatgaacccgaccatccttttgcttgatgagccaaccaaccatcttgatctcgaggcttgtgtctggctggaagagaaattaaagaattttgagcgtatacttgttgttatctcgcattcccaagattttctaaatggagtgtgcactaacatcatccacatgcagaacaagaccctcaagttatatactggaaattatgaccagtatgttcaaactcgctctgagcttgaagagaatcaaatgaagcagtacaaatgggaacaggaacagatagctaatatgaaggagtacattgcacgatttggtcatggatctgcgaagcttgctcgtcaggctcagagcaaagagaagactcttgcaaagatggagcgtggtggtcttgctgagaaggttgtcaatgacaggattcttgtattccgctttacagatgttggcaaactcccaccaccagtgctgcagtttgctgatgtcacatttggttacactccggataatctcatctacaagaaccttgacttcggtgttgaccttgactcgagagttgcactggtcggtcccaatggggctggtaagagcacacttctgaagctcatgacaggtgacctatctccgttggatggcatggtcagacgccacaaccacctacgcattgcacaattccatcaacatctcactgagaagctggacctggacatgccggccctgcagtacatgatgagggagtaccctgggaatgaagaggagaagatgagagctgcaattggcaagtttggcctgtcaggaaaggcacaggtgatgccaatgaaaaacctgtctgatgggcagaaggcccgtgtcatttttgcttggctagcatttaggcagccacagatgctgttgcttgatgagccgacaaatcatcttgacattgagaccattgactcacttgctgaggcactgaaggaatgggacggggggttggtcctggtgagccatgacttcaggctgatcaatcaggttgctcaagagatctgggtctgtgagaaccaggcggtgactaggtgggaaggcgatatcatggatttcaagcaacacttgaagaaaagggctggtctctagattttctgtcttttcattctctcggctctttggagatctagacaaccccaaagttttgcctgtatcagaaaagtttccatcatttagcgtgacaagtatgagtactattgtatcgcttaaaacatatcttctctacactattttaccagacgatccgtgtttaattcc

SEQ ID NO: 12099 - protein, 592 aa, Triticum aestivum
  peptide (1)..(592): Ceres Seq. ID no. 15220989
  misc_feature (93)..(284): Pfam Name: Pfam Description:  ABC transporter
  misc_feature (1)..(592): NCBI GI NO: 28071305 NR Description: putative ABC transporter
  misc_feature (1)..(592): NCBI GI NO: 15239436 NR Description: ABC transporter family protein
  misc_feature (1)..(545): NCBI GI NO: 7573600 NR Description: ABC transporter homolog [Populus nigra]
  misc_feature (1)..(591): NCBI GI NO: 28436765 NR Description: Similar to ATP-binding cassette, sub-family F
  misc_feature (1)..(589): NCBI GI NO: 28502799 NR Description: Similar to ATP-binding cassette, sub-family F
  misc_feature (5)..(589): NCBI GI NO: 10179834 NR Description: iron inhibited ABC transporter 2 [Homo sapiens]
  misc_feature (5)..(589): NCBI GI NO: 10947137 NR Description: ATP-binding cassette
  misc_feature (5)..(589): NCBI GI NO: 27881506 NR Description: ATP-binding cassette
  misc_feature (53)..(589): NCBI GI NO: 27707592 NR Description: similar to ATP-binding cassette
  misc_feature (53)..(589): NCBI GI NO: 23956078 NR Description: ATP-binding cassette, sub-family F
MVSDASKKKAAQKKAAAAAKRGAKSSAAASSSSASSAADKAANGIAALNLSDRTCTGVLASHPLSRDIHIESLSLTFHGHDLIVDSELELNYGRRYGLLGLNGCGKSTLLTAIGCRELPIPEHMDIHHLTREIEASDMSALQAVICCDEERVKLEKEAEILAAQDDGGGEALDLVYERLEAMDASTAEKRAAEILFGLGFDKQMQAKPTRDFSGGWRMRIALARALFMNPTILLLDEPTNHLDLEACVWLEEKLKNFERILVVISHSQDFLNGVCTNIIHMQNKTLKLYTGNYDQYVQTRSELEENQMKQYKWEQEQIANMKEYIARFGHGSAKLARQAQSKEKTLAKMERGGLAEKVVNDRILVFRFTDVGKLPPPVLQFADVTFGYTPDNLIYKNLDFGVDLDSRVALVGPNGAGKSTLLKLMTGDLSPLDGMVRRHNHLRIAQFHQHLTEKLDLDMPALQYMMREYPGNEEEKMRAAIGKFGLSGKAQVMPMKNLSDGQKARVIFAWLAFRQPQMLLLDEPTNHLDIETIDSLAEALKEWDGGLVLVSHDFRLINQVAQEIWVCENQAVTRWEGDIMDFKQHLKKRAGL

SEQ ID NO: 12100 - protein, 469 aa, Triticum aestivum; identical to SEQ ID NO: 10946
  peptide (1)..(469): Ceres Seq. ID no. 15220990
  misc_feature (1)..(161): Pfam Name: Pfam Description:  ABC transporter
  misc_feature (1)..(469): NCBI GI NO: 28071305 NR Description: putative ABC transporter
  misc_feature (1)..(469): NCBI GI NO: 15239436 NR Description: ABC transporter family protein
  misc_feature (1)..(422): NCBI GI NO: 7573600 NR Description: ABC transporter homolog [Populus nigra]
  misc_feature (1)..(468): NCBI GI NO: 28436765 NR Description: Similar to ATP-binding cassette, sub-family F
  misc_feature (1)..(466): NCBI GI NO: 28502799 NR Description: Similar to ATP-binding cassette, sub-family F
  misc_feature (1)..(466): NCBI GI NO: 10179834 NR Description: iron inhibited ABC transporter 2 [Homo sapiens]
  misc_feature (1)..(466): NCBI GI NO: 10947137 NR Description: ATP-binding cassette
  misc_feature (1)..(466): NCBI GI NO: 27881506 NR Description: ATP-binding cassette
  misc_feature (1)..(466): NCBI GI NO: 27707592 NR Description: similar to ATP-binding cassette
  misc_feature (1)..(466): NCBI GI NO: 23956078 NR Description: ATP-binding cassette, sub-family F

SEQ ID NO: 12101 - protein, 455 aa, Triticum aestivum; identical to SEQ ID NO: 10947
  peptide (1)..(455): Ceres Seq. ID no. 15220991
  misc_feature (1)..(147): Pfam Name: Pfam Description:  ABC transporter
  misc_feature (1)..(455): NCBI GI NO: 28071305 NR Description: putative ABC transporter
  misc_feature (1)..(455): NCBI GI NO: 15239436 NR Description: ABC transporter family protein
  misc_feature (1)..(408): NCBI GI NO: 7573600 NR Description: ABC transporter homolog [Populus nigra]
  misc_feature (1)..(454): NCBI GI NO: 28436765 NR Description: Similar to ATP-binding cassette, sub-family F
  misc_feature (1)..(452): NCBI GI NO: 28502799 NR Description: Similar to ATP-binding cassette, sub-family F
  misc_feature (1)..(452): NCBI GI NO: 10179834 NR Description: iron inhibited ABC transporter 2 [Homo sapiens]
  misc_feature (1)..(452): NCBI GI NO: 10947137 NR Description: ATP-binding cassette
  misc_feature (1)..(452): NCBI GI NO: 27881506 NR Description: ATP-binding cassette
  misc_feature (1)..(452): NCBI GI NO: 27707592 NR Description: similar to ATP-binding cassette
  misc_feature (1)..(452): NCBI GI NO: 23956078 NR Description: ATP-binding cassette, sub-family F

SEQ ID NO: 12102 - DNA, 1133 bp, Triticum aestivum
  misc_feature (1)..(1133): Ceres Seq. ID no. 13598367
  misc_feature (1079)..(1079): n is a, c, t, g, unknown, or other
  misc_feature (936)..(936): n is a, c, t, g, unknown, or other
  misc_feature (941)..(941): n is a, c, t, g, unknown, or other
  misc_feature (1080)..(1080): n is a, c, t, g, unknown, or other
  misc_feature (939)..(939): n is a, c, t, g, unknown, or other
  misc_feature (937)..(937): n is a, c, t, g, unknown, or other
  misc_feature (1078)..(1078): n is a, c, t, g, unknown, or other
  misc_feature (938)..(938): n is a, c, t, g, unknown, or other
  misc_feature (940)..(940): n is a, c, t, g, unknown, or other
tagctagttccccaccagagcacacccgccgccgccgccgccgcaacaagagccgccgctagctcgccgccgtccgcctccttccctctgggcagccagcaccgcagcagtgttgagtccagcaccagaagcagaaccttccctctgtcggtgggctgcggcgccgtccgtccgtccgtccgttgaggagggcaagaatgaagggcggtaggaagaacctgcggcgcgcgtgcgaggagggcaccgcggtgacgctggcggagggcgagagcatcatgcaggtcgtcacgctgcgcggctcaaacctcatcgaggtgaccgacggcgagggcgtcaagtctctcgccctcttccccgccaagttccagaagagcttctggatcaagaacgggaatttcgtggttgtggatgctagtggcagggacgaggctctcgaatctggaagcaagatagcctgtgtcgtctcgcgcgtcctctttcacgaccaggttcgcgccctcgagaaatccggccaatggccggctatcttcaagtcaactcccaatgggtgggcgacagggccacaaggaacgacatcacaggctgaggaagagcacaactctgatgaagacgacgatgatgatatgccgccacttgaggcaaacacgaacagaaatagaccgtttgacgtgcattccgatacagaaagtgattctgattcttgaactggtagacgacttgggaatagtcatcatcctatggttaccgtccacctgtacacctaatgtatttatgcttgttgaatttgggcatgacatcataaacttacggcccaatctgtcaaagatatagtagtcagtgcgttttgtcgacattaagtggcagggcatgtggaggcctgtcacctgtagtgtaatatgaagaaaacaaagaatgttgcamctggaggggggcctnnnnnnaaaaaaaaaaaaaaaaaaaaaaaaaaaaaaaaaaaaaaaaaaaaaaaaaaaaaaaaaaaaaaaaaaaaaagaaaaaaaaaaaaaaaaaaaaaaaaaaaattttcaaaaaaaaaaaaaaaaaaaaaaaaaaaaaaaannnccccaaaaaaaaaaaaaagttttttttaaacccccccccccaagggggggccc

SEQ ID NO: 12103 - protein, 168 aa, Triticum aestivum
  peptide (1)..(168): Ceres Seq. ID no. 15222326
  misc_feature (1)..(168): NCBI GI NO: 34902168 NR Description: Hypothetical protein
  misc_feature (1)..(168): NCBI GI NO: 15226743 NR Description: translation initiation factor -related
  misc_feature (18)..(167): NCBI GI NO: 32766657 NR Description: Unknown (protein for MGC:63631) [Danio rerio]
  misc_feature (15)..(167): NCBI GI NO: 34861445 NR Description: similar to 2010003J03Rik protein
MKGGRKNLRRACEEGTAVTLAEGESIMQVVTLRGSNLIEVTDGEGVKSLALFPAKFQKSFWIKNGNFVVVDASGRDEALESGSKIACVVSRVLFHDQVRALEKSGQWPAIFKSTPNGWATGPQGTTSQAEEEHNSDEDDDDDMPPLEANTNRNRPFDVHSDTESDSDS

SEQ ID NO: 12104 - protein, 142 aa, Triticum aestivum
  peptide (1)..(142): Ceres Seq. ID no. 15222327
  misc_feature (1)..(142): NCBI GI NO: 34902168 NR Description: Hypothetical protein
  misc_feature (1)..(142): NCBI GI NO: 15226743 NR Description: translation initiation factor -related
  misc_feature (1)..(141): NCBI GI NO: 32766657 NR Description: Unknown (protein for MGC:63631) [Danio rerio]
  misc_feature (1)..(141): NCBI GI NO: 34861445 NR Description: similar to 2010003J03Rik protein
MQVVTLRGSNLIEVTDGEGVKSLALFPAKFQKSFWIKNGNFVVVDASGRDEALESGSKIACVVSRVLFHDQVRALEKSGQWPAIFKSTPNGWATGPQGTTSQAEEEHNSDEDDDDDMPPLEANTNRNRPFDVHSDTESDSDS

SEQ ID NO: 12105 - protein, 95 aa, Triticum aestivum
  peptide (1)..(95): Ceres Seq. ID no. 15222328
MGGRQGHKERHHRLRKSTTLMKTTMMICRHLRQTRTEIDRLTCIPIQKVILILELVDDLGIVIILWLPSTCTPNVFMLVEFGHDIINLRPNLSKI

SEQ ID NO: 12106 - DNA, 1814 bp, Triticum aestivum
  misc_feature (1)..(1814): Ceres Seq. ID no. 13596039
gagacctaaatcgccgccaccgttcctcgccactgcggcgaccgccgttctcctccccctcccaccccgcatcggagaggaagatcgccgcgccagcgccaccatacccgaccctcgactccaccactctcggcggtgtgtgctagtctagtctgtctccaccccgacgaatttgcttcgcctgatagcgattaggctgcaatgggtagatgattaatttttgaagcccagctcatcgttaataacaggccgaaagcccagaaacccagcagcagtgtgcaacgagacgatcagattgttctcttttaccatcgtctcggacaaggcaacagagagcaggcagaaggatggatgagcaagatgataaaagtacaaaggctgagctgaaactatgtggtgacatagctgttaagaggaagaattaccgtggcgcgtcagcattctacagcgaggcaattgagctggaccctaatgatgcgacgctgtacgcaaacaggagcctttgctacctgcaaatgactgaagcagataaggctttgcatgatgctaacacctgcataaaactgcgtcctgaatggttaaaaggttactacaggaaaggatctgctcttatgtcgctcaaggagtacaaagaagcatgtgatgcgttcgaagccggactgaaactggaccctggaaacaccgagttggagaaagtattccaggaggcagttgaggcgatgaaaaaggatgacttggctagaaaaagagaaaatgcttcaagccatccagctagagaaaaacaggcacgcaaggggcgcggccgcaacacccactgagctgctgcaacaacgtacgcgggcgattgtgytaagccagccaccgcctgcatccctatgggatttcactgaatttcccgttttgtacacaatatttagtaaaacgtacactgtagctgtgagattggtttttgaattgcgccgtttacagcttggttctgttttatatcaccaaaaaaaaaaaaaaaaaacggcacgagaagcgcttctcgtgccggcttctcgtgccgttttttttttttttttttgttaaacaatgagaatgctcaataacgatcatagccgacacaacgttgacacgtgaaccaacaaccatcctgtacaacatctaccttctcatggactccatcagcgcattcaaattgttcaacgactggccttcgtcgctcatgtttttctccgccatctccttcaacctcagcaccctccgccaaaatgcagatcttcgtcaagaccctcacggggaagaccatcaccctcgaggttgagagcagcgataccatcgacaatgtcaaggccaagatccaggacaaggaggggatcccgccggaccagcagcggctgatcttcgccggaaagcagttggaggacggccgcacccttgccgactacaacatccagaaggagtccaccctccatctcgtcctcaggctccgtggaggcatcatcgagccgtccttgcaggctcttgcccgcaagtacaaccaggagaagatgatctgccgcaaatgctacgcgcgcctgcatccaagggctgtcaactgccgcaagaagaagtgtggccacagcaaccagctgaggcccaagaagaagatcaagaactagagtgctgctagtcagtttcatggaccggttgaatccatcactgtgtcagagtttatgctattatcgtctcggttgtcgttgaaccttattttactttgctttcagcctcctatcgttgtggtgatgataagtgacagtattggtatatggtagcaaacctataattttgcc

SEQ ID NO: 12107 - protein, 156 aa, Triticum aestivum
  peptide (1)..(156): Ceres Seq. ID no. 15221746
  misc_feature (1)..(133): NCBI GI NO: 13435245 NR Description: putative protein phosphatase [Oryza sativa]
  misc_feature (1)..(133): NCBI GI NO: 34896840 NR Description: putative stress-inducible protein [Oryza sativa]
  misc_feature (1)..(133): NCBI GI NO: 34896852 NR Description: putative ankyrin [Oryza sativa]
  misc_feature (10)..(134): NCBI GI NO: 13435249 NR Description: putative protein phosphatase [Oryza sativa]
  misc_feature (10)..(134): NCBI GI NO: 13435247 NR Description: putative ankyrin [Oryza sativa]
  misc_feature (1)..(134): NCBI GI NO: 34896858 NR Description: putative ankyrin [Oryza sativa]
  misc_feature (1)..(127): NCBI GI NO: 34898364 NR Description: Similar to Glycine max gmsti mRNA.(X79770)
MDEQDDKSTKAELKLCGDIAVKRKNYRGASAFYSEAIELDPNDATLYANRSLCYLQMTEADKALHDANTCIKLRPEWLKGYYRKGSALMSLKEYKEACDAFEAGLKLDPGNTELEKVFQEAVEAMKKDDLARKRENASSHPAREKQARKGRGRNTH

SEQ ID NO: 12108 - protein, 129 aa, Triticum aestivum
  peptide (1)..(129): Ceres Seq. ID no. 15221747
  misc_feature (1)..(74): Pfam Name: Pfam Description:  Ubiquitin family
  misc_feature (1)..(129): NCBI GI NO: 485518 NR Description: ubiquitin / ribosomal protein CEP52 - rice
  misc_feature (1)..(128): NCBI GI NO: 322750 NR Description: ubiquitin / ribosomal protein CEP52 - wood tobacco
  misc_feature (1)..(128): NCBI GI NO: 421867 NR Description: ubiquitin / ribosomal protein CEP52 - turnip
  misc_feature (1)..(128): NCBI GI NO: 18404062 NR Description: ubiquitin extension protein
  misc_feature (1)..(128): NCBI GI NO: 70654 NR Description: ubiquitin / ribosomal protein CEP52
  misc_feature (1)..(97): NCBI GI NO: 20330759 NR Description: Putative ubiquitin / ribosomal protein CEP52
  misc_feature (99)..(129): NCBI GI NO: 20330759 NR Description: Putative ubiquitin / ribosomal protein CEP52
  misc_feature (1)..(128): NCBI GI NO: 13569612 NR Description: ubiquitin A-52 residue ribosomal protein fusionproduct 1
  misc_feature (1)..(128): NCBI GI NO: 630455 NR Description: ubiquitin / ribosomal protein CEP52
  misc_feature (1)..(128): NCBI GI NO: 2558539 NR Description: ubiquitin-ribosomal protein fusion protein
MQIFVKTLTGKTITLEVESSDTIDNVKAKIQDKEGIPPDQQRLIFAGKQLEDGRTLADYNIQKESTLHLVLRLRGGIIEPSLQALARKYNQEKMICRKCYARLHPRAVNCRKKKCGHSNQLRPKKKIKN

SEQ ID NO: 12109 - protein, 113 aa, Triticum aestivum
  peptide (1)..(113): Ceres Seq. ID no. 15221748
  misc_feature (41)..(41): Xaa is any aa, unknown or other
MTWLEKEKMLQAIQLEKNRHARGAAATPTELLQQRTRAIVXSQPPPASLWDFTEFPVLYTIFSKTYTVAVRLVFELRRLQLGSVLYHQKKKKKTAREALLVPASRAVFFFFFC

SEQ ID NO: 12110 - DNA, 1434 bp, Triticum aestivum
  misc_feature (1)..(1434): Ceres Seq. ID no. 13654209
aaaccaacgcaaaccccaaatccccaatccgagctgccctcttcccctgaggtaagatccgttcacgatctcagcgcctcatagtccagatcgatttctgcagcaatttcccgcaattttgtctgactttttctcgggaggtcgatcgggtacgattcgattcgatcagatggcggcggtctggatggcgttggcggtgatgctggtcgctgctgctcaggtggcggtggctgccccggtgacggcgccggccttcctctgggctcccaagaactacggacttagtcccaatgaggctaaagaagtagtccactatcagacaatctccccaaagagtttagctgattctgttctcgaggaaggtggctggtcgaacttggtgtgttcaaaggatggtcctcaaaagaatgttgatgttgcagttctttttcttggatcaaagctacaatcatcagacatctctaaagataaacaagtcgatcctgctttagcggacatactaaagctgtccttctcaagctctgagttttccatggcattcccttatgttgccatgtcagacgacgaagcactagagaactcattgctatctggatttactgagaattgtgaggatggttctggaggaaatcatatcacttacacagacacgtgtactgcaagcagtgaaagtgtgaagaaacatctgaacatggattctgttcaagacttggtgaagtcacggatgggaaacaaccaaccaactgagctaatcgtcttctgtagcggtggtttcaaggacagtacaaaatcagaagggcagttgcttttggatctggtttctgttcttgacaagtctggggctaaatacacagttctttacgcttctcaaccctatggtttgctggagaatccttcggacctgccattagccaggtatcttgcagagaagaccaacacaactaaacctgtcctagagaaatgtgatggagagtgccaattaaaatcaactctcctggaaggagtttttgtgggtgtagtgctgcttatcatcttgatatcaggactttgctgcatgatggggatcgatactccatcaagatttgaggctccccaggattaatcttggtctgattttgaagcaaacccgatgtggatggccagtgtttgttaccctgcgcagtggatatagttagcttcctcttcaaaggtgccttgcttgtgtatttttctaagccaaacttctgtttagtgaccaaacttttggtgtataattgcattccaaacccacggagatctgagcttttgcaaactacactacatgcgcaaggcttatgttgtactatcaaaccagaattgtttccagttttctctgtgaatagcctggattcaggaagccaataagatgatggcactactgtccatctaataaaatcttgttattttttagtagcc

SEQ ID NO: 12111 - protein, 310 aa, Triticum aestivum
  peptide (1)..(310): Ceres Seq. ID no. 13654210
  misc_feature (1)..(310): NCBI GI NO: 24417230 NR Description: unknown [Arabidopsis thaliana]
  misc_feature (1)..(310): NCBI GI NO: 30682651 NR Description: expressed protein [Arabidopsis thaliana]
  misc_feature (115)..(310): NCBI GI NO: 21618303 NR Description: unknown [Arabidopsis thaliana]
  misc_feature (52)..(127): NCBI GI NO: 25405838 NR Description: hypothetical protein T5A14.4
MAAVWMALAVMLVAAAQVAVAAPVTAPAFLWAPKNYGLSPNEAKEVVHYQTISPKSLADSVLEEGGWSNLVCSKDGPQKNVDVAVLFLGSKLQSSDISKDKQVDPALADILKLSFSSSEFSMAFPYVAMSDDEALENSLLSGFTENCEDGSGGNHITYTDTCTASSESVKKHLNMDSVQDLVKSRMGNNQPTELIVFCSGGFKDSTKSEGQLLLDLVSVLDKSGAKYTVLYASQPYGLLENPSDLPLARYLAEKTNTTKPVLEKCDGECQLKSTLLEGVFVGVVLLIILISGLCCMMGIDTPSRFEAPQD

SEQ ID NO: 12112 - protein, 305 aa, Triticum aestivum
  peptide (1)..(305): Ceres Seq. ID no. 13654211
  misc_feature (1)..(305): NCBI GI NO: 24417230 NR Description: unknown [Arabidopsis thaliana]
  misc_feature (1)..(305): NCBI GI NO: 30682651 NR Description: expressed protein [Arabidopsis thaliana]
  misc_feature (110)..(305): NCBI GI NO: 21618303 NR Description: unknown [Arabidopsis thaliana]
  misc_feature (47)..(122): NCBI GI NO: 25405838 NR Description: hypothetical protein T5A14.4
MALAVMLVAAAQVAVAAPVTAPAFLWAPKNYGLSPNEAKEVVHYQTISPKSLADSVLEEGGWSNLVCSKDGPQKNVDVAVLFLGSKLQSSDISKDKQVDPALADILKLSFSSSEFSMAFPYVAMSDDEALENSLLSGFTENCEDGSGGNHITYTDTCTASSESVKKHLNMDSVQDLVKSRMGNNQPTELIVFCSGGFKDSTKSEGQLLLDLVSVLDKSGAKYTVLYASQPYGLLENPSDLPLARYLAEKTNTTKPVLEKCDGECQLKSTLLEGVFVGVVLLIILISGLCCMMGIDTPSRFEAPQD

SEQ ID NO: 12113 - protein, 300 aa, Triticum aestivum
  peptide (1)..(300): Ceres Seq. ID no. 13654212
  misc_feature (1)..(300): NCBI GI NO: 24417230 NR Description: unknown [Arabidopsis thaliana]
  misc_feature (1)..(300): NCBI GI NO: 30682651 NR Description: expressed protein [Arabidopsis thaliana]
  misc_feature (105)..(300): NCBI GI NO: 21618303 NR Description: unknown [Arabidopsis thaliana]
  misc_feature (42)..(117): NCBI GI NO: 25405838 NR Description: hypothetical protein T5A14.4
MLVAAAQVAVAAPVTAPAFLWAPKNYGLSPNEAKEVVHYQTISPKSLADSVLEEGGWSNLVCSKDGPQKNVDVAVLFLGSKLQSSDISKDKQVDPALADILKLSFSSSEFSMAFPYVAMSDDEALENSLLSGFTENCEDGSGGNHITYTDTCTASSESVKKHLNMDSVQDLVKSRMGNNQPTELIVFCSGGFKDSTKSEGQLLLDLVSVLDKSGAKYTVLYASQPYGLLENPSDLPLARYLAEKTNTTKPVLEKCDGECQLKSTLLEGVFVGVVLLIILISGLCCMMGIDTPSRFEAPQD

SEQ ID NO: 12114 - DNA, 856 bp, Triticum aestivum
  misc_feature (1)..(856): Ceres Seq. ID no. 12625251
ctccgcagatcagcagcccccaaatcggcgacccctcgctctctctccgatctccaatcctccacctcgcacacgcgcaccaaccgggcacgatgcgggcgatctcgtcggcggcgggagggatgctgcgggcgcggctgcgcgcggcggtgcgcctccgcggcgggcacggcgacggcgggggccgctggacgacgcccggccacgaggtgcggcccaaggggtacccgatgaaccgcacgccgccgccgccgggcgagtcgcgcaagtgggaggactgggagctcccctgctacgtcacctccttcctcaccgtcgtcatcctcggcgtcgggctcaacgccaagcccgacctcaccctcgagacctgggcgcaccacaaggcgctcgagcgcctccagcagcaggagctcgccgccgcctccgcctcggccgacgccctgtccgagtgatccgcgcgcgcgcgccccaggtcttcctccaagcctaggtcgcttctgttctgttttgcttccaataagggttggttgtgaacttgtgatgtaccaatctgatattgatgggacctgggcggaacactatatttctgtttctgttttgttgttgaaatttatctgatgatgatggcagataccgtatgcatttcgaaatgccctgtggtgtcccaaacattttgaaatgcctctgcattgtattgtcttgtgtatcccttatttatttccttgggcatgatttgctacatgcttttgcgagcgtaattaggaccgattgtacctgtctctctttgcctgaaatgacttgttgcagaaaataaataaatcagttgtcgcattgaacagcttgatgccgaaaaact

SEQ ID NO: 12115 - protein, 162 aa, Triticum aestivum
  peptide (1)..(162): Ceres Seq. ID no. 12625252
SADQQPPNRRPLALSPISNPPPRTRAPTGHDAGDLVGGGRDAAGAAARGGAPPRRARRRRGPLDDARPRGAAQGVPDEPHAAAAGRVAQVGGLGAPLLRHLLPHRRHPRRRAQRQARPHPRDLGAPQGARAPPAAGARRRLRLGRRPVRVIRARAPQVFLQA

SEQ ID NO: 12116 - protein, 149 aa, Triticum aestivum
  peptide (1)..(149): Ceres Seq. ID no. 12625253
  misc_feature (46)..(144): NCBI GI NO: 18410807 NR Description: Expressed protein; protein id: At3g57785
  misc_feature (46)..(144): NCBI GI NO: 7485503 NR Description: hypothetical protein F15B8
  misc_feature (46)..(145): NCBI GI NO: 15227917 NR Description: unknown protein; protein id: At2g42310
  misc_feature (16)..(142): NCBI GI NO: 9858777 NR Description: BAC19.9 [Lycopersicon esculentum]
  misc_feature (67)..(149): NCBI GI NO: 29150398 NR Description: hypothetical protein
PQISSPQIGDPSLSLRSPILHLAHAHQPGTMRAISSAAGGMLRARLRAAVRLRGGHGDGGGRWTTPGHEVRPKGYPMNRTPPPPGESRKWEDWELPCYVTSFLTVVILGVGLNAKPDLTLETWAHHKALERLQQQELAAASASADALSE

SEQ ID NO: 12117 - protein, 119 aa, Triticum aestivum
  peptide (1)..(119): Ceres Seq. ID no. 12625254
  misc_feature (16)..(114): NCBI GI NO: 18410807 NR Description: Expressed protein; protein id: At3g57785
  misc_feature (16)..(114): NCBI GI NO: 7485503 NR Description: hypothetical protein F15B8
  misc_feature (16)..(115): NCBI GI NO: 15227917 NR Description: unknown protein; protein id: At2g42310
  misc_feature (1)..(112): NCBI GI NO: 9858777 NR Description: BAC19.9 [Lycopersicon esculentum]
  misc_feature (37)..(119): NCBI GI NO: 29150398 NR Description: hypothetical protein
MRAISSAAGGMLRARLRAAVRLRGGHGDGGGRWTTPGHEVRPKGYPMNRTPPPPGESRKWEDWELPCYVTSFLTVVILGVGLNAKPDLTLETWAHHKALERLQQQELAAASASADALSE

SEQ ID NO: 12118 - DNA, 504 bp, Triticum aestivum
  misc_feature (1)..(504): Ceres Seq. ID no. 13596388
ctgtgcttgaaccacaagacaagctcgatcacgattcacgcgccgcgcgttgtcagtgcgaagcagctgttgtgcgctctgcagagacgacccatggcctcgagaacagcggcggtgccggaggtggccctgcggtccggcgacgcgaggcccatgccggccatcggcatgggcaccgcccagtccccggtggtgccggacaccaccgtgaaggccgtgctggaggccgtggaggtgggctaccgccacttcgacacggcctccatgtacgcgacggagcggcccctgggcgaggccctcgcggaggcggtgcgccgcgggctcctggcgtcccgggaggaggtgttcgtcacgtccaagctctgttgcacgcagtgccacccgcacctcgtgctcccgtccctccaggagagcctccagaacctgcagatggagtacgtggacctgtatctgatccactggccgatcagcctgaagcccgggcccgtggtgttcccggtgaag

SEQ ID NO: 12119 - protein, 168 aa, Triticum aestivum
  peptide (1)..(168): Ceres Seq. ID no. 13596389
  misc_feature (39)..(167): NCBI GI NO: 38344823 NR Description: OSJNBa0064H22.4
  misc_feature (37)..(167): NCBI GI NO: 38344824 NR Description: OSJNBa0064H22.5
  misc_feature (34)..(167): NCBI GI NO: 38344822 NR Description: OSJNBa0064H22.3
  misc_feature (39)..(167): NCBI GI NO: 40781598 NR Description: reductase 2 [Hydrangea macrophylla]
  misc_feature (32)..(167): NCBI GI NO: 40781599 NR Description: reductase 1 [Hydrangea macrophylla]
  misc_feature (39)..(167): NCBI GI NO: 6478216 NR Description: putative NADPH-dependent oxidoreductase
  misc_feature (33)..(163): NCBI GI NO: 37530540 NR Description: putative NADPH-dependent oxidoreductase
  misc_feature (39)..(167): NCBI GI NO: 4249390 NR Description: Similar to gb|AF039182 probable aldo-keto reductasefrom Fragaria x ananassa
  misc_feature (39)..(167): NCBI GI NO: 15218960 NR Description: aldo/keto reductase, putative
  misc_feature (52)..(161): NCBI GI NO: 27357979 NR Description: Putative NADPH-dependent oxidoreductase
LCLNHKTSSITIHAPRVVSAKQLLCALQRRPMASRTAAVPEVALRSGDARPMPAIGMGTAQSPVVPDTTVKAVLEAVEVGYRHFDTASMYATERPLGEALAEAVRRGLLASREEVFVTSKLCCTQCHPHLVLPSLQESLQNLQMEYVDLYLIHWPISLKPGPVVFPVK

SEQ ID NO: 12120 - protein, 167 aa, Triticum aestivum
  peptide (1)..(167): Ceres Seq. ID no. 13596390
VLEPQDKLDHDSRAARCQCEAAVVRSAETTHGLENSGGAGGGPAVRRREAHAGHRHGHRPVPGGAGHHREGRAGGRGGGLPPLRHGLHVRDGAAPGRGPRGGGAPRAPGVPGGGVRHVQALLHAVPPAPRAPVPPGEPPEPADGVRGPVSDPLADQPEARARGVPGE

SEQ ID NO: 12121 - protein, 137 aa, Triticum aestivum
  peptide (1)..(137): Ceres Seq. ID no. 13596391
  misc_feature (8)..(136): NCBI GI NO: 38344823 NR Description: OSJNBa0064H22.4
  misc_feature (6)..(136): NCBI GI NO: 38344824 NR Description: OSJNBa0064H22.5
  misc_feature (3)..(136): NCBI GI NO: 38344822 NR Description: OSJNBa0064H22.3
  misc_feature (8)..(136): NCBI GI NO: 40781598 NR Description: reductase 2 [Hydrangea macrophylla]
  misc_feature (1)..(136): NCBI GI NO: 40781599 NR Description: reductase 1 [Hydrangea macrophylla]
  misc_feature (8)..(136): NCBI GI NO: 6478216 NR Description: putative NADPH-dependent oxidoreductase
  misc_feature (2)..(132): NCBI GI NO: 37530540 NR Description: putative NADPH-dependent oxidoreductase
  misc_feature (8)..(136): NCBI GI NO: 4249390 NR Description: Similar to gb|AF039182 probable aldo-keto reductasefrom Fragaria x ananassa
  misc_feature (8)..(136): NCBI GI NO: 15218960 NR Description: aldo/keto reductase, putative
  misc_feature (21)..(130): NCBI GI NO: 27357979 NR Description: Putative NADPH-dependent oxidoreductase
MASRTAAVPEVALRSGDARPMPAIGMGTAQSPVVPDTTVKAVLEAVEVGYRHFDTASMYATERPLGEALAEAVRRGLLASREEVFVTSKLCCTQCHPHLVLPSLQESLQNLQMEYVDLYLIHWPISLKPGPVVFPVK

SEQ ID NO: 12122 - DNA, 1477 bp, Triticum aestivum
  misc_feature (1)..(1477): Ceres Seq. ID no. 13596465
agtctacccaaagtccgacgagcaaccacccggccatggcgaccaccgacatccgcctctccatcgggcaccagacccgcttcgccctccgcctcgcctccgccatctcctcgccctcccacgccaagggatccgccggcaacgccgccttctccccgctctcgctccacgtcgcgctcagcctcgtcgcggcgggcgccggcggcgccacccgcgaccagctcgccgccgcgcttgggtccgcggagaaaggcgaggccgagggcctccacgcgctcgccgagcaggtggttcaggtcgtgctcgccgacgcgtcgggcgccggcggcccgcgcgtcgccttcgccaacggcgtcttcgtcgacgcgtcgctcaagctcaagccttccttcaaggatctcactgtgggcaagtacaaggccgagacacagtccgtggacttccaaactaaggctgctgaagttgctggtcaagtgaactcctgggtagagaaaatcacaacaggtctcatcaaagagatcctccctgcaggatctgttgataacaccactagactggttcttggtaatgccctttatttcaaaggagcttggactgagaagtttgatgcatctaagacaaaagacgagaagttccacctccttgatgggagctcagttcaaacaccgttcatgtccagtacaaagaagcaatatatttcgtcttctgacagcttgaaggtactgaagcttccttaccagcaaggcgaggacaagaggcagttctccatgtacattcttcttccagaagcacaggatggtctctggaacttggccaacaagttgagcaccgaaccagagttcttggaaaaccatatcccaatgcagaaggttcctgtcgggcagttcaagcttccgaagttcaagatatcatttggatttgaagcgtctgatatgctcaaaggtttgggtctccagctgccgttcagcgcagaggcagatctttcggagatggtggattcaccggcgggcttatacgtctcatccgttttccacaagtcgtttgtcgaggtgaacgaagaaggcaccgaggctgccgctgcaactgcttcagtggtcacacttaggtcactgccagtggagcccgtgaaggtggatttcgtcgcggatcaccctttcctcttccttatccgagaagacctcacaggggtggtgctattcgtcggccatgtgttcaatcccttggtgtctgcatgatgtgtttgctctggatcgctgccttggcagtgacctcaactgtcacatgtaagtgaagggtttcgactttagatcatgctgcctgtgcaataaatccggtgcatgtttttgttttcgaataacggcttgcttgatgtatggaggttatggtgagttggtgacaataatccagggttgccgtggagttttgtgctttcagttgaatgatactcctacatgagatggccaaatgcttcttggtc

SEQ ID NO: 12123 - protein, 410 aa, Triticum aestivum
  peptide (1)..(410): Ceres Seq. ID no. 15221885
  misc_feature (14)..(406): Pfam Name: serine protease inhibitor Pfam Description: Serpin
  misc_feature (12)..(410): NCBI GI NO: 421989 NR Description: serpin - barley
  misc_feature (16)..(410): NCBI GI NO: 40539102 NR Description: putative serine protease inhibitor
  misc_feature (12)..(410): NCBI GI NO: 7438222 NR Description: serpin homolog WZS3 - wheat
  misc_feature (12)..(410): NCBI GI NO: 1310677 NR Description: protein z-type serpin
  misc_feature (12)..(410): NCBI GI NO: 131091 NR Description: Protein Z (Z4) (Major endosperm albumin)
  misc_feature (14)..(410): NCBI GI NO: 7438218 NR Description: serpin - barley
  misc_feature (12)..(409): NCBI GI NO: 5734506 NR Description: serpin [Triticum aestivum]
  misc_feature (12)..(410): NCBI GI NO: 5734504 NR Description: serpin [Triticum aestivum]
  misc_feature (12)..(410): NCBI GI NO: 7438221 NR Description: serpin WZS2 - wheat
  misc_feature (12)..(410): NCBI GI NO: 2130110 NR Description: serpin - wheat
STQSPTSNHPAMATTDIRLSIGHQTRFALRLASAISSPSHAKGSAGNAAFSPLSLHVALSLVAAGAGGATRDQLAAALGSAEKGEAEGLHALAEQVVQVVLADASGAGGPRVAFANGVFVDASLKLKPSFKDLTVGKYKAETQSVDFQTKAAEVAGQVNSWVEKITTGLIKEILPAGSVDNTTRLVLGNALYFKGAWTEKFDASKTKDEKFHLLDGSSVQTPFMSSTKKQYISSSDSLKVLKLPYQQGEDKRQFSMYILLPEAQDGLWNLANKLSTEPEFLENHIPMQKVPVGQFKLPKFKISFGFEASDMLKGLGLQLPFSAEADLSEMVDSPAGLYVSSVFHKSFVEVNEEGTEAAAATASVVTLRSLPVEPVKVDFVADHPFLFLIREDLTGVVLFVGHVFNPLVSA

SEQ ID NO: 12124 - protein, 399 aa, Triticum aestivum
  peptide (1)..(399): Ceres Seq. ID no. 15221886
  misc_feature (3)..(395): Pfam Name: serine protease inhibitor Pfam Description: Serpin
  misc_feature (1)..(399): NCBI GI NO: 421989 NR Description: serpin - barley
  misc_feature (5)..(399): NCBI GI NO: 40539102 NR Description: putative serine protease inhibitor
  misc_feature (1)..(399): NCBI GI NO: 7438222 NR Description: serpin homolog WZS3 - wheat
  misc_feature (1)..(399): NCBI GI NO: 1310677 NR Description: protein z-type serpin
  misc_feature (1)..(399): NCBI GI NO: 131091 NR Description: Protein Z (Z4) (Major endosperm albumin)
  misc_feature (3)..(399): NCBI GI NO: 7438218 NR Description: serpin - barley
  misc_feature (1)..(398): NCBI GI NO: 5734506 NR Description: serpin [Triticum aestivum]
  misc_feature (1)..(399): NCBI GI NO: 5734504 NR Description: serpin [Triticum aestivum]
  misc_feature (1)..(399): NCBI GI NO: 7438221 NR Description: serpin WZS2 - wheat
  misc_feature (1)..(399): NCBI GI NO: 2130110 NR Description: serpin - wheat
MATTDIRLSIGHQTRFALRLASAISSPSHAKGSAGNAAFSPLSLHVALSLVAAGAGGATRDQLAAALGSAEKGEAEGLHALAEQVVQVVLADASGAGGPRVAFANGVFVDASLKLKPSFKDLTVGKYKAETQSVDFQTKAAEVAGQVNSWVEKITTGLIKEILPAGSVDNTTRLVLGNALYFKGAWTEKFDASKTKDEKFHLLDGSSVQTPFMSSTKKQYISSSDSLKVLKLPYQQGEDKRQFSMYILLPEAQDGLWNLANKLSTEPEFLENHIPMQKVPVGQFKLPKFKISFGFEASDMLKGLGLQLPFSAEADLSEMVDSPAGLYVSSVFHKSFVEVNEEGTEAAAATASVVTLRSLPVEPVKVDFVADHPFLFLIREDLTGVVLFVGHVFNPLVSA

SEQ ID NO: 12125 - DNA, 1427 bp, Triticum aestivum
  misc_feature (1)..(1427): Ceres Seq. ID no. 13596392
aaaaccaaaacaaataccaacacacacacagccagccagccagccaggaagcaaaaaaatccccccaccctccctgcaatagcaaacacgcggaaaaaaatggaggcatgaacacgcccccctcctcctccgtccccgcctcctccgtccccgatcccgtcgacagcccagcggccccgcccccgccccctcctcgccggcggcacccttgctcgtaggcgggcgtgaggggagcggcgcgcagcgacgatgccgtcgcactcggatctggaccggcagatctcgctgctgcgggactgcaagttcctgccggacgccgaggtcaaggccctctgcgagcaggccaaggcgatcctcatggaggagtggaacgtgcagcccgtgcgctgccccgtcaccgtctgcggcgacatccacggccagttctacgacctcatcgagctcttccgcatcgggggcgacacccccgacaccaactaccttttcatgggcgactacgtcgaccgtggctactattcagtggagactgtttcattattagtggctctcaaagttcgttatagagacagaatcacaatcttgagaggaaatcacgagagccgacaaatcactcaagtgtatggcttctatgatgaatgcttacggaagtacggaaatgcaaatgtctggaagtacttcacagatttgtttgattatttgcctctcacagctcttatagaaaaccaggtgttttgcctccatggtggtctctctccatcattagatacattggacaatattcgttctcttgatcgcatacaagaggtcccgcatgaaggacctatgtgtgatcttttgtggtctgatccggatgaccgatgcgggtggggaatttcaccaagaggagcaggctacacatttggacaagatatagcacaacaatttaaccatacaaatggtcttagccttatttcaagggcccatcaacttgtgatggaagggttcaactgggcacaggagaagaatgttgtcacagttttcagtgcgccaaactactgttaccggtgtggtaacatggctgcgattctcgaaattggggagaacatggatcagaacttcctccaattcgatccagcgccgcggcaaatcgagccagacacaacgcgcaagacccccgactactttttgtaatcgtggtgttgactttttttaactcttctgctgcctggctggatctgtagatctctgtccttagaaaatgggattccttgagctgagttgtgtaccccccctctcattcttttgtttggagattttggttgccgcttctcaggacctcataggacatgttaaaagtacattgcattggtattttttttgtatctccattttgtattatttccgagacagagaagggaagctgcaatagaatcgtctcgtaacatatt

SEQ ID NO: 12126 - protein, 306 aa, Triticum aestivum
  peptide (1)..(306): Ceres Seq. ID no. 15221856
  misc_feature (47)..(242): Pfam Name: Pfam Description:  Calcineurin-like phosphoesterase
  misc_feature (1)..(306): NCBI GI NO: 11134285 NR Description: Serine/threonine protein phosphatase PP2A-1catalytic subunit
  misc_feature (1)..(306): NCBI GI NO: 11134222 NR Description: Serine/threonine protein phosphatase PP2A-3catalytic subunit
  misc_feature (1)..(306): NCBI GI NO: 7435122 NR Description: probable phosphoprotein phosphatase (EC 3
  misc_feature (1)..(306): NCBI GI NO: 7248359 NR Description: type 2A protein phosphatase-1 [Vicia faba]
  misc_feature (1)..(306): NCBI GI NO: 10638985 NR Description: protein phosphatase 2A [Fagus sylvatica]
  misc_feature (1)..(306): NCBI GI NO: 7248361 NR Description: type 2A protein phosphatase-2 [Vicia faba]
  misc_feature (1)..(306): NCBI GI NO: 15218524 NR Description: serine/threonine protein phosphatase, PP2A
  misc_feature (1)..(306): NCBI GI NO: 11133825 NR Description: Serine/threonine protein phosphatase PP2A catalytic subunit
  misc_feature (1)..(306): NCBI GI NO: 21593150 NR Description: serine/threonine protein phosphatase type 2A
  misc_feature (1)..(306): NCBI GI NO: 15218928 NR Description: serine/threonine protein phosphatase PP2A
MPSHSDLDRQISLLRDCKFLPDAEVKALCEQAKAILMEEWNVQPVRCPVTVCGDIHGQFYDLIELFRIGGDTPDTNYLFMGDYVDRGYYSVETVSLLVALKVRYRDRITILRGNHESRQITQVYGFYDECLRKYGNANVWKYFTDLFDYLPLTALIENQVFCLHGGLSPSLDTLDNIRSLDRIQEVPHEGPMCDLLWSDPDDRCGWGISPRGAGYTFGQDIAQQFNHTNGLSLISRAHQLVMEGFNWAQEKNVVTVFSAPNYCYRCGNMAAILEIGENMDQNFLQFDPAPRQIEPDTTRKTPDYFL

SEQ ID NO: 12127 - protein, 270 aa, Triticum aestivum
  peptide (1)..(270): Ceres Seq. ID no. 15221857
  misc_feature (11)..(206): Pfam Name: Pfam Description:  Calcineurin-like phosphoesterase
  misc_feature (1)..(270): NCBI GI NO: 11134285 NR Description: Serine/threonine protein phosphatase PP2A-1catalytic subunit
  misc_feature (1)..(270): NCBI GI NO: 11134222 NR Description: Serine/threonine protein phosphatase PP2A-3catalytic subunit
  misc_feature (1)..(270): NCBI GI NO: 7435122 NR Description: probable phosphoprotein phosphatase (EC 3
  misc_feature (1)..(270): NCBI GI NO: 7248359 NR Description: type 2A protein phosphatase-1 [Vicia faba]
  misc_feature (1)..(270): NCBI GI NO: 10638985 NR Description: protein phosphatase 2A [Fagus sylvatica]
  misc_feature (1)..(270): NCBI GI NO: 7248361 NR Description: type 2A protein phosphatase-2 [Vicia faba]
  misc_feature (1)..(270): NCBI GI NO: 15218524 NR Description: serine/threonine protein phosphatase, PP2A
  misc_feature (1)..(270): NCBI GI NO: 11133825 NR Description: Serine/threonine protein phosphatase PP2A catalytic subunit
  misc_feature (1)..(270): NCBI GI NO: 21593150 NR Description: serine/threonine protein phosphatase type 2A
  misc_feature (1)..(270): NCBI GI NO: 15218928 NR Description: serine/threonine protein phosphatase PP2A
MEEWNVQPVRCPVTVCGDIHGQFYDLIELFRIGGDTPDTNYLFMGDYVDRGYYSVETVSLLVALKVRYRDRITILRGNHESRQITQVYGFYDECLRKYGNANVWKYFTDLFDYLPLTALIENQVFCLHGGLSPSLDTLDNIRSLDRIQEVPHEGPMCDLLWSDPDDRCGWGISPRGAGYTFGQDIAQQFNHTNGLSLISRAHQLVMEGFNWAQEKNVVTVFSAPNYCYRCGNMAAILEIGENMDQNFLQFDPAPRQIEPDTTRKTPDYFL

SEQ ID NO: 12128 - protein, 227 aa, Triticum aestivum
  peptide (1)..(227): Ceres Seq. ID no. 15221858
  misc_feature (1)..(163): Pfam Name: Pfam Description:  Calcineurin-like phosphoesterase
  misc_feature (1)..(227): NCBI GI NO: 11134285 NR Description: Serine/threonine protein phosphatase PP2A-1catalytic subunit
  misc_feature (1)..(227): NCBI GI NO: 11134222 NR Description: Serine/threonine protein phosphatase PP2A-3catalytic subunit
  misc_feature (1)..(227): NCBI GI NO: 7435122 NR Description: probable phosphoprotein phosphatase (EC 3
  misc_feature (1)..(227): NCBI GI NO: 7248359 NR Description: type 2A protein phosphatase-1 [Vicia faba]
  misc_feature (1)..(227): NCBI GI NO: 10638985 NR Description: protein phosphatase 2A [Fagus sylvatica]
  misc_feature (1)..(227): NCBI GI NO: 7248361 NR Description: type 2A protein phosphatase-2 [Vicia faba]
  misc_feature (1)..(227): NCBI GI NO: 15218524 NR Description: serine/threonine protein phosphatase, PP2A
  misc_feature (1)..(227): NCBI GI NO: 11133825 NR Description: Serine/threonine protein phosphatase PP2A catalytic subunit
  misc_feature (1)..(227): NCBI GI NO: 21593150 NR Description: serine/threonine protein phosphatase type 2A
  misc_feature (1)..(227): NCBI GI NO: 15218928 NR Description: serine/threonine protein phosphatase PP2A
MGDYVDRGYYSVETVSLLVALKVRYRDRITILRGNHESRQITQVYGFYDECLRKYGNANVWKYFTDLFDYLPLTALIENQVFCLHGGLSPSLDTLDNIRSLDRIQEVPHEGPMCDLLWSDPDDRCGWGISPRGAGYTFGQDIAQQFNHTNGLSLISRAHQLVMEGFNWAQEKNVVTVFSAPNYCYRCGNMAAILEIGENMDQNFLQFDPAPRQIEPDTTRKTPDYFL

SEQ ID NO: 12129 - DNA, 1573 bp, Triticum aestivum
  misc_feature (1)..(1573): Ceres Seq. ID no. 13598368
cacaatactagcaagagtgtagccaacagagccaaactcaccggtacgcagccgatcgatcgataaggtcccccgaatttaacacccgctcgccatgtcgttcctcccgattccgctgccaatcgttggagacatagccagcaggctgaacggccaagagaaaccgcgcggcgacgacacgacgtcgtcggcgccggcgcctgtcctcggaaccgtggccagcaggtggcgcgagctccacggcgagaactcgtggaagggcctcctggaccctctggacccgcacctccgctccagcatcatctcctacggcgagatggtgcaggccgcctacgacgccttcaacaccgagaggcgctccccgcactgcggcgcgtgcttctacggctacgaggacctgctggcgggcgtcggggtgccgcaccacggcaacaactacgaggtcaccaagttcatctacgccacctcgtcgctgccactcccgagctccttcctcctgctgccgctgccgtcgctgccggacgtctggagccgagagtccaactggatggggtacgtggccgtggccacggacgagggcgccgccgcgctcgggaggcgggacatcgttgtggcgtggcgcggcaccgtccagaacatggagtgggtcaacgacctcgacttcgcgccggtgcccgccgcgcccgtgctgggctccgcggcgagccagcaccgcctcgccgtcgtgcaccatgggttcctctccatgtacacgtcaagcaacaagagctccgagttcaccaagaccagcgccagagatcaggttgtcaaggaggtcaggaggctcgtggagctgtacaaggatgaggaggtcagcatcaccatctgtggccacagccttggtgcgtcagtcgccaccctgaacgccgttgacctggtgtctagcggcatcaacaaacccgagggctccactaagtcgttccctgtgactgctatcgtgtttgcgagccctcacgtcgggtgccgcttctttaggtcggcgttcaactcatttccagacctgaaggcactacatgtgcagaacgctggcgacgtcgtgcccatgtacccacctctgggatacgtggacgtggccgtggagcttaccataagaacaatccgatctccgtacatgcgtaagccggccacagtgggaacactccacaatctcgagtgctacctacacggagtggccggggagcagggaagtgccggagggttcaagctagaggtggatcgtgacatagcgctggtgaacaagggtgccgacgctctcacggacgagcacccggtgccggcgtgttggtgggtccctagacacaagttcatggtcaagggggaagatgggcgatggacgctccaggatttcaagcacatctgagttactcacatcggccattgaaaggtaaattaggccttgatgtgattcacgacattgtactcgttaccaagtttctaaataacggctacggtttgtcaaccgtaccgagtatctttccctttttatgcaatataagtgaatgtttcacgacattgtactcgttaccaagggtct

SEQ ID NO: 12130 - protein, 434 aa, Triticum aestivum
  peptide (1)..(434): Ceres Seq. ID no. 15222329
  misc_feature (32)..(254): NCBI GI NO: 34911870 NR Description: lipase-like protein
  misc_feature (240)..(432): NCBI GI NO: 34911870 NR Description: lipase-like protein
  misc_feature (38)..(430): NCBI GI NO: 34911830 NR Description: lipase-like protein
  misc_feature (41)..(430): NCBI GI NO: 34911832 NR Description: lipase-like protein
  misc_feature (42)..(430): NCBI GI NO: 15233922 NR Description: lipase (class 3) family [Arabidopsis thaliana]
  misc_feature (35)..(430): NCBI GI NO: 34911842 NR Description: lipase-like protein
  misc_feature (41)..(428): NCBI GI NO: 15221426 NR Description: lipase (class 3) family [Arabidopsis thaliana]
  misc_feature (41)..(428): NCBI GI NO: 21537306 NR Description: lipase-like protein [Arabidopsis thaliana]
  misc_feature (41)..(430): NCBI GI NO: 1527001 NR Description: Ipomoea nil Pn47p
  misc_feature (38)..(429): NCBI GI NO: 34910484 NR Description: putative lipase
MSFLPIPLPIVGDIASRLNGQEKPRGDDTTSSAPAPVLGTVASRWRELHGENSWKGLLDPLDPHLRSSIISYGEMVQAAYDAFNTERRSPHCGACFYGYEDLLAGVGVPHHGNNYEVTKFIYATSSLPLPSSFLLLPLPSLPDVWSRESNWMGYVAVATDEGAAALGRRDIVVAWRGTVQNMEWVNDLDFAPVPAAPVLGSAASQHRLAVVHHGFLSMYTSSNKSSEFTKTSARDQVVKEVRRLVELYKDEEVSITICGHSLGASVATLNAVDLVSSGINKPEGSTKSFPVTAIVFASPHVGCRFFRSAFNSFPDLKALHVQNAGDVVPMYPPLGYVDVAVELTIRTIRSPYMRKPATVGTLHNLECYLHGVAGEQGSAGGFKLEVDRDIALVNKGADALTDEHPVPACWWVPRHKFMVKGEDGRWTLQDFKHI

SEQ ID NO: 12131 - protein, 360 aa, Triticum aestivum
  peptide (1)..(360): Ceres Seq. ID no. 15222330
  misc_feature (1)..(180): NCBI GI NO: 34911870 NR Description: lipase-like protein
  misc_feature (166)..(358): NCBI GI NO: 34911870 NR Description: lipase-like protein
  misc_feature (1)..(356): NCBI GI NO: 34911830 NR Description: lipase-like protein
  misc_feature (1)..(356): NCBI GI NO: 34911832 NR Description: lipase-like protein
  misc_feature (1)..(356): NCBI GI NO: 15233922 NR Description: lipase (class 3) family [Arabidopsis thaliana]
  misc_feature (1)..(356): NCBI GI NO: 34911842 NR Description: lipase-like protein
  misc_feature (1)..(354): NCBI GI NO: 15221426 NR Description: lipase (class 3) family [Arabidopsis thaliana]
  misc_feature (1)..(354): NCBI GI NO: 21537306 NR Description: lipase-like protein [Arabidopsis thaliana]
  misc_feature (1)..(356): NCBI GI NO: 1527001 NR Description: Ipomoea nil Pn47p
  misc_feature (1)..(355): NCBI GI NO: 34910484 NR Description: putative lipase
MVQAAYDAFNTERRSPHCGACFYGYEDLLAGVGVPHHGNNYEVTKFIYATSSLPLPSSFLLLPLPSLPDVWSRESNWMGYVAVATDEGAAALGRRDIVVAWRGTVQNMEWVNDLDFAPVPAAPVLGSAASQHRLAVVHHGFLSMYTSSNKSSEFTKTSARDQVVKEVRRLVELYKDEEVSITICGHSLGASVATLNAVDLVSSGINKPEGSTKSFPVTAIVFASPHVGCRFFRSAFNSFPDLKALHVQNAGDVVPMYPPLGYVDVAVELTIRTIRSPYMRKPATVGTLHNLECYLHGVAGEQGSAGGFKLEVDRDIALVNKGADALTDEHPVPACWWVPRHKFMVKGEDGRWTLQDFKHI

SEQ ID NO: 12132 - protein, 283 aa, Triticum aestivum
  peptide (1)..(283): Ceres Seq. ID no. 15222331
  misc_feature (1)..(103): NCBI GI NO: 34911870 NR Description: lipase-like protein
  misc_feature (89)..(281): NCBI GI NO: 34911870 NR Description: lipase-like protein
  misc_feature (1)..(279): NCBI GI NO: 34911830 NR Description: lipase-like protein
  misc_feature (1)..(279): NCBI GI NO: 34911832 NR Description: lipase-like protein
  misc_feature (1)..(279): NCBI GI NO: 15233922 NR Description: lipase (class 3) family [Arabidopsis thaliana]
  misc_feature (1)..(279): NCBI GI NO: 34911842 NR Description: lipase-like protein
  misc_feature (1)..(277): NCBI GI NO: 15221426 NR Description: lipase (class 3) family [Arabidopsis thaliana]
  misc_feature (1)..(277): NCBI GI NO: 21537306 NR Description: lipase-like protein [Arabidopsis thaliana]
  misc_feature (1)..(279): NCBI GI NO: 1527001 NR Description: Ipomoea nil Pn47p
  misc_feature (1)..(278): NCBI GI NO: 34910484 NR Description: putative lipase
MGYVAVATDEGAAALGRRDIVVAWRGTVQNMEWVNDLDFAPVPAAPVLGSAASQHRLAVVHHGFLSMYTSSNKSSEFTKTSARDQVVKEVRRLVELYKDEEVSITICGHSLGASVATLNAVDLVSSGINKPEGSTKSFPVTAIVFASPHVGCRFFRSAFNSFPDLKALHVQNAGDVVPMYPPLGYVDVAVELTIRTIRSPYMRKPATVGTLHNLECYLHGVAGEQGSAGGFKLEVDRDIALVNKGADALTDEHPVPACWWVPRHKFMVKGEDGRWTLQDFKHI

SEQ ID NO: 12133 - DNA, 1321 bp, Triticum aestivum
  misc_feature (1)..(1321): Ceres Seq. ID no. 13596393
tcccccgggctscmggaattcgcaactttattgwgtttamcattacctagaacatcctaatcgaaaaaatatttgctccgcctctcgttctctcccccccccccgtctctctctctagcctctccattccgtgtggcgaccgagcgaaccctagccgagattagactaccatccccaatctaccggaggaggacgaggacgacgccgacgagatgctgagggttgcggggaggaggctctcgtcttccctctcctggcgccccgcggcgaccgtcggagccaggggcccgctcgccggcgccggcggccctgggagagacgacgacgacggttcggcctaccagcggcggttcgccatcgagtcccccttcttcaccgccgcgagaggcttttcttcggctgaaacacttgttccacggaaccaagatgctgggttggctgaactcccagccactgttgctgcactgaagaaccccaactcaaaaatcctttatgaccagtacaaccatgaaagatatcctcctggagatcccagcaagcgtgcctttgcctactttgttctgagtggtgggagattcgtatatgcatcactgctgcgtctccttgtcttgaagtttgtcttgagcatgtcagcaagtaaggatgttcttgcacttgcttcccttgaggttgatctatccagcattgaacccggcagcacagtgactgtcaagtggcgtggaaagccagtcttcatcaggcgacggacagacgatgacatcaagctggccaacagcgtggatgttgcatccctgcgccacccagagcaagacgctgagcgtgtgaagaacccagagtggctggtggttattggtgtctgcactcatcttggttgcattccccttcccaactctggagactttggtggctggttctgcccgtgccatggctcccactatgacatctctggcagaatccgcaagggccctgccccgtacaaccttgaggtgcccacctacagtttcttggaagataacaagatgctcataggctaagagcctaaaaccagtacctaccaacatatattctccacaggagtgaattcctgttgcgctgttattttgttttcaatgtggctaggagtttttgtttcaggactatcgcaacggtgatccactgttacctaccgaagttcatttgcagtgcgaaataattgtttctcctatgttgctactggattgtaagttttgtactgattttctgagaccctattggaaggatattgtacacctcttctggttcttgctccctatatatttgataaataagcaaacattcttcc

SEQ ID NO: 12134 - protein, 273 aa, Triticum aestivum
  peptide (1)..(273): Ceres Seq. ID no. 15221859
  misc_feature (173)..(269): Pfam Name: Pfam Description:  Rieske [2Fe-2S] domain
  misc_feature (1)..(273): NCBI GI NO: 1717957 NR Description: Ubiquinol-cytochrome C reductase iron-sulfur subunit
  misc_feature (1)..(273): NCBI GI NO: 38347166 NR Description: OSJNBa0039C07.12
  misc_feature (1)..(273): NCBI GI NO: 1076675 NR Description: ubiquinol-cytochrome-c reductase (EC 1
  misc_feature (1)..(273): NCBI GI NO: 586145 NR Description: Ubiquinol-cytochrome C reductase iron-sulfur subunit
  misc_feature (1)..(273): NCBI GI NO: 1717950 NR Description: Ubiquinol-cytochrome C reductase iron-sulfur subunit 2
  misc_feature (1)..(273): NCBI GI NO: 1717953 NR Description: Ubiquinol-cytochrome C reductase iron-sulfur subunit 5
  misc_feature (1)..(273): NCBI GI NO: 1717951 NR Description: Ubiquinol-cytochrome C reductase iron-sulfur subunit 3
  misc_feature (36)..(273): NCBI GI NO: 1717949 NR Description: Ubiquinol-cytochrome C reductase iron-sulfur subunit 1
  misc_feature (1)..(273): NCBI GI NO: 18417067 NR Description: ubiquinol--cytochrome C reductase
  misc_feature (1)..(273): NCBI GI NO: 21553507 NR Description: ubiquinol--cytochrome-c reductase-like protein
MLRVAGRRLSSSLSWRPAATVGARGPLAGAGGPGRDDDDGSAYQRRFAIESPFFTAARGFSSAETLVPRNQDAGLAELPATVAALKNPNSKILYDQYNHERYPPGDPSKRAFAYFVLSGGRFVYASLLRLLVLKFVLSMSASKDVLALASLEVDLSSIEPGSTVTVKWRGKPVFIRRRTDDDIKLANSVDVASLRHPEQDAERVKNPEWLVVIGVCTHLGCIPLPNSGDFGGWFCPCHGSHYDISGRIRKGPAPYNLEVPTYSFLEDNKMLIG

SEQ ID NO: 12135 - DNA, 697 bp, Triticum aestivum
  misc_feature (1)..(697): Ceres Seq. ID no. 12597207
  misc_feature (680)..(680): n is a, c, t, g, unknown, or other
  misc_feature (518)..(518): n is a, c, t, g, unknown, or other
  misc_feature (456)..(456): n is a, c, t, g, unknown, or other
  misc_feature (691)..(691): n is a, c, t, g, unknown, or other
  misc_feature (285)..(285): n is a, c, t, g, unknown, or other
attccgcctccacccccgaactccaaaccctagtagcgccgccgccgccaggtaagaggcgagatggtgtccggctccggcgtgtgcgccaagcgcgtggtggtggacgcccgccaccacatgctcggccgcctggcgtcgatcgtcgccaaggagctgctaaacgggcagcgtgtggtggtggtccgctgcgaggagatctgcatgtccggcggcctcgtccgccagaagatgaagtacctccgcttcctccgcaagaggatgaacaccaagccctcccacggncccatccacttccgcgcccccgccaagatcctctggcgcaccatccgcggtatgattccgcacaagaccgcgaggggcgaggccgcgctcgccaggctcaaggcgtacgagggcgtgccgccgccgtacgacaggaccaagcgaggcgagcaaggagtgaggcagggtcancggtggggcggggctccggtggcgagatcgccggcgggagcagctccggcggtcgagtgctntgcgagcaagcgtgggcggcgagggacttggtgcacacaacatgctcgataaaatgctcaaggagtgaagtgtactgcagtctactgacgggtggcccctttgtgttaacttaacgttgcagcagatgccgttagatatgggtgccacgtcagccctaacancgggctcagtntgtcat

SEQ ID NO: 12136 - protein, 209 aa, Triticum aestivum
  peptide (1)..(209): Ceres Seq. ID no. 12597208
  misc_feature (95)..(95): Xaa is any aa, unknown or other
  misc_feature (152)..(152): Xaa is any aa, unknown or other
  misc_feature (172)..(172): Xaa is any aa, unknown or other
SASTPELQTLVAPPPPGKRRDGVRLRRVRQARGGGRPPPHARPPGVDRRQGAAKRAACGGGPLRGDLHVRRPRPPEDEVPPLPPQEDEHQALPRXHPLPRPRQDPLAHHPRYDSAQDREGRGRARQAQGVRGRAAAVRQDQARRARSEAGSXVGRGSGGEIAGGSSSGGRVXCEQAWAARDLVHTTCSIKCSRSEVYCSLLTGGPFVLT

SEQ ID NO: 12137 - protein, 168 aa, Triticum aestivum
  peptide (1)..(168): Ceres Seq. ID no. 12597209
  misc_feature (11)..(122): Pfam Name: Pfam Description:  Ribosomal protein L13
  misc_feature (1)..(122): NCBI GI NO: 37718812 NR Description: putative ribosomal protein L13a
  misc_feature (1)..(122): NCBI GI NO: 21326116 NR Description: putative 60S ribosomal protein [Sorghum bicolor]
  misc_feature (1)..(122): NCBI GI NO: 33146452 NR Description: putative 60S ribosomal protein
  misc_feature (1)..(122): NCBI GI NO: 34899414 NR Description: putative 60S ribosomal protein
  misc_feature (1)..(122): NCBI GI NO: 6093869 NR Description: 60S RIBOSOMAL PROTEIN L13A
  misc_feature (1)..(122): NCBI GI NO: 40748267 NR Description: 60S ribosomal protein L13a [Capsicum annuum]
  misc_feature (1)..(122): NCBI GI NO: 15230197 NR Description: 60S ribosomal protein, putative
  misc_feature (1)..(122): NCBI GI NO: 19423912 NR Description: putative 60S ribosomal protein
  misc_feature (1)..(122): NCBI GI NO: 15239698 NR Description: 60S ribosomal protein L13a; protein id:At5g48760
  misc_feature (1)..(122): NCBI GI NO: 15235617 NR Description: ribosomal protein L13a like protein
  misc_feature (74)..(74): Xaa is any aa, unknown or other
  misc_feature (131)..(131): Xaa is any aa, unknown or other
  misc_feature (152)..(152): Xaa is any aa, unknown or other
MVSGSGVCAKRVVVDARHHMLGRLASIVAKELLNGQRVVVVRCEEICMSGGLVRQKMKYLRFLRKRMNTKPSHXPIHFRAPAKILWRTIRGMIPHKTARGEAALARLKAYEGVPPPYDRTKRGEQGVRQGXRWGGAPVARSPAGAAPAVECXASKRGRRGTWCTQHAR

SEQ ID NO: 12138 - protein, 149 aa, Triticum aestivum
  peptide (1)..(149): Ceres Seq. ID no. 12597210
  misc_feature (1)..(103): Pfam Name: Pfam Description:  Ribosomal protein L13
  misc_feature (1)..(103): NCBI GI NO: 37718812 NR Description: putative ribosomal protein L13a
  misc_feature (1)..(103): NCBI GI NO: 21326116 NR Description: putative 60S ribosomal protein [Sorghum bicolor]
  misc_feature (1)..(103): NCBI GI NO: 33146452 NR Description: putative 60S ribosomal protein
  misc_feature (1)..(103): NCBI GI NO: 34899414 NR Description: putative 60S ribosomal protein
  misc_feature (1)..(103): NCBI GI NO: 6093869 NR Description: 60S RIBOSOMAL PROTEIN L13A
  misc_feature (1)..(103): NCBI GI NO: 40748267 NR Description: 60S ribosomal protein L13a [Capsicum annuum]
  misc_feature (1)..(103): NCBI GI NO: 15230197 NR Description: 60S ribosomal protein, putative
  misc_feature (1)..(103): NCBI GI NO: 19423912 NR Description: putative 60S ribosomal protein
  misc_feature (1)..(103): NCBI GI NO: 15239698 NR Description: 60S ribosomal protein L13a; protein id:At5g48760
  misc_feature (1)..(103): NCBI GI NO: 15235617 NR Description: ribosomal protein L13a like protein
  misc_feature (55)..(55): Xaa is any aa, unknown or other
  misc_feature (112)..(112): Xaa is any aa, unknown or other
  misc_feature (133)..(133): Xaa is any aa, unknown or other
MLGRLASIVAKELLNGQRVVVVRCEEICMSGGLVRQKMKYLRFLRKRMNTKPSHXPIHFRAPAKILWRTIRGMIPHKTARGEAALARLKAYEGVPPPYDRTKRGEQGVRQGXRWGGAPVARSPAGAAPAVECXASKRGRRGTWCTQHAR

SEQ ID NO: 12139 - DNA, 1496 bp, Triticum aestivum
  misc_feature (1)..(1496): Ceres Seq. ID no. 15226198
gactttctcgcccgaccgctccttttgcgccgccgccaccgccgcatccgcgaaaacctcgcccccactcccgccgccgtctccgccgcagctccggacccctagaatccgagcggcgatggcctcctccatactctccgactgctcctcctgcgccacctcccgcctcctccccctccgccgcgccctccacccgccgccgccccgcttccgcccctcccccgccccggcgccgttgccgaggaggcctctcctcgccgccgccgcctcgctcccgctcctcccccgcgcgcgccgcatggccgcgctcgccgccgcctcttccgccgactcagccactgttttggctgatgcatctgccaagatcatcgacggcaagctggtggcaaagcaaataagggaggaggtcggcgttgagatcgccaggatgaaggacacgatcggagtggtgcctgggctggcggtcatcctagtcggctcgaggaaggattcccagacatacgtgcggaacaagaagaaggcgtgcgatgcggtcggtatcaagtcgtatgaggttaatttgccagaggacgcttccgagtacgaggtcatcaagcacatagcaaccttcaacgatgatccgtcggtgcatggcatcttggttcagctgcccttacctcgccatatgaacgacgagaacatattgaatgctgttagtattgaaaaggacgttgatggctttcatccagtgaacattggacgacttgcaatgcaaggtcgggatccattctttgttccatgcacccctaaaggatgcatggagctgctacacagatctggagttgaaataaaagggaagagagctgttgtaattggaaggagcaatattgtggggacgcctgctgctttactcttacaaaaagcaaatgcaacagtgagtattgtacattcaaaaaccaagaaccccgaggaaataacaagacaagcagatattataatcgcggctgttggagttgctaacctggtcagagggagttggataaagcctggagctgctattattgatgttggcatcaatccggttgatgatccagcaagccctcgaggttaccggctagttggagatgtctgctttgaggaggcctccaaggttgcaggagccatcacaccagttcccggcggtgtcgggccaatgacaattgcgatgcttctgtcgaacacactggattcagctaaaagaatccacaagttcaagtaaccggacaaccctgtactcagaacttgggagagcgcttaacctttggtttagtctaccaggcaaggtattgccaactgtttgatgcgccttttgttggaccagaaaaggtcaacaagagccgtgaaataaatttttgacaggggtgagaaatttaccccggcttcaaactgtaccgtattcgctaatgttccatgaaatcccagttcaatctgtggcacaacttaggtcaattgagatctcagttaagcttggacgaacc

SEQ ID NO: 12140 - protein, 411 aa, Triticum aestivum
  peptide (1)..(411): Ceres Seq. ID no. 15226199
  misc_feature (240)..(393): Pfam Name: P Pfam Description: Tetrahydrofolate dehydrogenase/cyclohydrolase
  misc_feature (40)..(411): NCBI GI NO: 15236888 NR Description: tetrahydrofolate dehydrogenase/cyclohydrolase
  misc_feature (116)..(407): NCBI GI NO: 21553669 NR Description: 5
  misc_feature (116)..(407): NCBI GI NO: 15230449 NR Description: tetrahydrofolate dehydrogenase/cyclohydrolase
  misc_feature (120)..(406): NCBI GI NO: 11252953 NR Description: methylenetetrahydrofolate dehydrogenase
  misc_feature (120)..(406): NCBI GI NO: 12083525 NR Description: similar to Pisum sativum methylenetetrahydrofolatedehydrogenase
  misc_feature (122)..(407): NCBI GI NO: 25284864 NR Description: methylenetetrahydrofolate dehydrogenase
  misc_feature (122)..(407): NCBI GI NO: 30687594 NR Description: tetrahydrofolate dehydrogenase/cyclohydrolase
  misc_feature (189)..(411): NCBI GI NO: 15236884 NR Description: tetrahydrofolate dehydrogenase/cyclohydrolase
  misc_feature (120)..(406): NCBI GI NO: 9992889 NR Description: C1-THFS protein [Yarrowia lipolytica]
  misc_feature (234)..(393): NCBI GI NO: 17017267 NR Description: methylenetetrahydrofolatedehydrogenase/ methylenetetrahydrofolate cylcohydrolase isoform 2
TFSPDRSFCAAATAASAKTSPPLPPPSPPQLRTPRIRAAMASSILSDCSSCATSRLLPLRRALHPPPPRFRPSPAPAPLPRRPLLAAAASLPLLPRARRMAALAAASSADSATVLADASAKIIDGKLVAKQIREEVGVEIARMKDTIGVVPGLAVILVGSRKDSQTYVRNKKKACDAVGIKSYEVNLPEDASEYEVIKHIATFNDDPSVHGILVQLPLPRHMNDENILNAVSIEKDVDGFHPVNIGRLAMQGRDPFFVPCTPKGCMELLHRSGVEIKGKRAVVIGRSNIVGTPAALLLQKANATVSIVHSKTKNPEEITRQADIIIAAVGVANLVRGSWIKPGAAIIDVGINPVDDPASPRGYRLVGDVCFEEASKVAGAITPVPGGVGPMTIAMLLSNTLDSAKRIHKFK

SEQ ID NO: 12141 - protein, 372 aa, Triticum aestivum
  peptide (1)..(372): Ceres Seq. ID no. 15226200
  misc_feature (201)..(354): Pfam Name: P Pfam Description: Tetrahydrofolate dehydrogenase/cyclohydrolase
  misc_feature (1)..(372): NCBI GI NO: 15236888 NR Description: tetrahydrofolate dehydrogenase/cyclohydrolase
  misc_feature (77)..(368): NCBI GI NO: 21553669 NR Description: 5
  misc_feature (77)..(368): NCBI GI NO: 15230449 NR Description: tetrahydrofolate dehydrogenase/cyclohydrolase
  misc_feature (81)..(367): NCBI GI NO: 11252953 NR Description: methylenetetrahydrofolate dehydrogenase
  misc_feature (81)..(367): NCBI GI NO: 12083525 NR Description: similar to Pisum sativum methylenetetrahydrofolatedehydrogenase
  misc_feature (83)..(368): NCBI GI NO: 25284864 NR Description: methylenetetrahydrofolate dehydrogenase
  misc_feature (83)..(368): NCBI GI NO: 30687594 NR Description: tetrahydrofolate dehydrogenase/cyclohydrolase
  misc_feature (150)..(372): NCBI GI NO: 15236884 NR Description: tetrahydrofolate dehydrogenase/cyclohydrolase
  misc_feature (81)..(367): NCBI GI NO: 9992889 NR Description: C1-THFS protein [Yarrowia lipolytica]
  misc_feature (195)..(354): NCBI GI NO: 17017267 NR Description: methylenetetrahydrofolatedehydrogenase/ methylenetetrahydrofolate cylcohydrolase isoform 2
MASSILSDCSSCATSRLLPLRRALHPPPPRFRPSPAPAPLPRRPLLAAAASLPLLPRARRMAALAAASSADSATVLADASAKIIDGKLVAKQIREEVGVEIARMKDTIGVVPGLAVILVGSRKDSQTYVRNKKKACDAVGIKSYEVNLPEDASEYEVIKHIATFNDDPSVHGILVQLPLPRHMNDENILNAVSIEKDVDGFHPVNIGRLAMQGRDPFFVPCTPKGCMELLHRSGVEIKGKRAVVIGRSNIVGTPAALLLQKANATVSIVHSKTKNPEEITRQADIIIAAVGVANLVRGSWIKPGAAIIDVGINPVDDPASPRGYRLVGDVCFEEASKVAGAITPVPGGVGPMTIAMLLSNTLDSAKRIHKFK

SEQ ID NO: 12142 - protein, 312 aa, Triticum aestivum
  peptide (1)..(312): Ceres Seq. ID no. 15226201
  misc_feature (141)..(294): Pfam Name: P Pfam Description: Tetrahydrofolate dehydrogenase/cyclohydrolase
  misc_feature (1)..(312): NCBI GI NO: 15236888 NR Description: tetrahydrofolate dehydrogenase/cyclohydrolase
  misc_feature (17)..(308): NCBI GI NO: 21553669 NR Description: 5
  misc_feature (17)..(308): NCBI GI NO: 15230449 NR Description: tetrahydrofolate dehydrogenase/cyclohydrolase
  misc_feature (21)..(307): NCBI GI NO: 11252953 NR Description: methylenetetrahydrofolate dehydrogenase
  misc_feature (21)..(307): NCBI GI NO: 12083525 NR Description: similar to Pisum sativum methylenetetrahydrofolatedehydrogenase
  misc_feature (23)..(308): NCBI GI NO: 25284864 NR Description: methylenetetrahydrofolate dehydrogenase
  misc_feature (23)..(308): NCBI GI NO: 30687594 NR Description: tetrahydrofolate dehydrogenase/cyclohydrolase
  misc_feature (90)..(312): NCBI GI NO: 15236884 NR Description: tetrahydrofolate dehydrogenase/cyclohydrolase
  misc_feature (21)..(307): NCBI GI NO: 9992889 NR Description: C1-THFS protein [Yarrowia lipolytica]
  misc_feature (135)..(294): NCBI GI NO: 17017267 NR Description: methylenetetrahydrofolatedehydrogenase/ methylenetetrahydrofolate cylcohydrolase isoform 2
MAALAAASSADSATVLADASAKIIDGKLVAKQIREEVGVEIARMKDTIGVVPGLAVILVGSRKDSQTYVRNKKKACDAVGIKSYEVNLPEDASEYEVIKHIATFNDDPSVHGILVQLPLPRHMNDENILNAVSIEKDVDGFHPVNIGRLAMQGRDPFFVPCTPKGCMELLHRSGVEIKGKRAVVIGRSNIVGTPAALLLQKANATVSIVHSKTKNPEEITRQADIIIAAVGVANLVRGSWIKPGAAIIDVGINPVDDPASPRGYRLVGDVCFEEASKVAGAITPVPGGVGPMTIAMLLSNTLDSAKRIHKFK

SEQ ID NO: 12143 - DNA, 1347 bp, Triticum aestivum
  misc_feature (1)..(1347): Ceres Seq. ID no. 14302247
gacaccgtgactgactcggccgtacggtatcgattcccgccggaaaaggaatcagcggcgagcgccatcgacggaagcaagtcattaggtatctagctagctcctttaagagagaaaaaaaaggagttatctagcttgctacttctaggcggaggttgagatggttcaggccggattggctcagccggccccgagcacgggggcgccggcgatggcggcagcggcggtgcacgtcgcgctcaagatcccctccggcggggggccgtatgcacgggccaagcactaccagctagtggagaaggacttggacgcttcgatcgcgtggttttggaaggcgatcgagacgggggacaaggtggacagcgcgctcaaggacatggcggtggtgatgaagcagcgcggttacctggacgacgccgtggacgccatccggtcgctgcgccacctctgcccggggaagcagtcgcaggagtccctggacaacatcctgctcgacctctacaaggccagcgggcgcaccaaggaggagatcgagctgctcaagcacaagctccgccggatctaccacggccaggccttccccgccggcaaggccaccaagcgcgcccgctcccacggccgcaagatccacgtctccgtccagcaggagacgtcccgggtgctgggcaacctcgcgtgggcctacatgcagcagcgcaacttcatggcggccgaggccgtgtaccgcaaggcgcagatggtggagcccgacgccaacaaggcctgcaacctcgcgctgtgcctcatggagcaggggcggctaggggacgccgagggggtgctcgccgacgtggtcgccggcgcgttccgcgacgggagggagagggagcacggcggcgggaaggtcgtgaggaaggcggaggagctgctggagcggatcagggcggagacgggcggcggcgagaaggaggccggggaggaggacggcgtcgaggccgacgagatggcggagctactggacatggtggccaggcagtgggccgcgccgtacaggaagagccaccggaggctgcccgtgttcgaggagatcacaccgttcggcagggagcagatggcttgctagctctagaagctcatgagaactcaatagaagctgtgagtgtgcagtagcttcaccagaatattgtgaagctcgtgagaactcaatagaagttgtgtgtgtgtgtgcagtactgcagtagcttgatcagaatggtgtgaagcgtacgtgttaatcaatgtgacatatgttctatgttggtgctcatgtatgtagatgtgttgcatgtgcagtgtacaagttctttttggcggtttcatgtgtacaac

SEQ ID NO: 12144 - protein, 313 aa, Triticum aestivum
  peptide (1)..(313): Ceres Seq. ID no. 14302248
  misc_feature (165)..(198): Pfam Name: Pfam Description:  TPR Domain
  misc_feature (24)..(313): NCBI GI NO: 3859116 NR Description: unknown [Oryza sativa]
  misc_feature (19)..(313): NCBI GI NO: 25406811 NR Description: hypothetical protein
  misc_feature (19)..(313): NCBI GI NO: 30678993 NR Description: male sterility MS5 family [Arabidopsis thaliana]
  misc_feature (24)..(313): NCBI GI NO: 9758884 NR Description: gb|AAC72543
  misc_feature (24)..(313): NCBI GI NO: 30695554 NR Description: male sterility MS5 family [Arabidopsis thaliana]
  misc_feature (9)..(262): NCBI GI NO: 15230439 NR Description: male sterility MS5, putative
  misc_feature (24)..(264): NCBI GI NO: 3859112 NR Description: male sterility MS5 [Arabidopsis thaliana]
  misc_feature (24)..(264): NCBI GI NO: 4028970 NR Description: pollenless3 [Arabidopsis thaliana]
  misc_feature (24)..(264): NCBI GI NO: 15233432 NR Description: male sterility MS5/pollenless 3
  misc_feature (29)..(224): NCBI GI NO: 29467532 NR Description: P0582D05.25
MVQAGLAQPAPSTGAPAMAAAAVHVALKIPSGGGPYARAKHYQLVEKDLDASIAWFWKAIETGDKVDSALKDMAVVMKQRGYLDDAVDAIRSLRHLCPGKQSQESLDNILLDLYKASGRTKEEIELLKHKLRRIYHGQAFPAGKATKRARSHGRKIHVSVQQETSRVLGNLAWAYMQQRNFMAAEAVYRKAQMVEPDANKACNLALCLMEQGRLGDAEGVLADVVAGAFRDGREREHGGGKVVRKAEELLERIRAETGGGEKEAGEEDGVEADEMAELLDMVARQWAAPYRKSHRRLPVFEEITPFGREQMAC

SEQ ID NO: 12145 - protein, 296 aa, Triticum aestivum
  peptide (1)..(296): Ceres Seq. ID no. 14302249
  misc_feature (148)..(181): Pfam Name: Pfam Description:  TPR Domain
  misc_feature (7)..(296): NCBI GI NO: 3859116 NR Description: unknown [Oryza sativa]
  misc_feature (2)..(296): NCBI GI NO: 25406811 NR Description: hypothetical protein
  misc_feature (2)..(296): NCBI GI NO: 30678993 NR Description: male sterility MS5 family [Arabidopsis thaliana]
  misc_feature (7)..(296): NCBI GI NO: 9758884 NR Description: gb|AAC72543
  misc_feature (7)..(296): NCBI GI NO: 30695554 NR Description: male sterility MS5 family [Arabidopsis thaliana]
  misc_feature (1)..(245): NCBI GI NO: 15230439 NR Description: male sterility MS5, putative
  misc_feature (7)..(247): NCBI GI NO: 3859112 NR Description: male sterility MS5 [Arabidopsis thaliana]
  misc_feature (7)..(247): NCBI GI NO: 4028970 NR Description: pollenless3 [Arabidopsis thaliana]
  misc_feature (7)..(247): NCBI GI NO: 15233432 NR Description: male sterility MS5/pollenless 3
  misc_feature (12)..(207): NCBI GI NO: 29467532 NR Description: P0582D05.25
MAAAAVHVALKIPSGGGPYARAKHYQLVEKDLDASIAWFWKAIETGDKVDSALKDMAVVMKQRGYLDDAVDAIRSLRHLCPGKQSQESLDNILLDLYKASGRTKEEIELLKHKLRRIYHGQAFPAGKATKRARSHGRKIHVSVQQETSRVLGNLAWAYMQQRNFMAAEAVYRKAQMVEPDANKACNLALCLMEQGRLGDAEGVLADVVAGAFRDGREREHGGGKVVRKAEELLERIRAETGGGEKEAGEEDGVEADEMAELLDMVARQWAAPYRKSHRRLPVFEEITPFGREQMAC

SEQ ID NO: 12146 - protein, 241 aa, Triticum aestivum
  peptide (1)..(241): Ceres Seq. ID no. 14302250
  misc_feature (93)..(126): Pfam Name: Pfam Description:  TPR Domain
  misc_feature (1)..(241): NCBI GI NO: 3859116 NR Description: unknown [Oryza sativa]
  misc_feature (1)..(241): NCBI GI NO: 25406811 NR Description: hypothetical protein
  misc_feature (1)..(241): NCBI GI NO: 30678993 NR Description: male sterility MS5 family [Arabidopsis thaliana]
  misc_feature (1)..(241): NCBI GI NO: 9758884 NR Description: gb|AAC72543
  misc_feature (1)..(241): NCBI GI NO: 30695554 NR Description: male sterility MS5 family [Arabidopsis thaliana]
  misc_feature (1)..(190): NCBI GI NO: 15230439 NR Description: male sterility MS5, putative
  misc_feature (1)..(192): NCBI GI NO: 3859112 NR Description: male sterility MS5 [Arabidopsis thaliana]
  misc_feature (1)..(192): NCBI GI NO: 4028970 NR Description: pollenless3 [Arabidopsis thaliana]
  misc_feature (1)..(192): NCBI GI NO: 15233432 NR Description: male sterility MS5/pollenless 3
  misc_feature (1)..(152): NCBI GI NO: 29467532 NR Description: P0582D05.25
MAVVMKQRGYLDDAVDAIRSLRHLCPGKQSQESLDNILLDLYKASGRTKEEIELLKHKLRRIYHGQAFPAGKATKRARSHGRKIHVSVQQETSRVLGNLAWAYMQQRNFMAAEAVYRKAQMVEPDANKACNLALCLMEQGRLGDAEGVLADVVAGAFRDGREREHGGGKVVRKAEELLERIRAETGGGEKEAGEEDGVEADEMAELLDMVARQWAAPYRKSHRRLPVFEEITPFGREQMAC

SEQ ID NO: 12147 - DNA, 1570 bp, Triticum aestivum
  misc_feature (1)..(1570): Ceres Seq. ID no. 13596470
ttacctagaacatcctaatctaaaaatggaaagcacgcaccggaagcatcttagaagaagaagagccagcaacaaggaacgatatccgtctgtgttggacgcgccaagacgatcgaggcatgcctgctgccgtctctgggtgcctcttggcgaggagcatggcgagccaccacaaacaccagcagcggggagcggcggcgacggcgccgggggcactgccggtgatcaacattggccggctcggcgacaaggaccccgccgcgcgggcgctcgtggtccaggacatcgcccgggcgtgccgcgaccgggggtgcttccaggtggtaaaccacggcgtcagcaagtcggccatggacggcgccctggaggccgcctcggagttcttcgacatgcccgcggagcgcaaggcggcgttcgcctgcgccgacatccgcagcccggtccggtacgacaccagctccaaggacggcatcagcaaggccaggtctttcctcaagcactacgccaatcccctcgaccactgggtcgactcctggccaacccaaccagcaacatacaggaagaagatggggacgtacgcggtggagatacataaactgtcaatgcagctcacaggggccatcgtgcaggggctggggctatgcccaatgcacctgcaggagaagctcggagcagggatgcagttcatggggctcaacaactacccgcaggggtcgtcccgggcgggcgacacggtcgggctggcgccgcactccgacattggcttcatcaccatcctgctgcagagctcgccggggctcgaggtgacgcaccacgacgacggcggcgtctggacgcccgtcccggccatcccgggggcgctccacgtcgacctcggcgaccacctggaggtgctgagcaacgggcggctcaggtccctcctgcaccgggccatcctcaacaccgacgaggcgaggatctccatcgccagcatccacggcgcggccatggacgagaaggtcgggtgcgccgaggagctcgtcgacgagcgccacccgaggatgtacagggagagcagcttccatgacttcctcgacttcctgcccaccaacgtcaaggcgtaccggaggttcgtcgagaccctcaagatcgacagcgcttaattccttctgctgcattaagacacacttagctgaatgagacactgcacataagtgtccatttagttgtgtagtcttactgctagctgaagaacaaaattacggtttaattatgcctccattatcaagtagtatctcagtacgaataagggagtatggtatcagcagctggataggcgtgtgattagcagggtgccttttttttcactccatttctttctttggggaaatgcagtatgtctgcatgtctcttccatcaaaaggaggatcaaaggaaccttgccaagttcttccggttctttggtagtacctacatacaccatgtgttgatcagtgcagtcctatatgtgtatcagttgatttcacctatagaaatttactttctcatgggatatattgcgcaacgatatattaaatacaatttactgttt

SEQ ID NO: 12148 - protein, 340 aa, Triticum aestivum
  peptide (1)..(340): Ceres Seq. ID no. 13596471
  misc_feature (186)..(286): Pfam Name: II Pfam Description: 2OG-Fe
  misc_feature (28)..(340): NCBI GI NO: 7433240 NR Description: probable flavonol synthase
  misc_feature (28)..(340): NCBI GI NO: 30689834 NR Description: flavonol synthase family [Arabidopsis thaliana]
  misc_feature (68)..(337): NCBI GI NO: 15240797 NR Description: oxidoreductase, 2OG-Fe(II) oxygenase family
  misc_feature (40)..(337): NCBI GI NO: 15228020 NR Description: oxidoreductase, 2OG-Fe(II) oxygenase family
  misc_feature (35)..(317): NCBI GI NO: 37536444 NR Description: unknown protein
  misc_feature (31)..(319): NCBI GI NO: 38345873 NR Description: OSJNBa0064M23.15
  misc_feature (28)..(319): NCBI GI NO: 15235124 NR Description: oxidoreductase, 2OG-Fe(II) oxygenase family
  misc_feature (32)..(319): NCBI GI NO: 15235126 NR Description: oxidoreductase, 2OG-Fe(II) oxygenase family
  misc_feature (24)..(321): NCBI GI NO: 21327037 NR Description: putative flavanone 3-hydroxylase
  misc_feature (10)..(317): NCBI GI NO: 38345872 NR Description: OSJNBa0064M23.14
MPAAVSGCLLARSMASHHKHQQRGAAATAPGALPVINIGRLGDKDPAARALVVQDIARACRDRGCFQVVNHGVSKSAMDGALEAASEFFDMPAERKAAFACADIRSPVRYDTSSKDGISKARSFLKHYANPLDHWVDSWPTQPATYRKKMGTYAVEIHKLSMQLTGAIVQGLGLCPMHLQEKLGAGMQFMGLNNYPQGSSRAGDTVGLAPHSDIGFITILLQSSPGLEVTHHDDGGVWTPVPAIPGALHVDLGDHLEVLSNGRLRSLLHRAILNTDEARISIASIHGAAMDEKVGCAEELVDERHPRMYRESSFHDFLDFLPTNVKAYRRFVETLKIDSA

SEQ ID NO: 12149 - protein, 327 aa, Triticum aestivum
  peptide (1)..(327): Ceres Seq. ID no. 13596472
  misc_feature (173)..(273): Pfam Name: II Pfam Description: 2OG-Fe
  misc_feature (15)..(327): NCBI GI NO: 7433240 NR Description: probable flavonol synthase
  misc_feature (15)..(327): NCBI GI NO: 30689834 NR Description: flavonol synthase family [Arabidopsis thaliana]
  misc_feature (55)..(324): NCBI GI NO: 15240797 NR Description: oxidoreductase, 2OG-Fe(II) oxygenase family
  misc_feature (27)..(324): NCBI GI NO: 15228020 NR Description: oxidoreductase, 2OG-Fe(II) oxygenase family
  misc_feature (22)..(304): NCBI GI NO: 37536444 NR Description: unknown protein
  misc_feature (18)..(306): NCBI GI NO: 38345873 NR Description: OSJNBa0064M23.15
  misc_feature (15)..(306): NCBI GI NO: 15235124 NR Description: oxidoreductase, 2OG-Fe(II) oxygenase family
  misc_feature (19)..(306): NCBI GI NO: 15235126 NR Description: oxidoreductase, 2OG-Fe(II) oxygenase family
  misc_feature (11)..(308): NCBI GI NO: 21327037 NR Description: putative flavanone 3-hydroxylase
  misc_feature (1)..(304): NCBI GI NO: 38345872 NR Description: OSJNBa0064M23.14
MASHHKHQQRGAAATAPGALPVINIGRLGDKDPAARALVVQDIARACRDRGCFQVVNHGVSKSAMDGALEAASEFFDMPAERKAAFACADIRSPVRYDTSSKDGISKARSFLKHYANPLDHWVDSWPTQPATYRKKMGTYAVEIHKLSMQLTGAIVQGLGLCPMHLQEKLGAGMQFMGLNNYPQGSSRAGDTVGLAPHSDIGFITILLQSSPGLEVTHHDDGGVWTPVPAIPGALHVDLGDHLEVLSNGRLRSLLHRAILNTDEARISIASIHGAAMDEKVGCAEELVDERHPRMYRESSFHDFLDFLPTNVKAYRRFVETLKIDSA

SEQ ID NO: 12150 - protein, 263 aa, Triticum aestivum
  peptide (1)..(263): Ceres Seq. ID no. 13596473
  misc_feature (109)..(209): Pfam Name: II Pfam Description: 2OG-Fe
  misc_feature (1)..(263): NCBI GI NO: 7433240 NR Description: probable flavonol synthase
  misc_feature (1)..(263): NCBI GI NO: 30689834 NR Description: flavonol synthase family [Arabidopsis thaliana]
  misc_feature (1)..(260): NCBI GI NO: 15240797 NR Description: oxidoreductase, 2OG-Fe(II) oxygenase family
  misc_feature (1)..(260): NCBI GI NO: 15228020 NR Description: oxidoreductase, 2OG-Fe(II) oxygenase family
  misc_feature (1)..(240): NCBI GI NO: 37536444 NR Description: unknown protein
  misc_feature (1)..(242): NCBI GI NO: 38345873 NR Description: OSJNBa0064M23.15
  misc_feature (1)..(242): NCBI GI NO: 15235124 NR Description: oxidoreductase, 2OG-Fe(II) oxygenase family
  misc_feature (1)..(242): NCBI GI NO: 15235126 NR Description: oxidoreductase, 2OG-Fe(II) oxygenase family
  misc_feature (1)..(244): NCBI GI NO: 21327037 NR Description: putative flavanone 3-hydroxylase
  misc_feature (1)..(240): NCBI GI NO: 38345872 NR Description: OSJNBa0064M23.14
MDGALEAASEFFDMPAERKAAFACADIRSPVRYDTSSKDGISKARSFLKHYANPLDHWVDSWPTQPATYRKKMGTYAVEIHKLSMQLTGAIVQGLGLCPMHLQEKLGAGMQFMGLNNYPQGSSRAGDTVGLAPHSDIGFITILLQSSPGLEVTHHDDGGVWTPVPAIPGALHVDLGDHLEVLSNGRLRSLLHRAILNTDEARISIASIHGAAMDEKVGCAEELVDERHPRMYRESSFHDFLDFLPTNVKAYRRFVETLKIDSA

SEQ ID NO: 12151 - DNA, 1525 bp, Triticum aestivum
  misc_feature (1)..(1525): Ceres Seq. ID no. 13662324
ttttcctccgcgtagccttcccaccatattccagttcggcaagctcgccagtcaccaagctcctcctcctccacaggaaagcaacagcgcagcgcggcttcactggtttcgccctcaattcgagagctagtcttggaaggccttccatggctcagccgtcgctgctcctcggctctccggcatcgattgtcctccttatcaccttcttccaaggaccggtagtgagcgccatcacgttcaccttcgccaaccggtgcacggacacggtgtggcccgggttgctctcgggctccacctcgccgccgctggagaccaccggcttcgcgctctcgccgggccagtcgcgctcaatctacgggccgaccgggtggtcgggccgcttctgggcgcgctctggctgtaatttcaacggcggcaagggcacctgcgtcacgggggactgcggctccggcgagatagagtgccgcggcgccggggccaccccgcccgccacgctcgcggagttcaccctcgacggcgacggcgggaaggacttctatgacgtcagcctcgtcgacggctacaacttgcccatgctcgtgcagccgtccgtgcctgggtgccccgacaccgggtgcctcgtcgacctcaacgagcgctgcccctccgagctccgctccggcggcggcctcgcctgccgcagcgcctgcgaggccttcggcaagcccgagttctgctgcaacggcgcctacgggaaccctgacacgtgccacccctcccagtactcgcagctcttcaagtcggcgtgccccaagtcctacagctacgcctacgacgacgccacctccaccttcacctgcaaccacaccgattacaccattaccttctgcccgcagtccaatccttacagtggcaaaccgaacaagcacgcattgcggaggccgagccatgagcagcttgaggacgacgtgtggctggcatctttgaagaaaaccagcggcgccggtggaagcagcatggcatcatggtcggcgtccggaggtttccaagccgccctggcaattgctgtggccgtcgtgcttgccgcggcacaggggggtcatccccgtttcagcttgttatgaccgggcaaggcaggcgattcttcatccctaggagtgatctgcagagggtttttttaggataaaaaaggaggatcagagcactagaggaagagacgtggatatcatgttctttaggcctttttgcttgttgataaagaacatgacgcgtcctcatgttggcaattgtagttgttctagtagtggcatttcatattgctttattgcctttttgaaaacattgttcttctggttgtattcatctttctgcgcaatttttttgtggggatcctgatcagtgcatcgtcactaggagatcgcaagctttgaagtgggaagactgtaagatctgaatatactattgctctgccttctgagctccttttttttgtaaaaatctgaaatgccttcttaaaaaaaaaaaaaaaaaagcttatcgataccgt

SEQ ID NO: 12152 - protein, 366 aa, Triticum aestivum
  peptide (1)..(366): Ceres Seq. ID no. 13662325
  misc_feature (83)..(290): Pfam Name: Pfam Description:  Thaumatin family
  misc_feature (76)..(356): NCBI GI NO: 37531042 NR Description: putative thaumatin-like protein
  misc_feature (62)..(290): NCBI GI NO: 15233738 NR Description: thaumatin family [Arabidopsis thaliana]
  misc_feature (62)..(290): NCBI GI NO: 2262099 NR Description: thaumatin isolog [Arabidopsis thaliana]
  misc_feature (78)..(292): NCBI GI NO: 21592749 NR Description: putative thaumatin-like protein
  misc_feature (78)..(292): NCBI GI NO: 7442168 NR Description: pathogenesis-related protein F20M13
  misc_feature (78)..(292): NCBI GI NO: 18420282 NR Description: thaumatin-like protein, putative
  misc_feature (62)..(294): NCBI GI NO: 15233437 NR Description: thaumatin family [Arabidopsis thaliana]
  misc_feature (68)..(349): NCBI GI NO: 25296204 NR Description: hypothetical protein T20H2.19
  misc_feature (78)..(349): NCBI GI NO: 30686652 NR Description: thaumatin family [Arabidopsis thaliana]
  misc_feature (59)..(293): NCBI GI NO: 15222875 NR Description: thaumatin family [Arabidopsis thaliana]
FLRVAFPPYSSSASSPVTKLLLLHRKATAQRGFTGFALNSRASLGRPSMAQPSLLLGSPASIVLLITFFQGPVVSAITFTFANRCTDTVWPGLLSGSTSPPLETTGFALSPGQSRSIYGPTGWSGRFWARSGCNFNGGKGTCVTGDCGSGEIECRGAGATPPATLAEFTLDGDGGKDFYDVSLVDGYNLPMLVQPSVPGCPDTGCLVDLNERCPSELRSGGGLACRSACEAFGKPEFCCNGAYGNPDTCHPSQYSQLFKSACPKSYSYAYDDATSTFTCNHTDYTITFCPQSNPYSGKPNKHALRRPSHEQLEDDVWLASLKKTSGAGGSSMASWSASGGFQAALAIAVAVVLAAAQGGHPRFSLL

SEQ ID NO: 12153 - protein, 318 aa, Triticum aestivum
  peptide (1)..(318): Ceres Seq. ID no. 13662326
  misc_feature (35)..(242): Pfam Name: Pfam Description:  Thaumatin family
  misc_feature (28)..(308): NCBI GI NO: 37531042 NR Description: putative thaumatin-like protein
  misc_feature (14)..(242): NCBI GI NO: 15233738 NR Description: thaumatin family [Arabidopsis thaliana]
  misc_feature (14)..(242): NCBI GI NO: 2262099 NR Description: thaumatin isolog [Arabidopsis thaliana]
  misc_feature (30)..(244): NCBI GI NO: 21592749 NR Description: putative thaumatin-like protein
  misc_feature (30)..(244): NCBI GI NO: 7442168 NR Description: pathogenesis-related protein F20M13
  misc_feature (30)..(244): NCBI GI NO: 18420282 NR Description: thaumatin-like protein, putative
  misc_feature (14)..(246): NCBI GI NO: 15233437 NR Description: thaumatin family [Arabidopsis thaliana]
  misc_feature (20)..(301): NCBI GI NO: 25296204 NR Description: hypothetical protein T20H2.19
  misc_feature (30)..(301): NCBI GI NO: 30686652 NR Description: thaumatin family [Arabidopsis thaliana]
  misc_feature (11)..(245): NCBI GI NO: 15222875 NR Description: thaumatin family [Arabidopsis thaliana]
MAQPSLLLGSPASIVLLITFFQGPVVSAITFTFANRCTDTVWPGLLSGSTSPPLETTGFALSPGQSRSIYGPTGWSGRFWARSGCNFNGGKGTCVTGDCGSGEIECRGAGATPPATLAEFTLDGDGGKDFYDVSLVDGYNLPMLVQPSVPGCPDTGCLVDLNERCPSELRSGGGLACRSACEAFGKPEFCCNGAYGNPDTCHPSQYSQLFKSACPKSYSYAYDDATSTFTCNHTDYTITFCPQSNPYSGKPNKHALRRPSHEQLEDDVWLASLKKTSGAGGSSMASWSASGGFQAALAIAVAVVLAAAQGGHPRFSLL

SEQ ID NO: 12154 - DNA, 1419 bp, Triticum aestivum
  misc_feature (1)..(1419): Ceres Seq. ID no. 13598369
ataagtttgtaagttcgacgacataaggttgcgcatcgaaaaggacccaggttctcttctccaacggtttggttgtgcgccatggacgctggaatgagacaatcgagggtccggttttctggtgtagggcaggaagatcagggcagcggccaggctatggcaatgccaccacagcgacagcgaggcacaccttttggaagaggtgaagaatacgatgccgcgtacgcagcaacggtggcagcagtggcatatgctattgctgcaatggaggaagagaagttgccatcccaacagaagcctatcccagaaaaagcagcatctcggcagaagcgcgtaacagttcatgagcccacagctgccccacccccgagatcaccacccaggagaggtggaagcatgaaaaggccgactgaaggaagcaaaatctcaagattgtttagcggtaacaaagaaatagttgaagttggcgacgaagacgaacgagcaaatgtgtcggtgaggaggccggtgaaaccggcgccaaagaagccaggagatctaactccaggccagaacgtggtagggaaggtggttgactccgtcccgaacctgaaggacgatccaagtttcacgaggaaaacaccggacaagaagaggagcagaaactttgagcaggaggaggcaaatcagagggcgaaacccggggttaacccgacgacctcgtttccaggagagaggaaacagagctggaagcacgagcaggaaccagcgaatcagagggcaccaccggcagccaggcctccaggaatggtttattccagcgaggcggagaggatggcggctgcgtgggagaaggagaagctggctaagatcaaggagcagtataacgagacgatggaaaccatagccgaatgggagactgaaaagaaggccaaggccaggcgccagaaggagcccaaagagggggattcagagaggaagcgagcaaaggcgctggaggagtacaacgacgagatgaagcggatcagcaaggtggccgccgcgtcgaggatgtcggcagaggacaagaaaaggaacgccgagggcaaagtctgggagaaggcggccaaaatccggtcgacggggaagctcccacggtcctgtggctgcttctgaaaccatggacacacataatgtgggccaagaatctggttgtgttgctgctttactgtgtatacttgtttatgtatcgcctaaatgaagtacattgcgccaaccagtgcaaactccaacaacaacaacaacaaagcctttagtcccaagcaagttgaggtaggctagaggtgaaacccataagatctcgcaaccaactcatggctctggcacatggatagcaagcttccatgcatccctgtccatagctagctcttcggtgataccccaatccttcaggtctctctt

SEQ ID NO: 12155 - protein, 350 aa, Triticum aestivum
  peptide (1)..(350): Ceres Seq. ID no. 13598370
  misc_feature (246)..(348): Pfam Name: Pfam Description:  Remorin, C-terminal region
  misc_feature (245)..(350): NCBI GI NO: 37532756 NR Description: hypothetical protein
  misc_feature (82)..(350): NCBI GI NO: 8778390 NR Description: F16A14.13 [Arabidopsis thaliana]
  misc_feature (111)..(350): NCBI GI NO: 15222980 NR Description: hypothetical protein [Arabidopsis thaliana]
  misc_feature (237)..(347): NCBI GI NO: 12597780 NR Description: hypothetical protein [Arabidopsis thaliana]
  misc_feature (237)..(347): NCBI GI NO: 30697834 NR Description: predicted protein [Arabidopsis thaliana]
  misc_feature (182)..(350): NCBI GI NO: 15240195 NR Description: hypothetical protein [Arabidopsis thaliana]
  misc_feature (256)..(347): NCBI GI NO: 12325086 NR Description: hypothetical protein; 34983-33172
  misc_feature (162)..(349): NCBI GI NO: 15237822 NR Description: expressed protein [Arabidopsis thaliana]
  misc_feature (162)..(349): NCBI GI NO: 21555669 NR Description: remorin [Arabidopsis thaliana]
  misc_feature (217)..(350): NCBI GI NO: 15233068 NR Description: DNA-binding protein -related
MDAGMRQSRVRFSGVGQEDQGSGQAMAMPPQRQRGTPFGRGEEYDAAYAATVAAVAYAIAAMEEEKLPSQQKPIPEKAASRQKRVTVHEPTAAPPPRSPPRRGGSMKRPTEGSKISRLFSGNKEIVEVGDEDERANVSVRRPVKPAPKKPGDLTPGQNVVGKVVDSVPNLKDDPSFTRKTPDKKRSRNFEQEEANQRAKPGVNPTTSFPGERKQSWKHEQEPANQRAPPAARPPGMVYSSEAERMAAAWEKEKLAKIKEQYNETMETIAEWETEKKAKARRQKEPKEGDSERKRAKALEEYNDEMKRISKVAAASRMSAEDKKRNAEGKVWEKAAKIRSTGKLPRSCGCF

SEQ ID NO: 12156 - protein, 346 aa, Triticum aestivum
  peptide (1)..(346): Ceres Seq. ID no. 13598371
  misc_feature (242)..(344): Pfam Name: Pfam Description:  Remorin, C-terminal region
  misc_feature (241)..(346): NCBI GI NO: 37532756 NR Description: hypothetical protein
  misc_feature (78)..(346): NCBI GI NO: 8778390 NR Description: F16A14.13 [Arabidopsis thaliana]
  misc_feature (107)..(346): NCBI GI NO: 15222980 NR Description: hypothetical protein [Arabidopsis thaliana]
  misc_feature (233)..(343): NCBI GI NO: 12597780 NR Description: hypothetical protein [Arabidopsis thaliana]
  misc_feature (233)..(343): NCBI GI NO: 30697834 NR Description: predicted protein [Arabidopsis thaliana]
  misc_feature (178)..(346): NCBI GI NO: 15240195 NR Description: hypothetical protein [Arabidopsis thaliana]
  misc_feature (252)..(343): NCBI GI NO: 12325086 NR Description: hypothetical protein; 34983-33172
  misc_feature (158)..(345): NCBI GI NO: 15237822 NR Description: expressed protein [Arabidopsis thaliana]
  misc_feature (158)..(345): NCBI GI NO: 21555669 NR Description: remorin [Arabidopsis thaliana]
  misc_feature (213)..(346): NCBI GI NO: 15233068 NR Description: DNA-binding protein -related
MRQSRVRFSGVGQEDQGSGQAMAMPPQRQRGTPFGRGEEYDAAYAATVAAVAYAIAAMEEEKLPSQQKPIPEKAASRQKRVTVHEPTAAPPPRSPPRRGGSMKRPTEGSKISRLFSGNKEIVEVGDEDERANVSVRRPVKPAPKKPGDLTPGQNVVGKVVDSVPNLKDDPSFTRKTPDKKRSRNFEQEEANQRAKPGVNPTTSFPGERKQSWKHEQEPANQRAPPAARPPGMVYSSEAERMAAAWEKEKLAKIKEQYNETMETIAEWETEKKAKARRQKEPKEGDSERKRAKALEEYNDEMKRISKVAAASRMSAEDKKRNAEGKVWEKAAKIRSTGKLPRSCGCF

SEQ ID NO: 12157 - protein, 325 aa, Triticum aestivum
  peptide (1)..(325): Ceres Seq. ID no. 13598372
  misc_feature (221)..(323): Pfam Name: Pfam Description:  Remorin, C-terminal region
  misc_feature (220)..(325): NCBI GI NO: 37532756 NR Description: hypothetical protein
  misc_feature (57)..(325): NCBI GI NO: 8778390 NR Description: F16A14.13 [Arabidopsis thaliana]
  misc_feature (86)..(325): NCBI GI NO: 15222980 NR Description: hypothetical protein [Arabidopsis thaliana]
  misc_feature (212)..(322): NCBI GI NO: 12597780 NR Description: hypothetical protein [Arabidopsis thaliana]
  misc_feature (212)..(322): NCBI GI NO: 30697834 NR Description: predicted protein [Arabidopsis thaliana]
  misc_feature (157)..(325): NCBI GI NO: 15240195 NR Description: hypothetical protein [Arabidopsis thaliana]
  misc_feature (231)..(322): NCBI GI NO: 12325086 NR Description: hypothetical protein; 34983-33172
  misc_feature (137)..(324): NCBI GI NO: 15237822 NR Description: expressed protein [Arabidopsis thaliana]
  misc_feature (137)..(324): NCBI GI NO: 21555669 NR Description: remorin [Arabidopsis thaliana]
  misc_feature (192)..(325): NCBI GI NO: 15233068 NR Description: DNA-binding protein -related
MAMPPQRQRGTPFGRGEEYDAAYAATVAAVAYAIAAMEEEKLPSQQKPIPEKAASRQKRVTVHEPTAAPPPRSPPRRGGSMKRPTEGSKISRLFSGNKEIVEVGDEDERANVSVRRPVKPAPKKPGDLTPGQNVVGKVVDSVPNLKDDPSFTRKTPDKKRSRNFEQEEANQRAKPGVNPTTSFPGERKQSWKHEQEPANQRAPPAARPPGMVYSSEAERMAAAWEKEKLAKIKEQYNETMETIAEWETEKKAKARRQKEPKEGDSERKRAKALEEYNDEMKRISKVAAASRMSAEDKKRNAEGKVWEKAAKIRSTGKLPRSCGCF

SEQ ID NO: 12158 - DNA, 1304 bp, Triticum aestivum
  misc_feature (1)..(1304): Ceres Seq. ID no. 13596474
atcaatcatctcgtgccattccccaaaagcaagctagacccttgcaatggcggcgtccttcaccaccagctggcgttgcgcattcctcgcgctactggcccttttcgtctccggcgcctacgggcagctcagcccgacgttctacgcgtcgacctgcccgaacctaacgaccatcgtgcgcgacgccatggtcacggccttgaacccggcagtcggcggcgagcgcaggatgggcgcttccctgctcaggctccacttccacgactgcttcgttgagggatgcgacggatcggtcctcctggacaacgtgcctgctaatgggagcactccggctttctttggcgagaagaacgccttcgggaacatcaactccgtccgcggcttcgaggtcatcgacacgatcaaggccgcagtggagcaagcctgccctggcgtcgtctcctgtgccgacatcctcaccctcgccgcacgggacggcacctttctgctcggcgggccgacctgggcagtgccgctcggccggcgcgactcgacgacggcgagcatggacctggcgaacagggacctcccgccgccgttcgctaacctcgtcactaatcctcctgacggcagcgacctcatcgcgaggttccaaaggaagggcctgagcgcgaccgagatgaccgtgctctccggcgcgcacaccatcggctccgcgcagtgccagaattaccggctccgcctctacaacgaaaaccgcatcgattttcagtttgcccagggtctcaaggccaactgcccccaaaatggccccgccggcgacaccttcctggcgccgttggactcgacggggtccaccttcgacaataagtactacacggatctcaccgggttgcgcggcctcctccactccgaccaggtgctgtacccccagaacaaccagacgcaggctaagatagtgctcaagtacaagggagacaacaccgccttctttgccgatttcgcggccgcgatgataaagatggggaacctcagcccgctcaccggaaccgccggccaaatcaggaccaactgtaggttggtcaacccggcctgatcatacggtctggcatatataccactgttaattaccgcgtaaccaaagataaataaatgcaacctctgtgataatctttcacctttgtaataactatactatgttgtgctacatactggcttactggttaaattattaatcgttccaattgactattgagctccaaatcatgtatatgtgtgtatcctttgtaaacaatattattatcaacgacaacaagaagatcctc

SEQ ID NO: 12159 - protein, 342 aa, Triticum aestivum
  peptide (1)..(342): Ceres Seq. ID no. 15221887
  misc_feature (50)..(297): Pfam Name: Pfam Description:  Peroxidase
  misc_feature (14)..(340): NCBI GI NO: 5453379 NR Description: bacterial-induced peroxidase precursor
  misc_feature (3)..(340): NCBI GI NO: 4760704 NR Description: peroxidase 3 [Scutellaria baicalensis]
  misc_feature (10)..(340): NCBI GI NO: 577503 NR Description: cationic peroxidase
  misc_feature (17)..(340): NCBI GI NO: 7433049 NR Description: peroxidase (EC 1.11.1.7) - flax (fragment)
  misc_feature (13)..(340): NCBI GI NO: 6093671 NR Description: Cationic peroxidase 1 precursor (PNPC1)
  misc_feature (13)..(340): NCBI GI NO: 99872 NR Description: peroxidase (EC 1
  misc_feature (1)..(340): NCBI GI NO: 2117619 NR Description: peroxidase (EC 1.11.1.7) 4 precursor - wheat
  misc_feature (28)..(340): NCBI GI NO: 1633130 NR Description: Chain A, Peanut Peroxidase
  misc_feature (14)..(340): NCBI GI NO: 34393249 NR Description: putative peroxidase precursor
  misc_feature (14)..(340): NCBI GI NO: 34393250 NR Description: peroxidase
MAASFTTSWRCAFLALLALFVSGAYGQLSPTFYASTCPNLTTIVRDAMVTALNPAVGGERRMGASLLRLHFHDCFVEGCDGSVLLDNVPANGSTPAFFGEKNAFGNINSVRGFEVIDTIKAAVEQACPGVVSCADILTLAARDGTFLLGGPTWAVPLGRRDSTTASMDLANRDLPPPFANLVTNPPDGSDLIARFQRKGLSATEMTVLSGAHTIGSAQCQNYRLRLYNENRIDFQFAQGLKANCPQNGPAGDTFLAPLDSTGSTFDNKYYTDLTGLRGLLHSDQVLYPQNNQTQAKIVLKYKGDNTAFFADFAAAMIKMGNLSPLTGTAGQIRTNCRLVNPA

SEQ ID NO: 12160 - protein, 295 aa, Triticum aestivum
  peptide (1)..(295): Ceres Seq. ID no. 15221888
  misc_feature (3)..(250): Pfam Name: Pfam Description:  Peroxidase
  misc_feature (1)..(293): NCBI GI NO: 5453379 NR Description: bacterial-induced peroxidase precursor
  misc_feature (1)..(293): NCBI GI NO: 4760704 NR Description: peroxidase 3 [Scutellaria baicalensis]
  misc_feature (1)..(293): NCBI GI NO: 577503 NR Description: cationic peroxidase
  misc_feature (1)..(293): NCBI GI NO: 7433049 NR Description: peroxidase (EC 1.11.1.7) - flax (fragment)
  misc_feature (1)..(293): NCBI GI NO: 6093671 NR Description: Cationic peroxidase 1 precursor (PNPC1)
  misc_feature (1)..(293): NCBI GI NO: 99872 NR Description: peroxidase (EC 1
  misc_feature (1)..(293): NCBI GI NO: 2117619 NR Description: peroxidase (EC 1.11.1.7) 4 precursor - wheat
  misc_feature (1)..(293): NCBI GI NO: 1633130 NR Description: Chain A, Peanut Peroxidase
  misc_feature (1)..(293): NCBI GI NO: 34393249 NR Description: putative peroxidase precursor
  misc_feature (1)..(293): NCBI GI NO: 34393250 NR Description: peroxidase
MVTALNPAVGGERRMGASLLRLHFHDCFVEGCDGSVLLDNVPANGSTPAFFGEKNAFGNINSVRGFEVIDTIKAAVEQACPGVVSCADILTLAARDGTFLLGGPTWAVPLGRRDSTTASMDLANRDLPPPFANLVTNPPDGSDLIARFQRKGLSATEMTVLSGAHTIGSAQCQNYRLRLYNENRIDFQFAQGLKANCPQNGPAGDTFLAPLDSTGSTFDNKYYTDLTGLRGLLHSDQVLYPQNNQTQAKIVLKYKGDNTAFFADFAAAMIKMGNLSPLTGTAGQIRTNCRLVNPA

SEQ ID NO: 12161 - protein, 281 aa, Triticum aestivum
  peptide (1)..(281): Ceres Seq. ID no. 15221889
  misc_feature (1)..(236): Pfam Name: Pfam Description:  Peroxidase
  misc_feature (1)..(279): NCBI GI NO: 5453379 NR Description: bacterial-induced peroxidase precursor
  misc_feature (1)..(279): NCBI GI NO: 4760704 NR Description: peroxidase 3 [Scutellaria baicalensis]
  misc_feature (1)..(279): NCBI GI NO: 577503 NR Description: cationic peroxidase
  misc_feature (1)..(279): NCBI GI NO: 7433049 NR Description: peroxidase (EC 1.11.1.7) - flax (fragment)
  misc_feature (1)..(279): NCBI GI NO: 6093671 NR Description: Cationic peroxidase 1 precursor (PNPC1)
  misc_feature (1)..(279): NCBI GI NO: 99872 NR Description: peroxidase (EC 1
  misc_feature (1)..(279): NCBI GI NO: 2117619 NR Description: peroxidase (EC 1.11.1.7) 4 precursor - wheat
  misc_feature (1)..(279): NCBI GI NO: 1633130 NR Description: Chain A, Peanut Peroxidase
  misc_feature (1)..(279): NCBI GI NO: 34393249 NR Description: putative peroxidase precursor
  misc_feature (1)..(279): NCBI GI NO: 34393250 NR Description: peroxidase
MGASLLRLHFHDCFVEGCDGSVLLDNVPANGSTPAFFGEKNAFGNINSVRGFEVIDTIKAAVEQACPGVVSCADILTLAARDGTFLLGGPTWAVPLGRRDSTTASMDLANRDLPPPFANLVTNPPDGSDLIARFQRKGLSATEMTVLSGAHTIGSAQCQNYRLRLYNENRIDFQFAQGLKANCPQNGPAGDTFLAPLDSTGSTFDNKYYTDLTGLRGLLHSDQVLYPQNNQTQAKIVLKYKGDNTAFFADFAAAMIKMGNLSPLTGTAGQIRTNCRLVNPA

SEQ ID NO: 12162 - DNA, 1498 bp, Triticum aestivum
  misc_feature (1)..(1498): Ceres Seq. ID no. 15226984
atacccttcacccgtcgtcgtcaccgccacctctgcacacgcgtagtctctcaccgcatctccggcgaccaccgaccatctccggccaccgctactccttccctctcctgtgatggcgccgcgcgccggcggtcagacctacggcttccccatctactgcgcctcctggctcccactcgcacacaccatcaagccctctccatccgccgacgacgtcgtggatgcggacgcgtccccggagctgtcctccccacctccgccccccatggtggcccttggcggaggcggaggcgagggccggagcggcgtgcccaacgcgctggtcgtcgccgccctcgaccccgccgctgcaggggcgcctccagcgctctcccccgagccggtgtttaggctggggacagaggagcgggtgccatacaggatggccgtacacccccgcggcgatggcctcctctgcgccttccccgacggctgcaggttggtgcggtgggaatcaccagaaggagaagatcgacatagcctagttttgatatctgaccaggaggctttagtgaagctaaaggatgttggtttacagttggctgtggcattcagtggagagggttcactacttgccactggtggtgaggatggacatttgagggtcttcaaatggcctggcatggaaaccattattgaagatcctgatgctaaaacatctgttaaggatcttagtttcagttccgatgagaagtttctagttgtgaacaggagcagtggcccatctagagtgtgggatttaaagtcatctgaagctgtggctaatctgccaagagaacaaggagaaatatttggcttctgccgattttctactaagtctgacaatagtcagattctctttgttacagcaatgcaaggtgattacgggaaaataatatcttggaataccacctcatggacaagaattggatcaaagaaagtaactcgtgacgcgatttcagccttttcagtctcgcctgatggtacacttctagcaattggaactattgagggaaccatcagtgttctaggttcaagagacatgcgagtggttgtaacagttaaaaaggcgcatcttggcattgttactacattagctttttctcaagattcaagggccttgctgtcgacttcctttgactcaaccgcaagggtgacatcgactgaatcacccaagagcgatggtataagcctctggtccatggtactagctattatactcgcaattttggcatattactatatgcagcacaaagaagatctcttagcaatgttgccacaatgaaaaaaataatcagcctctactgatatctcactgcttaccactgattatctgatcttgtactggagataaatgttgtatcgtgtaggagctagagcaatttttgtattcaggtggaaaaaaaacggctcaaaaacgtccagatcttttgtatcatgtcacgctggtataagaaggccatcctctcctggtttgtag

SEQ ID NO: 12163 - protein, 396 aa, Triticum aestivum
  peptide (1)..(396): Ceres Seq. ID no. 15226985
  misc_feature (320)..(355): Pfam Name: Pfam Description:  WD domain, G-beta repeat
  misc_feature (8)..(387): NCBI GI NO: 15226281 NR Description: SEC12p protein / St12p protein
  misc_feature (8)..(387): NCBI GI NO: 11358859 NR Description: St12p protein [imported] - Arabidopsis thaliana
  misc_feature (3)..(384): NCBI GI NO: 18423177 NR Description: St12p protein [Arabidopsis thaliana]
  misc_feature (3)..(355): NCBI GI NO: 8777388 NR Description: protein transport protein SEC12p-like
  misc_feature (8)..(363): NCBI GI NO: 322598 NR Description: St12p protein - Arabidopsis thaliana
  misc_feature (8)..(272): NCBI GI NO: 17473926 NR Description: putative protein transport protein SEC12p
  misc_feature (62)..(388): NCBI GI NO: 34394605 NR Description: transducin / WD-40 repeat protein-like
  misc_feature (57)..(386): NCBI GI NO: 34897162 NR Description: putative membrane protein
  misc_feature (67)..(396): NCBI GI NO: 18409509 NR Description: transducin / WD-40 repeat protein family
  misc_feature (158)..(396): NCBI GI NO: 26450470 NR Description: unknown protein [Arabidopsis thaliana]
MAPRAGGQTYGFPIYCASWLPLAHTIKPSPSADDVVDADASPELSSPPPPPMVALGGGGGEGRSGVPNALVVAALDPAAAGAPPALSPEPVFRLGTEERVPYRMAVHPRGDGLLCAFPDGCRLVRWESPEGEDRHSLVLISDQEALVKLKDVGLQLAVAFSGEGSLLATGGEDGHLRVFKWPGMETIIEDPDAKTSVKDLSFSSDEKFLVVNRSSGPSRVWDLKSSEAVANLPREQGEIFGFCRFSTKSDNSQILFVTAMQGDYGKIISWNTTSWTRIGSKKVTRDAISAFSVSPDGTLLAIGTIEGTISVLGSRDMRVVVTVKKAHLGIVTTLAFSQDSRALLSTSFDSTARVTSTESPKSDGISLWSMVLAIILAILAYYYMQHKEDLLAMLPQ

SEQ ID NO: 12164 - protein, 345 aa, Triticum aestivum
  peptide (1)..(345): Ceres Seq. ID no. 15226986
  misc_feature (269)..(304): Pfam Name: Pfam Description:  WD domain, G-beta repeat
  misc_feature (1)..(336): NCBI GI NO: 15226281 NR Description: SEC12p protein / St12p protein
  misc_feature (1)..(336): NCBI GI NO: 11358859 NR Description: St12p protein [imported] - Arabidopsis thaliana
  misc_feature (1)..(333): NCBI GI NO: 18423177 NR Description: St12p protein [Arabidopsis thaliana]
  misc_feature (1)..(304): NCBI GI NO: 8777388 NR Description: protein transport protein SEC12p-like
  misc_feature (1)..(312): NCBI GI NO: 322598 NR Description: St12p protein - Arabidopsis thaliana
  misc_feature (1)..(221): NCBI GI NO: 17473926 NR Description: putative protein transport protein SEC12p
  misc_feature (11)..(337): NCBI GI NO: 34394605 NR Description: transducin / WD-40 repeat protein-like
  misc_feature (6)..(335): NCBI GI NO: 34897162 NR Description: putative membrane protein
  misc_feature (16)..(345): NCBI GI NO: 18409509 NR Description: transducin / WD-40 repeat protein family
  misc_feature (107)..(345): NCBI GI NO: 26450470 NR Description: unknown protein [Arabidopsis thaliana]
MVALGGGGGEGRSGVPNALVVAALDPAAAGAPPALSPEPVFRLGTEERVPYRMAVHPRGDGLLCAFPDGCRLVRWESPEGEDRHSLVLISDQEALVKLKDVGLQLAVAFSGEGSLLATGGEDGHLRVFKWPGMETIIEDPDAKTSVKDLSFSSDEKFLVVNRSSGPSRVWDLKSSEAVANLPREQGEIFGFCRFSTKSDNSQILFVTAMQGDYGKIISWNTTSWTRIGSKKVTRDAISAFSVSPDGTLLAIGTIEGTISVLGSRDMRVVVTVKKAHLGIVTTLAFSQDSRALLSTSFDSTARVTSTESPKSDGISLWSMVLAIILAILAYYYMQHKEDLLAMLPQ

SEQ ID NO: 12165 - protein, 293 aa, Triticum aestivum
  peptide (1)..(293): Ceres Seq. ID no. 15226987
  misc_feature (217)..(252): Pfam Name: Pfam Description:  WD domain, G-beta repeat
  misc_feature (1)..(284): NCBI GI NO: 15226281 NR Description: SEC12p protein / St12p protein
  misc_feature (1)..(284): NCBI GI NO: 11358859 NR Description: St12p protein [imported] - Arabidopsis thaliana
  misc_feature (1)..(281): NCBI GI NO: 18423177 NR Description: St12p protein [Arabidopsis thaliana]
  misc_feature (1)..(252): NCBI GI NO: 8777388 NR Description: protein transport protein SEC12p-like
  misc_feature (1)..(260): NCBI GI NO: 322598 NR Description: St12p protein - Arabidopsis thaliana
  misc_feature (1)..(169): NCBI GI NO: 17473926 NR Description: putative protein transport protein SEC12p
  misc_feature (1)..(285): NCBI GI NO: 34394605 NR Description: transducin / WD-40 repeat protein-like
  misc_feature (1)..(283): NCBI GI NO: 34897162 NR Description: putative membrane protein
  misc_feature (1)..(293): NCBI GI NO: 18409509 NR Description: transducin / WD-40 repeat protein family
  misc_feature (55)..(293): NCBI GI NO: 26450470 NR Description: unknown protein [Arabidopsis thaliana]
MAVHPRGDGLLCAFPDGCRLVRWESPEGEDRHSLVLISDQEALVKLKDVGLQLAVAFSGEGSLLATGGEDGHLRVFKWPGMETIIEDPDAKTSVKDLSFSSDEKFLVVNRSSGPSRVWDLKSSEAVANLPREQGEIFGFCRFSTKSDNSQILFVTAMQGDYGKIISWNTTSWTRIGSKKVTRDAISAFSVSPDGTLLAIGTIEGTISVLGSRDMRVVVTVKKAHLGIVTTLAFSQDSRALLSTSFDSTARVTSTESPKSDGISLWSMVLAIILAILAYYYMQHKEDLLAMLPQ

SEQ ID NO: 12166 - DNA, 1117 bp, Triticum aestivum
  misc_feature (1)..(1117): Ceres Seq. ID no. 13596416
tctggggtgcaccgtacaattccacgccgcgttttctgcactttccagacagcacggaagcaaaacgatagaggcgtatccactatggcggcaacctactgcgcctaccccgccgccgccgccgccgccgccgcaaaccctaccagacgccgcctgcaaaccctaaccgcgccgggcgccctacctgctgctcggaaacccagccgccaaccccccaccttcctctctttccggctccccaatgcagcgctgccgccgctccgcgtcgctggcgctgacccgcaggttgtaaatggcgaagatttccctcctatgaatgacctaattcgactatacaagaaagcctttctagatggaaacgaagatgttgttagtgacatcgagaaggcaatcactagcatggaggaagagagaagtaaatcagcttctcagtttgaaagtatcacagctgaaatagcttcagggaagaataagtttcttcgcttaaatgctgatctagagaattttcggaagcagactgaaaaggaccgtgcaaagtttacatcgaatatacaagtggaacttgtacagagtctgttgcctctggttgacagctttgagaaaacaaatgtagagatcaccctagagactgagaaagagcagaagattagcgcaagctatcaaggcatatacaagcaattagtagaaacactgaaaaacttaggcgtaggggttgtggaaactgttggcaagccatttgatccagtggttcatgaggctatcgcgcgtgaagaatctacagagttcaaggcaggcatcgtctcacacgaagtccaccgagggttccttctgagggagagggtgctaaggcctgccgcggtgaaggtctctaatggtcctggtgaccaaaacgtgagctccacatcttcggaggagcctgtggaggataccaaagaggatgccgctgtgtgaatccgccagaaacctggcgccaacatttaccaagtcgttgtagctggagcaccattgtttgggagctctcgttgtactgttaatatggagcagagtcatttatgagaatgtacatctatggtgatctgcaactttgcaagtatcctaaagaattttactttggtgc

SEQ ID NO: 12167 - protein, 316 aa, Triticum aestivum
  peptide (1)..(316): Ceres Seq. ID no. 13596417
  misc_feature (136)..(290): Pfam Name: Pfam Description:  GrpE
  misc_feature (35)..(304): NCBI GI NO: 18400095 NR Description: heat shock protein -related [Arabidopsis thaliana]
  misc_feature (35)..(304): NCBI GI NO: 21593629 NR Description: putative heat shock protein [Arabidopsis thaliana]
  misc_feature (90)..(305): NCBI GI NO: 18418410 NR Description: chloroplast GrpE protein [Arabidopsis thaliana]
  misc_feature (90)..(305): NCBI GI NO: 30686476 NR Description: chloroplast GrpE protein [Arabidopsis thaliana]
  misc_feature (119)..(309): NCBI GI NO: 22298857 NR Description: heat shock protein
  misc_feature (124)..(305): NCBI GI NO: 15384277 NR Description: co-chaperone CGE1 precursor isoform a
  misc_feature (124)..(305): NCBI GI NO: 15384279 NR Description: co-chaperone CGE1 precursor isoform b
  misc_feature (143)..(309): NCBI GI NO: 33860576 NR Description: Heat shock protein GrpE
  misc_feature (128)..(306): NCBI GI NO: 23041352 NR Description: hypothetical protein
  misc_feature (120)..(306): NCBI GI NO: 16331493 NR Description: heat shock protein; GrpE
SGVHRTIPRRVFCTFQTARKQNDRGVSTMAATYCAYPAAAAAAAANPTRRRLQTLTAPGALPAARKPSRQPPTFLSFRLPNAALPPLRVAGADPQVVNGEDFPPMNDLIRLYKKAFLDGNEDVVSDIEKAITSMEEERSKSASQFESITAEIASGKNKFLRLNADLENFRKQTEKDRAKFTSNIQVELVQSLLPLVDSFEKTNVEITLETEKEQKISASYQGIYKQLVETLKNLGVGVVETVGKPFDPVVHEAIAREESTEFKAGIVSHEVHRGFLLRERVLRPAAVKVSNGPGDQNVSSTSSEEPVEDTKEDAAV

SEQ ID NO: 12168 - protein, 288 aa, Triticum aestivum
  peptide (1)..(288): Ceres Seq. ID no. 13596418
  misc_feature (108)..(262): Pfam Name: Pfam Description:  GrpE
  misc_feature (7)..(276): NCBI GI NO: 18400095 NR Description: heat shock protein -related [Arabidopsis thaliana]
  misc_feature (7)..(276): NCBI GI NO: 21593629 NR Description: putative heat shock protein [Arabidopsis thaliana]
  misc_feature (62)..(277): NCBI GI NO: 18418410 NR Description: chloroplast GrpE protein [Arabidopsis thaliana]
  misc_feature (62)..(277): NCBI GI NO: 30686476 NR Description: chloroplast GrpE protein [Arabidopsis thaliana]
  misc_feature (91)..(281): NCBI GI NO: 22298857 NR Description: heat shock protein
  misc_feature (96)..(277): NCBI GI NO: 15384277 NR Description: co-chaperone CGE1 precursor isoform a
  misc_feature (96)..(277): NCBI GI NO: 15384279 NR Description: co-chaperone CGE1 precursor isoform b
  misc_feature (115)..(281): NCBI GI NO: 33860576 NR Description: Heat shock protein GrpE
  misc_feature (100)..(278): NCBI GI NO: 23041352 NR Description: hypothetical protein
  misc_feature (92)..(278): NCBI GI NO: 16331493 NR Description: heat shock protein; GrpE
MAATYCAYPAAAAAAAANPTRRRLQTLTAPGALPAARKPSRQPPTFLSFRLPNAALPPLRVAGADPQVVNGEDFPPMNDLIRLYKKAFLDGNEDVVSDIEKAITSMEEERSKSASQFESITAEIASGKNKFLRLNADLENFRKQTEKDRAKFTSNIQVELVQSLLPLVDSFEKTNVEITLETEKEQKISASYQGIYKQLVETLKNLGVGVVETVGKPFDPVVHEAIAREESTEFKAGIVSHEVHRGFLLRERVLRPAAVKVSNGPGDQNVSSTSSEEPVEDTKEDAAV

SEQ ID NO: 12169 - protein, 212 aa, Triticum aestivum
  peptide (1)..(212): Ceres Seq. ID no. 13596419
  misc_feature (32)..(186): Pfam Name: Pfam Description:  GrpE
  misc_feature (1)..(200): NCBI GI NO: 18400095 NR Description: heat shock protein -related [Arabidopsis thaliana]
  misc_feature (1)..(200): NCBI GI NO: 21593629 NR Description: putative heat shock protein [Arabidopsis thaliana]
  misc_feature (1)..(201): NCBI GI NO: 18418410 NR Description: chloroplast GrpE protein [Arabidopsis thaliana]
  misc_feature (1)..(201): NCBI GI NO: 30686476 NR Description: chloroplast GrpE protein [Arabidopsis thaliana]
  misc_feature (15)..(205): NCBI GI NO: 22298857 NR Description: heat shock protein
  misc_feature (20)..(201): NCBI GI NO: 15384277 NR Description: co-chaperone CGE1 precursor isoform a
  misc_feature (20)..(201): NCBI GI NO: 15384279 NR Description: co-chaperone CGE1 precursor isoform b
  misc_feature (39)..(205): NCBI GI NO: 33860576 NR Description: Heat shock protein GrpE
  misc_feature (24)..(202): NCBI GI NO: 23041352 NR Description: hypothetical protein
  misc_feature (16)..(202): NCBI GI NO: 16331493 NR Description: heat shock protein; GrpE
MNDLIRLYKKAFLDGNEDVVSDIEKAITSMEEERSKSASQFESITAEIASGKNKFLRLNADLENFRKQTEKDRAKFTSNIQVELVQSLLPLVDSFEKTNVEITLETEKEQKISASYQGIYKQLVETLKNLGVGVVETVGKPFDPVVHEAIAREESTEFKAGIVSHEVHRGFLLRERVLRPAAVKVSNGPGDQNVSSTSSEEPVEDTKEDAAV

SEQ ID NO: 12170 - DNA, 1633 bp, Triticum aestivum
  misc_feature (1)..(1633): Ceres Seq. ID no. 15170127
gaggggaaagcaaaagagggcggcatctttgcgtcggcgatggcggcggcggcgggggcgaggagcagggtggcgttcgtgctggtggacgggataggggacgtgaccatcccttccctcggtgggcgtaccccgctggaggcggccgcggcaccacggctggacgctgtggcggcggctggggtggtcgggctcatggaccccgtggagccggggctcgcctgcggcagcgacacggcgcacctctccctcctcgggtacgatccccgcgtatactaccgcggccgcggcgcgttcgagtccatgggcgctggcctcgccatggccccgggcgacatcgccttcaagtcgaactttgctacattggacgaaagcacgggggttatcgtcagcaggagggcggataggcactttgaggaggaaggcccaatcctctgtgctgcattagatggaatgaagctcccatcatttcccgaatatgaagtgagagtcaggtacgctactgagcacagatgtggtgtggttgtgaaaggaccaaggctaagtggaaacatttccggaactgatccgttgaaagacaaccgcttgcatctaaaggctgaacctttggatgattcggaagaagctaaaaacaccgcagctgtggttaacgagctctctaaggagatcacacgtatactggtttctcaacccatcaatgcaaagcgtgctgtcgagaggaagaatattgctaatgttgtgctattgcgaggctgtggtatccggattgaggtacctccctttgaaaccaagcatggactcacaccatgcatggtagctcctaccaagatcatagccgggctggggctgtcgttgggcattgatatccttgaagcacctggagcaactggagattatagaactctcttaacttccaaggcaaaagctatagccaaggcactctctgctcctctggacacaccacctcgcgtttttgtgcctggagaggatgaatataaagccggaagagaaaatggatacgactttggtttcttgcacatcaaggctattgatgatgctggccatgacaaggctgtcaagttaaaggtgcgaggtctggaagctgtcgaccgggctattggtcagcttgcaaggctcctgtgggaagctgagaagtcggggcactaccagtacttcctctgtgtcactggagaccactctactcctgttgagtacggagaccacagctttgaacctgtcccgtttgcgatatgccggctgagagatttcgtgggagcgattggggagggcaatgtgatgaatacccccctcgacgatttcccgctgccttcggttaaatccggagaagatttaactgatgattcagaaccagcggaacacaagcctgaggagcgtaaagcttttagcggcgatacagtgtgtgaatacaccgagattgctgctgcaaggggctgccttgggcggttccctggaagtgagatgatgggcatcatcaagaagttcatgaaagcaaagaacgattaacgccagttcgattgctaacactgtacttgatctttgtaataatgacaaatggataaacgacgcagaaccagcttaatccgatagtaataaaatctatcatggttgaggc

SEQ ID NO: 12171 - protein, 507 aa, Triticum aestivum
  peptide (1)..(507): Ceres Seq. ID no. 15170128
  misc_feature (322)..(428): Pfam Name: Pfam Description:  Metalloenzyme superfamily
  misc_feature (21)..(502): NCBI GI NO: 30690068 NR Description: phosphonopyruvate decarboxylase -related
  misc_feature (21)..(503): NCBI GI NO: 30681098 NR Description: expressed protein [Arabidopsis thaliana]
  misc_feature (21)..(503): NCBI GI NO: 25407505 NR Description: hypothetical protein AT4g09520
  misc_feature (19)..(341): NCBI GI NO: 28828261 NR Description: similar to Arabidopsis thaliana (Mouse-ear cress)
  misc_feature (340)..(420): NCBI GI NO: 28828261 NR Description: similar to Arabidopsis thaliana (Mouse-ear cress)
  misc_feature (415)..(502): NCBI GI NO: 28828261 NR Description: similar to Arabidopsis thaliana (Mouse-ear cress)
  misc_feature (23)..(314): NCBI GI NO: 15897350 NR Description: Phosphonopyruvate decarboxylase
  misc_feature (336)..(414): NCBI GI NO: 15897350 NR Description: Phosphonopyruvate decarboxylase
  misc_feature (27)..(351): NCBI GI NO: 15679586 NR Description: phosphonopyruvate decarboxylase
  misc_feature (340)..(417): NCBI GI NO: 15679586 NR Description: phosphonopyruvate decarboxylase
EGKAKEGGIFASAMAAAAGARSRVAFVLVDGIGDVTIPSLGGRTPLEAAAAPRLDAVAAAGVVGLMDPVEPGLACGSDTAHLSLLGYDPRVYYRGRGAFESMGAGLAMAPGDIAFKSNFATLDESTGVIVSRRADRHFEEEGPILCAALDGMKLPSFPEYEVRVRYATEHRCGVVVKGPRLSGNISGTDPLKDNRLHLKAEPLDDSEEAKNTAAVVNELSKEITRILVSQPINAKRAVERKNIANVVLLRGCGIRIEVPPFETKHGLTPCMVAPTKIIAGLGLSLGIDILEAPGATGDYRTLLTSKAKAIAKALSAPLDTPPRVFVPGEDEYKAGRENGYDFGFLHIKAIDDAGHDKAVKLKVRGLEAVDRAIGQLARLLWEAEKSGHYQYFLCVTGDHSTPVEYGDHSFEPVPFAICRLRDFVGAIGEGNVMNTPLDDFPLPSVKSGEDLTDDSEPAEHKPEERKAFSGDTVCEYTEIAAARGCLGRFPGSEMMGIIKKFMKAKND

SEQ ID NO: 12172 - protein, 494 aa, Triticum aestivum
  peptide (1)..(494): Ceres Seq. ID no. 15170129
  misc_feature (309)..(415): Pfam Name: Pfam Description:  Metalloenzyme superfamily
  misc_feature (8)..(489): NCBI GI NO: 30690068 NR Description: phosphonopyruvate decarboxylase -related
  misc_feature (8)..(490): NCBI GI NO: 30681098 NR Description: expressed protein [Arabidopsis thaliana]
  misc_feature (8)..(490): NCBI GI NO: 25407505 NR Description: hypothetical protein AT4g09520
  misc_feature (6)..(328): NCBI GI NO: 28828261 NR Description: similar to Arabidopsis thaliana (Mouse-ear cress)
  misc_feature (327)..(407): NCBI GI NO: 28828261 NR Description: similar to Arabidopsis thaliana (Mouse-ear cress)
  misc_feature (402)..(489): NCBI GI NO: 28828261 NR Description: similar to Arabidopsis thaliana (Mouse-ear cress)
  misc_feature (10)..(301): NCBI GI NO: 15897350 NR Description: Phosphonopyruvate decarboxylase
  misc_feature (323)..(401): NCBI GI NO: 15897350 NR Description: Phosphonopyruvate decarboxylase
  misc_feature (14)..(338): NCBI GI NO: 15679586 NR Description: phosphonopyruvate decarboxylase
  misc_feature (327)..(404): NCBI GI NO: 15679586 NR Description: phosphonopyruvate decarboxylase
MAAAAGARSRVAFVLVDGIGDVTIPSLGGRTPLEAAAAPRLDAVAAAGVVGLMDPVEPGLACGSDTAHLSLLGYDPRVYYRGRGAFESMGAGLAMAPGDIAFKSNFATLDESTGVIVSRRADRHFEEEGPILCAALDGMKLPSFPEYEVRVRYATEHRCGVVVKGPRLSGNISGTDPLKDNRLHLKAEPLDDSEEAKNTAAVVNELSKEITRILVSQPINAKRAVERKNIANVVLLRGCGIRIEVPPFETKHGLTPCMVAPTKIIAGLGLSLGIDILEAPGATGDYRTLLTSKAKAIAKALSAPLDTPPRVFVPGEDEYKAGRENGYDFGFLHIKAIDDAGHDKAVKLKVRGLEAVDRAIGQLARLLWEAEKSGHYQYFLCVTGDHSTPVEYGDHSFEPVPFAICRLRDFVGAIGEGNVMNTPLDDFPLPSVKSGEDLTDDSEPAEHKPEERKAFSGDTVCEYTEIAAARGCLGRFPGSEMMGIIKKFMKAKND

SEQ ID NO: 12173 - protein, 442 aa, Triticum aestivum
  peptide (1)..(442): Ceres Seq. ID no. 15170130
  misc_feature (257)..(363): Pfam Name: Pfam Description:  Metalloenzyme superfamily
  misc_feature (1)..(437): NCBI GI NO: 30690068 NR Description: phosphonopyruvate decarboxylase -related
  misc_feature (1)..(438): NCBI GI NO: 30681098 NR Description: expressed protein [Arabidopsis thaliana]
  misc_feature (1)..(438): NCBI GI NO: 25407505 NR Description: hypothetical protein AT4g09520
  misc_feature (1)..(276): NCBI GI NO: 28828261 NR Description: similar to Arabidopsis thaliana (Mouse-ear cress)
  misc_feature (275)..(355): NCBI GI NO: 28828261 NR Description: similar to Arabidopsis thaliana (Mouse-ear cress)
  misc_feature (350)..(437): NCBI GI NO: 28828261 NR Description: similar to Arabidopsis thaliana (Mouse-ear cress)
  misc_feature (1)..(249): NCBI GI NO: 15897350 NR Description: Phosphonopyruvate decarboxylase
  misc_feature (271)..(349): NCBI GI NO: 15897350 NR Description: Phosphonopyruvate decarboxylase
  misc_feature (1)..(286): NCBI GI NO: 15679586 NR Description: phosphonopyruvate decarboxylase
  misc_feature (275)..(352): NCBI GI NO: 15679586 NR Description: phosphonopyruvate decarboxylase
MDPVEPGLACGSDTAHLSLLGYDPRVYYRGRGAFESMGAGLAMAPGDIAFKSNFATLDESTGVIVSRRADRHFEEEGPILCAALDGMKLPSFPEYEVRVRYATEHRCGVVVKGPRLSGNISGTDPLKDNRLHLKAEPLDDSEEAKNTAAVVNELSKEITRILVSQPINAKRAVERKNIANVVLLRGCGIRIEVPPFETKHGLTPCMVAPTKIIAGLGLSLGIDILEAPGATGDYRTLLTSKAKAIAKALSAPLDTPPRVFVPGEDEYKAGRENGYDFGFLHIKAIDDAGHDKAVKLKVRGLEAVDRAIGQLARLLWEAEKSGHYQYFLCVTGDHSTPVEYGDHSFEPVPFAICRLRDFVGAIGEGNVMNTPLDDFPLPSVKSGEDLTDDSEPAEHKPEERKAFSGDTVCEYTEIAAARGCLGRFPGSEMMGIIKKFMKAKND

SEQ ID NO: 12174 - DNA, 1042 bp, Triticum aestivum
  misc_feature (1)..(1042): Ceres Seq. ID no. 13598373
cttatctcctcgtctcgcaaaagcagagacagaagagagatcgattccgactaaaacctctcgccgccgacgaccaagctcggagacctattgacctagttcctgatgtcggacgccgatgattaccgttgcttcgttgggagtctgtcatggaacacaactgatgtggatctgaaggatgcgtttgggaaatttggtcgagttactgagaccaaggtggttcttgacaagttctctggccggtcacgtggctttggatttgtgacttttgatgacaagaaggccatggaagaagctgttgaggctatgaatggaattgatttggatggaaggaatattactgttgaaagagcacaacctcaaggttcaggcagggaccgtgatggagatcgagactatcgtggtggtggtgaccgctatggtggtggccgtgattttggtggcggtcgtggtggtggtcgtggtggcggcggtgattgctacaaatgtggcaagcctggtcattttgcaagggagtgcccttctggtgatggtggggacaggtatggtagcagggatgacaggtatagtagcagggatgacaggtatagtagtagggatgacaggtatggtggcagggatggtggaagggatgacaagtatggtggtagcaacggcagcagtcgctatgggcctgaccgtggtggtgatcgctattctggaagtcgtgatggaggaagccgcagcagtggtggcggtgatcgatacagccgtgacaggtctggaccgtatgatcgtcgcagccgagatgaatactgatcttgatggtggagattctgtctcaggtatgaaaggtattggataatactagtggtatgtttgctttatcacataaggcagcaaatggtttgctgttgtactctttatgagaagtttaatgcttttgttatccatgctgactagtgcttggtttaccaatgttcctacctggatttggcttgtaaccggttccttgggagcttcagtggattgcgttattttgtctgagtaatatttgggatcc

SEQ ID NO: 12175 - protein, 230 aa, Triticum aestivum
  peptide (1)..(230): Ceres Seq. ID no. 13598374
  misc_feature (9)..(80): Pfam Name: a.k.a. RRM, RBD, or RNP domain Pfam Description: RNA recognition motif.
  misc_feature (1)..(172): NCBI GI NO: 12659074 NR Description: RNA-binding protein [Triticum aestivum]
  misc_feature (1)..(203): NCBI GI NO: 40714682 NR Description: putative RNA binding protein
  misc_feature (1)..(224): NCBI GI NO: 15231557 NR Description: glycine-rich RNA-binding protein
  misc_feature (1)..(207): NCBI GI NO: 2129944 NR Description: RNA-binding protein RZ-1 - wood tobacco
  misc_feature (1)..(140): NCBI GI NO: 15982739 NR Description: AT3g26420/F20C19_14 [Arabidopsis thaliana]
  misc_feature (1)..(230): NCBI GI NO: 33146923 NR Description: glycine-rich RNA-binding protein-like
  misc_feature (1)..(230): NCBI GI NO: 15237666 NR Description: glycine-rich RNA-binding protein
  misc_feature (1)..(173): NCBI GI NO: 1076672 NR Description: probable glycine rich RNA binding protein - potato
  misc_feature (1)..(147): NCBI GI NO: 7024451 NR Description: glycine-rich RNA-binding protein [Citrus unshiu]
  misc_feature (1)..(184): NCBI GI NO: 15235002 NR Description: glycine-rich RNA-binding protein 8 (GRP8) (CCR1)
MSDADDYRCFVGSLSWNTTDVDLKDAFGKFGRVTETKVVLDKFSGRSRGFGFVTFDDKKAMEEAVEAMNGIDLDGRNITVERAQPQGSGRDRDGDRDYRGGGDRYGGGRDFGGGRGGGRGGGGDCYKCGKPGHFARECPSGDGGDRYGSRDDRYSSRDDRYSSRDDRYGGRDGGRDDKYGGSNGSSRYGPDRGGDRYSGSRDGGSRSSGGGDRYSRDRSGPYDRRSRDEY

SEQ ID NO: 12176 - protein, 177 aa, Triticum aestivum
  peptide (1)..(177): Ceres Seq. ID no. 13598375
  misc_feature (24)..(170): NCBI GI NO: 34860233 NR Description: similar to lymphocyte alpha-kinase
MELIWMEGILLLKEHNLKVQAGTVMEIETIVVVVTAMVVAVILVAVVVVVVVAAVIATNVASLVILQGSALLVMVGTGMVAGMTGIVAGMTGIVVGMTGMVAGMVEGMTSMVVATAAVAMGLTVVVIAILEVVMEEAAAVVAVIDTAVTGLDRMIVAAEMNTDLDGGDSVSGMKGIG

SEQ ID NO: 12177 - protein, 172 aa, Triticum aestivum
  peptide (1)..(172): Ceres Seq. ID no. 13598376
  misc_feature (19)..(165): NCBI GI NO: 34860233 NR Description: similar to lymphocyte alpha-kinase
MEGILLLKEHNLKVQAGTVMEIETIVVVVTAMVVAVILVAVVVVVVVAAVIATNVASLVILQGSALLVMVGTGMVAGMTGIVAGMTGIVVGMTGMVAGMVEGMTSMVVATAAVAMGLTVVVIAILEVVMEEAAAVVAVIDTAVTGLDRMIVAAEMNTDLDGGDSVSGMKGIG

SEQ ID NO: 12178 - DNA, 1403 bp, Triticum aestivum
  misc_feature (1)..(1403): Ceres Seq. ID no. 12625237
attctatccaaatccatggaaacctccacgcagaatgtaaggagcgggcggagtaatggagggcgaggcgcagccgccgccggcgtgcgtgtccaaggtgctcgacgaggacaacctcctccgagagatcatcgtccgtgtcggcttccccaccagcctcgtccgcgccgccggcgtctgcacgcgctggctcagccacgcctccgaccgcgcgctcctccgccgtttccgcgagctccacccgcccaggctcctcggcttctacctcgcgaacagggagcgtccgggcggggcgcgcttcctcccggtgctgcctctgcccccggatctcgccgccgtcgtccgccgcgcaagcttcagccttgacacccacgacggcgcgcgccgctccgcaagcttcagccccggcacccactcggacgggcggaccgacgtggtgggctgctggaacggccgcgtcatcaccagctcgcaggggcagaattacgcccacggccgatccgaaattatatttcaagtgcacaccccgctatgctctggctctgagaaaggtgcggccatcatcccagcattacacctcaaagtccaggatggaatttgcaggcttattagacaacccttcttctggattgtcctacttttttgtcacggtggagtgtaccaggtatcatgaagattctaaggtgcatgtgtatatgctgcaaaatggtgatgatgcctggcgcaagcatcttaccttggcctcggacctcctcctgtatccacgcaaaagccccaaaggcgtgctcgttcacaacaaattctatctgccgaccgacaatgaaattgttgtcctggatttggtgtcctcaagcttatcgacaattcagctcccacaaggggtgggttttagtccaataggcaccaccatgttgtcacgggctgatgatgcttctggtgtgtatctcatccatatcaaggaccttcaacttagcatctggctccacaatggggacaactggttgctggtggacaccatttgcttgtgtgaaatatctgataatttgcttgacgatgagcctactgacgatatcctgataaaccatgtgggggactataatgagtttttattcttggagctgggtcgatgcgcactctacttggatgtcaaacgcaggacgctgcgtaaagtgtatgagatgacagcagaggagcaacaattgggtgatatctatcctcttatgatgagctggcttcccaatttccctgcactcatggatagtcctgcaaggtttgccttttgcccttttcgtgatctatatactgtccttgtagagtttactcaattttgcaattcgcatcgtgcatctcactgtttggtatttactatagttgtggggtgctaatacatatgtgattgattc

SEQ ID NO: 12179 - protein, 264 aa, Triticum aestivum
  peptide (1)..(264): Ceres Seq. ID no. 12625238
  misc_feature (1)..(14): NCBI GI NO: 2769724 NR Description: H87 [Human herpesvirus 6]
  misc_feature (1)..(15): NCBI GI NO: 11359723 NR Description: proteophosphoglycan, membrane-associated
MEFAGLLDNPSSGLSYFFVTVECTRYHEDSKVHVYMLQNGDDAWRKHLTLASDLLLYPRKSPKGVLVHNKFYLPTDNEIVVLDLVSSSLSTIQLPQGVGFSPIGTTMLSRADDASGVYLIHIKDLQLSIWLHNGDNWLLVDTICLCEISDNLLDDEPTDDILINHVGDYNEFLFLELGRCALYLDVKRRTLRKVYEMTAEEQQLGDIYPLMMSWLPNFPALMDSPARFAFCPFRDLYTVLVEFTQFCNSHRASHCLVFTIVVGC

SEQ ID NO: 12180 - protein, 229 aa, Triticum aestivum
  peptide (1)..(229): Ceres Seq. ID no. 12625239
MLQNGDDAWRKHLTLASDLLLYPRKSPKGVLVHNKFYLPTDNEIVVLDLVSSSLSTIQLPQGVGFSPIGTTMLSRADDASGVYLIHIKDLQLSIWLHNGDNWLLVDTICLCEISDNLLDDEPTDDILINHVGDYNEFLFLELGRCALYLDVKRRTLRKVYEMTAEEQQLGDIYPLMMSWLPNFPALMDSPARFAFCPFRDLYTVLVEFTQFCNSHRASHCLVFTIVVGC

SEQ ID NO: 12181 - protein, 205 aa, Triticum aestivum
  peptide (1)..(205): Ceres Seq. ID no. 12625240
  misc_feature (7)..(139): NCBI GI NO: 38347670 NR Description: OSJNBa0054D14.5
  misc_feature (7)..(103): NCBI GI NO: 37531854 NR Description: hypothetical protein
MEGEAQPPPACVSKVLDEDNLLREIIVRVGFPTSLVRAAGVCTRWLSHASDRALLRRFRELHPPRLLGFYLANRERPGGARFLPVLPLPPDLAAVVRRASFSLDTHDGARRSASFSPGTHSDGRTDVVGCWNGRVITSSQGQNYAHGRSEIIFQVHTPLCSGSEKGAAIIPALHLKVQDGICRLIRQPFFWIVLLFCHGGVYQVS

SEQ ID NO: 12182 - DNA, 1566 bp, Triticum aestivum
  misc_feature (1)..(1566): Ceres Seq. ID no. 15226307
gtccactagttcctccaccaaaaactagggttagggttagggcggcggcggctttatttccgatcgcgatcgccatggccaccggaggcgccccaaagccggaggaggagaccgtcgtcttccccgattgggtgatgctggaacgcatcttccgcaaacggtgcctcgacgacctagacgctgctggtgaggccgtcaacaagaacaagaccgctgctccagtcaagatagacggcgttcactcctgcttcgtctccttcaccctcgcagctcctccagggtcctcctacttcaacctccattggccggagagacaaggctcagacagactctctgccttcgtccgggcaaccgacaagaacctcgtcctcttcgacatctcgatccccgaccggattcgctacatggacgctccgccagatctgttcgtctacacggcctctgctccttccccctcggtgcagcagcttcctcggcgcagcacaaggcggttcctggctcatcagttcatcaccggcattctgcagctcaaagcggagcactgctacatcgttgccgacctcaatgtccaccccaagaaaaagggcgtttgggctgaactctgtgtcttcaactccggcgccaacgactggagaatcatcaccgaggtgcttgctgatgagctccctgacctctggtggtccgatgatgtgtttgctttcgacggccgtttcctttgctgggtggactacttctgcggcgtcgtgctatgcgacttctccaaaaatgtggactcaggtgctccacttcgtgccttttcctggaggaatcaaatacccttttgacgcacggttcccgaggtacttcccagggaggttccgaagtgcgtccatcagccaaggcatgatccgctatatccacattgacaatgactttcatgagactatccactccgactggcaagtgatgattcctcctaagagaagccaacggcggcagcagcagcttccccacaaaatcaccatttggacgttgaactccaagttcgagtgggaggtgcattgtaagatcaacctggattgtctctgggcacaacctctttaccgaggtctacctcggcgtcttcctgagttcccagtcatcagcatggatgacccgggtgttctgtgctgcctgctgagggcgaaggaatttggtggcaaggagcggatgatcatggttgacatgaaccatgcggatctgcagtcatttactgatgtgaatgtagaagacaagttctctaataccacccaacttccaactgtcttctccaaataccttcaaaaggccaacagggatggcatggggcaacattgagcttacttcattgaaatgcaagtctgcaatatgaagacctgtaatctggtgactgaaggtgaaaactttgcggatgctcaaatcaaagatgttgtttgtcaatgacgcggtgcaggcagaacagtttgatgatgtactgatgaatatctattggagtaacgctacatgttctggatcatgtaatcatatgtttcagcgttaaaagtatgagattgaaaaaaaaaaaaaaaa

SEQ ID NO: 12183 - protein, 273 aa, Triticum aestivum
  peptide (1)..(273): Ceres Seq. ID no. 15226308
PLVPPPKTRVRVRAAAALFPIAIAMATGGAPKPEEETVVFPDWVMLERIFRKRCLDDLDAAGEAVNKNKTAAPVKIDGVHSCFVSFTLAAPPGSSYFNLHWPERQGSDRLSAFVRATDKNLVLFDISIPDRIRYMDAPPDLFVYTASAPSPSVQQLPRRSTRRFLAHQFITGILQLKAEHCYIVADLNVHPKKKGVWAELCVFNSGANDWRIITEVLADELPDLWWSDDVFAFDGRFLCWVDYFCGVVLCDFSKNVDSGAPLRAFSWRNQIPF

SEQ ID NO: 12184 - protein, 256 aa, Triticum aestivum
  peptide (1)..(256): Ceres Seq. ID no. 15226309
  misc_feature (1)..(65): Pfam Name: Pfam Description:  Equine herpesvirus glycoprotein gp2
MSTPRKRAFGLNSVSSTPAPTTGESSPRCLLMSSLTSGGPMMCLLSTAVSFAGWTTSAASCYATSPKMWTQVLHFVPFPGGIKYPFDARFPRYFPGRFRSASISQGMIRYIHIDNDFHETIHSDWQVMIPPKRSQRRQQQLPHKITIWTLNSKFEWEVHCKINLDCLWAQPLYRGLPRRLPEFPVISMDDPGVLCCLLRAKEFGGKERMIMVDMNHADLQSFTDVNVEDKFSNTTQLPTVFSKYLQKANRDGMGQH

SEQ ID NO: 12185 - protein, 249 aa, Triticum aestivum
  peptide (1)..(249): Ceres Seq. ID no. 15226310
MATGGAPKPEEETVVFPDWVMLERIFRKRCLDDLDAAGEAVNKNKTAAPVKIDGVHSCFVSFTLAAPPGSSYFNLHWPERQGSDRLSAFVRATDKNLVLFDISIPDRIRYMDAPPDLFVYTASAPSPSVQQLPRRSTRRFLAHQFITGILQLKAEHCYIVADLNVHPKKKGVWAELCVFNSGANDWRIITEVLADELPDLWWSDDVFAFDGRFLCWVDYFCGVVLCDFSKNVDSGAPLRAFSWRNQIPF

SEQ ID NO: 12186 - DNA, 2147 bp, Triticum aestivum
  misc_feature (1)..(2147): Ceres Seq. ID no. 13654290
acaccatccaccacatcccatcccaggagattaaaaaaggacaagagctcgattcaaatccgatcctgcgttacgtatcgcgcttcttccgtccgtgtgttcgttccgaggccaggagtttgaggagatggcgggcggcggtgtcgaggacgtctacggcgaggacagggccaccgaggagcagctcatcacgccatggtcattctccgtcgcaagtgggcaccagcttctgagggacccccggcacaacaaggggctggccttctccgaggcggagcgcgacgcgcactacctccggggcctgcttcccccggccatcgtctcccaggagcaccaggagaagaagatcatgcacaacctccgcagttacaccgtccccctgcaccgctacgtcgccatgatggacctccaggagaggaacgagaggctcttctacaagctcctcatcgacaacgtcgaggagctgctccccgtcgtctacacgcccgtcgtcggcgaggcctgccagaagtacggcagcatctaccgccgcccgcaggggctctacatcagcctcaaggacaagggcaaggtgctcgaggtgctcaagaactggcctgagaggagcatccaggtcatcgtcgtcaccgacggcgagcgcattttggggctcggagatctgggttgccagggtatggggattccggttggcaaactgtctctgtacaccgccctcggaggagttcgcccatcagcttgcctgccaattacgatcgatgttggcaccaacaatgagacattgctgaacgacgagtactacatcgggctccgtcaacggcgtgctaccggcgaggaataccatgagcttcttcaagagttcatgaatgcagtgaagcagaactacggcgagaaagtcctggtccagtttgaggactttgccaaccacaatgcattcgatttgctcgcaaagtacagcaagagccatctcgtcttcaacgatgatattcagggcacagcatcagtggtcctcgcaggcctcttggcggccctgaggatgatcggtggaggccttgtggatcagacttacctcttccttggtgctggagaggctggaactggcattgcagaactcattgctcttgagatgtcgaaacacactgaactcccggtggacgactgccgcaagaagatctggctggtggactccaagggtctgcttgtcgagtctagaaaagagtctctgcagcacttcaagaagccgttcgctcatgagcacgaagaactcaagaccctgctggaggccgtccagtccatcaagccaaccgtgctgatcggaacctccggcgtcgggaagaccttcacccaggaagtgatcgaggccatggcctccttcaacgagaaacccgtcatcttctcgctgtcgaacccgacgtcccactcggagtgcacggccgaggaggcctacacctggagcaagggcacggcggtgttcgcgagcggcagcccgttcgaccccgtggagtacgaggggaagacgttcgtgcccgggcagtccaacaacgcctacgtgttccccggcttcggcctcggcgtcgtcatctccggcgccatccgcgtccacgacgacatgctcctcgccgcctcggaggcgctggcggaggaggcgacccaggagaacttcgacaaggggctcatcttcccgcccttcaccaacatccgcaagatctcggccagcatcgccgccaaggtggccgccaaggcctacgacctgggcctggccagccggctgccgcggcccgacgacctggtcaagtacgccgagagctgcatgtacaccccgctctaccgcagctacaggtgagcgtggcgggcagttttgcggccagcacggacggagtcaatcaataaaatcaatctccttcccccgtatgccaaccagctcaactcaaagcttcagcgacgcaacctaaaacataggctttctttccttctgtgtccgtctatgcgtatgtgtactcttgtgctcttctactttgctttactttgtactgtaatgtactgttaacgggagcacggcacgcacctgtctatccgtgtcgaggtgcgtcgtcgtcgtcgtcgtcgattcttttgtcagattgagttaaacgagtgtaatagtttgattg

SEQ ID NO: 12187 - protein, 570 aa, Triticum aestivum
  peptide (1)..(570): Ceres Seq. ID no. 13654291
  misc_feature (286)..(539): Pfam Name: Pfam Description:  Malic enzyme, NAD binding domain
  misc_feature (1)..(570): NCBI GI NO: 34906372 NR Description: unnamed protein product
  misc_feature (1)..(570): NCBI GI NO: 1170871 NR Description: NADP-DEPENDENT MALIC ENZYME, CHLOROPLAST PRECURSOR
  misc_feature (3)..(570): NCBI GI NO: 510876 NR Description: NADP dependent malic enzyme [Phaseolus vulgaris]
  misc_feature (3)..(570): NCBI GI NO: 7427668 NR Description: malate dehydrogenase
  misc_feature (4)..(570): NCBI GI NO: 8118507 NR Description: NADP-dependent malic protein [Ricinus communis]
  misc_feature (3)..(570): NCBI GI NO: 115420 NR Description: NADP-DEPENDENT MALIC ENZYME (NADP-ME)
  misc_feature (1)..(570): NCBI GI NO: 18460985 NR Description: NADP-dependent malic enzyme [Zea mays]
  misc_feature (3)..(570): NCBI GI NO: 15077109 NR Description: putative cytosolic NADP-malic enzyme
  misc_feature (3)..(570): NCBI GI NO: 7431234 NR Description: malate dehydrogenase
  misc_feature (25)..(570): NCBI GI NO: 4096786 NR Description: NADP-malic enzyme [Zea mays]
MAGGGVEDVYGEDRATEEQLITPWSFSVASGHQLLRDPRHNKGLAFSEAERDAHYLRGLLPPAIVSQEHQEKKIMHNLRSYTVPLHRYVAMMDLQERNERLFYKLLIDNVEELLPVVYTPVVGEACQKYGSIYRRPQGLYISLKDKGKVLEVLKNWPERSIQVIVVTDGERILGLGDLGCQGMGIPVGKLSLYTALGGVRPSACLPITIDVGTNNETLLNDEYYIGLRQRRATGEEYHELLQEFMNAVKQNYGEKVLVQFEDFANHNAFDLLAKYSKSHLVFNDDIQGTASVVLAGLLAALRMIGGGLVDQTYLFLGAGEAGTGIAELIALEMSKHTELPVDDCRKKIWLVDSKGLLVESRKESLQHFKKPFAHEHEELKTLLEAVQSIKPTVLIGTSGVGKTFTQEVIEAMASFNEKPVIFSLSNPTSHSECTAEEAYTWSKGTAVFASGSPFDPVEYEGKTFVPGQSNNAYVFPGFGLGVVISGAIRVHDDMLLAASEALAEEATQENFDKGLIFPPFTNIRKISASIAAKVAAKAYDLGLASRLPRPDDLVKYAESCMYTPLYRSYR

SEQ ID NO: 12188 - protein, 496 aa, Triticum aestivum
  peptide (1)..(496): Ceres Seq. ID no. 13654292
  misc_feature (212)..(465): Pfam Name: Pfam Description:  Malic enzyme, NAD binding domain
  misc_feature (1)..(496): NCBI GI NO: 34906372 NR Description: unnamed protein product
  misc_feature (1)..(496): NCBI GI NO: 1170871 NR Description: NADP-DEPENDENT MALIC ENZYME, CHLOROPLAST PRECURSOR
  misc_feature (1)..(496): NCBI GI NO: 510876 NR Description: NADP dependent malic enzyme [Phaseolus vulgaris]
  misc_feature (1)..(496): NCBI GI NO: 7427668 NR Description: malate dehydrogenase
  misc_feature (1)..(496): NCBI GI NO: 8118507 NR Description: NADP-dependent malic protein [Ricinus communis]
  misc_feature (1)..(496): NCBI GI NO: 115420 NR Description: NADP-DEPENDENT MALIC ENZYME (NADP-ME)
  misc_feature (1)..(496): NCBI GI NO: 18460985 NR Description: NADP-dependent malic enzyme [Zea mays]
  misc_feature (1)..(496): NCBI GI NO: 15077109 NR Description: putative cytosolic NADP-malic enzyme
  misc_feature (1)..(496): NCBI GI NO: 7431234 NR Description: malate dehydrogenase
  misc_feature (1)..(496): NCBI GI NO: 4096786 NR Description: NADP-malic enzyme [Zea mays]
MHNLRSYTVPLHRYVAMMDLQERNERLFYKLLIDNVEELLPVVYTPVVGEACQKYGSIYRRPQGLYISLKDKGKVLEVLKNWPERSIQVIVVTDGERILGLGDLGCQGMGIPVGKLSLYTALGGVRPSACLPITIDVGTNNETLLNDEYYIGLRQRRATGEEYHELLQEFMNAVKQNYGEKVLVQFEDFANHNAFDLLAKYSKSHLVFNDDIQGTASVVLAGLLAALRMIGGGLVDQTYLFLGAGEAGTGIAELIALEMSKHTELPVDDCRKKIWLVDSKGLLVESRKESLQHFKKPFAHEHEELKTLLEAVQSIKPTVLIGTSGVGKTFTQEVIEAMASFNEKPVIFSLSNPTSHSECTAEEAYTWSKGTAVFASGSPFDPVEYEGKTFVPGQSNNAYVFPGFGLGVVISGAIRVHDDMLLAASEALAEEATQENFDKGLIFPPFTNIRKISASIAAKVAAKAYDLGLASRLPRPDDLVKYAESCMYTPLYRSYR

SEQ ID NO: 12189 - protein, 480 aa, Triticum aestivum
  peptide (1)..(480): Ceres Seq. ID no. 13654293
  misc_feature (196)..(449): Pfam Name: Pfam Description:  Malic enzyme, NAD binding domain
  misc_feature (1)..(480): NCBI GI NO: 34906372 NR Description: unnamed protein product
  misc_feature (1)..(480): NCBI GI NO: 1170871 NR Description: NADP-DEPENDENT MALIC ENZYME, CHLOROPLAST PRECURSOR
  misc_feature (1)..(480): NCBI GI NO: 510876 NR Description: NADP dependent malic enzyme [Phaseolus vulgaris]
  misc_feature (1)..(480): NCBI GI NO: 7427668 NR Description: malate dehydrogenase
  misc_feature (1)..(480): NCBI GI NO: 8118507 NR Description: NADP-dependent malic protein [Ricinus communis]
  misc_feature (1)..(480): NCBI GI NO: 115420 NR Description: NADP-DEPENDENT MALIC ENZYME (NADP-ME)
  misc_feature (1)..(480): NCBI GI NO: 18460985 NR Description: NADP-dependent malic enzyme [Zea mays]
  misc_feature (1)..(480): NCBI GI NO: 15077109 NR Description: putative cytosolic NADP-malic enzyme
  misc_feature (1)..(480): NCBI GI NO: 7431234 NR Description: malate dehydrogenase
  misc_feature (1)..(480): NCBI GI NO: 4096786 NR Description: NADP-malic enzyme [Zea mays]
MMDLQERNERLFYKLLIDNVEELLPVVYTPVVGEACQKYGSIYRRPQGLYISLKDKGKVLEVLKNWPERSIQVIVVTDGERILGLGDLGCQGMGIPVGKLSLYTALGGVRPSACLPITIDVGTNNETLLNDEYYIGLRQRRATGEEYHELLQEFMNAVKQNYGEKVLVQFEDFANHNAFDLLAKYSKSHLVFNDDIQGTASVVLAGLLAALRMIGGGLVDQTYLFLGAGEAGTGIAELIALEMSKHTELPVDDCRKKIWLVDSKGLLVESRKESLQHFKKPFAHEHEELKTLLEAVQSIKPTVLIGTSGVGKTFTQEVIEAMASFNEKPVIFSLSNPTSHSECTAEEAYTWSKGTAVFASGSPFDPVEYEGKTFVPGQSNNAYVFPGFGLGVVISGAIRVHDDMLLAASEALAEEATQENFDKGLIFPPFTNIRKISASIAAKVAAKAYDLGLASRLPRPDDLVKYAESCMYTPLYRSYR

SEQ ID NO: 12190 - DNA, 1173 bp, Triticum aestivum
  misc_feature (1)..(1173): Ceres Seq. ID no. 12578438
atcctacctcgctccacgccacttcccactagctagcctccaaggagagcagagcaccatgacgatgctgcgggctgtgtccgtcacggtgggcgtggccgtggcgctgctggcggcggccacggcggcggagtcgtggctgtacgaggagttcaccacggacggcaacgtgcgcgcggactacaacgcgcaggggcagcaggtggcgtcgctcatgctcacccagcagtccggcggcggcgccttcggctcccggcagaagtacctctacggcgagttcagcatccagatgaagctcgtccccggcaactccgccggcaccgtcacctccttctacctgtcgtcgggcgacggccccgggcacgacgagatcgacatggagttcatgggcaactccacggggcagccggtggtgctcaacaccaacgtgtgggccaacggcgacggcaagaaggagcaccagttcgacctctggttcgacccggccgcggactaccacacctacaccatcatctggaaccacaagaacgtcctcttcaaggtggacgacctcttcatccgctccttcaggcgccacgccgacctcccctacccgggcgccaagcccatgtccgtgcacgccacgctctgggacggcagctactgggccacgctcaagggcaaggtccccgtcgactggtccggcgcgcccttcctcgtctcctaccgcgcctactccgccgacgcctgcgtgcccgcggaaggcggcccgctctcctgccccgccggcaccgaccgctggatgaaccggcagctcgacgacgccgagcgcggcaccgtcgcctgggccaagcgcgactacatgcgctacaactactgcgacgacggctggcgattcccgcagggcttccccgccgagtgctcccgcgcctgaacacaaccgattgagatttgagttcacgtccccaatcccccgatgagattctaccttgttagcttgattcttttttctggtttcttcagcagccggctcctctacctctatgtgttcttgttttcgtcaaaaaacctctctctgttaagtgttttttcttaacgagaggggttaactctaacgataataaacgtaaattcgttgagtaaatacagtagtatttaaaaaaaaaaaaaaaaaagcttatcgataccgtcgac

SEQ ID NO: 12191 - protein, 303 aa, Triticum aestivum
  peptide (1)..(303): Ceres Seq. ID no. 12578439
  misc_feature (48)..(227): Pfam Name: Pfam Description:  Glycosyl hydrolases family 16
  misc_feature (25)..(302): NCBI GI NO: 40253521 NR Description: putative end-xyloglucan transferase
  misc_feature (27)..(302): NCBI GI NO: 7447410 NR Description: xyloglucan endo-1,4-beta-D-glucanase (EC 3
  misc_feature (32)..(302): NCBI GI NO: 7447415 NR Description: xyloglucan endotransglycosylase (EC 2
  misc_feature (32)..(302): NCBI GI NO: 14330334 NR Description: Xet2 protein [Festuca pratensis]
  misc_feature (25)..(264): NCBI GI NO: 7447411 NR Description: end-xyloglucan transferase (EC 2.4.1.-) - rice
  misc_feature (25)..(249): NCBI GI NO: 32489753 NR Description: OSJNBb0015N08.5
  misc_feature (250)..(301): NCBI GI NO: 32489753 NR Description: OSJNBb0015N08.5
  misc_feature (23)..(300): NCBI GI NO: 8886865 NR Description: xyloglucan endotransglycosylase XET1
  misc_feature (21)..(300): NCBI GI NO: 22327914 NR Description: xyloglucan endotransglycosylase
  misc_feature (29)..(300): NCBI GI NO: 2129773 NR Description: xyloglucan endo-1,4-beta-D-glucanase (EC 3
SYLAPRHFPLASLQGEQSTMTMLRAVSVTVGVAVALLAAATAAESWLYEEFTTDGNVRADYNAQGQQVASLMLTQQSGGGAFGSRQKYLYGEFSIQMKLVPGNSAGTVTSFYLSSGDGPGHDEIDMEFMGNSTGQPVVLNTNVWANGDGKKEHQFDLWFDPAADYHTYTIIWNHKNVLFKVDDLFIRSFRRHADLPYPGAKPMSVHATLWDGSYWATLKGKVPVDWSGAPFLVSYRAYSADACVPAEGGPLSCPAGTDRWMNRQLDDAERGTVAWAKRDYMRYNYCDDGWRFPQGFPAECSRA

SEQ ID NO: 12192 - protein, 284 aa, Triticum aestivum
  peptide (1)..(284): Ceres Seq. ID no. 12578440
  misc_feature (29)..(208): Pfam Name: Pfam Description:  Glycosyl hydrolases family 16
  misc_feature (6)..(283): NCBI GI NO: 40253521 NR Description: putative end-xyloglucan transferase
  misc_feature (8)..(283): NCBI GI NO: 7447410 NR Description: xyloglucan endo-1,4-beta-D-glucanase (EC 3
  misc_feature (13)..(283): NCBI GI NO: 7447415 NR Description: xyloglucan endotransglycosylase (EC 2
  misc_feature (13)..(283): NCBI GI NO: 14330334 NR Description: Xet2 protein [Festuca pratensis]
  misc_feature (6)..(245): NCBI GI NO: 7447411 NR Description: end-xyloglucan transferase (EC 2.4.1.-) - rice
  misc_feature (6)..(230): NCBI GI NO: 32489753 NR Description: OSJNBb0015N08.5
  misc_feature (231)..(282): NCBI GI NO: 32489753 NR Description: OSJNBb0015N08.5
  misc_feature (4)..(281): NCBI GI NO: 8886865 NR Description: xyloglucan endotransglycosylase XET1
  misc_feature (2)..(281): NCBI GI NO: 22327914 NR Description: xyloglucan endotransglycosylase
  misc_feature (10)..(281): NCBI GI NO: 2129773 NR Description: xyloglucan endo-1,4-beta-D-glucanase (EC 3
MTMLRAVSVTVGVAVALLAAATAAESWLYEEFTTDGNVRADYNAQGQQVASLMLTQQSGGGAFGSRQKYLYGEFSIQMKLVPGNSAGTVTSFYLSSGDGPGHDEIDMEFMGNSTGQPVVLNTNVWANGDGKKEHQFDLWFDPAADYHTYTIIWNHKNVLFKVDDLFIRSFRRHADLPYPGAKPMSVHATLWDGSYWATLKGKVPVDWSGAPFLVSYRAYSADACVPAEGGPLSCPAGTDRWMNRQLDDAERGTVAWAKRDYMRYNYCDDGWRFPQGFPAECSRA

SEQ ID NO: 12193 - protein, 282 aa, Triticum aestivum
  peptide (1)..(282): Ceres Seq. ID no. 12578441
  misc_feature (27)..(206): Pfam Name: Pfam Description:  Glycosyl hydrolases family 16
  misc_feature (4)..(281): NCBI GI NO: 40253521 NR Description: putative end-xyloglucan transferase
  misc_feature (6)..(281): NCBI GI NO: 7447410 NR Description: xyloglucan endo-1,4-beta-D-glucanase (EC 3
  misc_feature (11)..(281): NCBI GI NO: 7447415 NR Description: xyloglucan endotransglycosylase (EC 2
  misc_feature (11)..(281): NCBI GI NO: 14330334 NR Description: Xet2 protein [Festuca pratensis]
  misc_feature (4)..(243): NCBI GI NO: 7447411 NR Description: end-xyloglucan transferase (EC 2.4.1.-) - rice
  misc_feature (4)..(228): NCBI GI NO: 32489753 NR Description: OSJNBb0015N08.5
  misc_feature (229)..(280): NCBI GI NO: 32489753 NR Description: OSJNBb0015N08.5
  misc_feature (2)..(279): NCBI GI NO: 8886865 NR Description: xyloglucan endotransglycosylase XET1
  misc_feature (1)..(279): NCBI GI NO: 22327914 NR Description: xyloglucan endotransglycosylase
  misc_feature (8)..(279): NCBI GI NO: 2129773 NR Description: xyloglucan endo-1,4-beta-D-glucanase (EC 3
MLRAVSVTVGVAVALLAAATAAESWLYEEFTTDGNVRADYNAQGQQVASLMLTQQSGGGAFGSRQKYLYGEFSIQMKLVPGNSAGTVTSFYLSSGDGPGHDEIDMEFMGNSTGQPVVLNTNVWANGDGKKEHQFDLWFDPAADYHTYTIIWNHKNVLFKVDDLFIRSFRRHADLPYPGAKPMSVHATLWDGSYWATLKGKVPVDWSGAPFLVSYRAYSADACVPAEGGPLSCPAGTDRWMNRQLDDAERGTVAWAKRDYMRYNYCDDGWRFPQGFPAECSRA

SEQ ID NO: 12194 - DNA, 757 bp, Triticum aestivum
  misc_feature (1)..(757): Ceres Seq. ID no. 12598353
aaggagggaaagacgactattttcctccgcctcgatcccatcgccgtctcccccccacacctcgatcccgccgccgccccacccaccatggcgcgggcgaagccgtcgtcggcggcggcgaagaagagccaggcggcgcagcagggcggcggggccgggcacgcggcgccgtccgggctcgcgcggtacctcgacccggaggcgccgtgggacaaggaccggctgctggacgccgtgcactggatccgccaggcggtgggcctcgcctgcggccttctctggggcgccgtcccgctcgtcggcgccgcctggatcgtcctgttcgtggccatttcttctggcataatttactggtactatgcgcacctattgaaggtcgacgaggaagaatttggaggccatggcgcgctgcttcaggaggggatgtttgcatctttcaccctttttcctgctttcatggatttctttgtgtacagtttggctcacttttgatgagaagctcctttgttgaacatacccttgatttgggatcggattggcggaaaaaaattcaccagaactctgtagattattgaagagccctagaacagcattgtatgaaatcggttcaggcagtcatgttgtctctgaatcccagtgtaattttgatagaacatcttagcataccagttgttggcagaacatgttcagtatgcttgacatgtaactattggatatcattctcctgcgtcgattcaataaaatgttttaacatgtg

SEQ ID NO: 12195 - protein, 190 aa, Triticum aestivum
  peptide (1)..(190): Ceres Seq. ID no. 12598354
GGKDDYFPPPRSHRRLPPTPRSRRRPTHHGAGEAVVGGGEEEPGGAAGRRGRARGAVRARAVPRPGGAVGQGPAAGRRALDPPGGGPRLRPSLGRRPARRRRLDRPVRGHFFWHNLLVLCAPIEGRRGRIWRPWRAASGGDVCIFHPFSCFHGFLCVQFGSLLMRSSFVEHTLDLGSDWRKKIHQNSVDY

SEQ ID NO: 12196 - protein, 163 aa, Triticum aestivum
  peptide (1)..(163): Ceres Seq. ID no. 12598355
  misc_feature (30)..(149): NCBI GI NO: 14719336 NR Description: hypothetical protein [Oryza sativa]
  misc_feature (37)..(163): NCBI GI NO: 15238396 NR Description: putative Rab5-interacting protein - like
  misc_feature (37)..(155): NCBI GI NO: 8885547 NR Description: gb|AAF17201
  misc_feature (30)..(163): NCBI GI NO: 18401926 NR Description: expressed protein; protein id: At2g29020
  misc_feature (37)..(163): NCBI GI NO: 13385630 NR Description: RIKEN cDNA 1110008F13 [Mus musculus]
  misc_feature (37)..(163): NCBI GI NO: 10047116 NR Description: putative Rab5-interacting protein [Homo sapiens]
  misc_feature (37)..(163): NCBI GI NO: 27704314 NR Description: similar to RIKEN cDNA 1110008F13
  misc_feature (36)..(163): NCBI GI NO: 27503935 NR Description: Similar to RIKEN cDNA 1110008F13 gene
  misc_feature (37)..(149): NCBI GI NO: 24211596 NR Description: Protein C20orf24
  misc_feature (9)..(162): NCBI GI NO: 34872254 NR Description: similar to RIKEN cDNA 1110008F13
KEGKTTIFLRLDPIAVSPPHLDPAAAPPTMARAKPSSAAAKKSQAAQQGGGAGHAAPSGLARYLDPEAPWDKDRLLDAVHWIRQAVGLACGLLWGAVPLVGAAWIVLFVAISSGIIYWYYAHLLKVDEEEFGGHGALLQEGMFASFTLFPAFMDFFVYSLAHF

SEQ ID NO: 12197 - protein, 134 aa, Triticum aestivum
  peptide (1)..(134): Ceres Seq. ID no. 12598356
  misc_feature (1)..(120): NCBI GI NO: 14719336 NR Description: hypothetical protein [Oryza sativa]
  misc_feature (8)..(134): NCBI GI NO: 15238396 NR Description: putative Rab5-interacting protein - like
  misc_feature (8)..(126): NCBI GI NO: 8885547 NR Description: gb|AAF17201
  misc_feature (1)..(134): NCBI GI NO: 18401926 NR Description: expressed protein; protein id: At2g29020
  misc_feature (8)..(134): NCBI GI NO: 13385630 NR Description: RIKEN cDNA 1110008F13 [Mus musculus]
  misc_feature (8)..(134): NCBI GI NO: 10047116 NR Description: putative Rab5-interacting protein [Homo sapiens]
  misc_feature (8)..(134): NCBI GI NO: 27704314 NR Description: similar to RIKEN cDNA 1110008F13
  misc_feature (7)..(134): NCBI GI NO: 27503935 NR Description: Similar to RIKEN cDNA 1110008F13 gene
  misc_feature (8)..(120): NCBI GI NO: 24211596 NR Description: Protein C20orf24
  misc_feature (1)..(133): NCBI GI NO: 34872254 NR Description: similar to RIKEN cDNA 1110008F13
MARAKPSSAAAKKSQAAQQGGGAGHAAPSGLARYLDPEAPWDKDRLLDAVHWIRQAVGLACGLLWGAVPLVGAAWIVLFVAISSGIIYWYYAHLLKVDEEEFGGHGALLQEGMFASFTLFPAFMDFFVYSLAHF

SEQ ID NO: 12198 - DNA, 967 bp, Triticum aestivum
  misc_feature (1)..(967): Ceres Seq. ID no. 13598305
ctagaacatcctaatcgaaaaacatcccgccccccacagccatccgtccacagagtcaccacagccgcaccgcagctccatcttcaccaccgtcatcgtcaacgagaagcagcggcgagcagcagcgcccggccaagagacgagacgagacgagagaacaagtgttgccatggccgcgatggagagcaagagccggaggttcgcgctggcgtgcggcgtcctcagccagtacgtcaaggcggagcagaagatgtcctcctccgccgtcgtcgccccgcccccgcgcgccccgccggccaccacgctcagcctcatgcccggcgccgacgtcggccaggaccacgccgcggcggccgctgaggaggcgggcccggccacgccgctcaccatcttctacggcggcagggtagtcgtcttcgaggacttccccgcggacaaggcggccgaggtcatgcgcatggccaccaccgccggcgtcgagcgcgcggccgccacgcccgccccggccccggcgctcgcggacctgcccatcatgcgcaaggcctccctgcagaggttcttcgagaagcgcaaggaccgcctcggcgcgcgcgcgccctacgcccgccccgccgcgccggcagccaacaagggctcggaggacaagtcggcgtcgtcctcctcgtggctcgggctggccagcgccgacggcgccttcgcgctctgatccggacggacggacggacggggcaagacggcttgctcgctcgcctcaagacatcgtttgtagagcactttcaattttaatgtattctttgggtaaaaattcgaatagcgaaagaaagaaagaaagaaacaagattgagttcatagcaagccctctttgttcgttcgtttgatttgatcgacaaattcttttgatttctgcgcggatcatcagccatggttcgcacagaaacccagttcagttcatgaaccgaacaataac

SEQ ID NO: 12199 - protein, 178 aa, Triticum aestivum
  peptide (1)..(178): Ceres Seq. ID no. 13598306
  misc_feature (68)..(100): Pfam Name: Pfam Description:  ZIM motif
  misc_feature (4)..(177): NCBI GI NO: 24960746 NR Description: Unknown protein
  misc_feature (1)..(155): NCBI GI NO: 37533948 NR Description: hypothetical protein
  misc_feature (1)..(169): NCBI GI NO: 37533958 NR Description: unknown protein
  misc_feature (1)..(171): NCBI GI NO: 24960744 NR Description: Unknown protein
  misc_feature (1)..(167): NCBI GI NO: 24960745 NR Description: Unknown protein
  misc_feature (7)..(135): NCBI GI NO: 37533952 NR Description: hypothetical protein
  misc_feature (98)..(163): NCBI GI NO: 21592605 NR Description: unknown [Arabidopsis thaliana]
  misc_feature (69)..(98): NCBI GI NO: 21592605 NR Description: unknown [Arabidopsis thaliana]
  misc_feature (98)..(163): NCBI GI NO: 18410737 NR Description: expressed protein [Arabidopsis thaliana]
  misc_feature (69)..(98): NCBI GI NO: 18410737 NR Description: expressed protein [Arabidopsis thaliana]
MAAMESKSRRFALACGVLSQYVKAEQKMSSSAVVAPPPRAPPATTLSLMPGADVGQDHAAAAAEEAGPATPLTIFYGGRVVVFEDFPADKAAEVMRMATTAGVERAAATPAPAPALADLPIMRKASLQRFFEKRKDRLGARAPYARPAAPAANKGSEDKSASSSSWLGLASADGAFAL

SEQ ID NO: 12200 - protein, 175 aa, Triticum aestivum
  peptide (1)..(175): Ceres Seq. ID no. 13598307
  misc_feature (65)..(97): Pfam Name: Pfam Description:  ZIM motif
  misc_feature (1)..(174): NCBI GI NO: 24960746 NR Description: Unknown protein
  misc_feature (1)..(152): NCBI GI NO: 37533948 NR Description: hypothetical protein
  misc_feature (1)..(166): NCBI GI NO: 37533958 NR Description: unknown protein
  misc_feature (1)..(168): NCBI GI NO: 24960744 NR Description: Unknown protein
  misc_feature (1)..(164): NCBI GI NO: 24960745 NR Description: Unknown protein
  misc_feature (4)..(132): NCBI GI NO: 37533952 NR Description: hypothetical protein
  misc_feature (95)..(160): NCBI GI NO: 21592605 NR Description: unknown [Arabidopsis thaliana]
  misc_feature (66)..(95): NCBI GI NO: 21592605 NR Description: unknown [Arabidopsis thaliana]
  misc_feature (95)..(160): NCBI GI NO: 18410737 NR Description: expressed protein [Arabidopsis thaliana]
  misc_feature (66)..(95): NCBI GI NO: 18410737 NR Description: expressed protein [Arabidopsis thaliana]
MESKSRRFALACGVLSQYVKAEQKMSSSAVVAPPPRAPPATTLSLMPGADVGQDHAAAAAEEAGPATPLTIFYGGRVVVFEDFPADKAAEVMRMATTAGVERAAATPAPAPALADLPIMRKASLQRFFEKRKDRLGARAPYARPAAPAANKGSEDKSASSSSWLGLASADGAFAL

SEQ ID NO: 12201 - protein, 151 aa, Triticum aestivum
  peptide (1)..(151): Ceres Seq. ID no. 13598308
  misc_feature (41)..(73): Pfam Name: Pfam Description:  ZIM motif
  misc_feature (1)..(150): NCBI GI NO: 24960746 NR Description: Unknown protein
  misc_feature (1)..(128): NCBI GI NO: 37533948 NR Description: hypothetical protein
  misc_feature (1)..(142): NCBI GI NO: 37533958 NR Description: unknown protein
  misc_feature (1)..(144): NCBI GI NO: 24960744 NR Description: Unknown protein
  misc_feature (1)..(140): NCBI GI NO: 24960745 NR Description: Unknown protein
  misc_feature (1)..(108): NCBI GI NO: 37533952 NR Description: hypothetical protein
  misc_feature (71)..(136): NCBI GI NO: 21592605 NR Description: unknown [Arabidopsis thaliana]
  misc_feature (42)..(71): NCBI GI NO: 21592605 NR Description: unknown [Arabidopsis thaliana]
  misc_feature (71)..(136): NCBI GI NO: 18410737 NR Description: expressed protein [Arabidopsis thaliana]
  misc_feature (42)..(71): NCBI GI NO: 18410737 NR Description: expressed protein [Arabidopsis thaliana]
MSSSAVVAPPPRAPPATTLSLMPGADVGQDHAAAAAEEAGPATPLTIFYGGRVVVFEDFPADKAAEVMRMATTAGVERAAATPAPAPALADLPIMRKASLQRFFEKRKDRLGARAPYARPAAPAANKGSEDKSASSSSWLGLASADGAFAL

SEQ ID NO: 12202 - DNA, 958 bp, Triticum aestivum
  misc_feature (1)..(958): Ceres Seq. ID no. 13596116
atctcatctccgaggaaccatcaatccgagatagctctacaaccagcaaagccatccaaagccatgaggttgcagtgctccctggtcctcctgatcgccctgagcgtcggctgcgcggcagcgcaggagagcgggaaacaggcgggctacgatttcttctacctcgtgctgcagtggccggggtcgtactgcgacacgaagcagagctgctgctacccgcggtccggcaaaccggcggcggacttcgggatccacgggctgtggcccaaccgcgacgacgggtcctacccgcagaactgcaaccccgacagcgccttcgatccctccaaggtgagcgacatcctgagcagcctgcgcagcagctggccgacgctggcgtgcccgaccaacgacggcctccgcttctgggcgcacgagtgggagaagcacggcacctgcgcgcagaacctcttcaacgagcacggctacttccaggccgccctccgcctgcgcggccagctccgcgtcctcgacgccctcgccaccgcgggcatctcccccgacggcgggtactacacgatgggggccatcaagggcgccatccaggaggggaccgggttcgcgcctcacgtcgactgcaaccgcgacgagtccggcaacagccagctcttccagctctacttctgcgtccacgccgacgcctcccgcttcgtcgagtgccccgtccagcccggcggcaggccctgtggcaacaggatcgagttcccggctttctgatcattatctcctccaacccaaggagttatcatgtgttccttaatttgcctcccgattcctagatattcatttggttttcatttcttgccgctggcagaataaactgagggtgcatattcgaacatgtgctcgttttctttctttcccccccttaattttcatgttaatgacctgatctcaggcagcaattgaagttacgacg

SEQ ID NO: 12203 - protein, 271 aa, Triticum aestivum
  peptide (1)..(271): Ceres Seq. ID no. 13596117
LISEEPSIRDSSTTSKAIQSHEVAVLPGPPDRPERRLRGSAGERETGGLRFLLPRAAVAGVVLRHEAELLLPAVRQTGGGLRDPRAVAQPRRRVLPAELQPRQRLRSLQGERHPEQPAQQLADAGVPDQRRPPLLGARVGEARHLRAEPLQRARLLPGRPPPARPAPRPRRPRHRGHLPRRRVLHDGGHQGRHPGGDRVRASRRLQPRRVRQQPALPALLLRPRRRLPLRRVPRPARRQALWQQDRVPGFLIIISSNPRSYHVFLNLPPDS

SEQ ID NO: 12204 - protein, 251 aa, Triticum aestivum
  peptide (1)..(251): Ceres Seq. ID no. 13596118
  misc_feature (50)..(239): Pfam Name: Pfam Description:  Ribonuclease T2 family
  misc_feature (22)..(251): NCBI GI NO: 7435265 NR Description: ribonuclease (EC 3.1.-.-) - barley
  misc_feature (28)..(251): NCBI GI NO: 11990466 NR Description: ribonuclease [Oryza sativa]
  misc_feature (28)..(240): NCBI GI NO: 11990470 NR Description: ribonuclease
  misc_feature (27)..(251): NCBI GI NO: 7435266 NR Description: ribonuclease M5 (EC 3
  misc_feature (27)..(251): NCBI GI NO: 7768564 NR Description: RNase [Nicotiana tabacum]
  misc_feature (28)..(251): NCBI GI NO: 9081845 NR Description: S-like ribonuclease [Prunus dulcis]
  misc_feature (50)..(251): NCBI GI NO: 34810726 NR Description: Chain A
  misc_feature (27)..(251): NCBI GI NO: 532754 NR Description: RNase NE [Nicotiana alata]
  misc_feature (22)..(251): NCBI GI NO: 3860325 NR Description: ribonuclease T2 [Cicer arietinum]
  misc_feature (13)..(251): NCBI GI NO: 2148018 NR Description: ribonuclease II (EC 3
ISSPRNHQSEIALQPAKPSKAMRLQCSLVLLIALSVGCAAAQESGKQAGYDFFYLVLQWPGSYCDTKQSCCYPRSGKPAADFGIHGLWPNRDDGSYPQNCNPDSAFDPSKVSDILSSLRSSWPTLACPTNDGLRFWAHEWEKHGTCAQNLFNEHGYFQAALRLRGQLRVLDALATAGISPDGGYYTMGAIKGAIQEGTGFAPHVDCNRDESGNSQLFQLYFCVHADASRFVECPVQPGGRPCGNRIEFPAF

SEQ ID NO: 12205 - protein, 230 aa, Triticum aestivum
  peptide (1)..(230): Ceres Seq. ID no. 13596119
  misc_feature (29)..(218): Pfam Name: Pfam Description:  Ribonuclease T2 family
  misc_feature (1)..(230): NCBI GI NO: 7435265 NR Description: ribonuclease (EC 3.1.-.-) - barley
  misc_feature (7)..(230): NCBI GI NO: 11990466 NR Description: ribonuclease [Oryza sativa]
  misc_feature (7)..(219): NCBI GI NO: 11990470 NR Description: ribonuclease
  misc_feature (6)..(230): NCBI GI NO: 7435266 NR Description: ribonuclease M5 (EC 3
  misc_feature (6)..(230): NCBI GI NO: 7768564 NR Description: RNase [Nicotiana tabacum]
  misc_feature (7)..(230): NCBI GI NO: 9081845 NR Description: S-like ribonuclease [Prunus dulcis]
  misc_feature (29)..(230): NCBI GI NO: 34810726 NR Description: Chain A
  misc_feature (6)..(230): NCBI GI NO: 532754 NR Description: RNase NE [Nicotiana alata]
  misc_feature (1)..(230): NCBI GI NO: 3860325 NR Description: ribonuclease T2 [Cicer arietinum]
  misc_feature (1)..(230): NCBI GI NO: 2148018 NR Description: ribonuclease II (EC 3
MRLQCSLVLLIALSVGCAAAQESGKQAGYDFFYLVLQWPGSYCDTKQSCCYPRSGKPAADFGIHGLWPNRDDGSYPQNCNPDSAFDPSKVSDILSSLRSSWPTLACPTNDGLRFWAHEWEKHGTCAQNLFNEHGYFQAALRLRGQLRVLDALATAGISPDGGYYTMGAIKGAIQEGTGFAPHVDCNRDESGNSQLFQLYFCVHADASRFVECPVQPGGRPCGNRIEFPAF

SEQ ID NO: 12206 - DNA, 1109 bp, Triticum aestivum
  misc_feature (1)..(1109): Ceres Seq. ID no. 13596484
aaatgctcgtactctctctcccatctcccgcccggctgcttaaaagcccattatcggcgccgcctgtgacctcacctcactccgcctcgcagtcataattctccctagcatctttcttaccactagtattagtaggaggacctcctcctgttgctgctggagtggttgcttgtgtggtagagaggagaggagagggagatggaaggaggaggcgcggacggggtgacgagggtgctgctggtggacgactccccggtggacaggaaggtggtggaactggtgctcggcagcaacaccttcgccggctccttccacgtcgtcgccgtggacagcgccaagaaggccatggagttcctggggctcaaggacggcaaggagcaggccgtcgacatggtgctcactgactactgcatgcctgagatgaccggctacgacctcctcaaagccatcaaggcgatgagtcctctcaagcccatcccggtgatcgtcatgtcgtcggagaacgagccccagaggatcagcagatgcctcaaggctggtgctgaagattacatcgtcaagcctcttcagagcaaggatgtgccgcgtctgaggagctgctcgaacgtgaaacccaaggaccctccatgcagcactgtgagcaagagctcggaccatatagctgctgtcgatggcaagtcgtcgctgcgacggcgagcacacctcaccgatattgccatggttctccactcgtcgagcgccgggctctcgcactacttcccgttcctcttcaagttcatcctgctggtctacgccatcctgtgcgtcggcgagctcctgcacagatggtccaacggctgcttcctctcctacctgaggtgatggtgccgcggtccagtgacatgctgcagctctgcaaggagtagctcgtgtgtcgtagcttatgagtgagcagtgaacctccatgtttcaacaaccatggatggagctttaggtagtagattcgtttgctttgagattctctgaccgggcgtcagttcttggccttgttgggctgacgagttgaggaagaaccccttgtatccatccttgtacaaaacgcacaatgaggcaggcggtatctgatgtcc

SEQ ID NO: 12207 - protein, 220 aa, Triticum aestivum
  peptide (1)..(220): Ceres Seq. ID no. 13596485
  misc_feature (11)..(136): Pfam Name: Pfam Description:  Response regulator receiver domain
  misc_feature (2)..(217): NCBI GI NO: 12060390 NR Description: response regulator 7 [Zea mays]
  misc_feature (1)..(137): NCBI GI NO: 11041692 NR Description: response regulator [Zea mays]
  misc_feature (6)..(142): NCBI GI NO: 12060386 NR Description: response regulator 5 [Zea mays]
  misc_feature (1)..(133): NCBI GI NO: 15218957 NR Description: response regulator 3 [Arabidopsis thaliana]
  misc_feature (12)..(138): NCBI GI NO: 11358972 NR Description: repsonse regulator ZmRR2 [imported] - maize
  misc_feature (6)..(133): NCBI GI NO: 34906626 NR Description: putative response regulator
  misc_feature (12)..(159): NCBI GI NO: 13173408 NR Description: response regulator protein [Dianthus caryophyllus]
  misc_feature (12)..(133): NCBI GI NO: 15218550 NR Description: response regulator1 (ATRR1) [Arabidopsis thaliana]
  misc_feature (12)..(131): NCBI GI NO: 33330868 NR Description: type-A response regulator [Catharanthus roseus]
  misc_feature (12)..(133): NCBI GI NO: 34901288 NR Description: similar to response regulator
MEGGGADGVTRVLLVDDSPVDRKVVELVLGSNTFAGSFHVVAVDSAKKAMEFLGLKDGKEQAVDMVLTDYCMPEMTGYDLLKAIKAMSPLKPIPVIVMSSENEPQRISRCLKAGAEDYIVKPLQSKDVPRLRSCSNVKPKDPPCSTVSKSSDHIAAVDGKSSLRRRAHLTDIAMVLHSSSAGLSHYFPFLFKFILLVYAILCVGELLHRWSNGCFLSYLR

SEQ ID NO: 12208 - protein, 171 aa, Triticum aestivum
  peptide (1)..(171): Ceres Seq. ID no. 13596486
  misc_feature (1)..(87): Pfam Name: Pfam Description:  Response regulator receiver domain
  misc_feature (1)..(168): NCBI GI NO: 12060390 NR Description: response regulator 7 [Zea mays]
  misc_feature (1)..(88): NCBI GI NO: 11041692 NR Description: response regulator [Zea mays]
  misc_feature (1)..(93): NCBI GI NO: 12060386 NR Description: response regulator 5 [Zea mays]
  misc_feature (1)..(84): NCBI GI NO: 15218957 NR Description: response regulator 3 [Arabidopsis thaliana]
  misc_feature (1)..(89): NCBI GI NO: 11358972 NR Description: repsonse regulator ZmRR2 [imported] - maize
  misc_feature (1)..(84): NCBI GI NO: 34906626 NR Description: putative response regulator
  misc_feature (1)..(110): NCBI GI NO: 13173408 NR Description: response regulator protein [Dianthus caryophyllus]
  misc_feature (1)..(84): NCBI GI NO: 15218550 NR Description: response regulator1 (ATRR1) [Arabidopsis thaliana]
  misc_feature (1)..(82): NCBI GI NO: 33330868 NR Description: type-A response regulator [Catharanthus roseus]
  misc_feature (1)..(84): NCBI GI NO: 34901288 NR Description: similar to response regulator
MEFLGLKDGKEQAVDMVLTDYCMPEMTGYDLLKAIKAMSPLKPIPVIVMSSENEPQRISRCLKAGAEDYIVKPLQSKDVPRLRSCSNVKPKDPPCSTVSKSSDHIAAVDGKSSLRRRAHLTDIAMVLHSSSAGLSHYFPFLFKFILLVYAILCVGELLHRWSNGCFLSYLR

SEQ ID NO: 12209 - protein, 156 aa, Triticum aestivum
  peptide (1)..(156): Ceres Seq. ID no. 13596487
  misc_feature (1)..(72): Pfam Name: Pfam Description:  Response regulator receiver domain
  misc_feature (1)..(153): NCBI GI NO: 12060390 NR Description: response regulator 7 [Zea mays]
  misc_feature (1)..(73): NCBI GI NO: 11041692 NR Description: response regulator [Zea mays]
  misc_feature (1)..(78): NCBI GI NO: 12060386 NR Description: response regulator 5 [Zea mays]
  misc_feature (1)..(69): NCBI GI NO: 15218957 NR Description: response regulator 3 [Arabidopsis thaliana]
  misc_feature (1)..(74): NCBI GI NO: 11358972 NR Description: repsonse regulator ZmRR2 [imported] - maize
  misc_feature (1)..(69): NCBI GI NO: 34906626 NR Description: putative response regulator
  misc_feature (1)..(95): NCBI GI NO: 13173408 NR Description: response regulator protein [Dianthus caryophyllus]
  misc_feature (1)..(69): NCBI GI NO: 15218550 NR Description: response regulator1 (ATRR1) [Arabidopsis thaliana]
  misc_feature (1)..(67): NCBI GI NO: 33330868 NR Description: type-A response regulator [Catharanthus roseus]
  misc_feature (1)..(69): NCBI GI NO: 34901288 NR Description: similar to response regulator
MVLTDYCMPEMTGYDLLKAIKAMSPLKPIPVIVMSSENEPQRISRCLKAGAEDYIVKPLQSKDVPRLRSCSNVKPKDPPCSTVSKSSDHIAAVDGKSSLRRRAHLTDIAMVLHSSSAGLSHYFPFLFKFILLVYAILCVGELLHRWSNGCFLSYLR

SEQ ID NO: 12210 - DNA, 966 bp, Triticum aestivum
  misc_feature (1)..(966): Ceres Seq. ID no. 13583358
atggatggctgattctccaccggtacatcccgtcaccggtaaaaaaacttattcggcagctcccagccgtgcgccgtctcaactctcaagcgccgctcgccagcgaaacccgatccaagacaacaatacccactcccaaccttctgtggcgatggcagcactggcgaggagggcgggaggatcccctgcggcggcgctgtgggccgcggccaggggattcgcgtcggtcggctccgacatcgtctccgcggcgcccggcgtgtcgctgcagaaggcgcggtcctgggacgagggggtcgccaccaagttctccaccacccctctcaaggacatcttccatgggaagaaagtcgtcatcttcgggttgccgggtgcatacacaggagtatgttcgcagtcccacgttcctagttacaagaacaacattgataagttgaaagcaaaagggatcgactctgttatctgtgtagctgtaaatgatccctatgtgctgaatggatgggcagaaaaattacaggcaaaagatgcaattgagttttatggtgaccttgacgggagcttccacaaaagcttggatttggaaatagatctctctgctgctttgcttggtcgacgctcccacaggtggtcggcctttgtcgatgatgggaagatcaaggcattcaacgttgagaaagccccttctgacttcaaggtttctggtgctgaggtgatcttggatcaaatctgagctgatcggtaatcggtgctctgttttgcttttgtgatgcaaataagtgacagctcgagaatctgtgtgaagatgttgctgtctgtcgtgctagttccaggacagtcattttgctgctgcaaatctttatttcttttgttccagaacagtcatcgaattagtcaccggttcgtgtatgcgacagtttctgttatttggcgtttgatgaagagctgtgctcgcgtgcaggtaatccg

SEQ ID NO: 12211 - protein, 242 aa, Triticum aestivum
  peptide (1)..(242): Ceres Seq. ID no. 13583359
  misc_feature (80)..(240): Pfam Name: Pfam Description:  AhpC/TSA family
  misc_feature (52)..(242): NCBI GI NO: 34903114 NR Description: unnamed protein product
  misc_feature (55)..(242): NCBI GI NO: 21553531 NR Description: unknown [Arabidopsis thaliana]
  misc_feature (51)..(242): NCBI GI NO: 7658343 NR Description: unknown protein; 13384-11892
  misc_feature (51)..(242): NCBI GI NO: 18397457 NR Description: expressed protein [Arabidopsis thaliana]
  misc_feature (97)..(242): NCBI GI NO: 17987739 NR Description: THIOL PEROXIDASE [Brucella melitensis]
  misc_feature (97)..(242): NCBI GI NO: 23501379 NR Description: ahpC/TSA family protein [Brucella suis 1330]
  misc_feature (105)..(240): NCBI GI NO: 15964668 NR Description: HYPOTHETICAL PEROXIREDOXIN PROTEIN
  misc_feature (111)..(242): NCBI GI NO: 15888122 NR Description: AGR_C_1423p [Agrobacterium tumefaciens]
  misc_feature (110)..(239): NCBI GI NO: 28901148 NR Description: putative antioxidant
  misc_feature (107)..(239): NCBI GI NO: 27367181 NR Description: Peroxiredoxin [Vibrio vulnificus CMCP6]
WMADSPPVHPVTGKKTYSAAPSRAPSQLSSAARQRNPIQDNNTHSQPSVAMAALARRAGGSPAAALWAAARGFASVGSDIVSAAPGVSLQKARSWDEGVATKFSTTPLKDIFHGKKVVIFGLPGAYTGVCSQSHVPSYKNNIDKLKAKGIDSVICVAVNDPYVLNGWAEKLQAKDAIEFYGDLDGSFHKSLDLEIDLSAALLGRRSHRWSAFVDDGKIKAFNVEKAPSDFKVSGAEVILDQI

SEQ ID NO: 12212 - protein, 241 aa, Triticum aestivum
  peptide (1)..(241): Ceres Seq. ID no. 13583360
  misc_feature (79)..(239): Pfam Name: Pfam Description:  AhpC/TSA family
  misc_feature (51)..(241): NCBI GI NO: 34903114 NR Description: unnamed protein product
  misc_feature (54)..(241): NCBI GI NO: 21553531 NR Description: unknown [Arabidopsis thaliana]
  misc_feature (50)..(241): NCBI GI NO: 7658343 NR Description: unknown protein; 13384-11892
  misc_feature (50)..(241): NCBI GI NO: 18397457 NR Description: expressed protein [Arabidopsis thaliana]
  misc_feature (96)..(241): NCBI GI NO: 17987739 NR Description: THIOL PEROXIDASE [Brucella melitensis]
  misc_feature (96)..(241): NCBI GI NO: 23501379 NR Description: ahpC/TSA family protein [Brucella suis 1330]
  misc_feature (104)..(239): NCBI GI NO: 15964668 NR Description: HYPOTHETICAL PEROXIREDOXIN PROTEIN
  misc_feature (110)..(241): NCBI GI NO: 15888122 NR Description: AGR_C_1423p [Agrobacterium tumefaciens]
  misc_feature (109)..(238): NCBI GI NO: 28901148 NR Description: putative antioxidant
  misc_feature (106)..(238): NCBI GI NO: 27367181 NR Description: Peroxiredoxin [Vibrio vulnificus CMCP6]
MADSPPVHPVTGKKTYSAAPSRAPSQLSSAARQRNPIQDNNTHSQPSVAMAALARRAGGSPAAALWAAARGFASVGSDIVSAAPGVSLQKARSWDEGVATKFSTTPLKDIFHGKKVVIFGLPGAYTGVCSQSHVPSYKNNIDKLKAKGIDSVICVAVNDPYVLNGWAEKLQAKDAIEFYGDLDGSFHKSLDLEIDLSAALLGRRSHRWSAFVDDGKIKAFNVEKAPSDFKVSGAEVILDQI

SEQ ID NO: 12213 - protein, 192 aa, Triticum aestivum
  peptide (1)..(192): Ceres Seq. ID no. 13583361
  misc_feature (30)..(190): Pfam Name: Pfam Description:  AhpC/TSA family
  misc_feature (2)..(192): NCBI GI NO: 34903114 NR Description: unnamed protein product
  misc_feature (5)..(192): NCBI GI NO: 21553531 NR Description: unknown [Arabidopsis thaliana]
  misc_feature (1)..(192): NCBI GI NO: 7658343 NR Description: unknown protein; 13384-11892
  misc_feature (1)..(192): NCBI GI NO: 18397457 NR Description: expressed protein [Arabidopsis thaliana]
  misc_feature (47)..(192): NCBI GI NO: 17987739 NR Description: THIOL PEROXIDASE [Brucella melitensis]
  misc_feature (47)..(192): NCBI GI NO: 23501379 NR Description: ahpC/TSA family protein [Brucella suis 1330]
  misc_feature (55)..(190): NCBI GI NO: 15964668 NR Description: HYPOTHETICAL PEROXIREDOXIN PROTEIN
  misc_feature (61)..(192): NCBI GI NO: 15888122 NR Description: AGR_C_1423p [Agrobacterium tumefaciens]
  misc_feature (60)..(189): NCBI GI NO: 28901148 NR Description: putative antioxidant
  misc_feature (57)..(189): NCBI GI NO: 27367181 NR Description: Peroxiredoxin [Vibrio vulnificus CMCP6]
MAALARRAGGSPAAALWAAARGFASVGSDIVSAAPGVSLQKARSWDEGVATKFSTTPLKDIFHGKKVVIFGLPGAYTGVCSQSHVPSYKNNIDKLKAKGIDSVICVAVNDPYVLNGWAEKLQAKDAIEFYGDLDGSFHKSLDLEIDLSAALLGRRSHRWSAFVDDGKIKAFNVEKAPSDFKVSGAEVILDQI

SEQ ID NO: 12214 - DNA, 745 bp, Triticum aestivum
  misc_feature (1)..(745): Ceres Seq. ID no. 15224932
attaagtgtccgcggctgctagctcctcctccctctgtggtacgatcatcctcctctgctacgttgaccaagatggccgcgcgccttgcgcttgtggcgacgctcctgtgcgccggagccgcggccgccgcggcgcagcaggcgagcaacgtccgcgcgacctaccactactaccgcccggccgagaacggctgggacctgggcgcccctgccgtgagcgcctactgctccacctgggacgccggcaagccgtactcgtggcggtccaagtacggctggacggccttctgcggccccgccggcccccgcggccaggcgtcgtgcgggaggtgcatccgggtgaccaacacggggacgggggcgcagatcacggccaggatcgtggaccagtgcgccaacggcgggctggacctcgactgggacaccgtgttcgtcaagatcgataccgatggcatggggtaccagaggggccacctcatcgtcaactacgagttcgtcgactgcggcgacaaccacatcaacttccatggaaagaacgagacgctaccggccagcactggtgctgttgagtaagtaaaagctagtagcacatgcatgcattgatgttgcattgttgcgctgtacgcaaacatgtatgcatgcatggcacggaagttgaataagtcaaacgggaagttggaatgaatttcatgtatgaatcttatgattgtaacagcggaaagtgaaataaatctcagaagttgac

SEQ ID NO: 12215 - protein, 190 aa, Triticum aestivum
  peptide (1)..(190): Ceres Seq. ID no. 15224933
  misc_feature (47)..(168): Pfam Name: Pfam Description:  Barwin family
  misc_feature (25)..(170): NCBI GI NO: 34925032 NR Description: Wheatwin2 precursor
  misc_feature (25)..(170): NCBI GI NO: 7442145 NR Description: pathogenesis-related protein 4 - barley
  misc_feature (25)..(170): NCBI GI NO: 34925030 NR Description: Wheatwin1 precursor
  misc_feature (25)..(171): NCBI GI NO: 38018635 NR Description: pathogenesis-related protein 4b
  misc_feature (46)..(170): NCBI GI NO: 114832 NR Description: BARWIN
  misc_feature (46)..(170): NCBI GI NO: 442693 NR Description: Barwin, Basic Barley Seed Protein
  misc_feature (46)..(170): NCBI GI NO: 1588926 NR Description: pathogenesis-related protein
  misc_feature (46)..(170): NCBI GI NO: 626038 NR Description: barwin homolog wheatwin1 - wheat
  misc_feature (53)..(172): NCBI GI NO: 6048569 NR Description: PR-4 [Triticum aestivum]
  misc_feature (53)..(172): NCBI GI NO: 6002595 NR Description: pathogenesis-related protein 4 [Triticum aestivum]
IKCPRLLAPPPSVVRSSSSATLTKMAARLALVATLLCAGAAAAAAQQASNVRATYHYYRPAENGWDLGAPAVSAYCSTWDAGKPYSWRSKYGWTAFCGPAGPRGQASCGRCIRVTNTGTGAQITARIVDQCANGGLDLDWDTVFVKIDTDGMGYQRGHLIVNYEFVDCGDNHINFHGKNETLPASTGAVE

SEQ ID NO: 12216 - protein, 166 aa, Triticum aestivum
  peptide (1)..(166): Ceres Seq. ID no. 15224934
  misc_feature (23)..(144): Pfam Name: Pfam Description:  Barwin family
  misc_feature (1)..(146): NCBI GI NO: 34925032 NR Description: Wheatwin2 precursor
  misc_feature (1)..(146): NCBI GI NO: 7442145 NR Description: pathogenesis-related protein 4 - barley
  misc_feature (1)..(146): NCBI GI NO: 34925030 NR Description: Wheatwin1 precursor
  misc_feature (1)..(147): NCBI GI NO: 38018635 NR Description: pathogenesis-related protein 4b
  misc_feature (22)..(146): NCBI GI NO: 114832 NR Description: BARWIN
  misc_feature (22)..(146): NCBI GI NO: 442693 NR Description: Barwin, Basic Barley Seed Protein
  misc_feature (22)..(146): NCBI GI NO: 1588926 NR Description: pathogenesis-related protein
  misc_feature (22)..(146): NCBI GI NO: 626038 NR Description: barwin homolog wheatwin1 - wheat
  misc_feature (29)..(148): NCBI GI NO: 6048569 NR Description: PR-4 [Triticum aestivum]
  misc_feature (29)..(148): NCBI GI NO: 6002595 NR Description: pathogenesis-related protein 4 [Triticum aestivum]
MAARLALVATLLCAGAAAAAAQQASNVRATYHYYRPAENGWDLGAPAVSAYCSTWDAGKPYSWRSKYGWTAFCGPAGPRGQASCGRCIRVTNTGTGAQITARIVDQCANGGLDLDWDTVFVKIDTDGMGYQRGHLIVNYEFVDCGDNHINFHGKNETLPASTGAVE

SEQ ID NO: 12217 - DNA, 889 bp, Triticum aestivum
  misc_feature (1)..(889): Ceres Seq. ID no. 12587358
actttcccttaaaaaaaaggtgaggagggtgtggatcaatcgaatccaatcgaatcctaagctgaggatggcggcggtgctcaaggtgtatgcggaccggctgtcgcagccgtcgcgcgccatcatcatcttgtgcaaggtcaaccggatcgacttccaggagctcaccgtggatctcgccaagggacaacaccgcgcaccagaattcaccaaaatcaaccccatggcacaggtcccaacaatcgtcgatggaagattcaaactctttgaaagccatgccattctgaggtatcttgccaccgtcttccccggggttccagatcactggtatccggccgacttatttaccagagcaaaactcgagtctgtcttggattggcatcactctaatctgcgccgtggtgcagcaacctatgtactgcacaccgcgttgggtcctgctctcggcctcacaccgaatcctgaaaccgcaaaagaggccgagaagttgctgtcgcgatcactgggaacgatcgaaaccgtgtggctcaaaggcgatgcaaaattcttgaatggcaacccccagccatcaatcgcagacctcagcctcgtgtgcgagataatgcagctggaggttgttggtgatgagcgacgtgacagaattctgggacctcacgacaaggtgcgcgcttggatggagaatgtgaagaaggccaccagccctcattttgatgaggtccatgagctcatcttcaaactcaaggcacgcttgaacccagcagcatccaagctctgaagagatggatcctacacacatttacccaattcttctttcttcttgtcttgggattaaaacaagtactagcatccatgtactgtacgatgaaagaaagaaatactagtatgtttc

SEQ ID NO: 12218 - protein, 257 aa, Triticum aestivum
  peptide (1)..(257): Ceres Seq. ID no. 12587359
  misc_feature (118)..(232): Pfam Name: Pfam Description:  Glutathione S-transferase, C-terminal domain
  misc_feature (23)..(250): NCBI GI NO: 15430709 NR Description: putative glutathione S-transferase OsGSTT1
  misc_feature (27)..(255): NCBI GI NO: 11385461 NR Description: glutathione S-transferase GST 23 [Glycine max]
  misc_feature (27)..(247): NCBI GI NO: 15237583 NR Description: glutathione transferase, putative
  misc_feature (27)..(249): NCBI GI NO: 30693769 NR Description: glutathione transferase, putative
  misc_feature (27)..(249): NCBI GI NO: 15237595 NR Description: glutathione transferase, putative
  misc_feature (27)..(249): NCBI GI NO: 25453559 NR Description: glutathione transferase (EC 2.5.1.18) GST 10b
  misc_feature (27)..(249): NCBI GI NO: 10177768 NR Description: glutathione transferase [Arabidopsis thaliana]
  misc_feature (27)..(250): NCBI GI NO: 7595788 NR Description: glutathione S-transferase [Euphorbia esula]
  misc_feature (26)..(247): NCBI GI NO: 2495109 NR Description: GLUTATHIONE S-TRANSFERASE THETA 1
  misc_feature (26)..(247): NCBI GI NO: 31982317 NR Description: glutathione S-transferase, theta 1 [Mus musculus]
LSLKKKVRRVWINRIQSNPKLRMAAVLKVYADRLSQPSRAIIILCKVNRIDFQELTVDLAKGQHRAPEFTKINPMAQVPTIVDGRFKLFESHAILRYLATVFPGVPDHWYPADLFTRAKLESVLDWHHSNLRRGAATYVLHTALGPALGLTPNPETAKEAEKLLSRSLGTIETVWLKGDAKFLNGNPQPSIADLSLVCEIMQLEVVGDERRDRILGPHDKVRAWMENVKKATSPHFDEVHELIFKLKARLNPAASKL

SEQ ID NO: 12219 - protein, 235 aa, Triticum aestivum
  peptide (1)..(235): Ceres Seq. ID no. 12587360
  misc_feature (96)..(210): Pfam Name: Pfam Description:  Glutathione S-transferase, C-terminal domain
  misc_feature (1)..(228): NCBI GI NO: 15430709 NR Description: putative glutathione S-transferase OsGSTT1
  misc_feature (5)..(233): NCBI GI NO: 11385461 NR Description: glutathione S-transferase GST 23 [Glycine max]
  misc_feature (5)..(225): NCBI GI NO: 15237583 NR Description: glutathione transferase, putative
  misc_feature (5)..(227): NCBI GI NO: 30693769 NR Description: glutathione transferase, putative
  misc_feature (5)..(227): NCBI GI NO: 15237595 NR Description: glutathione transferase, putative
  misc_feature (5)..(227): NCBI GI NO: 25453559 NR Description: glutathione transferase (EC 2.5.1.18) GST 10b
  misc_feature (5)..(227): NCBI GI NO: 10177768 NR Description: glutathione transferase [Arabidopsis thaliana]
  misc_feature (5)..(228): NCBI GI NO: 7595788 NR Description: glutathione S-transferase [Euphorbia esula]
  misc_feature (4)..(225): NCBI GI NO: 2495109 NR Description: GLUTATHIONE S-TRANSFERASE THETA 1
  misc_feature (4)..(225): NCBI GI NO: 31982317 NR Description: glutathione S-transferase, theta 1 [Mus musculus]
MAAVLKVYADRLSQPSRAIIILCKVNRIDFQELTVDLAKGQHRAPEFTKINPMAQVPTIVDGRFKLFESHAILRYLATVFPGVPDHWYPADLFTRAKLESVLDWHHSNLRRGAATYVLHTALGPALGLTPNPETAKEAEKLLSRSLGTIETVWLKGDAKFLNGNPQPSIADLSLVCEIMQLEVVGDERRDRILGPHDKVRAWMENVKKATSPHFDEVHELIFKLKARLNPAASKL

SEQ ID NO: 12220 - protein, 183 aa, Triticum aestivum
  peptide (1)..(183): Ceres Seq. ID no. 12587361
  misc_feature (44)..(158): Pfam Name: Pfam Description:  Glutathione S-transferase, C-terminal domain
  misc_feature (1)..(176): NCBI GI NO: 15430709 NR Description: putative glutathione S-transferase OsGSTT1
  misc_feature (1)..(181): NCBI GI NO: 11385461 NR Description: glutathione S-transferase GST 23 [Glycine max]
  misc_feature (1)..(173): NCBI GI NO: 15237583 NR Description: glutathione transferase, putative
  misc_feature (1)..(175): NCBI GI NO: 30693769 NR Description: glutathione transferase, putative
  misc_feature (1)..(175): NCBI GI NO: 15237595 NR Description: glutathione transferase, putative
  misc_feature (1)..(175): NCBI GI NO: 25453559 NR Description: glutathione transferase (EC 2.5.1.18) GST 10b
  misc_feature (1)..(175): NCBI GI NO: 10177768 NR Description: glutathione transferase [Arabidopsis thaliana]
  misc_feature (1)..(176): NCBI GI NO: 7595788 NR Description: glutathione S-transferase [Euphorbia esula]
  misc_feature (1)..(173): NCBI GI NO: 2495109 NR Description: GLUTATHIONE S-TRANSFERASE THETA 1
  misc_feature (1)..(173): NCBI GI NO: 31982317 NR Description: glutathione S-transferase, theta 1 [Mus musculus]
MAQVPTIVDGRFKLFESHAILRYLATVFPGVPDHWYPADLFTRAKLESVLDWHHSNLRRGAATYVLHTALGPALGLTPNPETAKEAEKLLSRSLGTIETVWLKGDAKFLNGNPQPSIADLSLVCEIMQLEVVGDERRDRILGPHDKVRAWMENVKKATSPHFDEVHELIFKLKARLNPAASKL

SEQ ID NO: 12221 - DNA, 897 bp, Triticum aestivum
  misc_feature (1)..(897): Ceres Seq. ID no. 12584664
acgacgcggtctctcctccgctccgctccggtcaacccaagttcctcctcgcctcccaagccgtcttcctcctcctcgcagtgatggctgatgaggatgagtaccgatgcttcgttgggaacctgtcctggtccacaactgatgaaagcctcaaggatgcattctcaaaatatggcaaagttaccgaggcaaaggtggttatggacaagttttctggacgttcacgtggatttgcctttgtgacctttgatgagaagaaagccatggaagaagctatcgaggacatgaatggattggacttggaagggagggccatcactgttgataaagctcagcctcaaggggctggtagagatcgtaacggtgaccgtgattttgatcgtgaccgtgggtctcgtggtggccgtgactatggcggtggtcgtgcgccgcgtggtggtggtggtggggactgcttcaagtgcggcaaacctggacactttgctagagagtgtccagatggtgacggcgggagaggtgaccgatatggtggcagagatgataggtatggtggtggtagatctgaccgtggcggtgatcgttctgaccgtggcggcgatcgttctgaccgtgaccgttctgaccgtggcggcgaccgttctgatcgtgacggtgatcgatctgagcgtggcagtgaccgatattctagccgtagccgagatggtggaagcgggggtgatcgttacagtcgtgaccgatcaggtccctactgatggcctggatcttgagaagtgtgtttcatccaggtatgaaaaccctatctactatcatgaggtgtgtttccttgtgtctgaaactttgtgatcatgtatttgaatcataatgatgtcccgtgagtaagcagatcctttattacag

SEQ ID NO: 12222 - protein, 249 aa, Triticum aestivum
  peptide (1)..(249): Ceres Seq. ID no. 12584665
  misc_feature (36)..(107): Pfam Name: a.k.a. RRM, RBD, or RNP domain Pfam Description: RNA recognition motif.
  misc_feature (28)..(222): NCBI GI NO: 40714682 NR Description: putative RNA binding protein
  misc_feature (28)..(203): NCBI GI NO: 12659074 NR Description: RNA-binding protein [Triticum aestivum]
  misc_feature (28)..(234): NCBI GI NO: 2129944 NR Description: RNA-binding protein RZ-1 - wood tobacco
  misc_feature (28)..(249): NCBI GI NO: 15231557 NR Description: glycine-rich RNA-binding protein
  misc_feature (28)..(165): NCBI GI NO: 15982739 NR Description: AT3g26420/F20C19_14 [Arabidopsis thaliana]
  misc_feature (28)..(242): NCBI GI NO: 33146923 NR Description: glycine-rich RNA-binding protein-like
  misc_feature (28)..(247): NCBI GI NO: 31712074 NR Description: putative RNA-binding protein
  misc_feature (28)..(245): NCBI GI NO: 15237666 NR Description: glycine-rich RNA-binding protein
  misc_feature (32)..(208): NCBI GI NO: 21388660 NR Description: glycine-rich RNA-binding protein
  misc_feature (28)..(204): NCBI GI NO: 1076672 NR Description: probable glycine rich RNA binding protein - potato
DAVSPPLRSGQPKFLLASQAVFLLLAVMADEDEYRCFVGNLSWSTTDESLKDAFSKYGKVTEAKVVMDKFSGRSRGFAFVTFDEKKAMEEAIEDMNGLDLEGRAITVDKAQPQGAGRDRNGDRDFDRDRGSRGGRDYGGGRAPRGGGGGDCFKCGKPGHFARECPDGDGGRGDRYGGRDDRYGGGRSDRGGDRSDRGGDRSDRDRSDRGGDRSDRDGDRSERGSDRYSSRSRDGGSGGDRYSRDRSGPY

SEQ ID NO: 12223 - protein, 222 aa, Triticum aestivum
  peptide (1)..(222): Ceres Seq. ID no. 12584666
  misc_feature (9)..(80): Pfam Name: a.k.a. RRM, RBD, or RNP domain Pfam Description: RNA recognition motif.
  misc_feature (1)..(195): NCBI GI NO: 40714682 NR Description: putative RNA binding protein
  misc_feature (1)..(176): NCBI GI NO: 12659074 NR Description: RNA-binding protein [Triticum aestivum]
  misc_feature (1)..(207): NCBI GI NO: 2129944 NR Description: RNA-binding protein RZ-1 - wood tobacco
  misc_feature (1)..(222): NCBI GI NO: 15231557 NR Description: glycine-rich RNA-binding protein
  misc_feature (1)..(138): NCBI GI NO: 15982739 NR Description: AT3g26420/F20C19_14 [Arabidopsis thaliana]
  misc_feature (1)..(215): NCBI GI NO: 33146923 NR Description: glycine-rich RNA-binding protein-like
  misc_feature (1)..(220): NCBI GI NO: 31712074 NR Description: putative RNA-binding protein
  misc_feature (1)..(218): NCBI GI NO: 15237666 NR Description: glycine-rich RNA-binding protein
  misc_feature (5)..(181): NCBI GI NO: 21388660 NR Description: glycine-rich RNA-binding protein
  misc_feature (1)..(177): NCBI GI NO: 1076672 NR Description: probable glycine rich RNA binding protein - potato
MADEDEYRCFVGNLSWSTTDESLKDAFSKYGKVTEAKVVMDKFSGRSRGFAFVTFDEKKAMEEAIEDMNGLDLEGRAITVDKAQPQGAGRDRNGDRDFDRDRGSRGGRDYGGGRAPRGGGGGDCFKCGKPGHFARECPDGDGGRGDRYGGRDDRYGGGRSDRGGDRSDRGGDRSDRDRSDRGGDRSDRDGDRSERGSDRYSSRSRDGGSGGDRYSRDRSGPY

SEQ ID NO: 12224 - protein, 184 aa, Triticum aestivum
  peptide (1)..(184): Ceres Seq. ID no. 12584667
MDWTWKGGPSLLIKLSLKGLVEIVTVTVILIVTVGLVVAVTMAVVVRRVVVVVGTASSAANLDTLLESVQMVTAGEVTDMVAEMIGMVVVDLTVAVIVLTVAAIVLTVTVLTVAATVLIVTVIDLSVAVTDILAVAEMVEAGVIVTVVTDQVPTDGLDLEKCVSSRYENPIYYHEVCFLVSETL

SEQ ID NO: 12225 - DNA, 778 bp, Triticum aestivum
  misc_feature (1)..(778): Ceres Seq. ID no. 13596564
agctatcatcctgctagcacccgtgaactccagccattcacgctgcgtcgatcgtttggtttcgtgcgtgcgttgtttgtgatcgtgtgatctgttcgggagatggaggcttacatgctgttcccgcggagcaatggaaagagctgcgaggaggagcaggaggaggacatcggctgcccgtccgagtccgaggtgtcggcggccggctccatgctgtcgtcggacgaggagctcgacgacgacgccacctccagctccagctcctccggatccaccgacaacttccagatgtcctccctcatggcgcagctcccgctcaagaggggtctgtccaagttcttcgacggcaagtcgcagtcgttcgcgtcgctcgcggcggtgggcggcctggaggacctggccaagccgccgggcaagcggatcaagacgtcgcggagctgcgaggtcgggctgcaggacgcgcaccgccggcggttcgcgcgccacaatgccgcggccttcaagaaggtgtccaaagggcggctgtccgcgctcggcagggcgccgccgctccggccgctgacagcgagcgcggcgaggcccaagggcttgcccgtgcgggctccgctgttcgtttaggagatttcgcccgcagattagtcgtgtcggttgtggcgtgctcaaagagcagttggtgcggttgttacgtggattttgacatggtaactgaccggaaggtggccggctggtcgatggatgtgtaaatacagaaatgagaaacatgccttgttcagtatcc

SEQ ID NO: 12226 - protein, 171 aa, Triticum aestivum
  peptide (1)..(171): Ceres Seq. ID no. 13596565
  misc_feature (1)..(113): NCBI GI NO: 38346806 NR Description: OSJNBa0088A01.13
  misc_feature (20)..(144): NCBI GI NO: 15241248 NR Description: expressed protein [Arabidopsis thaliana]
  misc_feature (17)..(112): NCBI GI NO: 34909358 NR Description: P0638D12.11
  misc_feature (18)..(122): NCBI GI NO: 20159729 NR Description: unknown cold induced protein
  misc_feature (41)..(166): NCBI GI NO: 6714420 NR Description: hypothetical protein [Arabidopsis thaliana]
  misc_feature (41)..(166): NCBI GI NO: 18396462 NR Description: expressed protein [Arabidopsis thaliana]
MEAYMLFPRSNGKSCEEEQEEDIGCPSESEVSAAGSMLSSDEELDDDATSSSSSSGSTDNFQMSSLMAQLPLKRGLSKFFDGKSQSFASLAAVGGLEDLAKPPGKRIKTSRSCEVGLQDAHRRRFARHNAAAFKKVSKGRLSALGRAPPLRPLTASAARPKGLPVRAPLFV

SEQ ID NO: 12227 - protein, 167 aa, Triticum aestivum
  peptide (1)..(167): Ceres Seq. ID no. 13596566
  misc_feature (1)..(109): NCBI GI NO: 38346806 NR Description: OSJNBa0088A01.13
  misc_feature (16)..(140): NCBI GI NO: 15241248 NR Description: expressed protein [Arabidopsis thaliana]
  misc_feature (13)..(108): NCBI GI NO: 34909358 NR Description: P0638D12.11
  misc_feature (14)..(118): NCBI GI NO: 20159729 NR Description: unknown cold induced protein
  misc_feature (37)..(162): NCBI GI NO: 6714420 NR Description: hypothetical protein [Arabidopsis thaliana]
  misc_feature (37)..(162): NCBI GI NO: 18396462 NR Description: expressed protein [Arabidopsis thaliana]
MLFPRSNGKSCEEEQEEDIGCPSESEVSAAGSMLSSDEELDDDATSSSSSSGSTDNFQMSSLMAQLPLKRGLSKFFDGKSQSFASLAAVGGLEDLAKPPGKRIKTSRSCEVGLQDAHRRRFARHNAAAFKKVSKGRLSALGRAPPLRPLTASAARPKGLPVRAPLFV

SEQ ID NO: 12228 - protein, 142 aa, Triticum aestivum
  peptide (1)..(142): Ceres Seq. ID no. 13596567
  misc_feature (1)..(142): NCBI GI NO: 17505548 NR Description: Putative mitochondrial protein, nematode specific
MERAARRSRRRTSAARPSPRCRRPAPCCRRTRSSTTTPPPAPAPPDPPTTSRCPPSWRSSRSRGVCPSSSTASRSRSRRSRRWAAWRTWPSRRASGSRRRGAARSGCRTRTAGGSRATMPRPSRRCPKGGCPRSAGRRRSGR

SEQ ID NO: 12229 - DNA, 703 bp, Triticum aestivum
  misc_feature (1)..(703): Ceres Seq. ID no. 13583505
aaaaaaaacgtgaccccctccccgtccctacccctcttcctcctcggacaagccctccccctcgccgccgccgccgccgccgccgccccgcaggtcgccggctccgcttcgcgccgtaccgatggcggaagaagcagctgccaatgcggcgaagaaggaggaggaggagttcagcaccgggcccctgtccctgctcctcatgagcgtcaagaacaatactcaggtgcttatcaactgccggaacaacaagaagctacttggtcgcgtgagggcatttgaccgtcattgcaacatggttcttgagaatgtccgggagatgtggactgaggttccaaagactggcaaaggcaagaagaaggcccttccagtgaacaaggacaggttcatcagcaagatgttcctccgcggcgactcggtcatcattgttctcaggaacccgaaatgagttagacgacgacgacgacacatcgtacgcccagaagagtctctttgctatgtagtcgctgttaagtttgtgatactgaatactctaaaacagtgagtgcttaagagatgatatcaagccgagatttagcagtattgattaccggtccagtgttgtagtttgggatgttctgagttttgcctgtcctgtatctaaattgcgctcgtagtttgtatttggaccatcaatatatcggcagaacacaatttaaaaagtttg

SEQ ID NO: 12230 - protein, 107 aa, Triticum aestivum
  peptide (1)..(107): Ceres Seq. ID no. 13583506
  misc_feature (25)..(104): Pfam Name: Pfam Description:  LSM domain
  misc_feature (1)..(107): NCBI GI NO: 18407411 NR Description: small nuclear ribonucleo protein D2 -related
  misc_feature (4)..(107): NCBI GI NO: 21554692 NR Description: small nuclear ribonucleoprotein-like protein
  misc_feature (1)..(107): NCBI GI NO: 30690747 NR Description: small nuclear ribonucleo protein D2 -related
  misc_feature (1)..(106): NCBI GI NO: 26337731 NR Description: unnamed protein product [Mus musculus]
  misc_feature (1)..(106): NCBI GI NO: 4759158 NR Description: small nuclear ribonucleoprotein polypeptide D2
  misc_feature (1)..(106): NCBI GI NO: 21357623 NR Description: CG1249-PA [Drosophila melanogaster]
  misc_feature (1)..(106): NCBI GI NO: 22203734 NR Description: small nuclear ribonucleoprotein D2-like protein
  misc_feature (1)..(106): NCBI GI NO: 27677236 NR Description: similar to Small nuclear ribonucleoprotein Sm D2
  misc_feature (1)..(106): NCBI GI NO: 39592141 NR Description: Hypothetical protein CBG23345
  misc_feature (1)..(106): NCBI GI NO: 17558868 NR Description: Small nuclear ribonucleoprotein (13.3 kD)
MAEEAAANAAKKEEEEFSTGPLSLLLMSVKNNTQVLINCRNNKKLLGRVRAFDRHCNMVLENVREMWTEVPKTGKGKKKALPVNKDRFISKMFLRGDSVIIVLRNPK

SEQ ID NO: 12231 - protein, 92 aa, Triticum aestivum
  peptide (1)..(92): Ceres Seq. ID no. 13583507
KKNVTPSPSLPLFLLGQALPLAAAAAAAAPQVAGSASRRTDGGRSSCQCGEEGGGGVQHRAPVPAPHERQEQYSGAYQLPEQQEATWSREGI

SEQ ID NO: 12232 - protein, 81 aa, Triticum aestivum
  peptide (1)..(81): Ceres Seq. ID no. 13583508
  misc_feature (1)..(78): Pfam Name: Pfam Description:  LSM domain
  misc_feature (1)..(81): NCBI GI NO: 18407411 NR Description: small nuclear ribonucleo protein D2 -related
  misc_feature (1)..(81): NCBI GI NO: 21554692 NR Description: small nuclear ribonucleoprotein-like protein
  misc_feature (1)..(81): NCBI GI NO: 30690747 NR Description: small nuclear ribonucleo protein D2 -related
  misc_feature (1)..(80): NCBI GI NO: 26337731 NR Description: unnamed protein product [Mus musculus]
  misc_feature (1)..(80): NCBI GI NO: 4759158 NR Description: small nuclear ribonucleoprotein polypeptide D2
  misc_feature (1)..(80): NCBI GI NO: 21357623 NR Description: CG1249-PA [Drosophila melanogaster]
  misc_feature (1)..(80): NCBI GI NO: 22203734 NR Description: small nuclear ribonucleoprotein D2-like protein
  misc_feature (1)..(80): NCBI GI NO: 27677236 NR Description: similar to Small nuclear ribonucleoprotein Sm D2
  misc_feature (1)..(80): NCBI GI NO: 39592141 NR Description: Hypothetical protein CBG23345
  misc_feature (1)..(80): NCBI GI NO: 17558868 NR Description: Small nuclear ribonucleoprotein (13.3 kD)
MSVKNNTQVLINCRNNKKLLGRVRAFDRHCNMVLENVREMWTEVPKTGKGKKKALPVNKDRFISKMFLRGDSVIIVLRNPK

SEQ ID NO: 12233 - DNA, 690 bp, Triticum aestivum
  misc_feature (1)..(690): Ceres Seq. ID no. 12587363
actaaaactccggtcgaaaaaaaagagagagaaagaaacgaaaacaacagccggccgaagcctccgctgcgccgccgccggtacaggagccaagcagcgcctcccttcgtcgagcagcaacgccgccgcccggagctacgccggcgacgaatacatagaacagggcatcaacattgtcaattggagaggcttggagctgctttggcatccacagtagagcaaacaagaagtatcgacatggattccagcactacacagtctgaaggttctcagccacctgttcctcctaaaagccctaccatgtcgtcgtgccggaagaagaaaactgatgatgatgctaccttcctcaaagatgtgaaagagcacattgatgagttcatccatgcctccatggatgagcacaagacctgcttcaagaagaccatccagaagatgttcgggatgtcaaaggctgttgcggagcggtccgctgcagcaaaggaagctgaagtcgaaagtgctttgcctcttgagaccagtgtgtcccggtaggagattgcattggtggtggccagttcttgctttctggtggcatggttcttgtatcaggaatctagcaaatgtttttttcctattgttgctgtatggtcactatatattttttctgttagaaatgttgaataatattaacatgagtataaactgagactg

SEQ ID NO: 12234 - protein, 176 aa, Triticum aestivum
  peptide (1)..(176): Ceres Seq. ID no. 12587364
  misc_feature (80)..(176): NCBI GI NO: 40253393 NR Description: hypothetical protein
  misc_feature (80)..(175): NCBI GI NO: 15230009 NR Description: unknown protein; protein id: At3g05570.1
  misc_feature (99)..(175): NCBI GI NO: 21553485 NR Description: unknown [Arabidopsis thaliana]
  misc_feature (96)..(175): NCBI GI NO: 18420404 NR Description: Expressed protein; protein id: At4g39235
  misc_feature (74)..(176): NCBI GI NO: 15226603 NR Description: unknown protein; protein id: At2g21640.1
  misc_feature (78)..(139): NCBI GI NO: 14626302 NR Description: hypothetical protein
TKTPVEKKERERNENNSRPKPPLRRRRYRSQAAPPFVEQQRRRPELRRRRIHRTGHQHCQLERLGAALASTVEQTRSIDMDSSTTQSEGSQPPVPPKSPTMSSCRKKKTDDDATFLKDVKEHIDEFIHASMDEHKTCFKKTIQKMFGMSKAVAERSAAAKEAEVESALPLETSVSR

SEQ ID NO: 12235 - protein, 104 aa, Triticum aestivum
  peptide (1)..(104): Ceres Seq. ID no. 12587365
MSSSMPPWMSTRPASRRPSRRCSGCQRLLRSGPLQQRKLKSKVLCLLRPVCPGRRLHWWWPVLAFWWHGSCIRNLANVFFLLLLYGHYIFFLLEMLNNINMSIN

SEQ ID NO: 12236 - protein, 100 aa, Triticum aestivum
  peptide (1)..(100): Ceres Seq. ID no. 12587366
MPPWMSTRPASRRPSRRCSGCQRLLRSGPLQQRKLKSKVLCLLRPVCPGRRLHWWWPVLAFWWHGSCIRNLANVFFLLLLYGHYIFFLLEMLNNINMSIN

SEQ ID NO: 12237 - protein, 97 aa, Triticum aestivum
  peptide (1)..(97): Ceres Seq. ID no. 12587367
  misc_feature (1)..(97): NCBI GI NO: 40253393 NR Description: hypothetical protein
  misc_feature (1)..(96): NCBI GI NO: 15230009 NR Description: unknown protein; protein id: At3g05570.1
  misc_feature (20)..(96): NCBI GI NO: 21553485 NR Description: unknown [Arabidopsis thaliana]
  misc_feature (17)..(96): NCBI GI NO: 18420404 NR Description: Expressed protein; protein id: At4g39235
  misc_feature (1)..(97): NCBI GI NO: 15226603 NR Description: unknown protein; protein id: At2g21640.1
  misc_feature (1)..(60): NCBI GI NO: 14626302 NR Description: hypothetical protein
MDSSTTQSEGSQPPVPPKSPTMSSCRKKKTDDDATFLKDVKEHIDEFIHASMDEHKTCFKKTIQKMFGMSKAVAERSAAAKEAEVESALPLETSVSR

SEQ ID NO: 12238 - DNA, 812 bp, Triticum aestivum
  misc_feature (1)..(812): Ceres Seq. ID no. 12587328
aacaacaacaacaacatccaaaatccaaacccaagccaagaacacacgctgttctgaatctgtccatcagtctccgcttccactgattcgtccagccgagaagaagaagagctgcagaagatgagcaagctctggaccatcctcacccacctccacaccctcgcagggcctggcgtgatgctcctgtacccgctgtacgcgtcggtgcaggcgatggagagcccgtcgaagctggacgacgagcagtggctggcctactggatcctctactccttcgtcacgctcgtcgagatggtcctcgagtccctcatctactggataccgatctggtacgagctgaagctgctgttcctggcgtggctggcgctgcccaacttcaggggagcggccttcatctacgacaggttcgtcagggagcagctcaggaagcacggcctcaccaaccaccccggcagcggcatcagcagcagcaagaaggagaacggcggcaagtcgtcctcgccgttgacgtcccccaaggagaaggagaacgccaagagcaggttcctctcctttggcgctcccaagaaagaccactgaagtagattggggcagtaaccagagatccctgcggctagcttcttggcttgtggtgtttttttggtttgtttgagattttagcttgtggtcttgggagtattacatgtcttgtccaaaaaagttgtactagcactccatagatgaggccctcggttgcaggctagctagatggtggcttgtggtgttgtagtattattacatatatctgtcccgaaaaatgttccggggttggg

SEQ ID NO: 12239 - protein, 152 aa, Triticum aestivum
  peptide (1)..(152): Ceres Seq. ID no. 12587329
  misc_feature (5)..(101): Pfam Name: Pfam Description:  TB2/DP1, HVA22 family
  misc_feature (1)..(111): NCBI GI NO: 1076715 NR Description: abscisic acid-induced protein HVA22 - barley
  misc_feature (1)..(104): NCBI GI NO: 33342176 NR Description: hypothetical protein [Triticum aestivum]
  misc_feature (1)..(106): NCBI GI NO: 18423191 NR Description: putative protein; protein id: At5g50720
  misc_feature (1)..(106): NCBI GI NO: 18416458 NR Description: abscisic acid-induced - like protein
  misc_feature (20)..(106): NCBI GI NO: 8777395 NR Description: gene_id:MFB16
  misc_feature (20)..(106): NCBI GI NO: 7484787 NR Description: abscisic acid-induced protein homolog F13M23
  misc_feature (4)..(98): NCBI GI NO: 15221266 NR Description: AtHVA22a; protein id: At1g74520
  misc_feature (7)..(101): NCBI GI NO: 4884934 NR Description: AtHVA22b [Arabidopsis thaliana]
  misc_feature (7)..(101): NCBI GI NO: 15241840 NR Description: AtHVA22b-like protein; protein id: At5g62490
  misc_feature (4)..(98): NCBI GI NO: 15222421 NR Description: AtHVA22c; protein id: At1g69700
MSKLWTILTHLHTLAGPGVMLLYPLYASVQAMESPSKLDDEQWLAYWILYSFVTLVEMVLESLIYWIPIWYELKLLFLAWLALPNFRGAAFIYDRFVREQLRKHGLTNHPGSGISSSKKENGGKSSSPLTSPKEKENAKSRFLSFGAPKKDH

SEQ ID NO: 12240 - protein, 133 aa, Triticum aestivum
  peptide (1)..(133): Ceres Seq. ID no. 12587330
  misc_feature (1)..(82): Pfam Name: Pfam Description:  TB2/DP1, HVA22 family
  misc_feature (1)..(92): NCBI GI NO: 1076715 NR Description: abscisic acid-induced protein HVA22 - barley
  misc_feature (1)..(85): NCBI GI NO: 33342176 NR Description: hypothetical protein [Triticum aestivum]
  misc_feature (1)..(87): NCBI GI NO: 18423191 NR Description: putative protein; protein id: At5g50720
  misc_feature (1)..(87): NCBI GI NO: 18416458 NR Description: abscisic acid-induced - like protein
  misc_feature (1)..(87): NCBI GI NO: 8777395 NR Description: gene_id:MFB16
  misc_feature (1)..(87): NCBI GI NO: 7484787 NR Description: abscisic acid-induced protein homolog F13M23
  misc_feature (1)..(79): NCBI GI NO: 15221266 NR Description: AtHVA22a; protein id: At1g74520
  misc_feature (1)..(82): NCBI GI NO: 4884934 NR Description: AtHVA22b [Arabidopsis thaliana]
  misc_feature (1)..(82): NCBI GI NO: 15241840 NR Description: AtHVA22b-like protein; protein id: At5g62490
  misc_feature (1)..(79): NCBI GI NO: 15222421 NR Description: AtHVA22c; protein id: At1g69700
MLLYPLYASVQAMESPSKLDDEQWLAYWILYSFVTLVEMVLESLIYWIPIWYELKLLFLAWLALPNFRGAAFIYDRFVREQLRKHGLTNHPGSGISSSKKENGGKSSSPLTSPKEKENAKSRFLSFGAPKKDH

SEQ ID NO: 12241 - protein, 121 aa, Triticum aestivum
  peptide (1)..(121): Ceres Seq. ID no. 12587331
  misc_feature (1)..(70): Pfam Name: Pfam Description:  TB2/DP1, HVA22 family
  misc_feature (1)..(80): NCBI GI NO: 1076715 NR Description: abscisic acid-induced protein HVA22 - barley
  misc_feature (1)..(73): NCBI GI NO: 33342176 NR Description: hypothetical protein [Triticum aestivum]
  misc_feature (1)..(75): NCBI GI NO: 18423191 NR Description: putative protein; protein id: At5g50720
  misc_feature (1)..(75): NCBI GI NO: 18416458 NR Description: abscisic acid-induced - like protein
  misc_feature (1)..(75): NCBI GI NO: 8777395 NR Description: gene_id:MFB16
  misc_feature (1)..(75): NCBI GI NO: 7484787 NR Description: abscisic acid-induced protein homolog F13M23
  misc_feature (1)..(67): NCBI GI NO: 15221266 NR Description: AtHVA22a; protein id: At1g74520
  misc_feature (1)..(70): NCBI GI NO: 4884934 NR Description: AtHVA22b [Arabidopsis thaliana]
  misc_feature (1)..(70): NCBI GI NO: 15241840 NR Description: AtHVA22b-like protein; protein id: At5g62490
  misc_feature (1)..(67): NCBI GI NO: 15222421 NR Description: AtHVA22c; protein id: At1g69700
MESPSKLDDEQWLAYWILYSFVTLVEMVLESLIYWIPIWYELKLLFLAWLALPNFRGAAFIYDRFVREQLRKHGLTNHPGSGISSSKKENGGKSSSPLTSPKEKENAKSRFLSFGAPKKDH

SEQ ID NO: 12242 - DNA, 703 bp, Triticum aestivum
  misc_feature (1)..(703): Ceres Seq. ID no. 13583509
aactccccagcccagcttggcctagctgccaccacccctcttcctcctcctcctaggctagctccctccggcagactctcccttccatggcggatcggcacggcgagggcggcgtggcctcggcgcggcggccggggcgcacggacctggacgacccgtcgacgacgctgctgcagcgcgtgcaggcgcacctcccgaacgcgacgcaggtggtgggcctgctgaccctgctgctcgccggcgcggcgctgctggtgctggcggggctgacgttcacgggcgcggtggtggcgctcgtcttcctcggcccgctggcgctgctgaccagccccatctgggtgccgttctccttcgcgctcctggtcgtggccgtggcggcgctctccttcgtcgggttcgccgtggccgccctcgccgcggccacctgggcgtaccggtacttcacggggcggcaccccgtgggcgccgaccgcgtggatcgcgcccgcagccgcctcgccgacaccgccagccacgtcaaggactacgcccgccgcgagtacggcggatacctcggcaaccgcaccaaggacgccgccccgggcgcctaggcacgtcgcggctagatcgttattacgatatgttcttctctctttgcgtctctgtactctcccagctgttggtaatctcgtcgtcttcacgtgtatgaactactattagttcc

SEQ ID NO: 12243 - protein, 167 aa, Triticum aestivum
  peptide (1)..(167): Ceres Seq. ID no. 13583510
  misc_feature (39)..(155): Pfam Name: Pfam Description:  Oleosin
  misc_feature (22)..(167): NCBI GI NO: 15229674 NR Description: oleosin [Arabidopsis thaliana]
  misc_feature (19)..(167): NCBI GI NO: 15222021 NR Description: oleosin [Arabidopsis thaliana]
  misc_feature (22)..(167): NCBI GI NO: 21311555 NR Description: 15.8 kDa oleosin [Theobroma cacao]
  misc_feature (30)..(150): NCBI GI NO: 5381321 NR Description: 15 kDa oleosin [Sesamum indicum]
  misc_feature (34)..(153): NCBI GI NO: 29170509 NR Description: oleosin [Corylus avellana]
  misc_feature (31)..(153): NCBI GI NO: 7442009 NR Description: oleosin-like protein
  misc_feature (28)..(151): NCBI GI NO: 15225211 NR Description: oleosin [Arabidopsis thaliana]
  misc_feature (28)..(151): NCBI GI NO: 27754701 NR Description: putative oleosin protein [Arabidopsis thaliana]
  misc_feature (37)..(153): NCBI GI NO: 2119749 NR Description: oleosin - almond
  misc_feature (37)..(153): NCBI GI NO: 3914199 NR Description: OLEOSIN 1
MADRHGEGGVASARRPGRTDLDDPSTTLLQRVQAHLPNATQVVGLLTLLLAGAALLVLAGLTFTGAVVALVFLGPLALLTSPIWVPFSFALLVVAVAALSFVGFAVAALAAATWAYRYFTGRHPVGADRVDRARSRLADTASHVKDYARREYGGYLGNRTKDAAPGA

SEQ ID NO: 12244 - DNA, 633 bp, Triticum aestivum
  misc_feature (1)..(633): Ceres Seq. ID no. 13583494
ctcgaaggcggaagttctcgaagacgtaaacctgccagctccctccccaacccctggaaacgctctggtagtctccgccgcgggagaggcggagatggagaacgcggtggtgctccgggagtggttcgaccgcgtcgacgccgccggcaccggcaacatcacggctcctcagctccagagcgcgctggccgtgggcaacctcgacttccccctctccgtcgtgcagcagatgatcaggatgtacgactttgatcggaacggcaccatgagcttcgaagagttcttggctcttaacaagttccttcagaaggtgcagactgttttctcctccctagaaaggggccgtggatttctcagccttgaggatgtgtatgaggcgttaatcaaactcggtttctctttggattcacctgccttttacactgtctgtgagagcttcgacaagagcaagaaagggatggttcgtttggatgagttcatatcgatctgcatctttgtgcagtcagctcgtaacttgttcagctcatttgacacaaccaagcaagggaaagtgactttggatttcaaccagttcgtctactgcacggcaaactgcaggatatagctgtattacctgaaacctgtacatggaag

SEQ ID NO: 12245 - protein, 200 aa, Triticum aestivum
  peptide (1)..(200): Ceres Seq. ID no. 13583495
  misc_feature (14)..(192): NCBI GI NO: 8745028 NR Description: probable possible programmed cell death protein
  misc_feature (38)..(192): NCBI GI NO: 3024652 NR Description: Sorcin
  misc_feature (2)..(192): NCBI GI NO: 8745027 NR Description: probable possible programmed cell death protein
  misc_feature (42)..(192): NCBI GI NO: 28277280 NR Description: Similar to programmed cell death 6
  misc_feature (38)..(192): NCBI GI NO: 39595321 NR Description: Hypothetical protein CBG03955
  misc_feature (14)..(198): NCBI GI NO: 19921976 NR Description: CG17765-PA [Drosophila melanogaster]
  misc_feature (12)..(192): NCBI GI NO: 26346917 NR Description: unnamed protein product [Mus musculus]
  misc_feature (12)..(192): NCBI GI NO: 7019485 NR Description: programmed cell death 6; apoptosis-linked gene 2
  misc_feature (41)..(197): NCBI GI NO: 17512472 NR Description: RIKEN cDNA 2600002E23 gene [Mus musculus]
  misc_feature (12)..(192): NCBI GI NO: 34853323 NR Description: similar to ALG-2 [Rattus norvegicus]
SKAEVLEDVNLPAPSPTPGNALVVSAAGEAEMENAVVLREWFDRVDAAGTGNITAPQLQSALAVGNLDFPLSVVQQMIRMYDFDRNGTMSFEEFLALNKFLQKVQTVFSSLERGRGFLSLEDVYEALIKLGFSLDSPAFYTVCESFDKSKKGMVRLDEFISICIFVQSARNLFSSFDTTKQGKVTLDFNQFVYCTANCRI

SEQ ID NO: 12246 - protein, 169 aa, Triticum aestivum
  peptide (1)..(169): Ceres Seq. ID no. 13583496
  misc_feature (1)..(161): NCBI GI NO: 8745028 NR Description: probable possible programmed cell death protein
  misc_feature (7)..(161): NCBI GI NO: 3024652 NR Description: Sorcin
  misc_feature (1)..(161): NCBI GI NO: 8745027 NR Description: probable possible programmed cell death protein
  misc_feature (11)..(161): NCBI GI NO: 28277280 NR Description: Similar to programmed cell death 6
  misc_feature (7)..(161): NCBI GI NO: 39595321 NR Description: Hypothetical protein CBG03955
  misc_feature (1)..(167): NCBI GI NO: 19921976 NR Description: CG17765-PA [Drosophila melanogaster]
  misc_feature (1)..(161): NCBI GI NO: 26346917 NR Description: unnamed protein product [Mus musculus]
  misc_feature (1)..(161): NCBI GI NO: 7019485 NR Description: programmed cell death 6; apoptosis-linked gene 2
  misc_feature (10)..(166): NCBI GI NO: 17512472 NR Description: RIKEN cDNA 2600002E23 gene [Mus musculus]
  misc_feature (1)..(161): NCBI GI NO: 34853323 NR Description: similar to ALG-2 [Rattus norvegicus]
MENAVVLREWFDRVDAAGTGNITAPQLQSALAVGNLDFPLSVVQQMIRMYDFDRNGTMSFEEFLALNKFLQKVQTVFSSLERGRGFLSLEDVYEALIKLGFSLDSPAFYTVCESFDKSKKGMVRLDEFISICIFVQSARNLFSSFDTTKQGKVTLDFNQFVYCTANCRI

SEQ ID NO: 12247 - protein, 124 aa, Triticum aestivum
  peptide (1)..(124): Ceres Seq. ID no. 13583497
  misc_feature (1)..(116): NCBI GI NO: 8745028 NR Description: probable possible programmed cell death protein
  misc_feature (1)..(116): NCBI GI NO: 3024652 NR Description: Sorcin
  misc_feature (1)..(116): NCBI GI NO: 8745027 NR Description: probable possible programmed cell death protein
  misc_feature (1)..(116): NCBI GI NO: 28277280 NR Description: Similar to programmed cell death 6
  misc_feature (1)..(116): NCBI GI NO: 39595321 NR Description: Hypothetical protein CBG03955
  misc_feature (1)..(122): NCBI GI NO: 19921976 NR Description: CG17765-PA [Drosophila melanogaster]
  misc_feature (1)..(116): NCBI GI NO: 26346917 NR Description: unnamed protein product [Mus musculus]
  misc_feature (1)..(116): NCBI GI NO: 7019485 NR Description: programmed cell death 6; apoptosis-linked gene 2
  misc_feature (1)..(121): NCBI GI NO: 17512472 NR Description: RIKEN cDNA 2600002E23 gene [Mus musculus]
  misc_feature (1)..(116): NCBI GI NO: 34853323 NR Description: similar to ALG-2 [Rattus norvegicus]
MIRMYDFDRNGTMSFEEFLALNKFLQKVQTVFSSLERGRGFLSLEDVYEALIKLGFSLDSPAFYTVCESFDKSKKGMVRLDEFISICIFVQSARNLFSSFDTTKQGKVTLDFNQFVYCTANCRI

SEQ ID NO: 12248 - DNA, 574 bp, Triticum aestivum
  misc_feature (1)..(574): Ceres Seq. ID no. 12584760
cggaaaagctttttttttaaaaaaaaaaatttttttttttttttttttttttttttttttttttttttttttttttttttttttttttttttttttttttttttttttttttttttttttttttctaaagtacatgtttcttgtcatattatatataatttgtgatcaaagacaaacaaataatcagtatcaaataatcccgcactacaacctcgtaaaaggggaaaaaatgccttttggttactgccagttcgttacagaatgatttacatatcggttctttggctgttgtcatctctacttccctaaaacaaccttctaaggaaacttcttcttggtcttcttgattttacatcttttattctcccagcctttaacaaagcttcctcggcaattggtttccattgctgagcacaagaaaaacggaggcccatccctacagtcagcccacgcaacagttgtatcgtccgaagcaccgaaaataattcctctgggaagctctctactccaactttattcagtgaagaatcatcagcaaagggcgagagcacggttactccaggcggtaatcttg

SEQ ID NO: 12249 - protein, 87 aa, Triticum aestivum
  peptide (1)..(87): Ceres Seq. ID no. 12584761
  misc_feature (8)..(71): NCBI GI NO: 23487594 NR Description: hypothetical protein [Plasmodium yoelii yoelii]
  misc_feature (10)..(48): NCBI GI NO: 23486076 NR Description: Eukaryotic ribosomal protein L18, putative
  misc_feature (13)..(50): NCBI GI NO: 23486076 NR Description: Eukaryotic ribosomal protein L18, putative
  misc_feature (11)..(66): NCBI GI NO: 23613703 NR Description: hypothetical protein [Plasmodium falciparum 3D7]
  misc_feature (19)..(44): NCBI GI NO: 34897812 NR Description: P0514G12.26
  misc_feature (1)..(54): NCBI GI NO: 17158421 NR Description: wsv319 [shrimp white spot syndrome virus]
  misc_feature (11)..(51): NCBI GI NO: 40548804 NR Description: NADH dehydrogenase subunit 6 [Dirofilaria immitis]
  misc_feature (1)..(54): NCBI GI NO: 19481967 NR Description: WSSV375 [shrimp white spot syndrome virus]
  misc_feature (6)..(42): NCBI GI NO: 23488286 NR Description: Uba1 gene product-related
  misc_feature (11)..(53): NCBI GI NO: 40548804 NR Description: NADH dehydrogenase subunit 6 [Dirofilaria immitis]
GKAFFLKKKIFFFFFFFFFFFFFFFFFFFFFFFFFFFFFFFLKYMFLVILYIICDQRQTNNQYQIIPHYNLVKGEKMPFGYCQFVTE

SEQ ID NO: 12250 - protein, 54 aa, Triticum aestivum
  peptide (1)..(54): Ceres Seq. ID no. 12584762
  misc_feature (10)..(54): NCBI GI NO: 23486076 NR Description: Eukaryotic ribosomal protein L18, putative
  misc_feature (2)..(44): NCBI GI NO: 23487594 NR Description: hypothetical protein [Plasmodium yoelii yoelii]
  misc_feature (10)..(32): NCBI GI NO: 34897812 NR Description: P0514G12.26
  misc_feature (14)..(49): NCBI GI NO: 23482639 NR Description: hypothetical protein [Plasmodium yoelii yoelii]
  misc_feature (18)..(42): NCBI GI NO: 34897812 NR Description: P0514G12.26
  misc_feature (10)..(41): NCBI GI NO: 40548804 NR Description: NADH dehydrogenase subunit 6 [Dirofilaria immitis]
  misc_feature (10)..(38): NCBI GI NO: 40548804 NR Description: NADH dehydrogenase subunit 6 [Dirofilaria immitis]
  misc_feature (10)..(51): NCBI GI NO: 23613703 NR Description: hypothetical protein [Plasmodium falciparum 3D7]
RKSFFFKKKNFFFFFFFFFFFFFFFFFFFFFFFFFFFFFFFSKVHVSCHIIYNL

SEQ ID NO: 12251 - protein, 43 aa, Triticum aestivum
  peptide (1)..(43): Ceres Seq. ID no. 12584763
  misc_feature (1)..(27): NCBI GI NO: 23487594 NR Description: hypothetical protein [Plasmodium yoelii yoelii]
  misc_feature (1)..(22): NCBI GI NO: 23613703 NR Description: hypothetical protein [Plasmodium falciparum 3D7]
MFLVILYIICDQRQTNNQYQIIPHYNLVKGEKMPFGYCQFVTE

SEQ ID NO: 12252 - DNA, 859 bp, Triticum aestivum
  misc_feature (1)..(859): Ceres Seq. ID no. 12584695
attcgttccgcggccgcttcttcagcacaggcacggcgatctgtcccacggcggcgatggcgctctcctcctccaggccacaccacctcctccgccgcttccacgcttccgcgcgggctctgtcgcgggtggaaccgcacgagttctcgcagcccagcgactacctcgggagctgggcggagcgcgcccccgccacggtcgccgcgggcggcggcgacacacgggaggcttgggcacggctggagcgcctgcgcaaggggtacgcgcgcgaggttggggagctacggcgtcagtacgcctacgaggcgcaactgctggaggccgagcggcagcgcaaggcggaggcacgtgccgaggccgcccgcctcgccaacgaggagcgcaaagccgccaaggctgccgccgctcagaccagggcggccgagcgccgcgccttcgagctcgatttccgccaggccctcatgaaagaaagagctcagaagccggagagccggaggaacaaggagaagctgaaagcacagaagaaggcggagcacagggagctcttgcgcaggcagagttctgtttgggttgctgaggataaaatggaaaagaaaattcttgaggctatcatgcataccacccctctttgaggttcatgctgtgaggtctgcaggaaactagatgatgtatcctggacagtacaaatgaagcttgtttgctattccctcttaagaactactatttcgcagttgtctaaggaataacgacatttcttctagccttaagtttttttgtttctgaagctgtgttgtaatgttcagttgttagactggacgaacatcgagccggcgttgtgtttcggaatttaattttcttc

SEQ ID NO: 12253 - protein, 209 aa, Triticum aestivum
  peptide (1)..(209): Ceres Seq. ID no. 12584696
  misc_feature (89)..(201): Pfam Name: Pfam Description:  Caldesmon
  misc_feature (30)..(209): NCBI GI NO: 18423002 NR Description: expressed protein; protein id: At5g49210
  misc_feature (30)..(209): NCBI GI NO: 21618271 NR Description: unknown [Arabidopsis thaliana]
  misc_feature (30)..(154): NCBI GI NO: 10177150 NR Description: gene_id:K21P3.8~unknown protein
SFRGRFFSTGTAICPTAAMALSSSRPHHLLRRFHASARALSRVEPHEFSQPSDYLGSWAERAPATVAAGGGDTREAWARLERLRKGYAREVGELRRQYAYEAQLLEAERQRKAEARAEAARLANEERKAAKAAAAQTRAAERRAFELDFRQALMKERAQKPESRRNKEKLKAQKKAEHRELLRRQSSVWVAEDKMEKKILEAIMHTTPL

SEQ ID NO: 12254 - protein, 191 aa, Triticum aestivum
  peptide (1)..(191): Ceres Seq. ID no. 12584697
  misc_feature (71)..(183): Pfam Name: Pfam Description:  Caldesmon
  misc_feature (12)..(191): NCBI GI NO: 18423002 NR Description: expressed protein; protein id: At5g49210
  misc_feature (12)..(191): NCBI GI NO: 21618271 NR Description: unknown [Arabidopsis thaliana]
  misc_feature (12)..(136): NCBI GI NO: 10177150 NR Description: gene_id:K21P3.8~unknown protein
MALSSSRPHHLLRRFHASARALSRVEPHEFSQPSDYLGSWAERAPATVAAGGGDTREAWARLERLRKGYAREVGELRRQYAYEAQLLEAERQRKAEARAEAARLANEERKAAKAAAAQTRAAERRAFELDFRQALMKERAQKPESRRNKEKLKAQKKAEHRELLRRQSSVWVAEDKMEKKILEAIMHTTPL

SEQ ID NO: 12255 - protein, 191 aa, Triticum aestivum
  peptide (1)..(191): Ceres Seq. ID no. 12584698
FVPRPLLQHRHGDLSHGGDGALLLQATPPPPPLPRFRAGSVAGGTARVLAAQRLPRELGGARPRHGRRGRRRHTGGLGTAGAPAQGVRARGWGATASVRLRGATAGGRAAAQGGGTCRGRPPRQRGAQSRQGCRRSDQGGRAPRLRARFPPGPHERKSSEAGEPEEQGEAESTEEGGAQGALAQAEFCLGC

SEQ ID NO: 12256 - DNA, 1687 bp, Triticum aestivum
  misc_feature (1)..(1687): Ceres Seq. ID no. 13596803
ccttcccccttccccgtctgactttttctccaagttcaactccgccgcccgccccctctccccgatcccgggagagagagagagagatgtcctggcggtgggctctggcgcggcgcgtcgccacgctcgtcggcggcggcaccggcggcccaggcgccgcccaggcgcagaggctcttctcctcctccggcgccctcccggggaggctccaccctgcgccgcctcagattcggaacaaggtggtgggttgcagaggagctgctttcgtgaactcgcggtggctgcatgatgccacccaatgccagactcgccaggacggagtttcgagggctgaagaacaacatgatccatttgaattggttgctgatgaactatcgattcttggaaatagactacggtccatggtggttgctgaggtccctaaactagaatcagctgctgaatatttttttaaagtaggagctgagggaaaaagattccgacctacggttttattgctgatggcatcagctctgaaattcccaataccagaatcgacagatgttggagttttcagtatattggcaagtaagctgcgcacacggcagcaaaacattgccgagataactgaaatgatccatgttgcaagtcttctgcatgatgatgttctggatgatgctgacactaggcgaggtgtcacttcattgaattgcattatgggcaacaagctttctgttttggctggtgactttctcctgtccagagcatgtgtggcacttgcagcacttgggaatacagaggtggtatctctaatggcaactgcagttggacatctagttactggtgaaactatgcaaatgtcaacaagcagagagcaacggcgaagtatggagtactacttgcagaagacgtactacaaaacagcatcattgatatcaaacagttgcaaggctgttgctattcttgcagggcacactgctgagatttcagtgcttgcatacgaatatggtcgaaacctgggtctagccttccagttgatcgacgatgttcttgatttcacaggaacctctgcttcacttgggaagggttcattatctgatattcgtcatggaatcattactgctccaatgctatatgcgatggaagaattcccacaactacaagatgtcgttgaccagggttttgacaatcctgcaaatgttgagatcgccttggactacctccagaagagccggggaatcgaaagaacaaaagagcttgcgcaagaacacgttaaccttgcggtcaaagccatcgaatctctcccagacagtgacgatgaagatgttctgatttcaaggcgcgctcttattgatatcacacagagagtcatcacaaggacaaaatagcatgattatacacagggtggagaagataaggcggagtttcgccacaggtgtagtgttccgcttggaaatttttggtcgccttggtcattgcattctttccattgcccgggttttgtgtaacatttgatgagacttcagggtaaccattcctgggaatcatcctaagtcgcagctgtagtggttttagttactggtggcagcagaatctgtgtattaatatcacgattggcgattgcacgatgacctgatcataagactgtaaccttataaatcgaagtatgtaacactatatacgaggaaaaagtaacctgcttgtgttg

SEQ ID NO: 12257 - protein, 454 aa, Triticum aestivum
  peptide (1)..(454): Ceres Seq. ID no. 13596804
  misc_feature (141)..(413): Pfam Name: Pfam Description:  Polyprenyl synthetase
  misc_feature (78)..(454): NCBI GI NO: 12055493 NR Description: geranyl diphosphat synthase [Quercus robur]
  misc_feature (56)..(454): NCBI GI NO: 27261729 NR Description: geranylgeranyl diphosphate synthase
  misc_feature (108)..(454): NCBI GI NO: 20260214 NR Description: putative trans-prenyltransferase
  misc_feature (108)..(454): NCBI GI NO: 11322965 NR Description: geranyl diphosphate synthase
  misc_feature (134)..(454): NCBI GI NO: 11322972 NR Description: geranyl diphosphate synthase [Citrus sinensis]
  misc_feature (134)..(454): NCBI GI NO: 30686146 NR Description: geranyl diphosphate synthase
  misc_feature (255)..(454): NCBI GI NO: 25314274 NR Description: probable trans-prenyltransferase
  misc_feature (134)..(239): NCBI GI NO: 25314274 NR Description: probable trans-prenyltransferase
  misc_feature (100)..(454): NCBI GI NO: 9507201 NR Description: trans-prenyltransferase [Mus musculus]
  misc_feature (102)..(454): NCBI GI NO: 29165656 NR Description: Similar to trans-prenyltransferase [Homo sapiens]
FPLPRLTFSPSSTPPPAPSPRSREREREMSWRWALARRVATLVGGGTGGPGAAQAQRLFSSSGALPGRLHPAPPQIRNKVVGCRGAAFVNSRWLHDATQCQTRQDGVSRAEEQHDPFELVADELSILGNRLRSMVVAEVPKLESAAEYFFKVGAEGKRFRPTVLLLMASALKFPIPESTDVGVFSILASKLRTRQQNIAEITEMIHVASLLHDDVLDDADTRRGVTSLNCIMGNKLSVLAGDFLLSRACVALAALGNTEVVSLMATAVGHLVTGETMQMSTSREQRRSMEYYLQKTYYKTASLISNSCKAVAILAGHTAEISVLAYEYGRNLGLAFQLIDDVLDFTGTSASLGKGSLSDIRHGIITAPMLYAMEEFPQLQDVVDQGFDNPANVEIALDYLQKSRGIERTKELAQEHVNLAVKAIESLPDSDDEDVLISRRALIDITQRVITRTK

SEQ ID NO: 12258 - protein, 426 aa, Triticum aestivum
  peptide (1)..(426): Ceres Seq. ID no. 13596805
  misc_feature (113)..(385): Pfam Name: Pfam Description:  Polyprenyl synthetase
  misc_feature (50)..(426): NCBI GI NO: 12055493 NR Description: geranyl diphosphat synthase [Quercus robur]
  misc_feature (28)..(426): NCBI GI NO: 27261729 NR Description: geranylgeranyl diphosphate synthase
  misc_feature (80)..(426): NCBI GI NO: 20260214 NR Description: putative trans-prenyltransferase
  misc_feature (80)..(426): NCBI GI NO: 11322965 NR Description: geranyl diphosphate synthase
  misc_feature (106)..(426): NCBI GI NO: 11322972 NR Description: geranyl diphosphate synthase [Citrus sinensis]
  misc_feature (106)..(426): NCBI GI NO: 30686146 NR Description: geranyl diphosphate synthase
  misc_feature (227)..(426): NCBI GI NO: 25314274 NR Description: probable trans-prenyltransferase
  misc_feature (106)..(211): NCBI GI NO: 25314274 NR Description: probable trans-prenyltransferase
  misc_feature (72)..(426): NCBI GI NO: 9507201 NR Description: trans-prenyltransferase [Mus musculus]
  misc_feature (74)..(426): NCBI GI NO: 29165656 NR Description: Similar to trans-prenyltransferase [Homo sapiens]
MSWRWALARRVATLVGGGTGGPGAAQAQRLFSSSGALPGRLHPAPPQIRNKVVGCRGAAFVNSRWLHDATQCQTRQDGVSRAEEQHDPFELVADELSILGNRLRSMVVAEVPKLESAAEYFFKVGAEGKRFRPTVLLLMASALKFPIPESTDVGVFSILASKLRTRQQNIAEITEMIHVASLLHDDVLDDADTRRGVTSLNCIMGNKLSVLAGDFLLSRACVALAALGNTEVVSLMATAVGHLVTGETMQMSTSREQRRSMEYYLQKTYYKTASLISNSCKAVAILAGHTAEISVLAYEYGRNLGLAFQLIDDVLDFTGTSASLGKGSLSDIRHGIITAPMLYAMEEFPQLQDVVDQGFDNPANVEIALDYLQKSRGIERTKELAQEHVNLAVKAIESLPDSDDEDVLISRRALIDITQRVITRTK

SEQ ID NO: 12259 - protein, 321 aa, Triticum aestivum
  peptide (1)..(321): Ceres Seq. ID no. 13596806
  misc_feature (8)..(280): Pfam Name: Pfam Description:  Polyprenyl synthetase
  misc_feature (1)..(321): NCBI GI NO: 12055493 NR Description: geranyl diphosphat synthase [Quercus robur]
  misc_feature (1)..(321): NCBI GI NO: 27261729 NR Description: geranylgeranyl diphosphate synthase
  misc_feature (1)..(321): NCBI GI NO: 20260214 NR Description: putative trans-prenyltransferase
  misc_feature (1)..(321): NCBI GI NO: 11322965 NR Description: geranyl diphosphate synthase
  misc_feature (1)..(321): NCBI GI NO: 11322972 NR Description: geranyl diphosphate synthase [Citrus sinensis]
  misc_feature (1)..(321): NCBI GI NO: 30686146 NR Description: geranyl diphosphate synthase
  misc_feature (122)..(321): NCBI GI NO: 25314274 NR Description: probable trans-prenyltransferase
  misc_feature (1)..(106): NCBI GI NO: 25314274 NR Description: probable trans-prenyltransferase
  misc_feature (1)..(321): NCBI GI NO: 9507201 NR Description: trans-prenyltransferase [Mus musculus]
  misc_feature (1)..(321): NCBI GI NO: 29165656 NR Description: Similar to trans-prenyltransferase [Homo sapiens]
MVVAEVPKLESAAEYFFKVGAEGKRFRPTVLLLMASALKFPIPESTDVGVFSILASKLRTRQQNIAEITEMIHVASLLHDDVLDDADTRRGVTSLNCIMGNKLSVLAGDFLLSRACVALAALGNTEVVSLMATAVGHLVTGETMQMSTSREQRRSMEYYLQKTYYKTASLISNSCKAVAILAGHTAEISVLAYEYGRNLGLAFQLIDDVLDFTGTSASLGKGSLSDIRHGIITAPMLYAMEEFPQLQDVVDQGFDNPANVEIALDYLQKSRGIERTKELAQEHVNLAVKAIESLPDSDDEDVLISRRALIDITQRVITRTK

SEQ ID NO: 12260 - DNA, 1783 bp, Triticum aestivum
  misc_feature (1)..(1783): Ceres Seq. ID no. 13502952
ctagaacatcctaatcgaaaagaacaaaagcaagaagtctgctacccaatcccatctactaccccccatctctcttcctgctccgtggtgtacttgtggtctcgaggatgaggagctccatggccctcttggcggcggcgctgctgctgctggtgtcgctggcggcggcggcggacatgtcgatcgtgtcgtacggggagcggagcgaggaggaggtgcggcggatgtacgccgagtggatgtccgagcaccgcaggacgtacaacgccatcggcgaggaggagcgccgcttcgaggtcttcagggacaacctccgctacatcgaccagcacaacgccgccgccgacgccgggctccactccttccgcctcggcctcaaccgcttcgccgacctcaccaacgaggagtaccgcagcacgtacctgggcgcccggaccaagccggaccgggagcggaagctcagcgccaggtaccaggccgacgacaacgaggagctgccggagaccgtcgactggaggaagaagggggccgttgctgccatcaaggaccagggcggctgcgggagctgctgggctttctcagcaatagcagctgttgaaggcatcaaccagattgttacgggcgacatgatccctctgtccgagcaagagcttgttgactgtgacacttcatacaacgagggatgcaatggaggtctgatggactatgcgtttgagttcatcattaacaatggcggtatcgactctgaggaggactacccctacaaggagagggacaaccgttgcgatgctaacaagaaaaatgcgaaggttgttaccattgatgggtacgaggatgtgcccgtgaacagtgagaagagtctgcagaaggcagttgcaaaccagcccatcagtgttgcgattgaggctggtggcagggcattccagctctacaaatcgggtatcttcactggaacctgtggaacagcacttgaccatggtgtcgccgccgttggttatggtacagagaacggcaaggactactggctcgtcaggaactcctggggtaccgtctggggagaggatggttacatccggatggagcgtaacatcaaggcatccagtggcaaatgtggtattgccgttgagccttcctacccgacgaagacgggcgagaacccccctaaccccggcccaactccaccatctcccgccccaccgtcttccgtctgtgacagctacaacgagtgccccgcgagcacgacctgctgctgcatctacgagtacggcaaggagtgcttcgcctggggctgttgcccactcgagggtgctacctgctgcgatgatcactacagctgctgccctcataactatcccatctgcaacacccagcagggaacctgccttgcggccaaggacagtccactgtcagtgaaggctcagaggcgtaccctggccaagcctatcggtgctttctctgtcattgcaactgacggcaagaaaagtagcgcgtaaacatttgcatcaccacaatcctacagccaacggccatggtggttaacttctgcaaatgatcacctggtgacccacgatagaaggcgcagcatggcaatagctgtgctctcaagtatcttctttatagtagatgctcctgtacataatcctaaaatcgggttcggttgttcacagaaccgccacatttgcttttgcatatgtatatgtaaattcagcacattcccaggcagtttggggctgctattgttatatggaattcatcaagaaacaagataagcagatttcttgtc

SEQ ID NO: 12261 - protein, 461 aa, Triticum aestivum
  peptide (1)..(461): Ceres Seq. ID no. 13502953
  misc_feature (130)..(344): Pfam Name: Pfam Description:  Papain family cysteine protease
  misc_feature (1)..(461): NCBI GI NO: 129231 NR Description: Oryzain alpha chain precursor
  misc_feature (1)..(461): NCBI GI NO: 38345906 NR Description: OSJNBb0059K02.8
  misc_feature (1)..(461): NCBI GI NO: 6682829 NR Description: cysteine protease component of protease-inhibitorcomplex
  misc_feature (1)..(426): NCBI GI NO: 10241433 NR Description: putative oryzain alpha precursor
  misc_feature (3)..(461): NCBI GI NO: 7435806 NR Description: cysteine proteinase mir3 (EC 3.4.22.-) - maize
  misc_feature (1)..(445): NCBI GI NO: 14517542 NR Description: F2G19.31/F2G19.31 [Arabidopsis thaliana]
  misc_feature (1)..(445): NCBI GI NO: 18401614 NR Description: cysteine proteinase RD21A [Arabidopsis thaliana]
  misc_feature (12)..(450): NCBI GI NO: 7435791 NR Description: cysteine proteinase (EC 3
  misc_feature (4)..(461): NCBI GI NO: 5777889 NR Description: cysteine protease [Solanum tuberosum]
  misc_feature (4)..(461): NCBI GI NO: 7435801 NR Description: cysteine proteinase (EC 3
MRSSMALLAAALLLLVSLAAAADMSIVSYGERSEEEVRRMYAEWMSEHRRTYNAIGEEERRFEVFRDNLRYIDQHNAAADAGLHSFRLGLNRFADLTNEEYRSTYLGARTKPDRERKLSARYQADDNEELPETVDWRKKGAVAAIKDQGGCGSCWAFSAIAAVEGINQIVTGDMIPLSEQELVDCDTSYNEGCNGGLMDYAFEFIINNGGIDSEEDYPYKERDNRCDANKKNAKVVTIDGYEDVPVNSEKSLQKAVANQPISVAIEAGGRAFQLYKSGIFTGTCGTALDHGVAAVGYGTENGKDYWLVRNSWGTVWGEDGYIRMERNIKASSGKCGIAVEPSYPTKTGENPPNPGPTPPSPAPPSSVCDSYNECPASTTCCCIYEYGKECFAWGCCPLEGATCCDDHYSCCPHNYPICNTQQGTCLAAKDSPLSVKAQRRTLAKPIGAFSVIATDGKKSSA

SEQ ID NO: 12262 - protein, 457 aa, Triticum aestivum
  peptide (1)..(457): Ceres Seq. ID no. 13502954
  misc_feature (126)..(340): Pfam Name: Pfam Description:  Papain family cysteine protease
  misc_feature (1)..(457): NCBI GI NO: 129231 NR Description: Oryzain alpha chain precursor
  misc_feature (1)..(457): NCBI GI NO: 38345906 NR Description: OSJNBb0059K02.8
  misc_feature (1)..(457): NCBI GI NO: 6682829 NR Description: cysteine protease component of protease-inhibitorcomplex
  misc_feature (1)..(422): NCBI GI NO: 10241433 NR Description: putative oryzain alpha precursor
  misc_feature (1)..(457): NCBI GI NO: 7435806 NR Description: cysteine proteinase mir3 (EC 3.4.22.-) - maize
  misc_feature (1)..(441): NCBI GI NO: 14517542 NR Description: F2G19.31/F2G19.31 [Arabidopsis thaliana]
  misc_feature (1)..(441): NCBI GI NO: 18401614 NR Description: cysteine proteinase RD21A [Arabidopsis thaliana]
  misc_feature (8)..(446): NCBI GI NO: 7435791 NR Description: cysteine proteinase (EC 3
  misc_feature (1)..(457): NCBI GI NO: 5777889 NR Description: cysteine protease [Solanum tuberosum]
  misc_feature (1)..(457): NCBI GI NO: 7435801 NR Description: cysteine proteinase (EC 3
MALLAAALLLLVSLAAAADMSIVSYGERSEEEVRRMYAEWMSEHRRTYNAIGEEERRFEVFRDNLRYIDQHNAAADAGLHSFRLGLNRFADLTNEEYRSTYLGARTKPDRERKLSARYQADDNEELPETVDWRKKGAVAAIKDQGGCGSCWAFSAIAAVEGINQIVTGDMIPLSEQELVDCDTSYNEGCNGGLMDYAFEFIINNGGIDSEEDYPYKERDNRCDANKKNAKVVTIDGYEDVPVNSEKSLQKAVANQPISVAIEAGGRAFQLYKSGIFTGTCGTALDHGVAAVGYGTENGKDYWLVRNSWGTVWGEDGYIRMERNIKASSGKCGIAVEPSYPTKTGENPPNPGPTPPSPAPPSSVCDSYNECPASTTCCCIYEYGKECFAWGCCPLEGATCCDDHYSCCPHNYPICNTQQGTCLAAKDSPLSVKAQRRTLAKPIGAFSVIATDGKKSSA

SEQ ID NO: 12263 - protein, 438 aa, Triticum aestivum
  peptide (1)..(438): Ceres Seq. ID no. 13502955
  misc_feature (107)..(321): Pfam Name: Pfam Description:  Papain family cysteine protease
  misc_feature (1)..(438): NCBI GI NO: 129231 NR Description: Oryzain alpha chain precursor
  misc_feature (1)..(438): NCBI GI NO: 38345906 NR Description: OSJNBb0059K02.8
  misc_feature (1)..(438): NCBI GI NO: 6682829 NR Description: cysteine protease component of protease-inhibitorcomplex
  misc_feature (1)..(403): NCBI GI NO: 10241433 NR Description: putative oryzain alpha precursor
  misc_feature (1)..(438): NCBI GI NO: 7435806 NR Description: cysteine proteinase mir3 (EC 3.4.22.-) - maize
  misc_feature (1)..(422): NCBI GI NO: 14517542 NR Description: F2G19.31/F2G19.31 [Arabidopsis thaliana]
  misc_feature (1)..(422): NCBI GI NO: 18401614 NR Description: cysteine proteinase RD21A [Arabidopsis thaliana]
  misc_feature (1)..(427): NCBI GI NO: 7435791 NR Description: cysteine proteinase (EC 3
  misc_feature (1)..(438): NCBI GI NO: 5777889 NR Description: cysteine protease [Solanum tuberosum]
  misc_feature (1)..(438): NCBI GI NO: 7435801 NR Description: cysteine proteinase (EC 3
MSIVSYGERSEEEVRRMYAEWMSEHRRTYNAIGEEERRFEVFRDNLRYIDQHNAAADAGLHSFRLGLNRFADLTNEEYRSTYLGARTKPDRERKLSARYQADDNEELPETVDWRKKGAVAAIKDQGGCGSCWAFSAIAAVEGINQIVTGDMIPLSEQELVDCDTSYNEGCNGGLMDYAFEFIINNGGIDSEEDYPYKERDNRCDANKKNAKVVTIDGYEDVPVNSEKSLQKAVANQPISVAIEAGGRAFQLYKSGIFTGTCGTALDHGVAAVGYGTENGKDYWLVRNSWGTVWGEDGYIRMERNIKASSGKCGIAVEPSYPTKTGENPPNPGPTPPSPAPPSSVCDSYNECPASTTCCCIYEYGKECFAWGCCPLEGATCCDDHYSCCPHNYPICNTQQGTCLAAKDSPLSVKAQRRTLAKPIGAFSVIATDGKKSSA

SEQ ID NO: 12264 - DNA, 1372 bp, Triticum aestivum
  misc_feature (1)..(1372): Ceres Seq. ID no. 13596807
gtgtctggcactggcactgagatggcactgccggtgagctcggccggcctcgtctcgctcctcgtcccctgcctcctctccttcgtcctcctccgcttctccgccctgctggaccccggcgccgccgtgccccgcgtcaagaggtcccctcccctgcccctgcgcttccgccatgacggcgccttcaagatcctccaggtggcggacatgcacttcggcaacggcgccgccacgcgctgccgggacgtggcgccggaggtcggcggcgcgcgctgctccgaccgcaacaccacgcgcttcctgcgccggctcatcgaagcggagaggcccgacctcatagccttcaccggggataacatatttgggggcagtgcaactgatgcagcagaatcactgctcagagcaattagccctgctatagagtacaaggtaccatgggccgccatattaggaaatcatgaccaggaatctacaatgacgcgagaggaactgatgatgttcttgtctttgatggattactcagtatctcaagtaaaccctcctggttttctggtacatgggtttggcaattaccatgttggcatacatgggccatttggatcggggttggtcaatactagtctgcttaacctttacttcctggatagtggggatcgtgaagtggtcgacggaattaaaacttatggatggatcaaagaatctcaacttgcttggctcagtgctacttcaagagaactccagaaaaattcgcttgcccccgcgttatcattcttccacatcccaaatccagaagtccgagagctgtggtacacagattttaagggtgagtatcaggaaggagtggcttgctcattaattaactctggtgtccttgacaccctcgtctccatgggagatgtgaaaggtgtctttcttggtcatgatcatcttaatgatttctgtggcaaccttaacggcatatggttctgttatggcggtggctttggttaccatgcctatggaaggcctcattggccgaggagagctcgggtaatttacactcaactcaagaaagggcagaggtcatggatgggagtcgagtcgatacagacttggaagttgcttgacgacgagaacctttccaagatcgatgagcaggttctctggagagacagtgacaatgactcttaccagagtgtccacttgtaagctccggacactaaaagatctctttgtatgttgtaaacatatttgatcaattacaatacatcaaattggtaggtttgatcaaattagtcatggttggccatggaccaaattagacacctgtatatgatactgctgtatcttgttcatatgcaaatcccttgcttgggttgttgagaccagttcc

SEQ ID NO: 12265 - protein, 395 aa, Triticum aestivum
  peptide (1)..(395): Ceres Seq. ID no. 15221975
  misc_feature (62)..(311): Pfam Name: Pfam Description:  Calcineurin-like phosphoesterase
  misc_feature (21)..(387): NCBI GI NO: 15242042 NR Description: Calcineurin-like phosphoesterase family
  misc_feature (54)..(387): NCBI GI NO: 15242654 NR Description: calcineurin-like phosphoesterase family
  misc_feature (54)..(385): NCBI GI NO: 7208777 NR Description: putative PTS protein [Cicer arietinum]
  misc_feature (54)..(394): NCBI GI NO: 15226455 NR Description: calcineurin-like phosphoesterase family
  misc_feature (54)..(382): NCBI GI NO: 25763519 NR Description: probable phosphoesterase (EC 3
  misc_feature (54)..(382): NCBI GI NO: 30267807 NR Description: hypothetical protein [Arabidopsis thaliana]
  misc_feature (54)..(329): NCBI GI NO: 30267809 NR Description: hypothetical protein [Arabidopsis thaliana]
  misc_feature (46)..(381): NCBI GI NO: 40740622 NR Description: hypothetical protein AN3604.2
  misc_feature (59)..(393): NCBI GI NO: 6323393 NR Description: Dose-Dependent Cell cycle Regulator; Ylr361cp
  misc_feature (97)..(345): NCBI GI NO: 15896061 NR Description: Predicted phosphohydrolase, Icc family
VSGTGTEMALPVSSAGLVSLLVPCLLSFVLLRFSALLDPGAAVPRVKRSPPLPLRFRHDGAFKILQVADMHFGNGAATRCRDVAPEVGGARCSDRNTTRFLRRLIEAERPDLIAFTGDNIFGGSATDAAESLLRAISPAIEYKVPWAAILGNHDQESTMTREELMMFLSLMDYSVSQVNPPGFLVHGFGNYHVGIHGPFGSGLVNTSLLNLYFLDSGDREVVDGIKTYGWIKESQLAWLSATSRELQKNSLAPALSFFHIPNPEVRELWYTDFKGEYQEGVACSLINSGVLDTLVSMGDVKGVFLGHDHLNDFCGNLNGIWFCYGGGFGYHAYGRPHWPRRARVIYTQLKKGQRSWMGVESIQTWKLLDDENLSKIDEQVLWRDSDNDSYQSVHL

SEQ ID NO: 12266 - protein, 388 aa, Triticum aestivum
  peptide (1)..(388): Ceres Seq. ID no. 15221976
  misc_feature (55)..(304): Pfam Name: Pfam Description:  Calcineurin-like phosphoesterase
  misc_feature (14)..(380): NCBI GI NO: 15242042 NR Description: Calcineurin-like phosphoesterase family
  misc_feature (47)..(380): NCBI GI NO: 15242654 NR Description: calcineurin-like phosphoesterase family
  misc_feature (47)..(378): NCBI GI NO: 7208777 NR Description: putative PTS protein [Cicer arietinum]
  misc_feature (47)..(387): NCBI GI NO: 15226455 NR Description: calcineurin-like phosphoesterase family
  misc_feature (47)..(375): NCBI GI NO: 25763519 NR Description: probable phosphoesterase (EC 3
  misc_feature (47)..(375): NCBI GI NO: 30267807 NR Description: hypothetical protein [Arabidopsis thaliana]
  misc_feature (47)..(322): NCBI GI NO: 30267809 NR Description: hypothetical protein [Arabidopsis thaliana]
  misc_feature (39)..(374): NCBI GI NO: 40740622 NR Description: hypothetical protein AN3604.2
  misc_feature (52)..(386): NCBI GI NO: 6323393 NR Description: Dose-Dependent Cell cycle Regulator; Ylr361cp
  misc_feature (90)..(338): NCBI GI NO: 15896061 NR Description: Predicted phosphohydrolase, Icc family
MALPVSSAGLVSLLVPCLLSFVLLRFSALLDPGAAVPRVKRSPPLPLRFRHDGAFKILQVADMHFGNGAATRCRDVAPEVGGARCSDRNTTRFLRRLIEAERPDLIAFTGDNIFGGSATDAAESLLRAISPAIEYKVPWAAILGNHDQESTMTREELMMFLSLMDYSVSQVNPPGFLVHGFGNYHVGIHGPFGSGLVNTSLLNLYFLDSGDREVVDGIKTYGWIKESQLAWLSATSRELQKNSLAPALSFFHIPNPEVRELWYTDFKGEYQEGVACSLINSGVLDTLVSMGDVKGVFLGHDHLNDFCGNLNGIWFCYGGGFGYHAYGRPHWPRRARVIYTQLKKGQRSWMGVESIQTWKLLDDENLSKIDEQVLWRDSDNDSYQSVHL

SEQ ID NO: 12267 - protein, 326 aa, Triticum aestivum
  peptide (1)..(326): Ceres Seq. ID no. 15221977
  misc_feature (1)..(242): Pfam Name: Pfam Description:  Calcineurin-like phosphoesterase
  misc_feature (1)..(318): NCBI GI NO: 15242042 NR Description: Calcineurin-like phosphoesterase family
  misc_feature (1)..(318): NCBI GI NO: 15242654 NR Description: calcineurin-like phosphoesterase family
  misc_feature (1)..(316): NCBI GI NO: 7208777 NR Description: putative PTS protein [Cicer arietinum]
  misc_feature (1)..(325): NCBI GI NO: 15226455 NR Description: calcineurin-like phosphoesterase family
  misc_feature (1)..(313): NCBI GI NO: 25763519 NR Description: probable phosphoesterase (EC 3
  misc_feature (1)..(313): NCBI GI NO: 30267807 NR Description: hypothetical protein [Arabidopsis thaliana]
  misc_feature (1)..(260): NCBI GI NO: 30267809 NR Description: hypothetical protein [Arabidopsis thaliana]
  misc_feature (1)..(312): NCBI GI NO: 40740622 NR Description: hypothetical protein AN3604.2
  misc_feature (1)..(324): NCBI GI NO: 6323393 NR Description: Dose-Dependent Cell cycle Regulator; Ylr361cp
  misc_feature (28)..(276): NCBI GI NO: 15896061 NR Description: Predicted phosphohydrolase, Icc family
MHFGNGAATRCRDVAPEVGGARCSDRNTTRFLRRLIEAERPDLIAFTGDNIFGGSATDAAESLLRAISPAIEYKVPWAAILGNHDQESTMTREELMMFLSLMDYSVSQVNPPGFLVHGFGNYHVGIHGPFGSGLVNTSLLNLYFLDSGDREVVDGIKTYGWIKESQLAWLSATSRELQKNSLAPALSFFHIPNPEVRELWYTDFKGEYQEGVACSLINSGVLDTLVSMGDVKGVFLGHDHLNDFCGNLNGIWFCYGGGFGYHAYGRPHWPRRARVIYTQLKKGQRSWMGVESIQTWKLLDDENLSKIDEQVLWRDSDNDSYQSVHL

SEQ ID NO: 12268 - DNA, 630 bp, Triticum aestivum
  misc_feature (1)..(630): Ceres Seq. ID no. 13596513
  misc_feature (578)..(578): n is a, c, t, g, unknown, or other
  misc_feature (571)..(571): n is a, c, t, g, unknown, or other
  misc_feature (580)..(580): n is a, c, t, g, unknown, or other
  misc_feature (569)..(569): n is a, c, t, g, unknown, or other
  misc_feature (568)..(568): n is a, c, t, g, unknown, or other
aacatttcacatgccatctagcatcactcactgcaatcacactctatcactagctagctcagctgccctacagtgcacgcggattaactagccatggcagctcacgactcggacctcggcggcgccgtccacgtcctcctgctcccgtacccgagccagggccacatcaaccccatcctccagttcggcaagcgcctcgcctcccacgccggcgtccgctgcacgctcgccgtcacgcgctacctcctcggccagggccgggacccgtgcccgggcgccgtgcacctcgccgagatctccgacggctttgaccgcggcggcttcgccgaggccgacggcgacgtcgcggcgtacctcgcccggctggagtccgtcgggtcacgcactgtcgacgagctgctgcggtccgaggcggagaagggccggcccgtgcgcgccgtggtgtacgacgcgttcctgcagccgtgggcgccccgcgtggcccggcagcacggcgccgcgtgcgcgtccctcttcacgcaggcgcccgcggtgaacgtggcgtacgcgcacgccggtgctgggcgcnngnccgttcngntcctcgcgggcacggtgccgccggagcttcccgggctgcctgccgggctc

SEQ ID NO: 12269 - protein, 179 aa, Triticum aestivum
  peptide (1)..(179): Ceres Seq. ID no. 13596514
  misc_feature (13)..(175): Pfam Name: Pfam Description:  UDP-glucoronosyl and UDP-glucosyl transferase
  misc_feature (2)..(166): NCBI GI NO: 38345013 NR Description: OSJNBa0052O21.16
  misc_feature (1)..(158): NCBI GI NO: 38344999 NR Description: OSJNBa0052O21.2
  misc_feature (1)..(158): NCBI GI NO: 38345011 NR Description: OSJNBa0052O21.14
  misc_feature (5)..(177): NCBI GI NO: 38344998 NR Description: OSJNBa0052O21.1
  misc_feature (9)..(158): NCBI GI NO: 38345012 NR Description: OSJNBa0052O21.15
  misc_feature (5)..(158): NCBI GI NO: 38345000 NR Description: OSJNBa0052O21.3
  misc_feature (13)..(175): NCBI GI NO: 7385017 NR Description: UDP-glucose:salicylic acid glucosyltransferase
  misc_feature (13)..(151): NCBI GI NO: 15224368 NR Description: glycosyltransferase family [Arabidopsis thaliana]
  misc_feature (13)..(148): NCBI GI NO: 15224372 NR Description: glycosyltransferase family [Arabidopsis thaliana]
  misc_feature (13)..(161): NCBI GI NO: 28273402 NR Description: putative Glu synthetase
  misc_feature (159)..(159): Xaa is any aa, unknown or other
  misc_feature (160)..(160): Xaa is any aa, unknown or other
  misc_feature (162)..(162): Xaa is any aa, unknown or other
  misc_feature (163)..(163): Xaa is any aa, unknown or other
MAAHDSDLGGAVHVLLLPYPSQGHINPILQFGKRLASHAGVRCTLAVTRYLLGQGRDPCPGAVHLAEISDGFDRGGFAEADGDVAAYLARLESVGSRTVDELLRSEAEKGRPVRAVVYDAFLQPWAPRVARQHGAACASLFTQAPAVNVAYAHAGAGRXXVXXLAGTVPPELPGLPAGL

SEQ ID NO: 12270 - DNA, 1286 bp, Triticum aestivum
  misc_feature (1)..(1286): Ceres Seq. ID no. 12625255
ggtccgtagttcacagccgaggtccgtaaacccttggatttcctccatctccacaccagtgcggctccagtccgtccgagaccggcatggccaccacggccgccgccgccgccgcggtcccagacgctattccagccgcggcgcccgcggccccgtccgcgcaaccgcatcccgttccagacaaatgtacgaattataaaaaccatttgcaagagtggactcaaaggaatgatcagaagttgccagcttataatactgagtcgaaacgtgaccatcatcgacttgagttcagaagcaccgttgaggtgggtggcgagcggtttcaatcagctcgcaatcatagccgccgcaaggatgcggagcaggatgctgccagagtggcatatgaaatcttggtgacaaagacagtaaatgatgatgatcatacagatgcgcttgggctgattgatcagggcgtgctgttctgcaaatcaattctccatgaatttgctgttaagacaaaagctgaacagcccacttactccgcagatcatccagaaggggtatcacccatgcccctgtttgtttcatctgtgttgtttgctgggaacacttatactggtgaagctgcaacatgtaagaaggacgcagagcagaaggctgctcgtgttgcagtcaaatctattttagctacaaagaacacttgtatgcatcaaattgtcagatcaaagaaagagcttatcattgccatcacatcttctgggttcaacaaagaaagaggagttgtaagccaggaaaactgcaatgctccaacaaatgcaattactcctataaaatttgtgcctgctggtgaagctgctggtctaactgcggatcaaggagcgaccaacgttcctgaagatgatccatgtgcacaagctgtatctggctcggaaaagcgcaagaagcacagaaaggtttgatgagaagactctcacccatcgtaacatgagattttgtcgtctatggtggtggaagtgaaggggctgctggttatgtggcgctgtgtatgacatgtttttggatcattgctaggatgcttgttggaatgacgttgactaaggcatccactgtccgtatgtttccgtgattagcttagcttggtatcaggaactcaggtttctatcgaagtggcttcgctctgtcgggaactctggatctctgtgatgtaacttgtcgttcgtcgtaccgtttccaacctgtgtttgtgtcagatcagatctcttgaggacgtgtttggttcaagcaatattacccatcattgccgt

SEQ ID NO: 12271 - protein, 284 aa, Triticum aestivum
  peptide (1)..(284): Ceres Seq. ID no. 12625256
  misc_feature (128)..(193): Pfam Name: Pfam Description:  Double-stranded RNA binding motif
  misc_feature (2)..(246): NCBI GI NO: 40253891 NR Description: unknown protein
  misc_feature (34)..(193): NCBI GI NO: 8346542 NR Description: BcpLH protein [Brassica rapa]
  misc_feature (34)..(193): NCBI GI NO: 27262829 NR Description: dsRNA-binding protein [Brassica rapa subsp. rapa]
  misc_feature (34)..(193): NCBI GI NO: 9967526 NR Description: RBP2 protein [Brassica oleracea var. capitata]
  misc_feature (34)..(193): NCBI GI NO: 27262831 NR Description: dsRNA-binding protein
  misc_feature (34)..(193): NCBI GI NO: 27262835 NR Description: dsRNA-binding protein
  misc_feature (34)..(193): NCBI GI NO: 27262837 NR Description: dsRNA-binding protein
  misc_feature (34)..(193): NCBI GI NO: 27262833 NR Description: dsRNA-binding protein
  misc_feature (37)..(244): NCBI GI NO: 18401724 NR Description: expressed protein; protein id: At2g28380
  misc_feature (37)..(193): NCBI GI NO: 37535422 NR Description: putative extensin
MATTAAAAAAVPDAIPAAAPAAPSAQPHPVPDKCTNYKNHLQEWTQRNDQKLPAYNTESKRDHHRLEFRSTVEVGGERFQSARNHSRRKDAEQDAARVAYEILVTKTVNDDDHTDALGLIDQGVLFCKSILHEFAVKTKAEQPTYSADHPEGVSPMPLFVSSVLFAGNTYTGEAATCKKDAEQKAARVAVKSILATKNTCMHQIVRSKKELIIAITSSGFNKERGVVSQENCNAPTNAITPIKFVPAGEAAGLTADQGATNVPEDDPCAQAVSGSEKRKKHRKV

SEQ ID NO: 12272 - DNA, 816 bp, Triticum aestivum
  misc_feature (1)..(816): Ceres Seq. ID no. 13596812
cctagaacattctaatcgaaaaacacacccaacccccccacccccccaccccctcccccagcagccgccgcaaaagagagcaggaagcgaggaggaactttacaagatagggcatcgaatccgcctccttcttcctcgcgcggtcgtctccgaggcctccgacatggcgaacgcggcatcgggcatggctgtggacgacgaatgcaagctcaagttcctggagctgaaggcgaagcgaacccaccgcttcatcatctacaagatagacgacaagaagaagatggttgttgtggagaaagtcggtgagcctgccctgaactatgaggactttgctgccagcctccccaccaatgaatgcagatacgcgatattcgactatgactttgtcaccgaggagaactgccaaaagagcaagatattcttcgtcgcatggtctcctgacaccgcacgcgtgaggagcaagatgatctacgcaagctccaaggagaggttcaagagggagctcgacggcatccaggtggagctgcaggcgacagacccgaccgaggtcggcttcgatgtcatccaaggccgtgccaactgagcaccatggctgtgctgctgcttaccttaagtatgagcctctgatgaggatttagcgtgctcgccgaggctggtcatgagctgtttaccatgaggcaattgtgatttgagttgccagtatgtaccacctaaggaagatgtaagctatgactggcgcgacgacaaatgtatcctttctggttgttgattcgtggatcctgatatccccttcttgcctgctaaagatcagttgcg

SEQ ID NO: 12273 - protein, 193 aa, Triticum aestivum
  peptide (1)..(193): Ceres Seq. ID no. 13596813
  misc_feature (66)..(193): Pfam Name: Pfam Description:  Cofilin/tropomyosin-type actin-binding protein
  misc_feature (55)..(193): NCBI GI NO: 17366768 NR Description: Actin-depolymerizing factor 1 (ADF 1)
  misc_feature (55)..(193): NCBI GI NO: 30697300 NR Description: actin depolymerizing factor 4 - like protein
  misc_feature (55)..(193): NCBI GI NO: 38564721 NR Description: putative actin-depolymerizing factor 2
  misc_feature (55)..(193): NCBI GI NO: 4185511 NR Description: actin depolymerizing factor 4
  misc_feature (55)..(193): NCBI GI NO: 15231309 NR Description: actin depolymerizing factor 1 (ADF1)
  misc_feature (55)..(192): NCBI GI NO: 17366765 NR Description: Actin-depolymerizing factor 2 (ADF 2)
  misc_feature (62)..(193): NCBI GI NO: 30697303 NR Description: actin depolymerizing factor 4 - like protein
  misc_feature (55)..(193): NCBI GI NO: 18408116 NR Description: actin depolymerizing factor 2 (ADF2)
  misc_feature (55)..(193): NCBI GI NO: 30697295 NR Description: actin depolymerizing factor 3 - like protein
  misc_feature (55)..(193): NCBI GI NO: 15223471 NR Description: actin depolymerizing factor -related
LEHSNRKTHPTPPPPHPLPQQPPQKRAGSEEELYKIGHRIRLLLPRAVVSEASDMANAASGMAVDDECKLKFLELKAKRTHRFIIYKIDDKKKMVVVEKVGEPALNYEDFAASLPTNECRYAIFDYDFVTEENCQKSKIFFVAWSPDTARVRSKMIYASSKERFKRELDGIQVELQATDPTEVGFDVIQGRAN

SEQ ID NO: 12274 - protein, 139 aa, Triticum aestivum
  peptide (1)..(139): Ceres Seq. ID no. 13596814
  misc_feature (12)..(139): Pfam Name: Pfam Description:  Cofilin/tropomyosin-type actin-binding protein
  misc_feature (1)..(139): NCBI GI NO: 17366768 NR Description: Actin-depolymerizing factor 1 (ADF 1)
  misc_feature (1)..(139): NCBI GI NO: 30697300 NR Description: actin depolymerizing factor 4 - like protein
  misc_feature (1)..(139): NCBI GI NO: 38564721 NR Description: putative actin-depolymerizing factor 2
  misc_feature (1)..(139): NCBI GI NO: 4185511 NR Description: actin depolymerizing factor 4
  misc_feature (1)..(139): NCBI GI NO: 15231309 NR Description: actin depolymerizing factor 1 (ADF1)
  misc_feature (1)..(138): NCBI GI NO: 17366765 NR Description: Actin-depolymerizing factor 2 (ADF 2)
  misc_feature (8)..(139): NCBI GI NO: 30697303 NR Description: actin depolymerizing factor 4 - like protein
  misc_feature (1)..(139): NCBI GI NO: 18408116 NR Description: actin depolymerizing factor 2 (ADF2)
  misc_feature (1)..(139): NCBI GI NO: 30697295 NR Description: actin depolymerizing factor 3 - like protein
  misc_feature (1)..(139): NCBI GI NO: 15223471 NR Description: actin depolymerizing factor -related
MANAASGMAVDDECKLKFLELKAKRTHRFIIYKIDDKKKMVVVEKVGEPALNYEDFAASLPTNECRYAIFDYDFVTEENCQKSKIFFVAWSPDTARVRSKMIYASSKERFKRELDGIQVELQATDPTEVGFDVIQGRAN

SEQ ID NO: 12275 - protein, 132 aa, Triticum aestivum
  peptide (1)..(132): Ceres Seq. ID no. 13596815
  misc_feature (5)..(132): Pfam Name: Pfam Description:  Cofilin/tropomyosin-type actin-binding protein
  misc_feature (1)..(132): NCBI GI NO: 17366768 NR Description: Actin-depolymerizing factor 1 (ADF 1)
  misc_feature (1)..(132): NCBI GI NO: 30697300 NR Description: actin depolymerizing factor 4 - like protein
  misc_feature (1)..(132): NCBI GI NO: 38564721 NR Description: putative actin-depolymerizing factor 2
  misc_feature (1)..(132): NCBI GI NO: 4185511 NR Description: actin depolymerizing factor 4
  misc_feature (1)..(132): NCBI GI NO: 15231309 NR Description: actin depolymerizing factor 1 (ADF1)
  misc_feature (1)..(131): NCBI GI NO: 17366765 NR Description: Actin-depolymerizing factor 2 (ADF 2)
  misc_feature (1)..(132): NCBI GI NO: 30697303 NR Description: actin depolymerizing factor 4 - like protein
  misc_feature (1)..(132): NCBI GI NO: 18408116 NR Description: actin depolymerizing factor 2 (ADF2)
  misc_feature (1)..(132): NCBI GI NO: 30697295 NR Description: actin depolymerizing factor 3 - like protein
  misc_feature (1)..(132): NCBI GI NO: 15223471 NR Description: actin depolymerizing factor -related
MAVDDECKLKFLELKAKRTHRFIIYKIDDKKKMVVVEKVGEPALNYEDFAASLPTNECRYAIFDYDFVTEENCQKSKIFFVAWSPDTARVRSKMIYASSKERFKRELDGIQVELQATDPTEVGFDVIQGRAN

SEQ ID NO: 12276 - DNA, 1258 bp, Triticum aestivum
  misc_feature (1)..(1258): Ceres Seq. ID no. 13596816
acacaccagctcctagtagcagtgggtagcactggagagcagcagatacagacagggggctagctagcagcaatggccaggcaggatgttgcttccatgtttgccgttgctctcttcatcggagcattcgtttctgttcctacaagtgtgcaatccatcggcgtgtgctacggcgtgatcgccaacaacctcccgccggcgaacgacgtggtgcagctctacaggtccaagggcatcaccggcatgcgcatctacttcgccgacgccaaggccctctccgcgctccgtaactccggcatcagcctcatcctcgacgtcggcaacgaccagctcgccagcctcgccgccagcacctccaacgcggcgtcctgggtgcagaaaaacgtccggccatactacccggccgtgaacatcaagtacatcgccgccggtaacgaggtccagggaggcgccacccagagcatcgtgccggccatgcggaacctcaacgcggctctctccgccgctgggctcggcgccatcaaggtgtccacctccatccggttcgacgaggtggccaagtccttcccgccctccgagggcgtgttcgcgaatgcctacatgacggacgtggcccggctcctggcgagcaccggcgcgccgctgctggccaacgtgtacccctacttcgcctacaagcgcgacccgcagaacatcaagctcaactacgccacgttccggccgggacccacggtgcgggacgacaagaacgggctgacctacacgtgcctgttcgacgcgatggtggacgccgtggtcgccgccctggagaaggccggggcgccgggggtgagggtggtggtgtcggagagcgggtggccgtcggcgagcgggttcgctgcgacggcggacaacgcgagagcctacaaccagggactgatcgaccacgtcggcgggggcacgcccaagaggcgtggcgcgctggagacgtacatcttcggcatgttcaacgaaaacttcaagagaggggagctcgtggagaagcacttcgggctgttcaacccggacaagtcgccggcgtaccccatccagttcaagtgatctagtcttctagtctagtcgagctagcttacacgtgtacgtacccaggtcttctagtctagtaagtacacacgttcgacacgtactccatgggagagggaagccaatgacttcctgttcctggtggtgatacatcatcatgttatgaataaagagagggaagcagttatgaatttgt

SEQ ID NO: 12277 - protein, 335 aa, Triticum aestivum
  peptide (1)..(335): Ceres Seq. ID no. 13596817
  misc_feature (29)..(334): Pfam Name: Pfam Description:  Glycosyl hydrolases family 17
  misc_feature (1)..(334): NCBI GI NO: 167010 NR Description: (1-3)-beta-glucanase
  misc_feature (1)..(335): NCBI GI NO: 3757682 NR Description: glucan endo-1,3-beta-D-glucosidase
  misc_feature (1)..(334): NCBI GI NO: 119003 NR Description: Glucan endo-1,3-beta-glucosidase GII precursor
  misc_feature (1)..(334): NCBI GI NO: 21693553 NR Description: beta-1,3-glucanase II
  misc_feature (1)..(334): NCBI GI NO: 3068599 NR Description: beta-1,3-glucanase 2 [Hordeum vulgare]
  misc_feature (28)..(335): NCBI GI NO: 3037080 NR Description: glucan endo-1,3-beta-glucosidase isoenzyme I
  misc_feature (28)..(335): NCBI GI NO: 585075 NR Description: GLUCAN ENDO-1,3-BETA-GLUCOSIDASE GI ((1-
  misc_feature (29)..(334): NCBI GI NO: 809429 NR Description: Chain A, 1,3-Beta-Glucanase (E
  misc_feature (29)..(334): NCBI GI NO: 226804 NR Description: endo-1,3-beta-glucanase
  misc_feature (1)..(334): NCBI GI NO: 30692089 NR Description: 1,3-beta glucanase [Avena sativa]
MARQDVASMFAVALFIGAFVSVPTSVQSIGVCYGVIANNLPPANDVVQLYRSKGITGMRIYFADAKALSALRNSGISLILDVGNDQLASLAASTSNAASWVQKNVRPYYPAVNIKYIAAGNEVQGGATQSIVPAMRNLNAALSAAGLGAIKVSTSIRFDEVAKSFPPSEGVFANAYMTDVARLLASTGAPLLANVYPYFAYKRDPQNIKLNYATFRPGPTVRDDKNGLTYTCLFDAMVDAVVAALEKAGAPGVRVVVSESGWPSASGFAATADNARAYNQGLIDHVGGGTPKRRGALETYIFGMFNENFKRGELVEKHFGLFNPDKSPAYPIQFK

SEQ ID NO: 12278 - protein, 327 aa, Triticum aestivum
  peptide (1)..(327): Ceres Seq. ID no. 13596818
  misc_feature (21)..(326): Pfam Name: Pfam Description:  Glycosyl hydrolases family 17
  misc_feature (1)..(326): NCBI GI NO: 167010 NR Description: (1-3)-beta-glucanase
  misc_feature (1)..(327): NCBI GI NO: 3757682 NR Description: glucan endo-1,3-beta-D-glucosidase
  misc_feature (1)..(326): NCBI GI NO: 119003 NR Description: Glucan endo-1,3-beta-glucosidase GII precursor
  misc_feature (1)..(326): NCBI GI NO: 21693553 NR Description: beta-1,3-glucanase II
  misc_feature (1)..(326): NCBI GI NO: 3068599 NR Description: beta-1,3-glucanase 2 [Hordeum vulgare]
  misc_feature (20)..(327): NCBI GI NO: 3037080 NR Description: glucan endo-1,3-beta-glucosidase isoenzyme I
  misc_feature (20)..(327): NCBI GI NO: 585075 NR Description: GLUCAN ENDO-1,3-BETA-GLUCOSIDASE GI ((1-
  misc_feature (21)..(326): NCBI GI NO: 809429 NR Description: Chain A, 1,3-Beta-Glucanase (E
  misc_feature (21)..(326): NCBI GI NO: 226804 NR Description: endo-1,3-beta-glucanase
  misc_feature (1)..(326): NCBI GI NO: 30692089 NR Description: 1,3-beta glucanase [Avena sativa]
MFAVALFIGAFVSVPTSVQSIGVCYGVIANNLPPANDVVQLYRSKGITGMRIYFADAKALSALRNSGISLILDVGNDQLASLAASTSNAASWVQKNVRPYYPAVNIKYIAAGNEVQGGATQSIVPAMRNLNAALSAAGLGAIKVSTSIRFDEVAKSFPPSEGVFANAYMTDVARLLASTGAPLLANVYPYFAYKRDPQNIKLNYATFRPGPTVRDDKNGLTYTCLFDAMVDAVVAALEKAGAPGVRVVVSESGWPSASGFAATADNARAYNQGLIDHVGGGTPKRRGALETYIFGMFNENFKRGELVEKHFGLFNPDKSPAYPIQFK

SEQ ID NO: 12279 - protein, 278 aa, Triticum aestivum
  peptide (1)..(278): Ceres Seq. ID no. 13596819
  misc_feature (1)..(277): Pfam Name: Pfam Description:  Glycosyl hydrolases family 17
  misc_feature (1)..(277): NCBI GI NO: 167010 NR Description: (1-3)-beta-glucanase
  misc_feature (1)..(278): NCBI GI NO: 3757682 NR Description: glucan endo-1,3-beta-D-glucosidase
  misc_feature (1)..(277): NCBI GI NO: 119003 NR Description: Glucan endo-1,3-beta-glucosidase GII precursor
  misc_feature (1)..(277): NCBI GI NO: 21693553 NR Description: beta-1,3-glucanase II
  misc_feature (1)..(277): NCBI GI NO: 3068599 NR Description: beta-1,3-glucanase 2 [Hordeum vulgare]
  misc_feature (1)..(278): NCBI GI NO: 3037080 NR Description: glucan endo-1,3-beta-glucosidase isoenzyme I
  misc_feature (1)..(278): NCBI GI NO: 585075 NR Description: GLUCAN ENDO-1,3-BETA-GLUCOSIDASE GI ((1-
  misc_feature (1)..(277): NCBI GI NO: 809429 NR Description: Chain A, 1,3-Beta-Glucanase (E
  misc_feature (1)..(277): NCBI GI NO: 226804 NR Description: endo-1,3-beta-glucanase
  misc_feature (1)..(277): NCBI GI NO: 30692089 NR Description: 1,3-beta glucanase [Avena sativa]
MRIYFADAKALSALRNSGISLILDVGNDQLASLAASTSNAASWVQKNVRPYYPAVNIKYIAAGNEVQGGATQSIVPAMRNLNAALSAAGLGAIKVSTSIRFDEVAKSFPPSEGVFANAYMTDVARLLASTGAPLLANVYPYFAYKRDPQNIKLNYATFRPGPTVRDDKNGLTYTCLFDAMVDAVVAALEKAGAPGVRVVVSESGWPSASGFAATADNARAYNQGLIDHVGGGTPKRRGALETYIFGMFNENFKRGELVEKHFGLFNPDKSPAYPIQFK

SEQ ID NO: 12280 - DNA, 1499 bp, Triticum aestivum
  misc_feature (1)..(1499): Ceres Seq. ID no. 15226216
aggagcattcattcaggcaagcagacaatcaccgcgacagacgacgagcagcagcacacacccataaaccagaagcggccgtccaagccaaggcgcccacaggacgccaccaagaactcggagccaccttccaatcgaccaagccccctccatccggccaccggatcgggcccgccgatctctcgagctccccggccgccccctcccgcggcggcgtgcaatgggggccgccgccgaggacgccgtcaggcagctcggcatcctcatggatcaagtggacgcgccgctgaggaggacgttccagaatgtgcaccaaggccaccctagagaaacaatgttgcgctttctcaaggctagagaatggaacgtttccaaggctcataaaatgcttgtagattctttgaattggaggattgaaaatgaaattgatagtgtattggagagacctatactcccagtagatttatacagatcaatacgtgattcacaacttgttggactctcaggatacaccaaggagggtcttccagtttttggcattggtgttggtcagagcacatacgacaaagcttcggtgcactactatgtgcaatctcatattcagattaacgaataccgtgatcgcataattttgcccatgttgacggaaaagtttggacgcccgatcaccacttgcgttaaagttctcgacatgactggtttaaagttgtcagcactgagccaaatgaagatgctgagttcaatatcaactgttgatgatctgaactaccctgagaagtcagagacatattacatagttaatgttccatatatattctctgcatgctggaaggttgtgaagcccctattgcaggagaggacaaaaaagaaggttaaagttttgagtggttgtgggagagatgaacttctaaagattatggactactcagctctcccccatttctgccgacgagagggatcaggctcatccaagcattcatcttccaacgccgacgattgcttctcccctgaccaccctttccacaaagagctctacgagctcaccaaccagcaatcgtcgcacaaggagctcctcaagatgggatcattgcatgtgagcatcccggagcctgacccaaacgacgcgaagatcgtcgaggtgatccaggccgagttccacaagatgggggagcagaacggatcgaccaacgggcacaaggtctgatgccgcgccaccaccgaagacggccatctgcatgcggagcaccttaaccaatgcaagcgacctccgattaaactgatgatttaacctgtccatgttggttggctccctcgggacccctggggggatatagcagcgaaggctccgtgatgcatagggtgacgccggcctgggatcatagttggaagagatgaaccggacagtgtatatccattagcatagaacctgcatatgttaaactggtactataacaagatccatggatgatggatgtttattataacagcttgtaagcttc

SEQ ID NO: 12281 - protein, 327 aa, Triticum aestivum
  peptide (1)..(327): Ceres Seq. ID no. 15226217
  misc_feature (135)..(239): Pfam Name: Pfam Description:  CRAL/TRIO domain
  misc_feature (1)..(320): NCBI GI NO: 7488694 NR Description: phosphatidylinositol-phosphatidylcholine transfer protein SEC14 homolog Ssh1
  misc_feature (1)..(316): NCBI GI NO: 15222786 NR Description: sec14 cytosolic factor, putative
  misc_feature (1)..(320): NCBI GI NO: 15238794 NR Description: sec14 cytosolic factor, putative
  misc_feature (28)..(316): NCBI GI NO: 25295905 NR Description: protein F14J16.8 [imported] - Arabidopsis thaliana
  misc_feature (1)..(221): NCBI GI NO: 14532536 NR Description: AT5g47730/MCA23_5 [Arabidopsis thaliana]
  misc_feature (5)..(241): NCBI GI NO: 25412048 NR Description: hypothetical protein At2g21540
  misc_feature (5)..(241): NCBI GI NO: 15234966 NR Description: SEC14 - like protein [Arabidopsis thaliana]
  misc_feature (23)..(245): NCBI GI NO: 4506867 NR Description: SEC14 (S. cerevisiae)-like 1 [Homo sapiens]
  misc_feature (5)..(241): NCBI GI NO: 18399733 NR Description: phosphatidylinositol phophatidylcholine transfer protein -related
  misc_feature (23)..(245): NCBI GI NO: 31873398 NR Description: hypothetical protein [Homo sapiens]
MGAAAEDAVRQLGILMDQVDAPLRRTFQNVHQGHPRETMLRFLKAREWNVSKAHKMLVDSLNWRIENEIDSVLERPILPVDLYRSIRDSQLVGLSGYTKEGLPVFGIGVGQSTYDKASVHYYVQSHIQINEYRDRIILPMLTEKFGRPITTCVKVLDMTGLKLSALSQMKMLSSISTVDDLNYPEKSETYYIVNVPYIFSACWKVVKPLLQERTKKKVKVLSGCGRDELLKIMDYSALPHFCRREGSGSSKHSSSNADDCFSPDHPFHKELYELTNQQSSHKELLKMGSLHVSIPEPDPNDAKIVEVIQAEFHKMGEQNGSTNGHKV

SEQ ID NO: 12282 - protein, 312 aa, Triticum aestivum
  peptide (1)..(312): Ceres Seq. ID no. 15226218
  misc_feature (120)..(224): Pfam Name: Pfam Description:  CRAL/TRIO domain
  misc_feature (1)..(305): NCBI GI NO: 7488694 NR Description: phosphatidylinositol-phosphatidylcholine transfer protein SEC14 homolog Ssh1
  misc_feature (1)..(301): NCBI GI NO: 15222786 NR Description: sec14 cytosolic factor, putative
  misc_feature (1)..(305): NCBI GI NO: 15238794 NR Description: sec14 cytosolic factor, putative
  misc_feature (13)..(301): NCBI GI NO: 25295905 NR Description: protein F14J16.8 [imported] - Arabidopsis thaliana
  misc_feature (1)..(206): NCBI GI NO: 14532536 NR Description: AT5g47730/MCA23_5 [Arabidopsis thaliana]
  misc_feature (1)..(226): NCBI GI NO: 25412048 NR Description: hypothetical protein At2g21540
  misc_feature (1)..(226): NCBI GI NO: 15234966 NR Description: SEC14 - like protein [Arabidopsis thaliana]
  misc_feature (8)..(230): NCBI GI NO: 4506867 NR Description: SEC14 (S. cerevisiae)-like 1 [Homo sapiens]
  misc_feature (1)..(226): NCBI GI NO: 18399733 NR Description: phosphatidylinositol phophatidylcholine transfer protein -related
  misc_feature (8)..(230): NCBI GI NO: 31873398 NR Description: hypothetical protein [Homo sapiens]
MDQVDAPLRRTFQNVHQGHPRETMLRFLKAREWNVSKAHKMLVDSLNWRIENEIDSVLERPILPVDLYRSIRDSQLVGLSGYTKEGLPVFGIGVGQSTYDKASVHYYVQSHIQINEYRDRIILPMLTEKFGRPITTCVKVLDMTGLKLSALSQMKMLSSISTVDDLNYPEKSETYYIVNVPYIFSACWKVVKPLLQERTKKKVKVLSGCGRDELLKIMDYSALPHFCRREGSGSSKHSSSNADDCFSPDHPFHKELYELTNQQSSHKELLKMGSLHVSIPEPDPNDAKIVEVIQAEFHKMGEQNGSTNGHKV

SEQ ID NO: 12283 - protein, 289 aa, Triticum aestivum
  peptide (1)..(289): Ceres Seq. ID no. 15226219
  misc_feature (97)..(201): Pfam Name: Pfam Description:  CRAL/TRIO domain
  misc_feature (1)..(282): NCBI GI NO: 7488694 NR Description: phosphatidylinositol-phosphatidylcholine transfer protein SEC14 homolog Ssh1
  misc_feature (1)..(278): NCBI GI NO: 15222786 NR Description: sec14 cytosolic factor, putative
  misc_feature (1)..(282): NCBI GI NO: 15238794 NR Description: sec14 cytosolic factor, putative
  misc_feature (1)..(278): NCBI GI NO: 25295905 NR Description: protein F14J16.8 [imported] - Arabidopsis thaliana
  misc_feature (1)..(183): NCBI GI NO: 14532536 NR Description: AT5g47730/MCA23_5 [Arabidopsis thaliana]
  misc_feature (1)..(203): NCBI GI NO: 25412048 NR Description: hypothetical protein At2g21540
  misc_feature (1)..(203): NCBI GI NO: 15234966 NR Description: SEC14 - like protein [Arabidopsis thaliana]
  misc_feature (1)..(207): NCBI GI NO: 4506867 NR Description: SEC14 (S. cerevisiae)-like 1 [Homo sapiens]
  misc_feature (1)..(203): NCBI GI NO: 18399733 NR Description: phosphatidylinositol phophatidylcholine transfer protein -related
  misc_feature (1)..(207): NCBI GI NO: 31873398 NR Description: hypothetical protein [Homo sapiens]
MLRFLKAREWNVSKAHKMLVDSLNWRIENEIDSVLERPILPVDLYRSIRDSQLVGLSGYTKEGLPVFGIGVGQSTYDKASVHYYVQSHIQINEYRDRIILPMLTEKFGRPITTCVKVLDMTGLKLSALSQMKMLSSISTVDDLNYPEKSETYYIVNVPYIFSACWKVVKPLLQERTKKKVKVLSGCGRDELLKIMDYSALPHFCRREGSGSSKHSSSNADDCFSPDHPFHKELYELTNQQSSHKELLKMGSLHVSIPEPDPNDAKIVEVIQAEFHKMGEQNGSTNGHKV

SEQ ID NO: 12284 - DNA, 1347 bp, Triticum aestivum
  misc_feature (1)..(1347): Ceres Seq. ID no. 14302840
tctctcgactcattctcacggtcgtcaccagctatcgattcgcaacacagccgtcaagcccagccccgaggaaggaaggaaggaaaggaaggaataggtcggcgccgccatggagatgctgagcatgctgaaggtggggtacacggtgctgcgcagcgagacgccggcgacggacctcgtcaacaccttcatggactgggcggctcgccggtcgctcctccttctggcgctcttcatgcccccctactacgtctacaagctcaccgcgtcggccgccgccaccgtcgcgccgcaggacgtcgcggggaaggtcgtgctcgtcacgggcgcctcctccggcatcggcgagcaaatagcttaccagtacgcgaagaagggagcgaggctggccctggtggcacggagggagggaagcctgcgcgaggtcgccgccaaggcgaccgatctcggctcgccggacgtgctcgttgtgcccggggacgtggcgaggccggaggactgtaaggcgttcgtccaggccacagtcgagcgctttggccggttggatcatctcgtgaacaatgccggtctggtcaacgtgtgctggttcgaggagatgcccgacgtcgccactttcaagcaagtcttggacgtgaacttctggggcacggtgcatccaacccacgccgctcttcctcacctgacgaggagccgcggcaagatcttcgtcaactcctcggccgcggcggtgctggcaatgcctaggatgagcttctacaatgctagcaaggctgccgtgctgagcttcgccgacaccctgcggatggagctcggcgacgaggtgggcgtcacggtggcgacgcccggatggatcgagtccgagatgaccaaggggaagcacctctccaaaggagggagagtcgaggtcgatcaagacacgagggatgctcaggtggggctgtttccggtggtgcgtgccgagcggtgcgccgaggccatcgtggacgccgtttgccgcggccggcgcagcgtcaccgtgccgctgtggtaccgggcgctgttcctctggcggtcgttggcgccggaggtgggcgacgtcctgcaacgcgtgttctaccgccggagctccggcgacgggggcaggcagatgagggcgaggagggtcctggaggtcacgggcgccaagcgcgtgctgcagccgccgtcgctgcacacctcggatatcaaacgggagtagatgctacgtgaataaatgaatgttccggtgtcgtactgcaaagaaaataagatagaatggcgaggtgtagatggatggtttgtgtaaatttaagttgcgttcgaactaagtatgattttgtttctacctac

SEQ ID NO: 12285 - protein, 368 aa, Triticum aestivum
  peptide (1)..(368): Ceres Seq. ID no. 14302841
  misc_feature (1)..(368): NCBI GI NO: 21742781 NR Description: OSJNBa0055C08.3
  misc_feature (22)..(368): NCBI GI NO: 18423187 NR Description: short-chain dehydrogenase/reductase family protein
  misc_feature (22)..(368): NCBI GI NO: 15824408 NR Description: steroleosin [Sesamum indicum]
  misc_feature (35)..(326): NCBI GI NO: 15241261 NR Description: short-chain dehydrogenase/reductase family protein
  misc_feature (22)..(322): NCBI GI NO: 21311775 NR Description: steroleosin-B [Sesamum indicum]
  misc_feature (39)..(320): NCBI GI NO: 8777392 NR Description: 11-beta-hydroxysteroid dehydrogenase-like
  misc_feature (22)..(339): NCBI GI NO: 15234888 NR Description: short-chain dehydrogenase/reductase family protein
  misc_feature (39)..(320): NCBI GI NO: 15241203 NR Description: short-chain dehydrogenase/reductase family protein
  misc_feature (22)..(324): NCBI GI NO: 15232777 NR Description: short-chain dehydrogenase/reductase family protein
  misc_feature (35)..(322): NCBI GI NO: 15232779 NR Description: short-chain dehydrogenase/reductase family protein
MEMLSMLKVGYTVLRSETPATDLVNTFMDWAARRSLLLLALFMPPYYVYKLTASAAATVAPQDVAGKVVLVTGASSGIGEQIAYQYAKKGARLALVARREGSLREVAAKATDLGSPDVLVVPGDVARPEDCKAFVQATVERFGRLDHLVNNAGLVNVCWFEEMPDVATFKQVLDVNFWGTVHPTHAALPHLTRSRGKIFVNSSAAAVLAMPRMSFYNASKAAVLSFADTLRMELGDEVGVTVATPGWIESEMTKGKHLSKGGRVEVDQDTRDAQVGLFPVVRAERCAEAIVDAVCRGRRSVTVPLWYRALFLWRSLAPEVGDVLQRVFYRRSSGDGGRQMRARRVLEVTGAKRVLQPPSLHTSDIKRE

SEQ ID NO: 12286 - protein, 366 aa, Triticum aestivum
  peptide (1)..(366): Ceres Seq. ID no. 14302842
  misc_feature (1)..(366): NCBI GI NO: 21742781 NR Description: OSJNBa0055C08.3
  misc_feature (20)..(366): NCBI GI NO: 18423187 NR Description: short-chain dehydrogenase/reductase family protein
  misc_feature (20)..(366): NCBI GI NO: 15824408 NR Description: steroleosin [Sesamum indicum]
  misc_feature (33)..(324): NCBI GI NO: 15241261 NR Description: short-chain dehydrogenase/reductase family protein
  misc_feature (20)..(320): NCBI GI NO: 21311775 NR Description: steroleosin-B [Sesamum indicum]
  misc_feature (37)..(318): NCBI GI NO: 8777392 NR Description: 11-beta-hydroxysteroid dehydrogenase-like
  misc_feature (20)..(337): NCBI GI NO: 15234888 NR Description: short-chain dehydrogenase/reductase family protein
  misc_feature (37)..(318): NCBI GI NO: 15241203 NR Description: short-chain dehydrogenase/reductase family protein
  misc_feature (20)..(322): NCBI GI NO: 15232777 NR Description: short-chain dehydrogenase/reductase family protein
  misc_feature (33)..(320): NCBI GI NO: 15232779 NR Description: short-chain dehydrogenase/reductase family protein
MLSMLKVGYTVLRSETPATDLVNTFMDWAARRSLLLLALFMPPYYVYKLTASAAATVAPQDVAGKVVLVTGASSGIGEQIAYQYAKKGARLALVARREGSLREVAAKATDLGSPDVLVVPGDVARPEDCKAFVQATVERFGRLDHLVNNAGLVNVCWFEEMPDVATFKQVLDVNFWGTVHPTHAALPHLTRSRGKIFVNSSAAAVLAMPRMSFYNASKAAVLSFADTLRMELGDEVGVTVATPGWIESEMTKGKHLSKGGRVEVDQDTRDAQVGLFPVVRAERCAEAIVDAVCRGRRSVTVPLWYRALFLWRSLAPEVGDVLQRVFYRRSSGDGGRQMRARRVLEVTGAKRVLQPPSLHTSDIKRE

SEQ ID NO: 12287 - protein, 363 aa, Triticum aestivum
  peptide (1)..(363): Ceres Seq. ID no. 14302843
  misc_feature (1)..(363): NCBI GI NO: 21742781 NR Description: OSJNBa0055C08.3
  misc_feature (17)..(363): NCBI GI NO: 18423187 NR Description: short-chain dehydrogenase/reductase family protein
  misc_feature (17)..(363): NCBI GI NO: 15824408 NR Description: steroleosin [Sesamum indicum]
  misc_feature (30)..(321): NCBI GI NO: 15241261 NR Description: short-chain dehydrogenase/reductase family protein
  misc_feature (17)..(317): NCBI GI NO: 21311775 NR Description: steroleosin-B [Sesamum indicum]
  misc_feature (34)..(315): NCBI GI NO: 8777392 NR Description: 11-beta-hydroxysteroid dehydrogenase-like
  misc_feature (17)..(334): NCBI GI NO: 15234888 NR Description: short-chain dehydrogenase/reductase family protein
  misc_feature (34)..(315): NCBI GI NO: 15241203 NR Description: short-chain dehydrogenase/reductase family protein
  misc_feature (17)..(319): NCBI GI NO: 15232777 NR Description: short-chain dehydrogenase/reductase family protein
  misc_feature (30)..(317): NCBI GI NO: 15232779 NR Description: short-chain dehydrogenase/reductase family protein
MLKVGYTVLRSETPATDLVNTFMDWAARRSLLLLALFMPPYYVYKLTASAAATVAPQDVAGKVVLVTGASSGIGEQIAYQYAKKGARLALVARREGSLREVAAKATDLGSPDVLVVPGDVARPEDCKAFVQATVERFGRLDHLVNNAGLVNVCWFEEMPDVATFKQVLDVNFWGTVHPTHAALPHLTRSRGKIFVNSSAAAVLAMPRMSFYNASKAAVLSFADTLRMELGDEVGVTVATPGWIESEMTKGKHLSKGGRVEVDQDTRDAQVGLFPVVRAERCAEAIVDAVCRGRRSVTVPLWYRALFLWRSLAPEVGDVLQRVFYRRSSGDGGRQMRARRVLEVTGAKRVLQPPSLHTSDIKRE

SEQ ID NO: 12288 - DNA, 1711 bp, Triticum aestivum
  misc_feature (1)..(1711): Ceres Seq. ID no. 13596925
ctgtaactcccgctttcagctcactccgatcaatctcgatttgccagccctccgcgacgccggcaggtcgctgttgagcctgactactccccgtagcggacatgggatcgacggcgctcggtggtgcggctccggcgcgcgccggattggcccccaagagtggagtccttggatctactttcaagccatgtggtggtttcaagctcaaaacaactactaaggttggacgctcttcagtttgtgtgagggtatccattgcttcttcaccacaaaaacagtactctcctaagacatcagcagttaaatcaggggaggaagtgcgcattgcggtgctaggagccagcggttataccggggctgagattgttcggcttctagcaaaccaccctcagttccgtatcacagtgatgaccgcagacagaaaagctggtgaacagtttggatctgtatttcctcacttgataacacaagacctgccaaatttagttgcgattaaagatgcagatttttcagatgttgatgctgttttttgttgcttgccacatggaacaacacaggaaattattaaaggcttaccccaacaactgaagattgttgatctctctgcggatttccgattgcgtaacatcaatgagtatgctgagtggtatggccatgctcatagggcaccagaacttcaggaagaggctgtttatggtttgacggaggttcttcgagatgaaataagaaatgcacggcttgttgccaacccgggatgttatcccacgtctattcagctccctcttgttcctctaataaaggcaaaactgatcaagctgagcaatataataattgatgcaaaatctggggttaccggggcaggacgtggagctaaggaagcaaatctgtacaccgagatagctgaaggcattcatgcttatggaataaaaggccaccgtcatgttcctgaggttgaacaaggattgtcagaggctgctgaatccaaagttactatcagcttcactccaaatcttatctgcatgaaacgtgggatgcaatctactatgtttgttgaaatggcacctggagtgactgtcagtgatttgtatcagcatctcaagtctacttatgagggtgaagaatttgtcaagctgttaaatggcagcaatgttcctcacacacgccatgttgttggatcaaattactgcttcatgaatgtcttcgaggacagaattcctggaagggcaatcatcatctctgtcatagacaatcttgtaaagggagcatctggccaggccgtgcagaacctcaatctgatgatgggactgcctgagaacatggggctgcaatatcagcccctatttccttgatatgttgtgcctttgttgtgctctttctcgatgatgctttggagttaagcacccatctctgttttccgttgagaagcaaagagctgaatgtcggagtgtaaccaaactcgctcaacagcaaaacttggtttgtgctggtgtagtatttagagaggagcaacaattagcagttgaataagagtatgaactgagtggcttggtgtaatgaaagtccaaaggctattatatcctacagtggattgttgtcatgagatcaataaagcagtgtaaaacccgattcagagacatcaaccattgctgtcagcattggataatagttagaagtgtgttacttttaaatattaaaggataaattagttttc

SEQ ID NO: 12289 - protein, 415 aa, Triticum aestivum
  peptide (1)..(415): Ceres Seq. ID no. 13596926
  misc_feature (228)..(386): Pfam Name: Pfam Description:  Semialdehyde dehydrogenase, dimerisation domain
  misc_feature (19)..(415): NCBI GI NO: 37535658 NR Description: putative N-acetyl-gamma-glutamyl-phosphatereductase
  misc_feature (20)..(415): NCBI GI NO: 16604368 NR Description: At2g19940/F6F22.3 [Arabidopsis thaliana]
  misc_feature (64)..(415): NCBI GI NO: 18399202 NR Description: N-acetyl-gamma- glutamyl-phosphate reductase -related
  misc_feature (64)..(415): NCBI GI NO: 25284367 NR Description: hypothetical protein At2g19940
  misc_feature (64)..(415): NCBI GI NO: 22968389 NR Description: hypothetical protein [Rhodospirillum rubrum]
  misc_feature (141)..(415): NCBI GI NO: 23013472 NR Description: hypothetical protein
  misc_feature (74)..(415): NCBI GI NO: 6714965 NR Description: N-acetyl-gamma-glutamyl-phosphate reductase
  misc_feature (74)..(415): NCBI GI NO: 28376951 NR Description: N-acetyl-gamma-glutamyl-phosphate reductase
  misc_feature (75)..(415): NCBI GI NO: 22956652 NR Description: hypothetical protein [Rhodobacter sphaeroides]
  misc_feature (64)..(415): NCBI GI NO: 23054526 NR Description: hypothetical protein [Geobacter metallireducens]
MGSTALGGAAPARAGLAPKSGVLGSTFKPCGGFKLKTTTKVGRSSVCVRVSIASSPQKQYSPKTSAVKSGEEVRIAVLGASGYTGAEIVRLLANHPQFRITVMTADRKAGEQFGSVFPHLITQDLPNLVAIKDADFSDVDAVFCCLPHGTTQEIIKGLPQQLKIVDLSADFRLRNINEYAEWYGHAHRAPELQEEAVYGLTEVLRDEIRNARLVANPGCYPTSIQLPLVPLIKAKLIKLSNIIIDAKSGVTGAGRGAKEANLYTEIAEGIHAYGIKGHRHVPEVEQGLSEAAESKVTISFTPNLICMKRGMQSTMFVEMAPGVTVSDLYQHLKSTYEGEEFVKLLNGSNVPHTRHVVGSNYCFMNVFEDRIPGRAIIISVIDNLVKGASGQAVQNLNLMMGLPENMGLQYQPLFP

SEQ ID NO: 12290 - protein, 313 aa, Triticum aestivum
  peptide (1)..(313): Ceres Seq. ID no. 13596927
  misc_feature (126)..(284): Pfam Name: Pfam Description:  Semialdehyde dehydrogenase, dimerisation domain
  misc_feature (1)..(313): NCBI GI NO: 37535658 NR Description: putative N-acetyl-gamma-glutamyl-phosphatereductase
  misc_feature (1)..(313): NCBI GI NO: 16604368 NR Description: At2g19940/F6F22.3 [Arabidopsis thaliana]
  misc_feature (1)..(313): NCBI GI NO: 18399202 NR Description: N-acetyl-gamma- glutamyl-phosphate reductase -related
  misc_feature (1)..(313): NCBI GI NO: 25284367 NR Description: hypothetical protein At2g19940
  misc_feature (1)..(313): NCBI GI NO: 22968389 NR Description: hypothetical protein [Rhodospirillum rubrum]
  misc_feature (39)..(313): NCBI GI NO: 23013472 NR Description: hypothetical protein
  misc_feature (1)..(313): NCBI GI NO: 6714965 NR Description: N-acetyl-gamma-glutamyl-phosphate reductase
  misc_feature (1)..(313): NCBI GI NO: 28376951 NR Description: N-acetyl-gamma-glutamyl-phosphate reductase
  misc_feature (1)..(313): NCBI GI NO: 22956652 NR Description: hypothetical protein [Rhodobacter sphaeroides]
  misc_feature (1)..(313): NCBI GI NO: 23054526 NR Description: hypothetical protein [Geobacter metallireducens]
MTADRKAGEQFGSVFPHLITQDLPNLVAIKDADFSDVDAVFCCLPHGTTQEIIKGLPQQLKIVDLSADFRLRNINEYAEWYGHAHRAPELQEEAVYGLTEVLRDEIRNARLVANPGCYPTSIQLPLVPLIKAKLIKLSNIIIDAKSGVTGAGRGAKEANLYTEIAEGIHAYGIKGHRHVPEVEQGLSEAAESKVTISFTPNLICMKRGMQSTMFVEMAPGVTVSDLYQHLKSTYEGEEFVKLLNGSNVPHTRHVVGSNYCFMNVFEDRIPGRAIIISVIDNLVKGASGQAVQNLNLMMGLPENMGLQYQPLFP

SEQ ID NO: 12291 - DNA, 1448 bp, Triticum aestivum
  misc_feature (1)..(1448): Ceres Seq. ID no. 13654728
agcagaggcagcggcgagagcgagagcgagcacagccgcggagacagacagacgcacgcacgcacgcacgccacgccattacaaatcgcccccagcgagccaagcaccaaaccctacccaaccaggcaaccaccgcccgccagccctcccgcggacggatcctcctgcccgccctcacctctcgccttcctctcgtctcgtctgccttttttttctctcccgccgccgcgccatggaggaggggaggagggggacgaggacggtgcgggtgcggaacatctcagatctggccggggagcgcgaggtgcgcgagttcttctccttctccggcgaaatcgaccacgtcgacatcacccctgacggggcggcggcggggaggacggcctacgtcaccttcaaggacgccaaggccctggagatcgcgctgctgctctcgggagcaacaattgtggatcgagttgtgaacataacctctgctgaagattacatctacatccctgttaatgaacagcaacttatggtgaatgaggtgacaagtacagctcctactgcagatttggaacaacctactgaggccaacgcaagccccactagcgtttatgccagcaaggctcatgatgtcatgacaactgtgatcgcaaggggttcagcaattcgacaagatgctgtgaacaaagctaaatcatttgacgagaggcatcagttgagggctaatgcgtcagctaggatcagttccttcgataggcgtgttggcctttcagagaagttaaatactgggatatcggccgtaaatgaaaaggtgaaaactgtggaccaaaggttacatgtttctgacaaaacaatggctgctttgctggttgcagagcgcaagctaaacaatacaggctctgctgtgaaaaccaacaggtatgtgtctgctggaacaagctggctaaatggtgcgttcagcaaggttgccaaggctggtcatgttgctggctcaagaacaagagaaaagttccagatagctgtgtcaaatatatcagccaaagggcctgctgtcgttgcttgagctttgttctgggactgggagctcttcttcctggggaaaatctgttggaaatcttgagcaagcaccttccattggttgtgtcatcaagctgtggcttgtaactgtgtatttctctattgattttttcttcttcttcgaggagaactttttcagggagtcttgtcagatttggtacataggggatctaaattttctttagaattttagaaccactattctttttagtgcttgtgttcaattgattataggtggtagtgacactttgcaccatgttcctggctcggtgtggtttcatgattgccattgatgtcaaatgtgtcgtgcctctactttctgcagaaattgttactcaaattgagtaatttggaacgtatgaaactgcaatgcttctttgtgt

SEQ ID NO: 12292 - protein, 349 aa, Triticum aestivum
  peptide (1)..(349): Ceres Seq. ID no. 13654729
  misc_feature (88)..(156): Pfam Name: a.k.a. RRM, RBD, or RNP domain Pfam Description: RNA recognition motif.
  misc_feature (78)..(349): NCBI GI NO: 18087665 NR Description: putative arginine-rich protein [Oryza sativa]
  misc_feature (85)..(343): NCBI GI NO: 18421342 NR Description: RNA recognition motif (RRM)-containing protein
  misc_feature (87)..(336): NCBI GI NO: 8809670 NR Description: gene_id:MSD23
  misc_feature (87)..(336): NCBI GI NO: 30695063 NR Description: RNA recognition motif (RRM)-containing protein
  misc_feature (61)..(346): NCBI GI NO: 34897896 NR Description: ESTs D15336
  misc_feature (87)..(336): NCBI GI NO: 18414951 NR Description: RNA recognition motif (RRM)-containing protein
  misc_feature (169)..(331): NCBI GI NO: 38344181 NR Description: OSJNBa0053K19.20
  misc_feature (87)..(162): NCBI GI NO: 38344181 NR Description: OSJNBa0053K19.20
  misc_feature (87)..(336): NCBI GI NO: 7485085 NR Description: hypothetical protein - Arabidopsis thaliana
  misc_feature (167)..(334): NCBI GI NO: 15237419 NR Description: RNA recognition motif (RRM)-containing protein
AEAAARARASTAAETDRRTHARTPRHYKSPPASQAPNPTQPGNHRPPALPRTDPPARPHLSPSSRLVCLFFLSRRRAMEEGRRGTRTVRVRNISDLAGEREVREFFSFSGEIDHVDITPDGAAAGRTAYVTFKDAKALEIALLLSGATIVDRVVNITSAEDYIYIPVNEQQLMVNEVTSTAPTADLEQPTEANASPTSVYASKAHDVMTTVIARGSAIRQDAVNKAKSFDERHQLRANASARISSFDRRVGLSEKLNTGISAVNEKVKTVDQRLHVSDKTMAALLVAERKLNNTGSAVKTNRYVSAGTSWLNGAFSKVAKAGHVAGSRTREKFQIAVSNISAKGPAVVA

SEQ ID NO: 12293 - protein, 272 aa, Triticum aestivum
  peptide (1)..(272): Ceres Seq. ID no. 13654730
  misc_feature (11)..(79): Pfam Name: a.k.a. RRM, RBD, or RNP domain Pfam Description: RNA recognition motif.
  misc_feature (1)..(272): NCBI GI NO: 18087665 NR Description: putative arginine-rich protein [Oryza sativa]
  misc_feature (8)..(266): NCBI GI NO: 18421342 NR Description: RNA recognition motif (RRM)-containing protein
  misc_feature (10)..(259): NCBI GI NO: 8809670 NR Description: gene_id:MSD23
  misc_feature (10)..(259): NCBI GI NO: 30695063 NR Description: RNA recognition motif (RRM)-containing protein
  misc_feature (1)..(269): NCBI GI NO: 34897896 NR Description: ESTs D15336
  misc_feature (10)..(259): NCBI GI NO: 18414951 NR Description: RNA recognition motif (RRM)-containing protein
  misc_feature (92)..(254): NCBI GI NO: 38344181 NR Description: OSJNBa0053K19.20
  misc_feature (10)..(85): NCBI GI NO: 38344181 NR Description: OSJNBa0053K19.20
  misc_feature (10)..(259): NCBI GI NO: 7485085 NR Description: hypothetical protein - Arabidopsis thaliana
  misc_feature (90)..(257): NCBI GI NO: 15237419 NR Description: RNA recognition motif (RRM)-containing protein
MEEGRRGTRTVRVRNISDLAGEREVREFFSFSGEIDHVDITPDGAAAGRTAYVTFKDAKALEIALLLSGATIVDRVVNITSAEDYIYIPVNEQQLMVNEVTSTAPTADLEQPTEANASPTSVYASKAHDVMTTVIARGSAIRQDAVNKAKSFDERHQLRANASARISSFDRRVGLSEKLNTGISAVNEKVKTVDQRLHVSDKTMAALLVAERKLNNTGSAVKTNRYVSAGTSWLNGAFSKVAKAGHVAGSRTREKFQIAVSNISAKGPAVVA

SEQ ID NO: 12294 - protein, 177 aa, Triticum aestivum
  peptide (1)..(177): Ceres Seq. ID no. 13654731
  misc_feature (1)..(177): NCBI GI NO: 18087665 NR Description: putative arginine-rich protein [Oryza sativa]
  misc_feature (1)..(171): NCBI GI NO: 18421342 NR Description: RNA recognition motif (RRM)-containing protein
  misc_feature (1)..(164): NCBI GI NO: 8809670 NR Description: gene_id:MSD23
  misc_feature (1)..(164): NCBI GI NO: 30695063 NR Description: RNA recognition motif (RRM)-containing protein
  misc_feature (1)..(174): NCBI GI NO: 34897896 NR Description: ESTs D15336
  misc_feature (1)..(164): NCBI GI NO: 18414951 NR Description: RNA recognition motif (RRM)-containing protein
  misc_feature (1)..(159): NCBI GI NO: 38344181 NR Description: OSJNBa0053K19.20
  misc_feature (1)..(164): NCBI GI NO: 7485085 NR Description: hypothetical protein - Arabidopsis thaliana
  misc_feature (1)..(162): NCBI GI NO: 15237419 NR Description: RNA recognition motif (RRM)-containing protein
  misc_feature (1)..(162): NCBI GI NO: 21592997 NR Description: unknown [Arabidopsis thaliana]
MVNEVTSTAPTADLEQPTEANASPTSVYASKAHDVMTTVIARGSAIRQDAVNKAKSFDERHQLRANASARISSFDRRVGLSEKLNTGISAVNEKVKTVDQRLHVSDKTMAALLVAERKLNNTGSAVKTNRYVSAGTSWLNGAFSKVAKAGHVAGSRTREKFQIAVSNISAKGPAVVA

SEQ ID NO: 12295 - DNA, 1039 bp, Triticum aestivum
  misc_feature (1)..(1039): Ceres Seq. ID no. 13596515
ccaccgattccgccggcgggactcctgtccgggaaacgccgatctagaatggcggccaacttctggacgtcgtcgcacagcaagcagctgctggacccggaggaggtggacgtggtgccggcgcaagaccgggagcggggcgtcacgcccgtggagttccgcctcgtcaagatccacatgtccttccatatatggcggttggcccagcaggtcaaagttagacaaagagtcatagctactgcaatcacgtacttcaggtgtgtgtacacaagaaagagcatgacagagtatgatcctcgtttggtagcaccagcttgtttgtatttggcatcaaaggtagaggaaagcacagtgcaagcaaggcttcttgtattttacataaagaagatgtgtggttcggatgacaagtaccgatttgaaatcaaagatatccttgaaatggaaatgaagctcctggaagcacttgactattatttggttgtttaccatccataccgtcctcttctacagttattgcaggatgctggcataacagatctgacacaatttgcctggggcctcgtcaatgatacttacaagatggatctcattctcatatatcctccttatatgattgcattggcctgcatatacattgcaagcgttcttaaagataaggacacaacctcatggtttgaagaactccgtgttgacatgaacattgttaagaatatctcaatggaaatcttggacttctacgacacctacaagattgatcctcaaaggggcctccaggaggataagatcatccctgtgatgaacaagttgccatcaaaggcctgaaggccgatttgacacctgaccatttaaccaccttacaccgcctcatctggattgtgtaaccccgtagccctgaacatcttcggaggcgagagatccagggaatggcatcaaattgttaggcgccgcgatggcaatcccaatgttagggggttatctgtaatacttaagcatctgatttctgtatcatacaaaacccaagtggaattgtttcaacttg

SEQ ID NO: 12296 - protein, 273 aa, Triticum aestivum
  peptide (1)..(273): Ceres Seq. ID no. 13596516
  misc_feature (20)..(160): Pfam Name: Pfam Description:  Cyclin, N-terminal domain
  misc_feature (17)..(273): NCBI GI NO: 3334144 NR Description: G1/S-SPECIFIC CYCLIN C-TYPE
  misc_feature (17)..(269): NCBI GI NO: 15239664 NR Description: cyclin family [Arabidopsis thaliana]
  misc_feature (17)..(272): NCBI GI NO: 15239665 NR Description: cyclin family [Arabidopsis thaliana]
  misc_feature (17)..(270): NCBI GI NO: 28828497 NR Description: similar to Mus musculus (Mouse)
  misc_feature (8)..(270): NCBI GI NO: 38382739 NR Description: Unknown (protein for IMAGE:6391891) [Mus musculus]
  misc_feature (8)..(270): NCBI GI NO: 729105 NR Description: Cyclin C
  misc_feature (11)..(270): NCBI GI NO: 4885119 NR Description: cyclin C [Homo sapiens]
  misc_feature (11)..(270): NCBI GI NO: 34783612 NR Description: Unknown (protein for IMAGE:6165083) [Homo sapiens]
  misc_feature (8)..(270): NCBI GI NO: 21264408 NR Description: Cyclin C
  misc_feature (17)..(270): NCBI GI NO: 1705767 NR Description: Cyclin C
PPIPPAGLLSGKRRSRMAANFWTSSHSKQLLDPEEVDVVPAQDRERGVTPVEFRLVKIHMSFHIWRLAQQVKVRQRVIATAITYFRCVYTRKSMTEYDPRLVAPACLYLASKVEESTVQARLLVFYIKKMCGSDDKYRFEIKDILEMEMKLLEALDYYLVVYHPYRPLLQLLQDAGITDLTQFAWGLVNDTYKMDLILIYPPYMIALACIYIASVLKDKDTTSWFEELRVDMNIVKNISMEILDFYDTYKIDPQRGLQEDKIIPVMNKLPSKA

SEQ ID NO: 12297 - protein, 257 aa, Triticum aestivum
  peptide (1)..(257): Ceres Seq. ID no. 13596517
  misc_feature (4)..(144): Pfam Name: Pfam Description:  Cyclin, N-terminal domain
  misc_feature (1)..(257): NCBI GI NO: 3334144 NR Description: G1/S-SPECIFIC CYCLIN C-TYPE
  misc_feature (1)..(253): NCBI GI NO: 15239664 NR Description: cyclin family [Arabidopsis thaliana]
  misc_feature (1)..(256): NCBI GI NO: 15239665 NR Description: cyclin family [Arabidopsis thaliana]
  misc_feature (1)..(254): NCBI GI NO: 28828497 NR Description: similar to Mus musculus (Mouse)
  misc_feature (1)..(254): NCBI GI NO: 38382739 NR Description: Unknown (protein for IMAGE:6391891) [Mus musculus]
  misc_feature (1)..(254): NCBI GI NO: 729105 NR Description: Cyclin C
  misc_feature (1)..(254): NCBI GI NO: 4885119 NR Description: cyclin C [Homo sapiens]
  misc_feature (1)..(254): NCBI GI NO: 34783612 NR Description: Unknown (protein for IMAGE:6165083) [Homo sapiens]
  misc_feature (1)..(254): NCBI GI NO: 21264408 NR Description: Cyclin C
  misc_feature (1)..(254): NCBI GI NO: 1705767 NR Description: Cyclin C
MAANFWTSSHSKQLLDPEEVDVVPAQDRERGVTPVEFRLVKIHMSFHIWRLAQQVKVRQRVIATAITYFRCVYTRKSMTEYDPRLVAPACLYLASKVEESTVQARLLVFYIKKMCGSDDKYRFEIKDILEMEMKLLEALDYYLVVYHPYRPLLQLLQDAGITDLTQFAWGLVNDTYKMDLILIYPPYMIALACIYIASVLKDKDTTSWFEELRVDMNIVKNISMEILDFYDTYKIDPQRGLQEDKIIPVMNKLPSKA

SEQ ID NO: 12298 - protein, 214 aa, Triticum aestivum
  peptide (1)..(214): Ceres Seq. ID no. 13596518
  misc_feature (1)..(101): Pfam Name: Pfam Description:  Cyclin, N-terminal domain
  misc_feature (1)..(214): NCBI GI NO: 3334144 NR Description: G1/S-SPECIFIC CYCLIN C-TYPE
  misc_feature (1)..(210): NCBI GI NO: 15239664 NR Description: cyclin family [Arabidopsis thaliana]
  misc_feature (1)..(213): NCBI GI NO: 15239665 NR Description: cyclin family [Arabidopsis thaliana]
  misc_feature (1)..(211): NCBI GI NO: 28828497 NR Description: similar to Mus musculus (Mouse)
  misc_feature (1)..(211): NCBI GI NO: 38382739 NR Description: Unknown (protein for IMAGE:6391891) [Mus musculus]
  misc_feature (1)..(211): NCBI GI NO: 729105 NR Description: Cyclin C
  misc_feature (1)..(211): NCBI GI NO: 4885119 NR Description: cyclin C [Homo sapiens]
  misc_feature (1)..(211): NCBI GI NO: 34783612 NR Description: Unknown (protein for IMAGE:6165083) [Homo sapiens]
  misc_feature (1)..(211): NCBI GI NO: 21264408 NR Description: Cyclin C
  misc_feature (1)..(211): NCBI GI NO: 1705767 NR Description: Cyclin C
MSFHIWRLAQQVKVRQRVIATAITYFRCVYTRKSMTEYDPRLVAPACLYLASKVEESTVQARLLVFYIKKMCGSDDKYRFEIKDILEMEMKLLEALDYYLVVYHPYRPLLQLLQDAGITDLTQFAWGLVNDTYKMDLILIYPPYMIALACIYIASVLKDKDTTSWFEELRVDMNIVKNISMEILDFYDTYKIDPQRGLQEDKIIPVMNKLPSKA

SEQ ID NO: 12299 - DNA, 1638 bp, Triticum aestivum
  misc_feature (1)..(1638): Ceres Seq. ID no. 14301830
cccgatccgcctttcacggcgcgccaccctcgtcggttcactggagcacttcccactgccgcccggccgcgtggagatctgagcaggaagcccgcgccgcagcttatataacggcgcctcctcctccacattctcagcgcccatcacacccccgcagagccggaagccacacacacacgccttcctccttcctctgctcgcatctcggatcggggagaaggaggatctgaggctttcggcagggccggggacgatggcgccgctgctcaaggacgagctggacatcgtcatcccgacgatccggaacctggacttcctcgagatgtggaggcccttcttccagccgtaccacctcatcatcgtgcaggacggcgaccccacgaggaccgtcatggtgcccgagggcttcgactacgagctctacaaccgcaacgacatcaaccgcatcctcggccccaaggcctcctgcatctccttcaaggactccgcctgccgctgcttcggctacatggtctccaagaagaagtacgtctacaccatcgacgacgactgcttcgtggccaaggacccgacggggaaggacattgacgcgctggccaagcacatccagaacctgctctgcccctccacgccgctcttcttcaacaccctgtacgacccctaccaggagggcgccgacttcgtgcgcggctacccgttcagcctccgggagggcgtgcccaccgccgtgtcgcacggcctctggctcaacatccccgactacgacgcccccacgcagctggtcaagccgcgggagcgcaacggcaggtacgtcgacgccgtcatgaccatccccaagggctccctcttccccatgtgcggcatgaacctcgccttcgaccgcgagctcatcggcccggccatgtacttcggcctcatgggcgacggccagcccatcggacgctacgacgacatgtgggccggctggtgcgtcaaggtgatctgcgaccaccttgggctgggcgtcaagacggggctgccctacatctggcacagcaaggccagcaacccgttcgtgaacctgaagaaggagtacaagggcatcttctggcaggaggacatcatccccttcttccaggccgcgaagctgaccaaggaatgcgacaccgtgcagaagtgctacatctcgctctcgcagcaggtcaaggagaagctcggcaagatcgacccctacttcgtcaagctcgccgatgccatggtcacctggatcgaggcctgggacatgctcaactccaaggactccaaggaggccgatgccaacggcaagctcaaggggaggtagatcgagatcgagggagagaaccttttttgcactagcatactgagcaggcggtgaggcggcatataccggtttcttcagttcgtaggttcagtgcgtgcatcaggtattcaggttcaggctgttgtgtactacaaaacattagctgccgttctatcttacgtttacgttgagggtcgcgttaatttcccccttctttaatttcattattaagagatgatgtcgttttctcaagggtttagtactacggttatacttgtggctgctaatgtttccgtgtaatcttgtgtacactgaaatgtgagaataaaaagttgttc

SEQ ID NO: 12300 - protein, 355 aa, Triticum aestivum
  peptide (1)..(355): Ceres Seq. ID no. 14301831
  misc_feature (1)..(343): Pfam Name: Pfam Description:  Reversibly glycosylated polypeptide
  misc_feature (1)..(351): NCBI GI NO: 4158232 NR Description: reversibly glycosylated polypeptide
  misc_feature (1)..(353): NCBI GI NO: 4158221 NR Description: reversibly glycosylated polypeptide
  misc_feature (1)..(353): NCBI GI NO: 34915190 NR Description: reversibly glycosylated polypeptide
  misc_feature (1)..(353): NCBI GI NO: 34588146 NR Description: Alpha-1,4-glucan-protein synthase
  misc_feature (3)..(345): NCBI GI NO: 34582497 NR Description: Alpha-1,4-glucan-protein synthase
  misc_feature (1)..(339): NCBI GI NO: 34582499 NR Description: Alpha-1,4-glucan-protein synthase
  misc_feature (1)..(355): NCBI GI NO: 34394574 NR Description: putative reversibly glycosylated polypeptide
  misc_feature (1)..(339): NCBI GI NO: 21593071 NR Description: reversibly glycosylated polypeptide-3
  misc_feature (86)..(321): NCBI GI NO: 7488888 NR Description: type IIIa membrane protein cp-wap11 - cowpea
  misc_feature (1)..(335): NCBI GI NO: 19387283 NR Description: putative amylogenin
MAPLLKDELDIVIPTIRNLDFLEMWRPFFQPYHLIIVQDGDPTRTVMVPEGFDYELYNRNDINRILGPKASCISFKDSACRCFGYMVSKKKYVYTIDDDCFVAKDPTGKDIDALAKHIQNLLCPSTPLFFNTLYDPYQEGADFVRGYPFSLREGVPTAVSHGLWLNIPDYDAPTQLVKPRERNGRYVDAVMTIPKGSLFPMCGMNLAFDRELIGPAMYFGLMGDGQPIGRYDDMWAGWCVKVICDHLGLGVKTGLPYIWHSKASNPFVNLKKEYKGIFWQEDIIPFFQAAKLTKECDTVQKCYISLSQQVKEKLGKIDPYFVKLADAMVTWIEAWDMLNSKDSKEADANGKLKGR

SEQ ID NO: 12301 - protein, 332 aa, Triticum aestivum
  peptide (1)..(332): Ceres Seq. ID no. 14301832
  misc_feature (1)..(320): Pfam Name: Pfam Description:  Reversibly glycosylated polypeptide
  misc_feature (1)..(328): NCBI GI NO: 4158232 NR Description: reversibly glycosylated polypeptide
  misc_feature (1)..(330): NCBI GI NO: 4158221 NR Description: reversibly glycosylated polypeptide
  misc_feature (1)..(330): NCBI GI NO: 34915190 NR Description: reversibly glycosylated polypeptide
  misc_feature (1)..(330): NCBI GI NO: 34588146 NR Description: Alpha-1,4-glucan-protein synthase
  misc_feature (1)..(322): NCBI GI NO: 34582497 NR Description: Alpha-1,4-glucan-protein synthase
  misc_feature (1)..(316): NCBI GI NO: 34582499 NR Description: Alpha-1,4-glucan-protein synthase
  misc_feature (1)..(332): NCBI GI NO: 34394574 NR Description: putative reversibly glycosylated polypeptide
  misc_feature (1)..(316): NCBI GI NO: 21593071 NR Description: reversibly glycosylated polypeptide-3
  misc_feature (63)..(298): NCBI GI NO: 7488888 NR Description: type IIIa membrane protein cp-wap11 - cowpea
  misc_feature (1)..(312): NCBI GI NO: 19387283 NR Description: putative amylogenin
MWRPFFQPYHLIIVQDGDPTRTVMVPEGFDYELYNRNDINRILGPKASCISFKDSACRCFGYMVSKKKYVYTIDDDCFVAKDPTGKDIDALAKHIQNLLCPSTPLFFNTLYDPYQEGADFVRGYPFSLREGVPTAVSHGLWLNIPDYDAPTQLVKPRERNGRYVDAVMTIPKGSLFPMCGMNLAFDRELIGPAMYFGLMGDGQPIGRYDDMWAGWCVKVICDHLGLGVKTGLPYIWHSKASNPFVNLKKEYKGIFWQEDIIPFFQAAKLTKECDTVQKCYISLSQQVKEKLGKIDPYFVKLADAMVTWIEAWDMLNSKDSKEADANGKLKGR

SEQ ID NO: 12302 - protein, 309 aa, Triticum aestivum
  peptide (1)..(309): Ceres Seq. ID no. 14301833
  misc_feature (1)..(297): Pfam Name: Pfam Description:  Reversibly glycosylated polypeptide
  misc_feature (1)..(305): NCBI GI NO: 4158232 NR Description: reversibly glycosylated polypeptide
  misc_feature (1)..(307): NCBI GI NO: 4158221 NR Description: reversibly glycosylated polypeptide
  misc_feature (1)..(307): NCBI GI NO: 34915190 NR Description: reversibly glycosylated polypeptide
  misc_feature (1)..(307): NCBI GI NO: 34588146 NR Description: Alpha-1,4-glucan-protein synthase
  misc_feature (1)..(299): NCBI GI NO: 34582497 NR Description: Alpha-1,4-glucan-protein synthase
  misc_feature (1)..(293): NCBI GI NO: 34582499 NR Description: Alpha-1,4-glucan-protein synthase
  misc_feature (1)..(309): NCBI GI NO: 34394574 NR Description: putative reversibly glycosylated polypeptide
  misc_feature (1)..(293): NCBI GI NO: 21593071 NR Description: reversibly glycosylated polypeptide-3
  misc_feature (40)..(275): NCBI GI NO: 7488888 NR Description: type IIIa membrane protein cp-wap11 - cowpea
  misc_feature (1)..(289): NCBI GI NO: 19387283 NR Description: putative amylogenin
MVPEGFDYELYNRNDINRILGPKASCISFKDSACRCFGYMVSKKKYVYTIDDDCFVAKDPTGKDIDALAKHIQNLLCPSTPLFFNTLYDPYQEGADFVRGYPFSLREGVPTAVSHGLWLNIPDYDAPTQLVKPRERNGRYVDAVMTIPKGSLFPMCGMNLAFDRELIGPAMYFGLMGDGQPIGRYDDMWAGWCVKVICDHLGLGVKTGLPYIWHSKASNPFVNLKKEYKGIFWQEDIIPFFQAAKLTKECDTVQKCYISLSQQVKEKLGKIDPYFVKLADAMVTWIEAWDMLNSKDSKEADANGKLKGR

SEQ ID NO: 12303 - DNA, 692 bp, Triticum aestivum
  misc_feature (1)..(692): Ceres Seq. ID no. 12584771
gcactcacactagttcactctcgcatcaactaacctcgctctcgtgcgcaggatgcggagcggtgtcagcgcgcgccttctgccgcaggcggtggccatcgccatcgccgtggccgtcgcctgctgcatggccgccgcaccgtcgtcggcgcaggggacgacgacgcccgcggacgccagcggcgcggtgccgtcgtgcgcgtcgaagctcgtgacgtgcgcgggctacctgaacaccaccgacacgccgccggagtcgtgctgcgacccgctcaaggaggcggcgaccacgcaggcggcgtgcatgtgcgccatcctcatgaacaaggccgcgctgcaggcgttcggcgtggcgccggagcagggggtgctcctcgccaagcgctgcggcgtcaccaccgacgcgtccacctgcgccaagtacaccgccggcgccggttccgatgctgcaactgcaggtagcacagccgcttcttcagcatccacgggaactgctgcttctacagttgccaagccaacggcaagcggaggaaccacgcatcccctgagcttgatcgccgcatcttcatttgtaggcttcagtttcatctggtggacgatcatggcgtagtaagagatgccaatgagtatgaactgttatgtaaaaaaaaactgtatcgtctcaataaacataactatctggttgtcacttc

SEQ ID NO: 12304 - protein, 185 aa, Triticum aestivum
  peptide (1)..(185): Ceres Seq. ID no. 12584772
  misc_feature (49)..(121): Pfam Name: Pfam Description:  Protease inhibitor/seed storage/LTP family
  misc_feature (12)..(178): NCBI GI NO: 15221052 NR Description: lipid transfer protein, putative
  misc_feature (45)..(173): NCBI GI NO: 15221585 NR Description: unknown protein; protein id: At1g62790.1
  misc_feature (45)..(173): NCBI GI NO: 30696757 NR Description: protease inhibitor/seed storage/lipid transfer
  misc_feature (16)..(145): NCBI GI NO: 18410388 NR Description: lipid transfer protein, putative
  misc_feature (16)..(145): NCBI GI NO: 21593596 NR Description: lipid transfer protein, putative
  misc_feature (45)..(121): NCBI GI NO: 6630451 NR Description: F23N19.16 [Arabidopsis thaliana]
  misc_feature (16)..(123): NCBI GI NO: 25406276 NR Description: probable lipid transfer protein F6D5.5
  misc_feature (12)..(162): NCBI GI NO: 25553588 NR Description: OJ1656_E11.14
  misc_feature (48)..(179): NCBI GI NO: 7484433 NR Description: lipid transfer protein - Norway spruce
  misc_feature (45)..(122): NCBI GI NO: 15223104 NR Description: lipid transfer protein, putative
MRSGVSARLLPQAVAIAIAVAVACCMAAAPSSAQGTTTPADASGAVPSCASKLVTCAGYLNTTDTPPESCCDPLKEAATTQAACMCAILMNKAALQAFGVAPEQGVLLAKRCGVTTDASTCAKYTAGAGSDAATAGSTAASSASTGTAASTVAKPTASGGTTHPLSLIAASSFVGFSFIWWTIMA

SEQ ID NO: 12305 - protein, 160 aa, Triticum aestivum
  peptide (1)..(160): Ceres Seq. ID no. 12584773
  misc_feature (24)..(96): Pfam Name: Pfam Description:  Protease inhibitor/seed storage/LTP family
  misc_feature (1)..(153): NCBI GI NO: 15221052 NR Description: lipid transfer protein, putative
  misc_feature (20)..(148): NCBI GI NO: 15221585 NR Description: unknown protein; protein id: At1g62790.1
  misc_feature (20)..(148): NCBI GI NO: 30696757 NR Description: protease inhibitor/seed storage/lipid transfer
  misc_feature (1)..(120): NCBI GI NO: 18410388 NR Description: lipid transfer protein, putative
  misc_feature (1)..(120): NCBI GI NO: 21593596 NR Description: lipid transfer protein, putative
  misc_feature (20)..(96): NCBI GI NO: 6630451 NR Description: F23N19.16 [Arabidopsis thaliana]
  misc_feature (1)..(98): NCBI GI NO: 25406276 NR Description: probable lipid transfer protein F6D5.5
  misc_feature (1)..(137): NCBI GI NO: 25553588 NR Description: OJ1656_E11.14
  misc_feature (23)..(154): NCBI GI NO: 7484433 NR Description: lipid transfer protein - Norway spruce
  misc_feature (20)..(97): NCBI GI NO: 15223104 NR Description: lipid transfer protein, putative
MAAAPSSAQGTTTPADASGAVPSCASKLVTCAGYLNTTDTPPESCCDPLKEAATTQAACMCAILMNKAALQAFGVAPEQGVLLAKRCGVTTDASTCAKYTAGAGSDAATAGSTAASSASTGTAASTVAKPTASGGTTHPLSLIAASSFVGFSFIWWTIMA

SEQ ID NO: 12306 - protein, 101 aa, Triticum aestivum
  peptide (1)..(101): Ceres Seq. ID no. 12584774
  misc_feature (1)..(94): NCBI GI NO: 15221052 NR Description: lipid transfer protein, putative
  misc_feature (1)..(89): NCBI GI NO: 15221585 NR Description: unknown protein; protein id: At1g62790.1
  misc_feature (1)..(89): NCBI GI NO: 30696757 NR Description: protease inhibitor/seed storage/lipid transfer
  misc_feature (1)..(61): NCBI GI NO: 18410388 NR Description: lipid transfer protein, putative
  misc_feature (1)..(61): NCBI GI NO: 21593596 NR Description: lipid transfer protein, putative
  misc_feature (1)..(37): NCBI GI NO: 6630451 NR Description: F23N19.16 [Arabidopsis thaliana]
  misc_feature (1)..(39): NCBI GI NO: 25406276 NR Description: probable lipid transfer protein F6D5.5
  misc_feature (1)..(78): NCBI GI NO: 25553588 NR Description: OJ1656_E11.14
  misc_feature (1)..(95): NCBI GI NO: 7484433 NR Description: lipid transfer protein - Norway spruce
  misc_feature (1)..(38): NCBI GI NO: 15223104 NR Description: lipid transfer protein, putative
MCAILMNKAALQAFGVAPEQGVLLAKRCGVTTDASTCAKYTAGAGSDAATAGSTAASSASTGTAASTVAKPTASGGTTHPLSLIAASSFVGFSFIWWTIMA

SEQ ID NO: 12307 - DNA, 722 bp, Triticum aestivum
  misc_feature (1)..(722): Ceres Seq. ID no. 13583431
cggcctacccaccccctgccgctccctgcctagggttttgagtcccgcccccctccgccgcgcaccatgggccccgacgagctccccaaggccgccgccgccggtgccgaggaggccgccccgttctccttcagcatctggccgccgacgcagcggacgcgggacgccgtggtgcggcgcctggtggacacgctggccggcgacaccctcctctgcaagcgctacggcgccgtgccggccgccgacgccgagcccgccgcgcgggccatcgaggccgaggccttcgacgccgccgccgtcaccggcggggccgccgcctccgtcgaggagggcatcgaggcgctgcagctctactccaaggaggtcagccgccgccctcctcgacttcgtcaagtcccgctccgccgccgccaaggccgagccgccggccgaggaggcgctcgccgtcaaggaggagacctcccaggcctgagccccggacgagaaccgttcgtttcgattatgcttcgagataaaattcatttgcatctagagttcgtgtgcggcgttggcctctgcttgggatgagttgcctgtaggttgttcgcgtgcctgtgctgttattgttctttcagtagctgctggttacctttttttttagtgtgttcgtttattacttccgtttgtatctgtgaacaagaattatcttcaccttgtcgtggcaatgatccaagatttgaccg

SEQ ID NO: 12308 - protein, 166 aa, Triticum aestivum
  peptide (1)..(166): Ceres Seq. ID no. 13583432
  misc_feature (3)..(103): NCBI GI NO: 7546727 NR Description: MFP1 attachment factor 1 [Zea mays]
  misc_feature (9)..(143): NCBI GI NO: 26006500 NR Description: Unknown protein
  misc_feature (1)..(132): NCBI GI NO: 37533022 NR Description: hypothetical protein
  misc_feature (1)..(57): NCBI GI NO: 7546735 NR Description: MFP1 attachment factor 1 [Triticum aestivum]
  misc_feature (9)..(140): NCBI GI NO: 33146512 NR Description: putative MFP1 attachment factor 1
  misc_feature (1)..(125): NCBI GI NO: 7546729 NR Description: MFP1 attachment factor 1 [Glycine max]
  misc_feature (4)..(103): NCBI GI NO: 7546731 NR Description: MFP1 attachment factor 1 [Canna edulis]
  misc_feature (21)..(119): NCBI GI NO: 7546725 NR Description: MFP1 attachment factor 1 [Lycopersicon esculentum]
  misc_feature (5)..(136): NCBI GI NO: 18401618 NR Description: expressed protein [Arabidopsis thaliana]
MGPDELPKAAAAGAEEAAPFSFSIWPPTQRTRDAVVRRLVDTLAGDTLLCKRYGAVPAADAEPAARAIEAEAFDAAAVTGGAAASVEEGIEALQLYSKEVSRRPPRLRQVPLRRRQGRAAGRGGARRQGGDLPGLSPGREPFVSIMLRDKIHLHLEFVCGVGLCLG

SEQ ID NO: 12309 - protein, 156 aa, Triticum aestivum
  peptide (1)..(156): Ceres Seq. ID no. 13583433
  misc_feature (3)..(106): Pfam Name: Pfam Description:  Extensin-like region
  misc_feature (126)..(148): NCBI GI NO: 7546727 NR Description: MFP1 attachment factor 1 [Zea mays]
  misc_feature (3)..(107): NCBI GI NO: 14253159 NR Description: VMP3 protein [Volvox carteri f. nagariensis]
  misc_feature (3)..(108): NCBI GI NO: 20138131 NR Description: Vegetative cell wall protein gp1 precursor
  misc_feature (3)..(110): NCBI GI NO: 20138131 NR Description: Vegetative cell wall protein gp1 precursor
  misc_feature (3)..(108): NCBI GI NO: 20138131 NR Description: Vegetative cell wall protein gp1 precursor
  misc_feature (18)..(108): NCBI GI NO: 14253159 NR Description: VMP3 protein [Volvox carteri f. nagariensis]
  misc_feature (3)..(108): NCBI GI NO: 20138131 NR Description: Vegetative cell wall protein gp1 precursor
  misc_feature (3)..(150): NCBI GI NO: 20138131 NR Description: Vegetative cell wall protein gp1 precursor
  misc_feature (3)..(123): NCBI GI NO: 20138131 NR Description: Vegetative cell wall protein gp1 precursor
  misc_feature (8)..(120): NCBI GI NO: 2129478 NR Description: chitinase (EC 3.2.1.14) precursor - beet
GLPTPCRSLPRVLSPAPLRRAPWAPTSSPRPPPPVPRRPPRSPSASGRRRSGRGTPWCGAWWTRWPATPSSASATAPCRPPTPSPPRGPSRPRPSTPPPSPAGPPPPSRRASRRCSSTPRRSAAALLDFVKSRSAAAKAEPPAEEALAVKEETSQA

SEQ ID NO: 12310 - DNA, 1037 bp, Triticum aestivum
  misc_feature (1)..(1037): Ceres Seq. ID no. 13596535
aacacaacaccaccgcaatctttactcgagaaaagaaaaacacaacaccgcaatcgccacctgcaccgaaccggagcaaatctccggcgagctcgagccgaagcggcgaacccgcgcgagcaggagagatggatccggacgaggtgaagtcgaagctccaaggcctggccttcggcaacgtcctggccgccgccgcccgcgactacaagaaggaagttatagctaaagagaaggctcaagcagcacctgcgatcccatgatgaagtcgatcttgatgagttactggatgacccagagcttgagaaattgcatgctgaacggcttgctgctcttaagagagaggtcgagaagcgtgaggtgctaaagaggcaaggtcatggtgaatacagggaaataaccgaaggggacttcttaggagaggtcactcgtggtgacaaggtcatctgtcatttctaccatcgtgaattttaccgctgcaagatcatggataagcatttgaaggcacttgcaccggtctatttgggaactaaattcgtcaagcttgatgccgaaaatgctcccttctttgtggcaaaactagcaatcaaaacgttgccatgtgttatattgttcaagaagggtattgctcttgatcggttggttggtttcgatgaccttggaagtaaagatgatttttctaccagggctttggaaaatgtactgaagaggaaaggtataattgaggaaaagaagaaagacgatgatgacgaagatgatgagactgacatgtcaaaggataggagggttagatcttccactgcttacgattcggattcagattgaaaagatgaagtgatatgatcctgtcttttgtaacattataattttgtctcttttgtactctagctctcggaagttccttatgatttatgtgtgccgtattgtatcgaacaagagaactggaagccggatgtattagtgatctgtcagtaactccagttttacaccagttatcggagtacaatacatatgtatgactaagtattagtgctgcaatt

SEQ ID NO: 12311 - protein, 112 aa, Triticum aestivum
  peptide (1)..(112): Ceres Seq. ID no. 15221914
  misc_feature (1)..(112): NCBI GI NO: 18425069 NR Description: expressed protein [Arabidopsis thaliana]
  misc_feature (1)..(112): NCBI GI NO: 30693386 NR Description: expressed protein [Arabidopsis thaliana]
  misc_feature (1)..(112): NCBI GI NO: 10177522 NR Description: contains similarity to ATP binding proteinassociated with cell differentiation~gene_id:K1F13
  misc_feature (1)..(112): NCBI GI NO: 7485705 NR Description: hypothetical protein F18B3
  misc_feature (1)..(112): NCBI GI NO: 18104959 NR Description: ATP binding protein associated with celldifferentiation
  misc_feature (1)..(112): NCBI GI NO: 25286717 NR Description: ATP binding protein associated with celldifferentiation
  misc_feature (1)..(112): NCBI GI NO: 2342477 NR Description: ATP binding protein [Homo sapiens]
  misc_feature (1)..(112): NCBI GI NO: 25282435 NR Description: ES cell-related protein; ATP binding protein
  misc_feature (1)..(112): NCBI GI NO: 28277604 NR Description: Similar to ATP binding protein associated with celldifferentiation
  misc_feature (1)..(112): NCBI GI NO: 21594045 NR Description: putative ATP binding protein
MDKHLKALAPVYLGTKFVKLDAENAPFFVAKLAIKTLPCVILFKKGIALDRLVGFDDLGSKDDFSTRALENVLKRKGIIEEKKKDDDDEDDETDMSKDRRVRSSTAYDSDSD

SEQ ID NO: 12312 - protein, 85 aa, Triticum aestivum
  peptide (1)..(85): Ceres Seq. ID no. 15221915
  misc_feature (43)..(81): NCBI GI NO: 18425069 NR Description: expressed protein [Arabidopsis thaliana]
  misc_feature (43)..(81): NCBI GI NO: 30693386 NR Description: expressed protein [Arabidopsis thaliana]
  misc_feature (43)..(81): NCBI GI NO: 10177522 NR Description: contains similarity to ATP binding proteinassociated with cell differentiation~gene_id:K1F13
HNTTAIFTREKKNTTPQSPPAPNRSKSPASSSRSGEPARAGEMDPDEVKSKLQGLAFGNVLAAAARDYKKEVIAKEKAQAAPAIP

SEQ ID NO: 12313 - protein, 74 aa, Triticum aestivum
  peptide (1)..(74): Ceres Seq. ID no. 15221916
TQHHRNLYSRKEKHNTAIATCTEPEQISGELEPKRRTRASRRDGSGRGEVEAPRPGLRQRPGRRRPRLQEGSYS

SEQ ID NO: 12314 - DNA, 1045 bp, Triticum aestivum
  misc_feature (1)..(1045): Ceres Seq. ID no. 13598382
aggacatcaagcacctgagctccacatcgatcagtacccacggccactccactctcagctcagggactcggtgtcagggcgacccaagacagaagaatcggatccagaagaatcatggattccctgacggcgtcgacgacggcgaagcccaccctccgagtggccgcattctgcggctccctccgcaaggactcgtggcaccgcggcctcatccgcgccgcggaggagctttgcgaggagtccatcccggggctgcgcatcgaccacgtggacatctccggcctgcccatggtcaacccggacctggagaccgacggcggcaagggcttcccgccggccgtggaggcgctccgcgacagcgtccgcgccgcagactgcttcctcttcgcctcgcccgagtacaactactcggtcacagcgtccctgaagaacgcgctggactgggcgtcgaggggcaagcgcaactgctgggcggacagggcggcggcgatcgtgtgcgcggggggcgacttcggcggggccagggcgtcgctccacctccgccagatcggggtgttcctcgacctccacttcatcaacaagccggagctccacgtgagggcgtttgcggagccgcccaagttcgacgaggaggggaacctcatcgacgccgagaccagggagcggctcaggaaggtgctcctctcgctccaggccttcgcgctcaggctccagcacaacatggacgactgactgactcaagatcgatcgatgatacctggctctgtgtaccgtgcgcgctggttaatttgcattgcccttcagtttgacgacgttgtgctctatgcactagtattcgtggttccgtgagaagtctgtgctacctttgtgtaataaagcgccgaagcgtgcaaaaaaaaaaagtaataaatcgccgaagaattgcactgtaaaaaaaagaacgtgtgcgtgcgtatgtgttttaccgatgctactagtagaacgcaagggcgcatcggctacgttgagaaaacaatagaactgttgaagaaattgatattgtcgt

SEQ ID NO: 12315 - protein, 268 aa, Triticum aestivum
  peptide (1)..(268): Ceres Seq. ID no. 13598383
DIKHLSSTSISTHGHSTLSSGTRCQGDPRQKNRIQKNHGFPDGVDDGEAHPPSGRILRLPPQGLVAPRPHPRRGGALRGVHPGAAHRPRGHLRPAHGQPGPGDRRRQGLPAGRGGAPRQRPRRRLLPLRLARVQLLGHSVPEERAGLGVEGQAQLLGGQGGGDRVRGGRLRRGQGVAPPPPDRGVPRPPLHQQAGAPREGVCGAAQVRRGGEPHRRRDQGAAQEGAPLAPGLRAQAPAQHGRLTDSRSIDDTWLCVPCALVNLHCPSV

SEQ ID NO: 12316 - protein, 205 aa, Triticum aestivum
  peptide (1)..(205): Ceres Seq. ID no. 13598384
  misc_feature (14)..(187): Pfam Name: Pfam Description:  NADPH-dependent FMN reductase
  misc_feature (7)..(200): NCBI GI NO: 34906648 NR Description: putative NADPH:quinone oxidoreductase
  misc_feature (4)..(200): NCBI GI NO: 34906652 NR Description: putative NADPH:quinone oxidoreductase
  misc_feature (10)..(200): NCBI GI NO: 24745889 NR Description: NAD(P)H:quinone oxidoreductase [Solanum tuberosum]
  misc_feature (4)..(200): NCBI GI NO: 15232856 NR Description: NADPH:quinone oxidoreductase (NQR)
  misc_feature (4)..(200): NCBI GI NO: 5002232 NR Description: NADPH:quinone oxidoreductase
  misc_feature (14)..(200): NCBI GI NO: 15596401 NR Description: conserved hypothetical protein
  misc_feature (13)..(185): NCBI GI NO: 23135834 NR Description: hypothetical protein [Cytophaga hutchinsonii]
  misc_feature (12)..(195): NCBI GI NO: 22964797 NR Description: hypothetical protein [Rhodopseudomonas palustris]
  misc_feature (13)..(200): NCBI GI NO: 22406524 NR Description: hypothetical protein [Ferroplasma acidarmanus]
  misc_feature (13)..(201): NCBI GI NO: 40549313 NR Description: YieF [Salmonella enterica]
MDSLTASTTAKPTLRVAAFCGSLRKDSWHRGLIRAAEELCEESIPGLRIDHVDISGLPMVNPDLETDGGKGFPPAVEALRDSVRAADCFLFASPEYNYSVTASLKNALDWASRGKRNCWADRAAAIVCAGGDFGGARASLHLRQIGVFLDLHFINKPELHVRAFAEPPKFDEEGNLIDAETRERLRKVLLSLQAFALRLQHNMDD

SEQ ID NO: 12317 - protein, 147 aa, Triticum aestivum
  peptide (1)..(147): Ceres Seq. ID no. 13598385
  misc_feature (1)..(129): Pfam Name: Pfam Description:  NADPH-dependent FMN reductase
  misc_feature (1)..(142): NCBI GI NO: 34906648 NR Description: putative NADPH:quinone oxidoreductase
  misc_feature (1)..(142): NCBI GI NO: 34906652 NR Description: putative NADPH:quinone oxidoreductase
  misc_feature (1)..(142): NCBI GI NO: 24745889 NR Description: NAD(P)H:quinone oxidoreductase [Solanum tuberosum]
  misc_feature (1)..(142): NCBI GI NO: 15232856 NR Description: NADPH:quinone oxidoreductase (NQR)
  misc_feature (1)..(142): NCBI GI NO: 5002232 NR Description: NADPH:quinone oxidoreductase
  misc_feature (1)..(142): NCBI GI NO: 15596401 NR Description: conserved hypothetical protein
  misc_feature (1)..(127): NCBI GI NO: 23135834 NR Description: hypothetical protein [Cytophaga hutchinsonii]
  misc_feature (1)..(137): NCBI GI NO: 22964797 NR Description: hypothetical protein [Rhodopseudomonas palustris]
  misc_feature (1)..(142): NCBI GI NO: 22406524 NR Description: hypothetical protein [Ferroplasma acidarmanus]
  misc_feature (1)..(143): NCBI GI NO: 40549313 NR Description: YieF [Salmonella enterica]
MVNPDLETDGGKGFPPAVEALRDSVRAADCFLFASPEYNYSVTASLKNALDWASRGKRNCWADRAAAIVCAGGDFGGARASLHLRQIGVFLDLHFINKPELHVRAFAEPPKFDEEGNLIDAETRERLRKVLLSLQAFALRLQHNMDD

SEQ ID NO: 12318 - DNA, 1156 bp, Triticum aestivum
  misc_feature (1)..(1156): Ceres Seq. ID no. 13583434
attacacacctgcatctcggaatcatcgcgcagcatcaggcgattcgacctcgccgttgcccaggcgccggagacgacgacgccgacgagatgacggtgttccacttcctcaactgcgcggtcctcaccttcggcccccacgtcgtctactactccgccacccccctgtcagagtatgacacgattggcaccagtgtaaaagcagctgttgtttatcttggagcagcacttgtaaagcttgtttgtttagcaacgttcctcaaagtacctgatgcgaatgatagctttgatccctaccaggaattaatgaaaattctaattgggtttatagatgttgctggcctttattttgctttgacacagttgacccacagaaacatctcccagaaccataagttccaggctgttggtcttggctgggcttttgctgattcagttctgcacaggcttgcacctctctggattggggcacgagggcttgaatttacttgggagtacatattccaaggacttgaagcaaatgccaatcttgtgatgaccctctcccttgctgcattaggatccttgatgtggctgaggaagaacaaacctaggactttaattccaataatttatgcatgtgctctgcttctggcaacaatgccatctatcaccagttacttgcggagatcattggagtggcagactcccaaggtggttggcttcgagctctcctcctccttggttatggctttcatcagctggcagctgttctcggcttgtcagaggccgatgtaatcaacgaaacaaagcactgcgggatttgccggagatttggtgctcccaagatgtctcttgttgtacttgggcaaaattagaatgctgcttagagcctcggcgctaccgtaacatatattttgaggttcagttgcagaacgttttactttatttgtcggccatagtgcagaaacacatgatctgatgagtgctactgctactgtaacaggtgctcttgtaggaatcgagctaaaacgtagcaccttattccctgttgtatcacatattctgctcaatagcattgcatcttctagtctgaagccaagacattcacttatgccgacagattatgagaaaatacactgtcgtttcatctttggtacgatacatggttttggtc

SEQ ID NO: 12319 - protein, 258 aa, Triticum aestivum
  peptide (1)..(258): Ceres Seq. ID no. 13583435
  misc_feature (31)..(257): NCBI GI NO: 18401831 NR Description: expressed protein [Arabidopsis thaliana]
  misc_feature (140)..(203): NCBI GI NO: 15220273 NR Description: cytochrome P450 -related [Arabidopsis thaliana]
  misc_feature (201)..(257): NCBI GI NO: 15220273 NR Description: cytochrome P450 -related [Arabidopsis thaliana]
  misc_feature (31)..(253): NCBI GI NO: 17556931 NR Description: Seven transmembrane domain protein like (25.0 kD)
  misc_feature (31)..(207): NCBI GI NO: 39593965 NR Description: Hypothetical protein CBG16516
  misc_feature (31)..(204): NCBI GI NO: 7511137 NR Description: hypothetical protein ZK418
  misc_feature (31)..(177): NCBI GI NO: 3550427 NR Description: seven transmembrane domain protein [Homo sapiens]
  misc_feature (31)..(178): NCBI GI NO: 12841501 NR Description: unnamed protein product [Mus musculus]
  misc_feature (31)..(178): NCBI GI NO: 14249166 NR Description: seven transmembrane domain protein [Homo sapiens]
  misc_feature (31)..(178): NCBI GI NO: 27731097 NR Description: similar to seven transmembrane domain protein
ITHLHLGIIAQHQAIRPRRCPGAGDDDADEMTVFHFLNCAVLTFGPHVVYYSATPLSEYDTIGTSVKAAVVYLGAALVKLVCLATFLKVPDANDSFDPYQELMKILIGFIDVAGLYFALTQLTHRNISQNHKFQAVGLGWAFADSVLHRLAPLWIGARGLEFTWEYIFQGLEANANLVMTLSLAALGSLMWLRKNKPRTLIPIIYACALLLATMPSITSYLRRSLEWQTPKVVGFELSSSLVMAFISWQLFSACQRPM

SEQ ID NO: 12320 - protein, 228 aa, Triticum aestivum
  peptide (1)..(228): Ceres Seq. ID no. 13583436
  misc_feature (1)..(227): NCBI GI NO: 18401831 NR Description: expressed protein [Arabidopsis thaliana]
  misc_feature (110)..(173): NCBI GI NO: 15220273 NR Description: cytochrome P450 -related [Arabidopsis thaliana]
  misc_feature (171)..(227): NCBI GI NO: 15220273 NR Description: cytochrome P450 -related [Arabidopsis thaliana]
  misc_feature (1)..(223): NCBI GI NO: 17556931 NR Description: Seven transmembrane domain protein like (25.0 kD)
  misc_feature (1)..(177): NCBI GI NO: 39593965 NR Description: Hypothetical protein CBG16516
  misc_feature (1)..(174): NCBI GI NO: 7511137 NR Description: hypothetical protein ZK418
  misc_feature (1)..(147): NCBI GI NO: 3550427 NR Description: seven transmembrane domain protein [Homo sapiens]
  misc_feature (1)..(148): NCBI GI NO: 12841501 NR Description: unnamed protein product [Mus musculus]
  misc_feature (1)..(148): NCBI GI NO: 27731097 NR Description: similar to seven transmembrane domain protein
  misc_feature (1)..(148): NCBI GI NO: 21312420 NR Description: seven transmembrane domain protein [Mus musculus]
MTVFHFLNCAVLTFGPHVVYYSATPLSEYDTIGTSVKAAVVYLGAALVKLVCLATFLKVPDANDSFDPYQELMKILIGFIDVAGLYFALTQLTHRNISQNHKFQAVGLGWAFADSVLHRLAPLWIGARGLEFTWEYIFQGLEANANLVMTLSLAALGSLMWLRKNKPRTLIPIIYACALLLATMPSITSYLRRSLEWQTPKVVGFELSSSLVMAFISWQLFSACQRPM

SEQ ID NO: 12321 - protein, 156 aa, Triticum aestivum
  peptide (1)..(156): Ceres Seq. ID no. 13583437
  misc_feature (1)..(155): NCBI GI NO: 18401831 NR Description: expressed protein [Arabidopsis thaliana]
  misc_feature (38)..(101): NCBI GI NO: 15220273 NR Description: cytochrome P450 -related [Arabidopsis thaliana]
  misc_feature (99)..(155): NCBI GI NO: 15220273 NR Description: cytochrome P450 -related [Arabidopsis thaliana]
  misc_feature (1)..(151): NCBI GI NO: 17556931 NR Description: Seven transmembrane domain protein like (25.0 kD)
  misc_feature (1)..(105): NCBI GI NO: 39593965 NR Description: Hypothetical protein CBG16516
  misc_feature (1)..(102): NCBI GI NO: 7511137 NR Description: hypothetical protein ZK418
  misc_feature (1)..(75): NCBI GI NO: 3550427 NR Description: seven transmembrane domain protein [Homo sapiens]
  misc_feature (1)..(76): NCBI GI NO: 12841501 NR Description: unnamed protein product [Mus musculus]
  misc_feature (1)..(76): NCBI GI NO: 27731097 NR Description: similar to seven transmembrane domain protein
  misc_feature (1)..(76): NCBI GI NO: 21312420 NR Description: seven transmembrane domain protein [Mus musculus]
MKILIGFIDVAGLYFALTQLTHRNISQNHKFQAVGLGWAFADSVLHRLAPLWIGARGLEFTWEYIFQGLEANANLVMTLSLAALGSLMWLRKNKPRTLIPIIYACALLLATMPSITSYLRRSLEWQTPKVVGFELSSSLVMAFISWQLFSACQRPM

SEQ ID NO: 12322 - DNA, 776 bp, Triticum aestivum
  misc_feature (1)..(776): Ceres Seq. ID no. 12587829
gaaaaatcacaagctagcaagcccacctagctcagccacaagcctagccagtacactctagttggccacttgcttcatcaacatagcaatggcgccctccaagctcgctctcttcctcgccctgaaccaggtcctcttggcagccgtgcatggctgcgggtcgtactgcggcaatacaccggccgtcccagtgccaacatcaccgatcgccgtgtctccgcccgccatcccagtccctgcccccgccgacaaccggaggaggcagcggcacctgctcgatcaacacgctgaagctgaaggtgtgcgccaacgtactgaacctgctgaagctcaacttagccgtgctggcgagcgacgactgctgcccgctgttgggcgggctcgccgacctcgacgtcgccgtgtgcctctacaccgccatcaaggccaatgtcctcggcatcaagctcaacgtccccgtcgacctcgttctcctcctcaaccagtgcggcaagacctgccccgccgacttcacctgccccagctgatccacccatcatccctcgaaccatgcatcacaaaccatgtgtcgtcgtcatcatactcgtctttggtttgcatgccatcacacccgtcactcgtgcatgcatgcacgcttacgtgttcatttcttccagggactgcttataagatagtcgttgatcattgtattccgataggatatctaaatgcatggttcgcatatttgtaaaatgatatacatacgtggaataaaatgattcaagttgtgttaactc

SEQ ID NO: 12323 - protein, 213 aa, Triticum aestivum
  peptide (1)..(213): Ceres Seq. ID no. 12587830
  misc_feature (4)..(45): NCBI GI NO: 4240033 NR Description: ZmGR1a [Zea mays]
  misc_feature (4)..(45): NCBI GI NO: 4240035 NR Description: ZmGR1b [Zea mays]
MAPSKLALFLALNQVLLAAVHGCGSYCGNTPAVPVPTSPIAVSPPAIPVPAPADNRRRQRHLLDQHAEAEGVRQRTEPAEAQLSRAGERRLLPAVGRARRPRRRRVPLHRHQGQCPRHQAQRPRRPRSPPQPVRQDLPRRLHLPQLIHPSSLEPCITNHVSSSSYSSLVCMPSHPSLVHACTLTCSFLPGTAYKIVVDHCIPIGYLNAWFAYL

SEQ ID NO: 12324 - protein, 125 aa, Triticum aestivum
  peptide (1)..(125): Ceres Seq. ID no. 12587831
  misc_feature (42)..(123): Pfam Name: Pfam Description:  Protease inhibitor/seed storage/LTP family
  misc_feature (15)..(124): NCBI GI NO: 39748092 NR Description: lipid transfer protein-like protein
  misc_feature (25)..(123): NCBI GI NO: 4240033 NR Description: ZmGR1a [Zea mays]
  misc_feature (15)..(123): NCBI GI NO: 37536718 NR Description: putative lipid transfer protein
  misc_feature (7)..(123): NCBI GI NO: 37536712 NR Description: putative lipid transfer protein
  misc_feature (25)..(123): NCBI GI NO: 4240035 NR Description: ZmGR1b [Zea mays]
  misc_feature (26)..(123): NCBI GI NO: 37533212 NR Description: putative lipid transfer protein
  misc_feature (17)..(125): NCBI GI NO: 2226329 NR Description: physical impedance induced protein [Zea mays]
  misc_feature (20)..(123): NCBI GI NO: 15235390 NR Description: pEARLI 1-like protein; protein id: At4g12500.1
  misc_feature (1)..(125): NCBI GI NO: 38568018 NR Description: OSJNBa0070C17.10
  misc_feature (20)..(123): NCBI GI NO: 15235386 NR Description: pEARLI 1; protein id: At4g12480
MAAGRTAAIHRPSQCQHHRSPCLRPPSQSLPPPTTGGGSGTCSINTLKLKVCANVLNLLKLNLAVLASDDCCPLLGGLADLDVAVCLYTAIKANVLGIKLNVPVDLVLLLNQCGKTCPADFTCPS

SEQ ID NO: 12325 - DNA, 1330 bp, Triticum aestivum
  misc_feature (1)..(1330): Ceres Seq. ID no. 15179743
agttttccccgtcggtctcctcccccagatccacatccacccatcgccatggcgatctccccccgcctcctcctcccgctcctcctcgcggcggcggccgcctccgccttcgccggcgccaacgacctggtcggcgagctccagtccctccgctcccgctcccccgccggcgtgatccacctcaccgacacctccgtcacccgcttcctctcctcgccggccccgcgcccctactccgtcctcgtcttcttcgacgccacctcgctccactccaagaccgacctccacctcccccagctccgccgcgagttcgcgctcctctccgcctccttccacgccaacaaccccgactcctccgacctcttcttcgccgacatcgagttctccgagtcgcagcactccttctcccagttcggcgtcaactccctcccccacgtccgcctcatccgcccggagcactcccgcctcgccgactcggagcagatggaccagtcccacttctcccgcctcgccgactccatggtcgagttcgtggaggcccgcaccggcctcgaggtcggccccatcgtccgcccgcctctcgtctcccgcaaccagatgatcctgctcggcctcttgttcctgatctccatcccgttcgggatcaagaggatcatggaaggggacaccctgcttcatgaccgcaagctttggatggccggggcgctgttcgtctacttcttcagcgtctcagggggcatgtacgggatcatcaggcatacgcccatgttcatcaccgaccgggaggatccaaacaagctcgtcttcttctaccagggctcagggatgcagctcggcgcagaggggtttgctgtcggtttcctgtacaccctcgtggggctgatgatagctgtggtgacacacttgctggtgaaggtggagagcctgcagacacagcgatttgcgatgctggcagtcatggccatcgggtggtgggcagtcaggaaggtgatttacctggataactggaagactgggtacggcattcataccttctggccgagtagctggaggtaaatgttgtctcaaccggcgatcgatgcttctttcctttggttgcagaggacgcggagtcatccagatcggccatactgagatagagcatcattttggttgtaacgtcgtactagcaagtttagcatttcaattctctggtgctttattgtggaatatagagaaccgagtcattttataccgaggattttaacttgcagtattacttgaacaatggtaaatcctagctgatatttgttttcaggcagtaaccccggccaaggatattaaccgtggg

SEQ ID NO: 12326 - protein, 351 aa, Triticum aestivum
  peptide (1)..(351): Ceres Seq. ID no. 15179744
  misc_feature (24)..(344): Pfam Name: Pfam Description:  OST3 / OST6 family
  misc_feature (23)..(351): NCBI GI NO: 14091860 NR Description: Putative protein with similarity to putativeprostate cancer tumor suppressor
  misc_feature (17)..(351): NCBI GI NO: 15220609 NR Description: hypothetical protein [Arabidopsis thaliana]
  misc_feature (41)..(351): NCBI GI NO: 15220421 NR Description: hypothetical protein [Arabidopsis thaliana]
  misc_feature (41)..(326): NCBI GI NO: 25402667 NR Description: protein T23J18.22
SFPRRSPPPDPHPPIAMAISPRLLLPLLLAAAAASAFAGANDLVGELQSLRSRSPAGVIHLTDTSVTRFLSSPAPRPYSVLVFFDATSLHSKTDLHLPQLRREFALLSASFHANNPDSSDLFFADIEFSESQHSFSQFGVNSLPHVRLIRPEHSRLADSEQMDQSHFSRLADSMVEFVEARTGLEVGPIVRPPLVSRNQMILLGLLFLISIPFGIKRIMEGDTLLHDRKLWMAGALFVYFFSVSGGMYGIIRHTPMFITDREDPNKLVFFYQGSGMQLGAEGFAVGFLYTLVGLMIAVVTHLLVKVESLQTQRFAMLAVMAIGWWAVRKVIYLDNWKTGYGIHTFWPSSWR

SEQ ID NO: 12327 - protein, 335 aa, Triticum aestivum
  peptide (1)..(335): Ceres Seq. ID no. 15179745
  misc_feature (8)..(328): Pfam Name: Pfam Description:  OST3 / OST6 family
  misc_feature (7)..(335): NCBI GI NO: 14091860 NR Description: Putative protein with similarity to putativeprostate cancer tumor suppressor
  misc_feature (1)..(335): NCBI GI NO: 15220609 NR Description: hypothetical protein [Arabidopsis thaliana]
  misc_feature (25)..(335): NCBI GI NO: 15220421 NR Description: hypothetical protein [Arabidopsis thaliana]
  misc_feature (25)..(310): NCBI GI NO: 25402667 NR Description: protein T23J18.22
MAISPRLLLPLLLAAAAASAFAGANDLVGELQSLRSRSPAGVIHLTDTSVTRFLSSPAPRPYSVLVFFDATSLHSKTDLHLPQLRREFALLSASFHANNPDSSDLFFADIEFSESQHSFSQFGVNSLPHVRLIRPEHSRLADSEQMDQSHFSRLADSMVEFVEARTGLEVGPIVRPPLVSRNQMILLGLLFLISIPFGIKRIMEGDTLLHDRKLWMAGALFVYFFSVSGGMYGIIRHTPMFITDREDPNKLVFFYQGSGMQLGAEGFAVGFLYTLVGLMIAVVTHLLVKVESLQTQRFAMLAVMAIGWWAVRKVIYLDNWKTGYGIHTFWPSSWR

SEQ ID NO: 12328 - protein, 225 aa, Triticum aestivum
  peptide (1)..(225): Ceres Seq. ID no. 15179746
  misc_feature (20)..(207): Pfam Name: Pfam Description:  Formin Homology 2 Domain
  misc_feature (20)..(214): NCBI GI NO: 81286 NR Description: extensin - Volvox carteri (fragment)
FSPSVSSPRSTSTHRHGDLPPPPPPAPPRGGGRLRLRRRQRPGRRAPVPPLPLPRRRDPPHRHLRHPLPLLAGPAPLLRPRLLRRHLAPLQDRPPPPPAPPRVRAPLRLLPRQQPRLLRPLLRRHRVLRVAALLLPVRRQLPPPRPPHPPGALPPRRLGADGPVPLLPPRRLHGRVRGGPHRPRGRPHRPPASRLPQPDDPARPLVPDLHPVRDQEDHGRGHPAS

SEQ ID NO: 12329 - DNA, 726 bp, Triticum aestivum
  misc_feature (1)..(726): Ceres Seq. ID no. 12592975
aaatctaccaccgctctccctctcccggcctgcactcacaagcagcggcgaagccttctctgccttcctcctcctctctctttctgccatgaagccccctcacttcactggggaagcggcagccagcgcctcatgggctcacgaggtcaagcaggccctccgtgacaagctccggtggacacccgccgcgggcaccacgggcaccggcggccacggcgccgcgaggccgccgacggcctcctcggctgtgaccgccgagccggcggtgcagccggcccacggcgccgactgccggggcttggccgccgccgaggaccccatcaggagggtcatgttcttggccccctggggccacacataaacgagaaaagcaagtgcacgcacggccatgccttgtcttggccggatctgcaattgcacctcaacaaaaatatggactagtacgtatatatatgtggccgtatggaccatcaactgatgaacatgaactcatcaaggaccaattaaaaactgggactagatcgggagaagaagatgtggtgcttgaggtatttgttcatgtttctcttggagagatgcatgcatgcatggggagatctcgcctgacgggtttggtgcatatatatggcctatgggtgttgctgcctggccggttgaagctgcagctttgttgtagccatgaacctgttttttttgtttctctccagaaaatctgtaccaagagcc

SEQ ID NO: 12330 - protein, 119 aa, Triticum aestivum
  peptide (1)..(119): Ceres Seq. ID no. 12592976
  misc_feature (30)..(119): NCBI GI NO: 40714687 NR Description: expressed protein
NLPPLSLSRPALTSSGEAFSAFLLLSLSAMKPPHFTGEAAASASWAHEVKQALRDKLRWTPAAGTTGTGGHGAARPPTASSAVTAEPAVQPAHGADCRGLAAAEDPIRRVMFLAPWGHT

SEQ ID NO: 12331 - protein, 91 aa, Triticum aestivum
  peptide (1)..(91): Ceres Seq. ID no. 12592977
MWPYGPSTDEHELIKDQLKTGTRSGEEDVVLEVFVHVSLGEMHACMGRSRLTGLVHIYGLWVLLPGRLKLQLCCSHEPVFFVSLQKICTKS

SEQ ID NO: 12332 - protein, 90 aa, Triticum aestivum
  peptide (1)..(90): Ceres Seq. ID no. 12592978
  misc_feature (1)..(90): NCBI GI NO: 40714687 NR Description: expressed protein
MKPPHFTGEAAASASWAHEVKQALRDKLRWTPAAGTTGTGGHGAARPPTASSAVTAEPAVQPAHGADCRGLAAAEDPIRRVMFLAPWGHT

SEQ ID NO: 12333 - DNA, 986 bp, Triticum aestivum
  misc_feature (1)..(986): Ceres Seq. ID no. 14302449
aaaaatcgccttcgtctttccccgtcgtctccaccaacgccagtttttccccgtcgtctccaccaacgccagtccaaatccaaacccgaaggaggaagagaggctagctagctagggttccgcctcccgccggccggagagagggagagagaggatgacgacggcggcgcggccaacgtgggcgccagcgaagggcgggaacgagcagggcggcacgcgtatcttcgggccctccgggaagtactcctcccgcgacctcgccgcacacacctccctcaagcccagaaaagagggacaacaaactcaagaggaggtacagaagaggaatcttagggatgaacttgaggagcgtgaacgcaagcacttctcatccaaggataagtcctatgttgacgagagggaccggcgaaaaagttcaggcctgctcttagaaggttcaaaacgggatgaggataagatagttccacgtgaaattgatgcagatgactctgacgtggaactaaaaagtgatgatgaaagcgacgatgatgacgacgacgatgacactgaggcactaatggcagagcttgaaaggattaaaaaagaaagagccgaggacaggcttagaaaggagcgtcagcaagcagaagaagaggccaagatgaaggaggctgagctgatgcgaggaaacccactgatcaatatgaataattctggctccttcaatgtgaagagaaggtgggatgatgatgttgtattcaagaaccaggctcgtggagagactaagacaccgaaacggttcatcaatgacaccatcagaagtgatttccaccgcaagtttctgcataggtacatgaaatgatgctgctgtatgctttatgttgtctggacagtatgcatgctgaaagagcctgtgatgtttctgtattctgaagatcgatttgtatgacataactgtaacagctacgttatcttaatggtgatatgtttaccctgttcctaagagt

SEQ ID NO: 12334 - protein, 228 aa, Triticum aestivum; identical to SEQ ID NO: 6710
  peptide (1)..(228): Ceres Seq. ID no. 14302450
  misc_feature (1)..(228): Pfam Name: Pfam Description:  Cwf15/Cwc15 cell cycle control protein
  misc_feature (1)..(228): NCBI GI NO: 34897750 NR Description: ESTs AU032852
  misc_feature (1)..(228): NCBI GI NO: 21592359 NR Description: unknown [Arabidopsis thaliana]
  misc_feature (1)..(228): NCBI GI NO: 15451186 NR Description: Unknown protein [Arabidopsis thaliana]
  misc_feature (1)..(228): NCBI GI NO: 18399903 NR Description: expressed protein [Arabidopsis thaliana]
  misc_feature (1)..(228): NCBI GI NO: 12963537 NR Description: RIKEN cDNA 0610040D20 [Mus musculus]
  misc_feature (1)..(228): NCBI GI NO: 6523797 NR Description: adrenal gland protein AD-002 [Homo sapiens]
  misc_feature (1)..(228): NCBI GI NO: 27719369 NR Description: similar to RIKEN cDNA 0610040D20
  misc_feature (1)..(228): NCBI GI NO: 7705475 NR Description: hypothetical protein HSPC148 [Homo sapiens]
  misc_feature (1)..(228): NCBI GI NO: 39582427 NR Description: Hypothetical protein CBG22646
  misc_feature (1)..(228): NCBI GI NO: 17564200 NR Description: adrenal gland protein AD-002 like (26

SEQ ID NO: 12335 - DNA, 1003 bp, Triticum aestivum
  misc_feature (1)..(1003): Ceres Seq. ID no. 15173911
gactttggcttgatcaagtaggtatatatacatatcctctgctgctcctcccccgcaaacgatcgacgggcctggccggcgcagcctgcgacgtccgagctcccgccgcgccgtctccggccatggggttccccctggtgtgctactgcgtcgccatccccaagccgatcatcgccttctgcaagctcgtcgccgccgtccgggacgccctcctcctgctgctctccctcgtcggcctctgccgctccccgcgccgctccgtccacgacgccccgctgcccgaggaggtcaaggagcgcctcccggccgtcgagttctccttgctggcgcgtccggcgcagcagcagcaggggtgccacgacggggacgccgcggcggcggcgacgtgcatcgtgtgcctggagcggctgcgggcggcggacgaggtgcggcggctgggcaactgcgcgcacgccttccaccgcggctgcatcgacgggtggatcgacctcggccggaccacctgcccgctgtgccgctcccacctactgccccgccccgcggagggacggcccgctcgccagcctcctcacgcgcgtttggtgacgaccaaccgcgccactcgttcgttagctccaaggccacgtctttccttgtcccagcgcggtggcggccgacacagagattcgcgatctcgaccggctgcacgtatatttattgtgggtttacatcgtctcaaaatcgggattttatttagtaatttagtttagggcgccactttgtatagccatccaatcacgaggtcaccaataggtgcacaagcatagttttttttttccgtagagaaggattagtcggtcaaatatatgcgtggtcgtgtttggctagtggatctgaaatgtcaacagctcgagaacgcatgtcgctgttcgacttgtccaatcccactcgtgggactacgacgtacagttgtagtataactcatacttgattcttcatatcaaattgatgattgtttgctgcc

SEQ ID NO: 12336 - protein, 248 aa, Triticum aestivum
  peptide (1)..(248): Ceres Seq. ID no. 15173912
  misc_feature (129)..(171): Pfam Name: RING finger Pfam Description: Zinc finger, C3HC4 type
  misc_feature (41)..(182): NCBI GI NO: 38345870 NR Description: OSJNBa0064M23.12
  misc_feature (96)..(177): NCBI GI NO: 32488512 NR Description: OSJNBa0011J08.19
  misc_feature (121)..(189): NCBI GI NO: 34903102 NR Description: unnamed protein product
  misc_feature (41)..(180): NCBI GI NO: 34897812 NR Description: P0514G12.26
  misc_feature (41)..(177): NCBI GI NO: 15222553 NR Description: RING-H2 finger protein, putative
  misc_feature (125)..(182): NCBI GI NO: 18379162 NR Description: C3HC4-type zinc finger protein family (RHA2b)
  misc_feature (125)..(182): NCBI GI NO: 25410884 NR Description: probable RING-H2 finger protein RHA2b
  misc_feature (117)..(188): NCBI GI NO: 15227929 NR Description: RING zinc finger protein -related
  misc_feature (120)..(184): NCBI GI NO: 34907968 NR Description: P0446G04.15
  misc_feature (98)..(173): NCBI GI NO: 21554155 NR Description: RING zinc finger protein-like
LWLDQVGIYTYPLLLLPRKRSTGLAGAACDVRAPAAPSPAMGFPLVCYCVAIPKPIIAFCKLVAAVRDALLLLLSLVGLCRSPRRSVHDAPLPEEVKERLPAVEFSLLARPAQQQQGCHDGDAAAAATCIVCLERLRAADEVRRLGNCAHAFHRGCIDGWIDLGRTTCPLCRSHLLPRPAEGRPARQPPHARLVTTNRATRSLAPRPRLSLSQRGGGRHRDSRSRPAARIFIVGLHRLKIGILFSNLV

SEQ ID NO: 12337 - protein, 208 aa, Triticum aestivum
  peptide (1)..(208): Ceres Seq. ID no. 15173913
  misc_feature (89)..(131): Pfam Name: RING finger Pfam Description: Zinc finger, C3HC4 type
  misc_feature (1)..(142): NCBI GI NO: 38345870 NR Description: OSJNBa0064M23.12
  misc_feature (56)..(137): NCBI GI NO: 32488512 NR Description: OSJNBa0011J08.19
  misc_feature (81)..(149): NCBI GI NO: 34903102 NR Description: unnamed protein product
  misc_feature (1)..(140): NCBI GI NO: 34897812 NR Description: P0514G12.26
  misc_feature (1)..(137): NCBI GI NO: 15222553 NR Description: RING-H2 finger protein, putative
  misc_feature (85)..(142): NCBI GI NO: 18379162 NR Description: C3HC4-type zinc finger protein family (RHA2b)
  misc_feature (85)..(142): NCBI GI NO: 25410884 NR Description: probable RING-H2 finger protein RHA2b
  misc_feature (77)..(148): NCBI GI NO: 15227929 NR Description: RING zinc finger protein -related
  misc_feature (80)..(144): NCBI GI NO: 34907968 NR Description: P0446G04.15
  misc_feature (58)..(133): NCBI GI NO: 21554155 NR Description: RING zinc finger protein-like
MGFPLVCYCVAIPKPIIAFCKLVAAVRDALLLLLSLVGLCRSPRRSVHDAPLPEEVKERLPAVEFSLLARPAQQQQGCHDGDAAAAATCIVCLERLRAADEVRRLGNCAHAFHRGCIDGWIDLGRTTCPLCRSHLLPRPAEGRPARQPPHARLVTTNRATRSLAPRPRLSLSQRGGGRHRDSRSRPAARIFIVGLHRLKIGILFSNLV

SEQ ID NO: 12338 - DNA, 1191 bp, Triticum aestivum
  misc_feature (1)..(1191): Ceres Seq. ID no. 12625265
gattccccacagccaaaaagagagaaaacatcggaagaggacgggagagggaggaaatttggagtcgagggggcaggagaaggggagagcagagaagcttggagggcggagcgcgtcggcgatggacggcgagtggtggaggaagaagtgggtggcgtgggcggcggcggcggccatcttcgtggtgctcatgctcgtcacgcccgccatcccgcaggacgaggactaccacgacttcgccgaccagcgcgacctcttcctagggatccctaacacattgaatgtgctctcaaatatccctttcctctttgttggtctcgctgggctcatcctgtgccactacaaaaactacttcaggctatgctcacagggggagctctggagttggacactcttctatgctggtgtcactactgtcggtgttggttcatcctactaccatctctacccaaacgatgccaccttagtttgggacagattgcctatgacgattgctttcacgtctattgtggccattttcatcattgaaagggttgatgatagagcaggaacaaagtcccttgcaccccttgttattgctggtgcactgagcatcctgtactggagtttctttgatgatcttcggccatatgcaataatccagttcgttccatgcattgtaatacctgtgatggctatagttattccaccaatgtatacacattcaagctactggttgtgggcagcaggattttaccttcttgccaaagtggaagaggctgcggacaaacctatatataggtggacacatgacattgttagcggacacactcttaaacatctatgtgctgcgatggtacctgttttcttgactctcatgttggcaaagaggacaattgaacctgatagggtaagcttactccagatgtggaagatcagttggagagaacgtggttcccaagatagcaacactgtagacgtcaaatatgattatgctgcagtttcaactacgtctgaacaacagtagatatgtgttcttcatatgtactctactcccgaagtgtaaaaatagcatcgatctgaatatcaggagccccagcttgcacggttgtgtatcattgcctgctaatcaacgttcgtatgttgttgttcctgatcaaaacttcctgatcatatcttgtacaggaaggaaaaatatatattagttccctt

SEQ ID NO: 12339 - protein, 334 aa, Triticum aestivum
  peptide (1)..(334): Ceres Seq. ID no. 12625266
  misc_feature (47)..(332): NCBI GI NO: 34905818 NR Description: P0483G10.13
  misc_feature (52)..(330): NCBI GI NO: 15223970 NR Description: unknown protein; protein id: At1g71190.1
  misc_feature (46)..(296): NCBI GI NO: 15239801 NR Description: putative protein; protein id: At5g11870.1
  misc_feature (49)..(294): NCBI GI NO: 29653854 NR Description: membrane protein, putative
  misc_feature (61)..(293): NCBI GI NO: 23029224 NR Description: hypothetical protein
  misc_feature (205)..(293): NCBI GI NO: 34903592 NR Description: P0419B01.9
  misc_feature (33)..(112): NCBI GI NO: 34903592 NR Description: P0419B01.9
  misc_feature (58)..(294): NCBI GI NO: 27376099 NR Description: blr0988 [Bradyrhizobium japonicum]
IPHSQKERKHRKRTGEGGNLESRGQEKGRAEKLGGRSASAMDGEWWRKKWVAWAAAAAIFVVLMLVTPAIPQDEDYHDFADQRDLFLGIPNTLNVLSNIPFLFVGLAGLILCHYKNYFRLCSQGELWSWTLFYAGVTTVGVGSSYYHLYPNDATLVWDRLPMTIAFTSIVAIFIIERVDDRAGTKSLAPLVIAGALSILYWSFFDDLRPYAIIQFVPCIVIPVMAIVIPPMYTHSSYWLWAAGFYLLAKVEEAADKPIYRWTHDIVSGHTLKHLCAAMVPVFLTLMLAKRTIEPDRVSLLQMWKISWRERGSQDSNTVDVKYDYAAVSTTSEQQ

SEQ ID NO: 12340 - protein, 294 aa, Triticum aestivum
  peptide (1)..(294): Ceres Seq. ID no. 12625267
  misc_feature (7)..(292): NCBI GI NO: 34905818 NR Description: P0483G10.13
  misc_feature (12)..(290): NCBI GI NO: 15223970 NR Description: unknown protein; protein id: At1g71190.1
  misc_feature (6)..(256): NCBI GI NO: 15239801 NR Description: putative protein; protein id: At5g11870.1
  misc_feature (9)..(254): NCBI GI NO: 29653854 NR Description: membrane protein, putative
  misc_feature (21)..(253): NCBI GI NO: 23029224 NR Description: hypothetical protein
  misc_feature (165)..(253): NCBI GI NO: 34903592 NR Description: P0419B01.9
  misc_feature (1)..(72): NCBI GI NO: 34903592 NR Description: P0419B01.9
  misc_feature (18)..(254): NCBI GI NO: 27376099 NR Description: blr0988 [Bradyrhizobium japonicum]
MDGEWWRKKWVAWAAAAAIFVVLMLVTPAIPQDEDYHDFADQRDLFLGIPNTLNVLSNIPFLFVGLAGLILCHYKNYFRLCSQGELWSWTLFYAGVTTVGVGSSYYHLYPNDATLVWDRLPMTIAFTSIVAIFIIERVDDRAGTKSLAPLVIAGALSILYWSFFDDLRPYAIIQFVPCIVIPVMAIVIPPMYTHSSYWLWAAGFYLLAKVEEAADKPIYRWTHDIVSGHTLKHLCAAMVPVFLTLMLAKRTIEPDRVSLLQMWKISWRERGSQDSNTVDVKYDYAAVSTTSEQQ

SEQ ID NO: 12341 - protein, 271 aa, Triticum aestivum
  peptide (1)..(271): Ceres Seq. ID no. 12625268
  misc_feature (1)..(269): NCBI GI NO: 34905818 NR Description: P0483G10.13
  misc_feature (1)..(267): NCBI GI NO: 15223970 NR Description: unknown protein; protein id: At1g71190.1
  misc_feature (1)..(233): NCBI GI NO: 15239801 NR Description: putative protein; protein id: At5g11870.1
  misc_feature (1)..(231): NCBI GI NO: 29653854 NR Description: membrane protein, putative
  misc_feature (1)..(230): NCBI GI NO: 23029224 NR Description: hypothetical protein
  misc_feature (142)..(230): NCBI GI NO: 34903592 NR Description: P0419B01.9
  misc_feature (1)..(49): NCBI GI NO: 34903592 NR Description: P0419B01.9
  misc_feature (1)..(231): NCBI GI NO: 27376099 NR Description: blr0988 [Bradyrhizobium japonicum]
MLVTPAIPQDEDYHDFADQRDLFLGIPNTLNVLSNIPFLFVGLAGLILCHYKNYFRLCSQGELWSWTLFYAGVTTVGVGSSYYHLYPNDATLVWDRLPMTIAFTSIVAIFIIERVDDRAGTKSLAPLVIAGALSILYWSFFDDLRPYAIIQFVPCIVIPVMAIVIPPMYTHSSYWLWAAGFYLLAKVEEAADKPIYRWTHDIVSGHTLKHLCAAMVPVFLTLMLAKRTIEPDRVSLLQMWKISWRERGSQDSNTVDVKYDYAAVSTTSEQQ

SEQ ID NO: 12342 - DNA, 587 bp, Triticum aestivum
  misc_feature (1)..(587): Ceres Seq. ID no. 13596922
agaacatcctaatcgaaaaactcctccacactcttaagctaagctaagcaagccagcatctcgatctactcttcctccagcaatggcgtcgtccaggagagccctcatcctgctggccgtcgtgctggcggcggtgccggcggcgctgagccagaagacgacggccccggcgcccgaggcggcgcccgagacgccggaggcgcctgcggcggggacgacgcccaaggcggcggcggcgccgaacgtgacggcggtgctggagaaggccgggcagtacaccaagttcatccggctgatggcgtcgacgcagcaggacacgcagctgaacgcgcaggccaacgactcggacacgggcttcacggtgttcgcccccaccgacagcgccttcaacagcctcaagccgggcaccctcaactcgctctcgcagcaggaccaggtgacgctggtgcaggcccacatcgtccccaccttctactccatggagtccttcgagaccgccagcaaccccgtccgcacccaggcctccggcaccgacgggccctgcaccgtcaacgtcaccgccaccagcaacagcgccgtcaacgtct

SEQ ID NO: 12343 - protein, 168 aa, Triticum aestivum
  peptide (1)..(168): Ceres Seq. ID no. 13596923
  misc_feature (57)..(167): Pfam Name: Pfam Description:  Fasciclin domain
  misc_feature (1)..(167): NCBI GI NO: 34910950 NR Description: putative arabinogalactan-like protein
  misc_feature (33)..(167): NCBI GI NO: 2129473 NR Description: arabinogalactan-like protein - loblolly pine
  misc_feature (39)..(167): NCBI GI NO: 15242651 NR Description: fasciclin-like arabinogalactan-protein (FLA11)
  misc_feature (39)..(167): NCBI GI NO: 21553523 NR Description: arabinogalactan protein-like
  misc_feature (41)..(167): NCBI GI NO: 5919185 NR Description: arabinogalactan protein Pop14A9
  misc_feature (39)..(167): NCBI GI NO: 30841338 NR Description: arabinogalactan protein [Gossypium hirsutum]
  misc_feature (1)..(167): NCBI GI NO: 21553590 NR Description: arabinogalactan protein-like
  misc_feature (1)..(167): NCBI GI NO: 24417458 NR Description: unknown [Arabidopsis thaliana]
  misc_feature (1)..(167): NCBI GI NO: 18379157 NR Description: fasciclin-like arabinogalactan-protein (FLA9)
  misc_feature (8)..(167): NCBI GI NO: 15239344 NR Description: fasciclin-like arabinogalactan-protein (FLA12)
MASSRRALILLAVVLAAVPAALSQKTTAPAPEAAPETPEAPAAGTTPKAAAAPNVTAVLEKAGQYTKFIRLMASTQQDTQLNAQANDSDTGFTVFAPTDSAFNSLKPGTLNSLSQQDQVTLVQAHIVPTFYSMESFETASNPVRTQASGTDGPCTVNVTATSNSAVNV

SEQ ID NO: 12344 - protein, 97 aa, Triticum aestivum
  peptide (1)..(97): Ceres Seq. ID no. 13596924
  misc_feature (1)..(96): Pfam Name: Pfam Description:  Fasciclin domain
  misc_feature (1)..(96): NCBI GI NO: 34910950 NR Description: putative arabinogalactan-like protein
  misc_feature (1)..(96): NCBI GI NO: 2129473 NR Description: arabinogalactan-like protein - loblolly pine
  misc_feature (1)..(96): NCBI GI NO: 15242651 NR Description: fasciclin-like arabinogalactan-protein (FLA11)
  misc_feature (1)..(96): NCBI GI NO: 21553523 NR Description: arabinogalactan protein-like
  misc_feature (1)..(96): NCBI GI NO: 5919185 NR Description: arabinogalactan protein Pop14A9
  misc_feature (1)..(96): NCBI GI NO: 30841338 NR Description: arabinogalactan protein [Gossypium hirsutum]
  misc_feature (1)..(96): NCBI GI NO: 21553590 NR Description: arabinogalactan protein-like
  misc_feature (1)..(96): NCBI GI NO: 24417458 NR Description: unknown [Arabidopsis thaliana]
  misc_feature (1)..(96): NCBI GI NO: 18379157 NR Description: fasciclin-like arabinogalactan-protein (FLA9)
  misc_feature (1)..(96): NCBI GI NO: 15239344 NR Description: fasciclin-like arabinogalactan-protein (FLA12)
MASTQQDTQLNAQANDSDTGFTVFAPTDSAFNSLKPGTLNSLSQQDQVTLVQAHIVPTFYSMESFETASNPVRTQASGTDGPCTVNVTATSNSAVNV

SEQ ID NO: 12345 - DNA, 952 bp, Triticum aestivum
  misc_feature (1)..(952): Ceres Seq. ID no. 15173907
gaaagacaaaaaccttgaggacttggctgcctagctatacttactaggcgtactctgaaattgaaatggagactccttctctgctttttctcaccaccttgttggcctttgcattcaaggcctccgttgctcaatggacgcctgcatatgcaacattctacggcggcagcgacgcgtcagacaccatgggtggtgcgtgcgggtacgggaacttgtacaatgctgggtacggggttaattcagccgcgttgagcacggcgctcttcaacaacggcgcatcatgcggcatgtgcttcactatcacctgcgacgctagcaagacgcagtcgtgcaaacagggcacgtccatcaccatcacggccaccaacttctgcccgcccaactacgccctggccagcgacaacggcggatggtgcaacccgccgcggcagcacttcgacatgtcgcaacccgcgtgggagaccatcgctgtctaccaagccggcattgtgcccgtcaactacaggagggttccctgccagaggagtgggggcatgaggttcaccattaacgggaacgactactttgagctcgtgacggtggcaaatgtcgccggtagcggcgtggtgtcccaaatgtggataaaggggtccaagaccgactggatggtaatgagcaggaactggggtgccagctggcagagcaatgcttacctcaacggccagagcttgtccttcaaggtacagaccgacgacggccgggtcgtcacggccgacaatgttgcgccatacaactggtggttcggtggcacctacacttcgtggcagcagttctaacatcttgcgaggttgatgatttcatttgtgggtactcaaataaacaggcccgatgatttcatccgaggctatatctcctattttgtttctttgtatctatgttttgcttgtccaagtttgtgtacttagcttgcctc

SEQ ID NO: 12346 - protein, 249 aa, Triticum aestivum
  peptide (1)..(249): Ceres Seq. ID no. 15173908
  misc_feature (157)..(234): Pfam Name: Pfam Description:  Pollen allergen
  misc_feature (6)..(249): NCBI GI NO: 34904664 NR Description: putative expansin
  misc_feature (1)..(249): NCBI GI NO: 7489472 NR Description: expansin 3 - rice
  misc_feature (6)..(249): NCBI GI NO: 9967926 NR Description: expansin [Schedonorus pratensis]
  misc_feature (1)..(249): NCBI GI NO: 37999973 NR Description: expansin-2 [Musa acuminata]
  misc_feature (6)..(245): NCBI GI NO: 34904668 NR Description: putative expansin
  misc_feature (7)..(249): NCBI GI NO: 20149056 NR Description: putative expansin [Capsicum annuum]
  misc_feature (7)..(245): NCBI GI NO: 30519752 NR Description: expansin11 [Lycopersicon esculentum]
  misc_feature (14)..(249): NCBI GI NO: 4027895 NR Description: alpha-expansin precursor [Nicotiana tabacum]
  misc_feature (1)..(247): NCBI GI NO: 11932092 NR Description: expansin [Cicer arietinum]
  misc_feature (1)..(249): NCBI GI NO: 30697882 NR Description: expansin, putative (EXP1) [Arabidopsis thaliana]
METPSLLFLTTLLAFAFKASVAQWTPAYATFYGGSDASDTMGGACGYGNLYNAGYGVNSAALSTALFNNGASCGMCFTITCDASKTQSCKQGTSITITATNFCPPNYALASDNGGWCNPPRQHFDMSQPAWETIAVYQAGIVPVNYRRVPCQRSGGMRFTINGNDYFELVTVANVAGSGVVSQMWIKGSKTDWMVMSRNWGASWQSNAYLNGQSLSFKVQTDDGRVVTADNVAPYNWWFGGTYTSWQQF

SEQ ID NO: 12347 - protein, 209 aa, Triticum aestivum
  peptide (1)..(209): Ceres Seq. ID no. 15173909
  misc_feature (117)..(194): Pfam Name: Pfam Description:  Pollen allergen
  misc_feature (1)..(209): NCBI GI NO: 34904664 NR Description: putative expansin
  misc_feature (1)..(209): NCBI GI NO: 7489472 NR Description: expansin 3 - rice
  misc_feature (1)..(209): NCBI GI NO: 9967926 NR Description: expansin [Schedonorus pratensis]
  misc_feature (1)..(209): NCBI GI NO: 37999973 NR Description: expansin-2 [Musa acuminata]
  misc_feature (1)..(205): NCBI GI NO: 34904668 NR Description: putative expansin
  misc_feature (1)..(209): NCBI GI NO: 20149056 NR Description: putative expansin [Capsicum annuum]
  misc_feature (1)..(205): NCBI GI NO: 30519752 NR Description: expansin11 [Lycopersicon esculentum]
  misc_feature (1)..(209): NCBI GI NO: 4027895 NR Description: alpha-expansin precursor [Nicotiana tabacum]
  misc_feature (1)..(207): NCBI GI NO: 11932092 NR Description: expansin [Cicer arietinum]
  misc_feature (1)..(209): NCBI GI NO: 30697882 NR Description: expansin, putative (EXP1) [Arabidopsis thaliana]
MGGACGYGNLYNAGYGVNSAALSTALFNNGASCGMCFTITCDASKTQSCKQGTSITITATNFCPPNYALASDNGGWCNPPRQHFDMSQPAWETIAVYQAGIVPVNYRRVPCQRSGGMRFTINGNDYFELVTVANVAGSGVVSQMWIKGSKTDWMVMSRNWGASWQSNAYLNGQSLSFKVQTDDGRVVTADNVAPYNWWFGGTYTSWQQF

SEQ ID NO: 12348 - protein, 175 aa, Triticum aestivum
  peptide (1)..(175): Ceres Seq. ID no. 15173910
  misc_feature (83)..(160): Pfam Name: Pfam Description:  Pollen allergen
  misc_feature (1)..(175): NCBI GI NO: 34904664 NR Description: putative expansin
  misc_feature (1)..(175): NCBI GI NO: 7489472 NR Description: expansin 3 - rice
  misc_feature (1)..(175): NCBI GI NO: 9967926 NR Description: expansin [Schedonorus pratensis]
  misc_feature (1)..(175): NCBI GI NO: 37999973 NR Description: expansin-2 [Musa acuminata]
  misc_feature (1)..(171): NCBI GI NO: 34904668 NR Description: putative expansin
  misc_feature (1)..(175): NCBI GI NO: 20149056 NR Description: putative expansin [Capsicum annuum]
  misc_feature (1)..(171): NCBI GI NO: 30519752 NR Description: expansin11 [Lycopersicon esculentum]
  misc_feature (1)..(175): NCBI GI NO: 4027895 NR Description: alpha-expansin precursor [Nicotiana tabacum]
  misc_feature (1)..(173): NCBI GI NO: 11932092 NR Description: expansin [Cicer arietinum]
  misc_feature (1)..(175): NCBI GI NO: 30697882 NR Description: expansin, putative (EXP1) [Arabidopsis thaliana]
MCFTITCDASKTQSCKQGTSITITATNFCPPNYALASDNGGWCNPPRQHFDMSQPAWETIAVYQAGIVPVNYRRVPCQRSGGMRFTINGNDYFELVTVANVAGSGVVSQMWIKGSKTDWMVMSRNWGASWQSNAYLNGQSLSFKVQTDDGRVVTADNVAPYNWWFGGTYTSWQQF

SEQ ID NO: 12349 - DNA, 1403 bp, Triticum aestivum
  misc_feature (1)..(1403): Ceres Seq. ID no. 13596780
cgaaaaaaaatagatcatggcgacccctcagatctaccgcaaaaccctcctccccgtcctcctcctgctcgccgccgcggcgctctacccagccgccgccgacggcgacgaggtgctcgccctcacggagtccaccttcgagaaggaggtcggccaggatcgtggcgcgctcgtcgagttctacgctccctggtgtggccactgcaagaagcttgctccagaatatgagaagcttgctgcaagttttaaaaaggctaaatcagtcttgattgccaaggttgactgcgatgagcacaagagtgtgtgcagcaagtatggagtttctggctaccccacaatccagtggtttcccaaaggttccttggagcccaagaagtatgagggtcaacgcactgctgaagcccttacagaatatgttaactctgaagcagcaaccaatgtgaagatagcagcagttccttcaagtgttgtggttctgaccgaggaaacctttgactcagttgtccttgatgaaaccaaagatgtccttgttgagttctatgccccatggtgtggtcactgcaagagtcttgctccgatatatgagaaggtggcctctgttttcaagcaagatgagggtgtcgtgattgctaatcttgatgctgacaaatacacaagcttggctgagaagtatggagtttctggttttcccacattgaagttcttcccgaagggtaacaaagctggtgaagagtatgagagcggtcgggagttggatgactttgttaagttcattaatgagaaaagtggaactagccgtgattcgaagggtcagcttacttcagaggctgggcttgtggcaagtttggatgctcttgtcaaggaattccacagtgctgctgatgacaagcggaaggaaatcctctctaaaattgaagaggaggctgcgaagctcagtggtcctgctgtcaagcacggaaagatctatgtgaatgttgcaaagaagatattgcagaagggctctgactataccaagaaggaaactgagaggcttcatcgcttgttggagaagtcgatcagtccttccaaagccgatgaattcgccatcaagaagaacattctttcagccttctcctcttagtggtggtgacccacgtgccatagtcagtagtgcaacagtaccacctgccacaagagagaagtgaagaaagacaaagagagatagagatcagagagatggcagtgaaagtttagcggcgatagatttatcttattttggttcaatgttgaacaacatctgatatctgttttctctgccgtttacctttatggttacagggatttactttagcagtaaaagggtttactcaagaacaaacagtaccaactggtaatgacattaataaatttgccatttgtgtttg

SEQ ID NO: 12350 - protein, 367 aa, Triticum aestivum
  peptide (1)..(367): Ceres Seq. ID no. 13596781
  misc_feature (32)..(139): Pfam Name: Pfam Description:  Thioredoxin
  misc_feature (1)..(367): NCBI GI NO: 34897646 NR Description: putative disulfide-isomerase precursor
  misc_feature (1)..(367): NCBI GI NO: 34894982 NR Description: putative protein disulfide isomerase
  misc_feature (15)..(366): NCBI GI NO: 729442 NR Description: PROBABLE PROTEIN DISULFIDE ISOMERASE P5 PRECURSOR
  misc_feature (1)..(365): NCBI GI NO: 15226610 NR Description: protein disulfide isomerase family
  misc_feature (18)..(366): NCBI GI NO: 7489183 NR Description: probable protein disulfide-isomerase (EC 5
  misc_feature (9)..(367): NCBI GI NO: 28829383 NR Description: similar to Dictyostelium discoideum (Slime mold)
  misc_feature (9)..(367): NCBI GI NO: 2627440 NR Description: protein disulfide isomerase; PDI; P5-like
  misc_feature (173)..(367): NCBI GI NO: 10180029 NR Description: putative protein disulfide-isomerase
  misc_feature (12)..(365): NCBI GI NO: 19114496 NR Description: putative protein disulfide isomerase (EC 5.3.4.1)
  misc_feature (14)..(365): NCBI GI NO: 11359594 NR Description: probable protein disulfide-isomerase (EC 5
MATPQIYRKTLLPVLLLLAAAALYPAAADGDEVLALTESTFEKEVGQDRGALVEFYAPWCGHCKKLAPEYEKLAASFKKAKSVLIAKVDCDEHKSVCSKYGVSGYPTIQWFPKGSLEPKKYEGQRTAEALTEYVNSEAATNVKIAAVPSSVVVLTEETFDSVVLDETKDVLVEFYAPWCGHCKSLAPIYEKVASVFKQDEGVVIANLDADKYTSLAEKYGVSGFPTLKFFPKGNKAGEEYESGRELDDFVKFINEKSGTSRDSKGQLTSEAGLVASLDALVKEFHSAADDKRKEILSKIEEEAAKLSGPAVKHGKIYVNVAKKILQKGSDYTKKETERLHRLLEKSISPSKADEFAIKKNILSAFSS

SEQ ID NO: 12351 - DNA, 1394 bp, Triticum aestivum
  misc_feature (1)..(1394): Ceres Seq. ID no. 14301576
actcttctcgtaacttccacactcgtgtccctttctttcctccccgtcgcttccgcagatcaaaattcaaaaccctagcgaactcctccgcaagcacgtgatcgaccggccatggcttccgccctcggagcccaggtggctgccgtggcgccgattggttcggatggtcgccactacaggagttgttcttcgctcaagggtaataactcccgcaataagtcatggactggaaaattagcatgggaaaacaagaccctgcaaccaagacatacgaagaaggtcttttgtatgtccgtgcaacaagcaagcaaaagtaaatgtaaagttgctattaaacctctggaactggagaatacaaaggagccacccctcaacttgtacaaaccaaagggaccctacacagcctcaattgtctccgttgagagaattgtaggtcctaaagctcctggtgaaacatgtcacattgtcattgaccatggtggtaatgtcccatactgggaaggacaaagttatggtgtcattcctccaggagagaacccaaagaaacctggggccccaaataccgtccgactctattctattgcgtctactaggtatggcgattcttttgatggaaggactgctagtctttgtgtgcgccgtgctgtttattatgatcctgaaactggaaaagaagatccttcaaagaagggtatctgcagtaacttcttgtgtgactcaaaaccaggtgacaaaattcagatcacaggcccctcaggcaaaataatgcttctgcctgaggatgacccaaacgcaactcatatcatgattggaactggcacgggtgttgctcctttccgtggctacctacgtcgtatgttcatggaagatgtcccatctttcaagtttggtggtctggcttggctctttcttggtgttgccaatactgacagcctgctctatgacgaagagttcacaaactaccttcagcagtatccagaaaatttcaggtatgacaaagcactaagccgggagcagaaaaacaagagcggtggcaagatgtatgtgcaggacaggatcgaggagtacagtgatgaaatcttcaagcttttggatgatggtgcacacatctacttctgtggtttgaaggggatgatgctagggattcaggacacactcaagagagtagctgagcaaagaggtgagagttgggatcagaagctgtcacagctgaaaaagaacaagcaatggcacgtcgaggtttactaggttacaatggctgagattgttaattattgtttcccggggagatggaaaacagaaagataagtaggtcattctcttcccattgtaaaattgtcaatattattcatacgcgtgtgcgtcgcatgattaataaaacaatgtgcaattac

SEQ ID NO: 12352 - protein, 378 aa, Triticum aestivum
  peptide (1)..(378): Ceres Seq. ID no. 14301577
  misc_feature (227)..(348): Pfam Name: Pfam Description:  Oxidoreductase NAD-binding domain
  misc_feature (1)..(378): NCBI GI NO: 3913653 NR Description: Ferredoxin--NADP reductase
  misc_feature (1)..(378): NCBI GI NO: 34897132 NR Description: ferredoxin-NADP+ reductase [Oryza sativa]
  misc_feature (56)..(378): NCBI GI NO: 1076803 NR Description: ferredoxin-NADP reductase (EC 1
  misc_feature (60)..(378): NCBI GI NO: 218163 NR Description: ferredoxin-NADP+ reductase enzyme
  misc_feature (7)..(378): NCBI GI NO: 3913648 NR Description: Ferredoxin--NADP reductase
  misc_feature (7)..(378): NCBI GI NO: 7433380 NR Description: ferredoxin-NADP reductase (EC 1
  misc_feature (1)..(378): NCBI GI NO: 30691910 NR Description: ferredoxin--NADP
  misc_feature (1)..(378): NCBI GI NO: 18397542 NR Description: ferredoxin--NADP
  misc_feature (1)..(378): NCBI GI NO: 21593597 NR Description: ferrodoxin NADP oxidoreductase, putative
  misc_feature (1)..(378): NCBI GI NO: 3913650 NR Description: Ferredoxin--NADP reductase
MASALGAQVAAVAPIGSDGRHYRSCSSLKGNNSRNKSWTGKLAWENKTLQPRHTKKVFCMSVQQASKSKCKVAIKPLELENTKEPPLNLYKPKGPYTASIVSVERIVGPKAPGETCHIVIDHGGNVPYWEGQSYGVIPPGENPKKPGAPNTVRLYSIASTRYGDSFDGRTASLCVRRAVYYDPETGKEDPSKKGICSNFLCDSKPGDKIQITGPSGKIMLLPEDDPNATHIMIGTGTGVAPFRGYLRRMFMEDVPSFKFGGLAWLFLGVANTDSLLYDEEFTNYLQQYPENFRYDKALSREQKNKSGGKMYVQDRIEEYSDEIFKLLDDGAHIYFCGLKGMMLGIQDTLKRVAEQRGESWDQKLSQLKKNKQWHVEVY

SEQ ID NO: 12353 - protein, 319 aa, Triticum aestivum
  peptide (1)..(319): Ceres Seq. ID no. 14301578
  misc_feature (168)..(289): Pfam Name: Pfam Description:  Oxidoreductase NAD-binding domain
  misc_feature (1)..(319): NCBI GI NO: 3913653 NR Description: Ferredoxin--NADP reductase
  misc_feature (1)..(319): NCBI GI NO: 34897132 NR Description: ferredoxin-NADP+ reductase [Oryza sativa]
  misc_feature (1)..(319): NCBI GI NO: 1076803 NR Description: ferredoxin-NADP reductase (EC 1
  misc_feature (1)..(319): NCBI GI NO: 218163 NR Description: ferredoxin-NADP+ reductase enzyme
  misc_feature (1)..(319): NCBI GI NO: 3913648 NR Description: Ferredoxin--NADP reductase
  misc_feature (1)..(319): NCBI GI NO: 7433380 NR Description: ferredoxin-NADP reductase (EC 1
  misc_feature (1)..(319): NCBI GI NO: 30691910 NR Description: ferredoxin--NADP
  misc_feature (1)..(319): NCBI GI NO: 18397542 NR Description: ferredoxin--NADP
  misc_feature (1)..(319): NCBI GI NO: 21593597 NR Description: ferrodoxin NADP oxidoreductase, putative
  misc_feature (1)..(319): NCBI GI NO: 3913650 NR Description: Ferredoxin--NADP reductase
MSVQQASKSKCKVAIKPLELENTKEPPLNLYKPKGPYTASIVSVERIVGPKAPGETCHIVIDHGGNVPYWEGQSYGVIPPGENPKKPGAPNTVRLYSIASTRYGDSFDGRTASLCVRRAVYYDPETGKEDPSKKGICSNFLCDSKPGDKIQITGPSGKIMLLPEDDPNATHIMIGTGTGVAPFRGYLRRMFMEDVPSFKFGGLAWLFLGVANTDSLLYDEEFTNYLQQYPENFRYDKALSREQKNKSGGKMYVQDRIEEYSDEIFKLLDDGAHIYFCGLKGMMLGIQDTLKRVAEQRGESWDQKLSQLKKNKQWHVEVY

SEQ ID NO: 12354 - DNA, 1282 bp, Triticum aestivum
  misc_feature (1)..(1282): Ceres Seq. ID no. 14302303
aacccaaacggcacgcccaaacccaaagccaagtcgcactcctcctcctatcctcttcctcgccgaggcggcgaccggccagcgccgcagcagcaaccccggccgccgccagctccacctccaccgcccgcgcgtctccgattcggcgaatttggggctgaggaaagaggaggagcgacttctctctgctctggtggttgcaacttcaggacaaggttttgagcttttgtctgtttccctgggatggatgccaagaagttcctgcagatggtcgaagacaagaagaagagactccttgagaagaaggaagccccactgaaatggcagcagaaactggaagcggcaattaaggccactgaagagaaggagaagaagctcaagtcaaaaaagcacaggaggcgaagctattcttcctcagagtctgacagtgaatccgagagcgacagtgatcggaaacacaggaagaggaaggaccgcaaaaggcacaggaaacatggccactctgactctgatggtgccaggaggcgcaagcacaggtcaaagaggaggagcttggactctagtgatgagagcgacagtgatgaatatgatagcgaatctgaagaagagcgcccaaggaagaagcactcgcacaggaggaagcatcaccgacactctccaaggtcagagtctgatgcttcagattacagcagcgatgatgatgagcggagatcaaccaggaaggaccacacaaggagccgcaggcgtcgccaccgatcattagacgatgaatctgaggacaagatcaggtcgaggcataggaagcgtcacagatcaagtgacgaggacaagccatcagattctgacatccataagcgtcacaggagccgctctatgtccttggatgatggtgctgctggtgagccagacaagatgaatgatggtaaggggtctcacaaaagccggcaccaccgccgccatcaccatcaccatcatgatcaccatggcaactctgctgaacccagtgacgggaagcaactcgtgtaagttgttaatgcctcagaacctgattggcgtcatcactgggctctgtgacgggaaggtttgccccagttggctagttgctgaatgaaagcatgtatctttcataatgttactgtctcggctctgctgcgacttctgaagcctgtacttgttgtactgaaaaatttggcgacaccagatgttatttccagcatttcctctgttgagacatggcttggttgctgatttggtggttaaacatgcctgtttcatttgctgc

SEQ ID NO: 12355 - protein, 260 aa, Triticum aestivum
  peptide (1)..(260): Ceres Seq. ID no. 14302304
  misc_feature (19)..(229): Pfam Name: Pfam Description:  Caldesmon
  misc_feature (1)..(258): NCBI GI NO: 34895374 NR Description: P0698A04.25
  misc_feature (1)..(238): NCBI GI NO: 18379151 NR Description: expressed protein [Arabidopsis thaliana]
  misc_feature (11)..(255): NCBI GI NO: 39586156 NR Description: Hypothetical protein CBG15274
  misc_feature (2)..(228): NCBI GI NO: 39594465 NR Description: Hypothetical protein CBG19125
  misc_feature (27)..(255): NCBI GI NO: 12834839 NR Description: unnamed protein product [Mus musculus]
  misc_feature (35)..(239): NCBI GI NO: 18379151 NR Description: expressed protein [Arabidopsis thaliana]
  misc_feature (2)..(221): NCBI GI NO: 17542856 NR Description: putative nuclear protein (4B983)
  misc_feature (36)..(247): NCBI GI NO: 39580460 NR Description: Hypothetical protein CBG20540
  misc_feature (36)..(249): NCBI GI NO: 25151613 NR Description: putative protein (80.3 kD) (5T676)
  misc_feature (2)..(223): NCBI GI NO: 17558378 NR Description: putative protein, with 4 coiled coil-4 domains
MDAKKFLQMVEDKKKRLLEKKEAPLKWQQKLEAAIKATEEKEKKLKSKKHRRRSYSSSESDSESESDSDRKHRKRKDRKRHRKHGHSDSDGARRRKHRSKRRSLDSSDESDSDEYDSESEEERPRKKHSHRRKHHRHSPRSESDASDYSSDDDERRSTRKDHTRSRRRRHRSLDDESEDKIRSRHRKRHRSSDEDKPSDSDIHKRHRSRSMSLDDGAAGEPDKMNDGKGSHKSRHHRRHHHHHHDHHGNSAEPSDGKQLV

SEQ ID NO: 12356 - protein, 252 aa, Triticum aestivum
  peptide (1)..(252): Ceres Seq. ID no. 14302305
  misc_feature (11)..(221): Pfam Name: Pfam Description:  Caldesmon
  misc_feature (1)..(250): NCBI GI NO: 34895374 NR Description: P0698A04.25
  misc_feature (1)..(230): NCBI GI NO: 18379151 NR Description: expressed protein [Arabidopsis thaliana]
  misc_feature (3)..(247): NCBI GI NO: 39586156 NR Description: Hypothetical protein CBG15274
  misc_feature (1)..(220): NCBI GI NO: 39594465 NR Description: Hypothetical protein CBG19125
  misc_feature (19)..(247): NCBI GI NO: 12834839 NR Description: unnamed protein product [Mus musculus]
  misc_feature (27)..(231): NCBI GI NO: 18379151 NR Description: expressed protein [Arabidopsis thaliana]
  misc_feature (1)..(213): NCBI GI NO: 17542856 NR Description: putative nuclear protein (4B983)
  misc_feature (28)..(239): NCBI GI NO: 39580460 NR Description: Hypothetical protein CBG20540
  misc_feature (28)..(241): NCBI GI NO: 25151613 NR Description: putative protein (80.3 kD) (5T676)
  misc_feature (1)..(215): NCBI GI NO: 17558378 NR Description: putative protein, with 4 coiled coil-4 domains
MVEDKKKRLLEKKEAPLKWQQKLEAAIKATEEKEKKLKSKKHRRRSYSSSESDSESESDSDRKHRKRKDRKRHRKHGHSDSDGARRRKHRSKRRSLDSSDESDSDEYDSESEEERPRKKHSHRRKHHRHSPRSESDASDYSSDDDERRSTRKDHTRSRRRRHRSLDDESEDKIRSRHRKRHRSSDEDKPSDSDIHKRHRSRSMSLDDGAAGEPDKMNDGKGSHKSRHHRRHHHHHHDHHGNSAEPSDGKQLV

SEQ ID NO: 12357 - DNA, 1628 bp, Triticum aestivum
  misc_feature (1)..(1628): Ceres Seq. ID no. 13596921
aaagaaattctcgccccccaacccaacccccaaccaaccaaccaaacccaaccgaagaagccgagccgaaccccactccgccgatcagccgctatgcgctgaggccgaatcgccgcagcccgaggaggagaagggggtggaggggatggaggggagtggcgggtccgcgtcgctgccgccgttcctcaccaagacgtacgagatggtggacgagccggccacggacgcggtggtggcgtggacgccgtccggcaccagcttcgtcgtcctcagccaggccgacttctgccgggatcttctccccaagtacttcaagcacaacaacttctccagcttcgtgcgccagctcaacacctacggctttaggaaggtagatccagaacaatgggaatttgcaaatgaagaattcctacgagatcagcggcatcggttgaaaaatatccatagacgcaagccaatattcagccattcatcacacactcagggtgccggaccattagctgatagtgaaaggagggactatgaggaggaaattgagaggctcaagtgtgataatgcatcactaaatttacagcttgagaggaagaaaactgatatggagagtaaaatgaaggctttggaagacaaactatttgctattgaggatcagcagaaaaatcttatatcttatgtcagagaaattgtgaatgcacctggatttctttctagcttcgtagaacaatctgatcatcatggaaagaagaggagactgcctaaaccaatttcattccatgatgatgcttgtactcaggggaaccagattatgcattgtgacttggtcaactcaccagctcatgaactttttaggtcatcatttgacaaaatggaatcatccttaaattccttggagaatttcttcaaagaagcgagtgaggcatttggtaatgatgtttcatctgatggtgatgtcccaggtcattcttcagctgttgttcttacagagctccattcaactggggagagtgacccccacgcgcaatcacctccgtccatgatgcatacttgttcagctggtgtaggagattcacactcttctcgtgatatagcagagtccgccagctgtccagagagtcctctgcttccccaagctcattctcgtgcagattcacgagctaaggtctccgagatagatgtcaatttagaacctgctgttacagaaaatggtccatcgagagatcaacaacccacccaagaccttcctgctgacgcaaatgatggattttggcagcagtttcttaccgagcagcctgggttgacccatgcacaccaggaggcccaatcagaacggcgagacagagaagcaaatcaaacaacagcaggagaccgcggaagtttttggttggacaagagcagcatcgaacagatgacaaaaaaactggggcatctcacctcagctgagaaaacctgagtatgtatttctcatttcttgtagctgaaaatgaccagtacagaaacattaggaccatggcacctcccagtgaggtatgcctgctaacatttactttgcagtgtatcagaattgtgtgtgttagattgttgcagactatgtgctatatactaccttgatatacgttcatactttgttagcg

SEQ ID NO: 12358 - protein, 481 aa, Triticum aestivum
  peptide (1)..(481): Ceres Seq. ID no. 15222003
  misc_feature (59)..(227): Pfam Name: Pfam Description:  HSF-type DNA-binding
  misc_feature (49)..(481): NCBI GI NO: 34909524 NR Description: putative heat shock factor
  misc_feature (54)..(318): NCBI GI NO: 2130134 NR Description: heat shock transcription factor
  misc_feature (50)..(306): NCBI GI NO: 5821138 NR Description: heat shock factor [Nicotiana tabacum]
  misc_feature (358)..(481): NCBI GI NO: 5821138 NR Description: heat shock factor [Nicotiana tabacum]
  misc_feature (55)..(343): NCBI GI NO: 3399765 NR Description: heat shock transcription factor 21
  misc_feature (55)..(343): NCBI GI NO: 15234053 NR Description: heat shock transcription factor 21
  misc_feature (360)..(481): NCBI GI NO: 3399765 NR Description: heat shock transcription factor 21
  misc_feature (360)..(481): NCBI GI NO: 15234053 NR Description: heat shock transcription factor 21
  misc_feature (42)..(481): NCBI GI NO: 16580739 NR Description: heat stress transcription factor Spl7
  misc_feature (42)..(481): NCBI GI NO: 16580743 NR Description: spl7 protein [Oryza sativa]
KKFSPPNPTPNQPTKPNRRSRAEPHSADQPLCAEAESPQPEEEKGVEGMEGSGGSASLPPFLTKTYEMVDEPATDAVVAWTPSGTSFVVLSQADFCRDLLPKYFKHNNFSSFVRQLNTYGFRKVDPEQWEFANEEFLRDQRHRLKNIHRRKPIFSHSSHTQGAGPLADSERRDYEEEIERLKCDNASLNLQLERKKTDMESKMKALEDKLFAIEDQQKNLISYVREIVNAPGFLSSFVEQSDHHGKKRRLPKPISFHDDACTQGNQIMHCDLVNSPAHELFRSSFDKMESSLNSLENFFKEASEAFGNDVSSDGDVPGHSSAVVLTELHSTGESDPHAQSPPSMMHTCSAGVGDSHSSRDIAESASCPESPLLPQAHSRADSRAKVSEIDVNLEPAVTENGPSRDQQPTQDLPADANDGFWQQFLTEQPGLTHAHQEAQSERRDREANQTTAGDRGSFWLDKSSIEQMTKKLGHLTSAEKT

SEQ ID NO: 12359 - protein, 433 aa, Triticum aestivum
  peptide (1)..(433): Ceres Seq. ID no. 15222004
  misc_feature (11)..(179): Pfam Name: Pfam Description:  HSF-type DNA-binding
  misc_feature (1)..(433): NCBI GI NO: 34909524 NR Description: putative heat shock factor
  misc_feature (6)..(270): NCBI GI NO: 2130134 NR Description: heat shock transcription factor
  misc_feature (2)..(258): NCBI GI NO: 5821138 NR Description: heat shock factor [Nicotiana tabacum]
  misc_feature (310)..(433): NCBI GI NO: 5821138 NR Description: heat shock factor [Nicotiana tabacum]
  misc_feature (7)..(295): NCBI GI NO: 3399765 NR Description: heat shock transcription factor 21
  misc_feature (7)..(295): NCBI GI NO: 15234053 NR Description: heat shock transcription factor 21
  misc_feature (312)..(433): NCBI GI NO: 3399765 NR Description: heat shock transcription factor 21
  misc_feature (312)..(433): NCBI GI NO: 15234053 NR Description: heat shock transcription factor 21
  misc_feature (1)..(433): NCBI GI NO: 16580739 NR Description: heat stress transcription factor Spl7
  misc_feature (1)..(433): NCBI GI NO: 16580743 NR Description: spl7 protein [Oryza sativa]
MEGSGGSASLPPFLTKTYEMVDEPATDAVVAWTPSGTSFVVLSQADFCRDLLPKYFKHNNFSSFVRQLNTYGFRKVDPEQWEFANEEFLRDQRHRLKNIHRRKPIFSHSSHTQGAGPLADSERRDYEEEIERLKCDNASLNLQLERKKTDMESKMKALEDKLFAIEDQQKNLISYVREIVNAPGFLSSFVEQSDHHGKKRRLPKPISFHDDACTQGNQIMHCDLVNSPAHELFRSSFDKMESSLNSLENFFKEASEAFGNDVSSDGDVPGHSSAVVLTELHSTGESDPHAQSPPSMMHTCSAGVGDSHSSRDIAESASCPESPLLPQAHSRADSRAKVSEIDVNLEPAVTENGPSRDQQPTQDLPADANDGFWQQFLTEQPGLTHAHQEAQSERRDREANQTTAGDRGSFWLDKSSIEQMTKKLGHLTSAEKT

SEQ ID NO: 12360 - protein, 414 aa, Triticum aestivum
  peptide (1)..(414): Ceres Seq. ID no. 15222005
  misc_feature (1)..(160): Pfam Name: Pfam Description:  HSF-type DNA-binding
  misc_feature (1)..(414): NCBI GI NO: 34909524 NR Description: putative heat shock factor
  misc_feature (1)..(251): NCBI GI NO: 2130134 NR Description: heat shock transcription factor
  misc_feature (1)..(239): NCBI GI NO: 5821138 NR Description: heat shock factor [Nicotiana tabacum]
  misc_feature (291)..(414): NCBI GI NO: 5821138 NR Description: heat shock factor [Nicotiana tabacum]
  misc_feature (1)..(276): NCBI GI NO: 3399765 NR Description: heat shock transcription factor 21
  misc_feature (1)..(276): NCBI GI NO: 15234053 NR Description: heat shock transcription factor 21
  misc_feature (293)..(414): NCBI GI NO: 3399765 NR Description: heat shock transcription factor 21
  misc_feature (293)..(414): NCBI GI NO: 15234053 NR Description: heat shock transcription factor 21
  misc_feature (1)..(414): NCBI GI NO: 16580739 NR Description: heat stress transcription factor Spl7
  misc_feature (1)..(414): NCBI GI NO: 16580743 NR Description: spl7 protein [Oryza sativa]
MVDEPATDAVVAWTPSGTSFVVLSQADFCRDLLPKYFKHNNFSSFVRQLNTYGFRKVDPEQWEFANEEFLRDQRHRLKNIHRRKPIFSHSSHTQGAGPLADSERRDYEEEIERLKCDNASLNLQLERKKTDMESKMKALEDKLFAIEDQQKNLISYVREIVNAPGFLSSFVEQSDHHGKKRRLPKPISFHDDACTQGNQIMHCDLVNSPAHELFRSSFDKMESSLNSLENFFKEASEAFGNDVSSDGDVPGHSSAVVLTELHSTGESDPHAQSPPSMMHTCSAGVGDSHSSRDIAESASCPESPLLPQAHSRADSRAKVSEIDVNLEPAVTENGPSRDQQPTQDLPADANDGFWQQFLTEQPGLTHAHQEAQSERRDREANQTTAGDRGSFWLDKSSIEQMTKKLGHLTSAEKT

SEQ ID NO: 12361 - DNA, 1488 bp, Triticum aestivum
  misc_feature (1)..(1488): Ceres Seq. ID no. 13596541
gtggattttttagcgtgcattccctcgaacgagctcagtagagccagcctcgccggtctaggctgaatcggtaatgtaaccaaccacgccctaaacgagcaggcggaaagggtggttcagttgcgttcgctcgattgatccaaaaaaaaaagttgcgttcgctcgatcgagcagcagggaaacaagccatggagagctcgccgcccaccatcaccgtccaggtgaagttcgccggccgaaccattccggtggaactcccgacatccgcctccaccgcggagctgaagctcctcctccagccgctaaccaacgttcttccccgcggccagaaactcatctgcaaaggaaaagttcttgccgacgccgcgagtctgagctcgatgcaggttggggacagatccaaggtcatgctcatcgcttcgcagggtcttcatcagggggaaggccccatcactaagaatagcagtggtcttgcagcaagtgcaaaaagaacctcaaatgttaaggataatcaaacactaaaaccggagattatcagcaaaagccgagcggagcgttggaaaataacaggtgtcattgctttatctggttccagcttgaaggcagtgcctgaggaagtctgggactgtggctcctccatacgagtactagatgtctgtaacaacttaattgaagcaattccacagaaaattgctgcccttaaatcattaaataaattgttgctaaccgccaatgacatatctgatgggggcatcagctgggaaggtctatcatgtgttgatacattaacagttttatctttaagccaaaatcgattggtcactttacctccgagtttgggcacattgacttttctacgtgaacttcgcattgcaaataacatgcttggcagcctacctgttgaaataggtttgctgaagcagctagagattcttatagcaaataataataggataacttcgctgccttcctctataggcgattgtgaatctctctttgaggtggacttatcatcaaatcttttagccgaactaccaaaggcttgcggaaaccttcacaatctgaagactctgcatctaaggaacaatggccttaattccctaccgccaactttattcaagaagtgctggcggcttactacacttgatctccatggcactggaatcacaaatgacattcttcgacagatggagggctgggaggagtttgatgaacgtaggcggcagaagtatcaaaagcagctggattttcgtgtgggatcatcaggtgttttcgacgagggtgcggatgatgataaccggcatgcataagtgtttcttattacagacagggttttgcgcttccaatattgtcccagaattattctagaattgaacacagacacggagctgatattattcctcacattttggttgtgtatttgtttattcctctcatttcattacattttagtgccaagtgatgaaaagtggtggctacctgttaaac

SEQ ID NO: 12362 - protein, 373 aa, Triticum aestivum
  peptide (1)..(373): Ceres Seq. ID no. 15221917
  misc_feature (8)..(80): Pfam Name: Pfam Description:  Ubiquitin family
  misc_feature (1)..(371): NCBI GI NO: 37534990 NR Description: putative leucine-rich repeat protein
  misc_feature (1)..(367): NCBI GI NO: 30684470 NR Description: unknown protein, leucine-rich repeat -related
  misc_feature (1)..(367): NCBI GI NO: 7445541 NR Description: hypothetical protein At2g30100
  misc_feature (119)..(371): NCBI GI NO: 11357392 NR Description: hypothetical protein F13G24
  misc_feature (119)..(367): NCBI GI NO: 22326653 NR Description: leucine rich repeat protein family
  misc_feature (129)..(321): NCBI GI NO: 24215143 NR Description: putative outermembrane protein
  misc_feature (104)..(328): NCBI GI NO: 23050247 NR Description: hypothetical protein [Methanosarcina barkeri]
  misc_feature (120)..(316): NCBI GI NO: 24215152 NR Description: Leucine-rich repeat containing protein
  misc_feature (132)..(327): NCBI GI NO: 24216022 NR Description: Leucine-rich repeat containing protein
  misc_feature (149)..(350): NCBI GI NO: 30349057 NR Description: Hypothetical protein Y42G9A.3b
MESSPPTITVQVKFAGRTIPVELPTSASTAELKLLLQPLTNVLPRGQKLICKGKVLADAASLSSMQVGDRSKVMLIASQGLHQGEGPITKNSSGLAASAKRTSNVKDNQTLKPEIISKSRAERWKITGVIALSGSSLKAVPEEVWDCGSSIRVLDVCNNLIEAIPQKIAALKSLNKLLLTANDISDGGISWEGLSCVDTLTVLSLSQNRLVTLPPSLGTLTFLRELRIANNMLGSLPVEIGLLKQLEILIANNNRITSLPSSIGDCESLFEVDLSSNLLAELPKACGNLHNLKTLHLRNNGLNSLPPTLFKKCWRLTTLDLHGTGITNDILRQMEGWEEFDERRRQKYQKQLDFRVGSSGVFDEGADDDNRHA

SEQ ID NO: 12363 - protein, 309 aa, Triticum aestivum
  peptide (1)..(309): Ceres Seq. ID no. 15221918
  misc_feature (1)..(307): NCBI GI NO: 37534990 NR Description: putative leucine-rich repeat protein
  misc_feature (1)..(303): NCBI GI NO: 30684470 NR Description: unknown protein, leucine-rich repeat -related
  misc_feature (1)..(303): NCBI GI NO: 7445541 NR Description: hypothetical protein At2g30100
  misc_feature (55)..(307): NCBI GI NO: 11357392 NR Description: hypothetical protein F13G24
  misc_feature (55)..(303): NCBI GI NO: 22326653 NR Description: leucine rich repeat protein family
  misc_feature (65)..(257): NCBI GI NO: 24215143 NR Description: putative outermembrane protein
  misc_feature (40)..(264): NCBI GI NO: 23050247 NR Description: hypothetical protein [Methanosarcina barkeri]
  misc_feature (56)..(252): NCBI GI NO: 24215152 NR Description: Leucine-rich repeat containing protein
  misc_feature (68)..(263): NCBI GI NO: 24216022 NR Description: Leucine-rich repeat containing protein
  misc_feature (85)..(286): NCBI GI NO: 30349057 NR Description: Hypothetical protein Y42G9A.3b
MQVGDRSKVMLIASQGLHQGEGPITKNSSGLAASAKRTSNVKDNQTLKPEIISKSRAERWKITGVIALSGSSLKAVPEEVWDCGSSIRVLDVCNNLIEAIPQKIAALKSLNKLLLTANDISDGGISWEGLSCVDTLTVLSLSQNRLVTLPPSLGTLTFLRELRIANNMLGSLPVEIGLLKQLEILIANNNRITSLPSSIGDCESLFEVDLSSNLLAELPKACGNLHNLKTLHLRNNGLNSLPPTLFKKCWRLTTLDLHGTGITNDILRQMEGWEEFDERRRQKYQKQLDFRVGSSGVFDEGADDDNRHA

SEQ ID NO: 12364 - protein, 300 aa, Triticum aestivum
  peptide (1)..(300): Ceres Seq. ID no. 15221919
  misc_feature (1)..(298): NCBI GI NO: 37534990 NR Description: putative leucine-rich repeat protein
  misc_feature (1)..(294): NCBI GI NO: 30684470 NR Description: unknown protein, leucine-rich repeat -related
  misc_feature (1)..(294): NCBI GI NO: 7445541 NR Description: hypothetical protein At2g30100
  misc_feature (46)..(298): NCBI GI NO: 11357392 NR Description: hypothetical protein F13G24
  misc_feature (46)..(294): NCBI GI NO: 22326653 NR Description: leucine rich repeat protein family
  misc_feature (56)..(248): NCBI GI NO: 24215143 NR Description: putative outermembrane protein
  misc_feature (31)..(255): NCBI GI NO: 23050247 NR Description: hypothetical protein [Methanosarcina barkeri]
  misc_feature (47)..(243): NCBI GI NO: 24215152 NR Description: Leucine-rich repeat containing protein
  misc_feature (59)..(254): NCBI GI NO: 24216022 NR Description: Leucine-rich repeat containing protein
  misc_feature (76)..(277): NCBI GI NO: 30349057 NR Description: Hypothetical protein Y42G9A.3b
MLIASQGLHQGEGPITKNSSGLAASAKRTSNVKDNQTLKPEIISKSRAERWKITGVIALSGSSLKAVPEEVWDCGSSIRVLDVCNNLIEAIPQKIAALKSLNKLLLTANDISDGGISWEGLSCVDTLTVLSLSQNRLVTLPPSLGTLTFLRELRIANNMLGSLPVEIGLLKQLEILIANNNRITSLPSSIGDCESLFEVDLSSNLLAELPKACGNLHNLKTLHLRNNGLNSLPPTLFKKCWRLTTLDLHGTGITNDILRQMEGWEEFDERRRQKYQKQLDFRVGSSGVFDEGADDDNRHA

SEQ ID NO: 12365 - DNA, 1020 bp, Triticum aestivum
  misc_feature (1)..(1020): Ceres Seq. ID no. 15175438
agctcaccaccaccttcactctccatgctcgcagcaagccagctagctcctcgcctcctctcgtcacactactactagcagcttctcttctcttctctttaagtaacagagagcccaagctaggtgacactagagcgtctcaagcacccgcgccatggccacctccaccttctcgctcttcttcccgccgctgcccagcagcaaaggccagtggccgtctgtagaggaggctgcctactcctacgatgaccacagctccgtcaccaccctctccccttcctccccggcctcctctgcttcctcgggatccctggtggactgcacgctctccctcggcacgccgtcgacgcgccgccccgagccagaccgtactaggcacggggctccgccgcaggcctacccgtccgtgtctgccggggccgagccctgctactaccaccagcagcagggcaggggcggcgccgccgggcacgagcagctcctggaccgccgctgcgccaactgcggcacggcgtccacgccgctctggcggaacggccctcgcggacccaagtccctctgcaacgcctgcggcatcaggttcaagaaggaggagcgccgcgcggcggagaccaatgccggcggcgggtgcggctacgtcgcgcagcgggcgcacgtgtcggcccctcgtgccgtgccgtacgcggaggaggcgcttccttacgccggcgccgtcgacgcgcccttcctggcgtggcggctgaacggcgtcccgccggccccggcgttctcgtcgtggcccgacaggcagcacggcgtgtaccagtacaactagctagtagtactagtgagtagtacgtgtaggtacgtgttagggcatggaacgcggttggtgggcgctgcaacgtttttttggggatcttgttggggacgtacggttgcacgcggccggtgggatatgcatgtgcagtagtagcactgtattttgtctgacattatcgttgagcaagcctgccaaacatatgaattatgaagtagtac

SEQ ID NO: 12366 - protein, 219 aa, Triticum aestivum
  peptide (1)..(219): Ceres Seq. ID no. 15175439
  misc_feature (1)..(133): NCBI GI NO: 5091599 NR Description: 10A19I.2 [Oryza sativa]
  misc_feature (133)..(183): NCBI GI NO: 5091599 NR Description: 10A19I.2 [Oryza sativa]
  misc_feature (40)..(158): NCBI GI NO: 15234463 NR Description: GATA zinc finger protein [Arabidopsis thaliana]
  misc_feature (51)..(218): NCBI GI NO: 34912080 NR Description: P0671D01.19
  misc_feature (44)..(158): NCBI GI NO: 15224164 NR Description: GATA zinc finger protein [Arabidopsis thaliana]
  misc_feature (77)..(157): NCBI GI NO: 21555178 NR Description: transcription factor-like protein
  misc_feature (77)..(162): NCBI GI NO: 7488381 NR Description: transcription factor homolog F18B3
  misc_feature (77)..(162): NCBI GI NO: 18409199 NR Description: GATA zinc finger protein [Arabidopsis thaliana]
  misc_feature (112)..(158): NCBI GI NO: 34897256 NR Description: putative zinc finger protein
  misc_feature (98)..(154): NCBI GI NO: 15232346 NR Description: GATA zinc finger protein [Arabidopsis thaliana]
MATSTFSLFFPPLPSSKGQWPSVEEAAYSYDDHSSVTTLSPSSPASSASSGSLVDCTLSLGTPSTRRPEPDRTRHGAPPQAYPSVSAGAEPCYYHQQQGRGGAAGHEQLLDRRCANCGTASTPLWRNGPRGPKSLCNACGIRFKKEERRAAETNAGGGCGYVAQRAHVSAPRAVPYAEEALPYAGAVDAPFLAWRLNGVPPAPAFSSWPDRQHGVYQYN

SEQ ID NO: 12367 - protein, 165 aa, Triticum aestivum
  peptide (1)..(165): Ceres Seq. ID no. 15175440
  misc_feature (1)..(160): Pfam Name: Pfam Description:  Formin Homology 2 Domain
  misc_feature (1)..(110): NCBI GI NO: 2429362 NR Description: proline rich protein [Santalum album]
  misc_feature (1)..(156): NCBI GI NO: 25143299 NR Description: pre-mRNA splicing SR protein related (68
  misc_feature (1)..(165): NCBI GI NO: 29828765 NR Description: putative protoporphyrinogen oxidase
  misc_feature (1)..(165): NCBI GI NO: 27375632 NR Description: blr0521 [Bradyrhizobium japonicum]
  misc_feature (1)..(165): NCBI GI NO: 27375632 NR Description: blr0521 [Bradyrhizobium japonicum]
  misc_feature (1)..(165): NCBI GI NO: 33865132 NR Description: possible N-terminal part of IF-2
  misc_feature (1)..(165): NCBI GI NO: 5821145 NR Description: RNA binding protein [Homo sapiens]
  misc_feature (1)..(158): NCBI GI NO: 23105033 NR Description: hypothetical protein [Azotobacter vinelandii]
  misc_feature (1)..(165): NCBI GI NO: 5821143 NR Description: RNA binding protein [Homo sapiens]
  misc_feature (1)..(165): NCBI GI NO: 28493118 NR Description: unknown [Tropheryma whipplei str. Twist]
MTTAPSPPSPLPPRPPLLPRDPWWTARSPSARRRRAAPSQTVLGTGLRRRPTRPCLPGPSPATTTSSRAGAAPPGTSSSWTAAAPTAARRPRRSGGTALADPSPSATPAASGSRRRSAARRRPMPAAGAATSRSGRTCRPLVPCRTRRRRFLTPAPSTRPSWRGG

SEQ ID NO: 12368 - DNA, 1126 bp, Triticum aestivum
  misc_feature (1)..(1126): Ceres Seq. ID no. 12625302
acactcgcacccgcactcccatccgccggccgcgccatggcgtcgggggtgtccacgagcatggtgctcacgctgctcggcttctgcgtcagcgtcctcttcatagtcttcgtctgctccaggctcgtctgcgcgctcgtgcgccgccgccgccgccgctcccgcgcctcggcgctcccgccgggcttcccgcccctcgccgccaactacttcttcgccgtccaggtcgacggcctgggagctcaggccgcggctggcccctgtgccggggggctggacctggccgccgtcgcctccttccccacccgcgccttcgcagctgctgcctcctccgactccgactcctcagacgcggccccgcagtgtgttgtctgtcttgcagaatacgaggacaaagatgtgctccgcactcttccttactgtggccacaatttccatatggtgtgcatagatgcttggctaaagcagcactcaacatgcccagtctgtagaatttcactgtctgactatcctgatagcaagcaaattgcgcctcctttaccaagtgcagtggtgatacctatacctatacctccttattcccctgaagcatcaatatcggatccgtgccattgcctgtttgtcggcacgggccattcgtcaagggcatcagaggttcttcagaacgaacccgaccaggcgaatcggacagtacccggtccatccttggatgggccagacgacttgacgttgtctgaggttacctctcctggcgaaataacaagcaaacagtaaaacagcacatggagagtcctcgtgtactcagcaggtcgtgatctccccagctaagctccggcaagtagctgtttggagtttcttttgtgaacaacctgtaaacttggaaacatctgcccatgtgggtgaacggatgtctgttatagattagatttccgcgggtccgatgtaaatatgagaaatctttgggtttcttgtcgaaaagccacatttgctcgataatttgactgaaaacagtccattgtatccatctatggtagcccacagagaattgttgtaggaacatcatcatcagtgcatgtaccaattcaaacagctacaaacatattgattgagatgactgttttaatgc

SEQ ID NO: 12369 - protein, 257 aa, Triticum aestivum
  peptide (1)..(257): Ceres Seq. ID no. 12625303
  misc_feature (122)..(163): Pfam Name: RING finger Pfam Description: Zinc finger, C3HC4 type
  misc_feature (16)..(214): NCBI GI NO: 38567907 NR Description: OSJNBa0088I22.3
  misc_feature (13)..(240): NCBI GI NO: 34906738 NR Description: similar to ring-H2 zinc finger protein
  misc_feature (2)..(196): NCBI GI NO: 15225932 NR Description: hypothetical protein; protein id: At2g46160
  misc_feature (3)..(216): NCBI GI NO: 8698833 NR Description: EL5 [Oryza sativa (japonica cultivar-group)]
  misc_feature (15)..(215): NCBI GI NO: 30017522 NR Description: putative ring-H2 zinc finger protein
  misc_feature (80)..(196): NCBI GI NO: 34909314 NR Description: OSJNBb0021A09.3
  misc_feature (4)..(168): NCBI GI NO: 8698835 NR Description: RING finger 1
  misc_feature (7)..(171): NCBI GI NO: 37537088 NR Description: putative zinc finger protein
  misc_feature (4)..(196): NCBI GI NO: 15233144 NR Description: putative protein; protein id: At3g61550
  misc_feature (30)..(167): NCBI GI NO: 34907968 NR Description: P0446G04.15
TLAPALPSAGRAMASGVSTSMVLTLLGFCVSVLFIVFVCSRLVCALVRRRRRRSRASALPPGFPPLAANYFFAVQVDGLGAQAAAGPCAGGLDLAAVASFPTRAFAAAASSDSDSSDAAPQCVVCLAEYEDKDVLRTLPYCGHNFHMVCIDAWLKQHSTCPVCRISLSDYPDSKQIAPPLPSAVVIPIPIPPYSPEASISDPCHCLFVGTGHSSRASEVLQNEPDQANRTVPGPSLDGPDDLTLSEVTSPGEITSKQ

SEQ ID NO: 12370 - protein, 245 aa, Triticum aestivum
  peptide (1)..(245): Ceres Seq. ID no. 12625304
  misc_feature (110)..(151): Pfam Name: RING finger Pfam Description: Zinc finger, C3HC4 type
  misc_feature (4)..(202): NCBI GI NO: 38567907 NR Description: OSJNBa0088I22.3
  misc_feature (1)..(228): NCBI GI NO: 34906738 NR Description: similar to ring-H2 zinc finger protein
  misc_feature (1)..(184): NCBI GI NO: 15225932 NR Description: hypothetical protein; protein id: At2g46160
  misc_feature (1)..(204): NCBI GI NO: 8698833 NR Description: EL5 [Oryza sativa (japonica cultivar-group)]
  misc_feature (3)..(203): NCBI GI NO: 30017522 NR Description: putative ring-H2 zinc finger protein
  misc_feature (68)..(184): NCBI GI NO: 34909314 NR Description: OSJNBb0021A09.3
  misc_feature (1)..(156): NCBI GI NO: 8698835 NR Description: RING finger 1
  misc_feature (1)..(159): NCBI GI NO: 37537088 NR Description: putative zinc finger protein
  misc_feature (1)..(184): NCBI GI NO: 15233144 NR Description: putative protein; protein id: At3g61550
  misc_feature (18)..(155): NCBI GI NO: 34907968 NR Description: P0446G04.15
MASGVSTSMVLTLLGFCVSVLFIVFVCSRLVCALVRRRRRRSRASALPPGFPPLAANYFFAVQVDGLGAQAAAGPCAGGLDLAAVASFPTRAFAAAASSDSDSSDAAPQCVVCLAEYEDKDVLRTLPYCGHNFHMVCIDAWLKQHSTCPVCRISLSDYPDSKQIAPPLPSAVVIPIPIPPYSPEASISDPCHCLFVGTGHSSRASEVLQNEPDQANRTVPGPSLDGPDDLTLSEVTSPGEITSKQ

SEQ ID NO: 12371 - protein, 237 aa, Triticum aestivum
  peptide (1)..(237): Ceres Seq. ID no. 12625305
  misc_feature (102)..(143): Pfam Name: RING finger Pfam Description: Zinc finger, C3HC4 type
  misc_feature (1)..(194): NCBI GI NO: 38567907 NR Description: OSJNBa0088I22.3
  misc_feature (1)..(220): NCBI GI NO: 34906738 NR Description: similar to ring-H2 zinc finger protein
  misc_feature (1)..(176): NCBI GI NO: 15225932 NR Description: hypothetical protein; protein id: At2g46160
  misc_feature (1)..(196): NCBI GI NO: 8698833 NR Description: EL5 [Oryza sativa (japonica cultivar-group)]
  misc_feature (1)..(195): NCBI GI NO: 30017522 NR Description: putative ring-H2 zinc finger protein
  misc_feature (60)..(176): NCBI GI NO: 34909314 NR Description: OSJNBb0021A09.3
  misc_feature (1)..(148): NCBI GI NO: 8698835 NR Description: RING finger 1
  misc_feature (1)..(151): NCBI GI NO: 37537088 NR Description: putative zinc finger protein
  misc_feature (1)..(176): NCBI GI NO: 15233144 NR Description: putative protein; protein id: At3g61550
  misc_feature (10)..(147): NCBI GI NO: 34907968 NR Description: P0446G04.15
MVLTLLGFCVSVLFIVFVCSRLVCALVRRRRRRSRASALPPGFPPLAANYFFAVQVDGLGAQAAAGPCAGGLDLAAVASFPTRAFAAAASSDSDSSDAAPQCVVCLAEYEDKDVLRTLPYCGHNFHMVCIDAWLKQHSTCPVCRISLSDYPDSKQIAPPLPSAVVIPIPIPPYSPEASISDPCHCLFVGTGHSSRASEVLQNEPDQANRTVPGPSLDGPDDLTLSEVTSPGEITSKQ

SEQ ID NO: 12372 - DNA, 1260 bp, Triticum aestivum
  misc_feature (1)..(1260): Ceres Seq. ID no. 12615264
gttgacagacttctttccttttgggctggttgtggttgatgggcatctatttgttgttgtgcggttcgtttgcttgccttttgagcccacacaataagaagaaccccaccccctcaaaaaaagaaggggacaaaggagaagaaccctaggcggctctctgtgactcaaacccccgcagcccggcgccggcgcgaagcgaagggagaagaaggcatggggcggccgtacgcagtgaaggggaagaagaagcggaagctggaaggcggcgaagcctcgcgcgcccctccggtcgacgccgaggcggtggatgaagaggtgaaggaaaatgaggaggtgatggagggggaggcggcggcagaggaggcttttgcccgaggaggtgggggaggggatccccatcgtgccccgcccggtcgacagtaagcggcggccgggcgctatcttcgtacttgagagggcctgcctcgaggtcggcaaagtcggcaagggtatgcaaatcttgaatttggatgatcacgcaaattatttaaggaagcagaatcgcaatccagctgattacaggcctgatatcattcaccaggcactactagcaatatttgatagccctctaactaaggctgggaggttacaagctgtttatgttaggactgaaaagggagtgttgtttgaaatcaagcctcatgttcgcatgccacggacgttcaaacgtttctgtggcttgatgtcacagttattgcaaaagctgagcatcacggcagttgggaagcgtgagaagctccttaatgttattaaaaatcctgttacccagtatctacctgttggcgtacggaaaattggcctttcatatagtgcggagaaggcagttaatttgtttgactatgttgctaagtccaatgatgatgaacctcttgtgtttgtggttggtgccatggcccatggaaaggttgacaaggaatactcagatgattacatacagattagcggttaccctctcagtgctgcctgctgcctgaatcgaatatgcagtgccttggagcagaaatggaacatccagtgaagggaagtttgaaaacgaacattacatctttgtgatcagatttttatgtactcattagcgctcatagtattgttgtgccttttcatgtcttatgtctacagtattagttttgtcgagacatgaatcactggctgtaaaagtattaacactgaatgtttcaagtgcttatgctccttgcagttgtcatttttggtgaaatttgc

SEQ ID NO: 12373 - protein, 188 aa, Triticum aestivum
  peptide (1)..(188): Ceres Seq. ID no. 12615265
  misc_feature (17)..(181): Pfam Name: Pfam Description:  Suppressor Mra1
  misc_feature (1)..(187): NCBI GI NO: 15230180 NR Description: putative protein; protein id: At3g57000
  misc_feature (1)..(187): NCBI GI NO: 21593563 NR Description: unknown [Arabidopsis thaliana]
  misc_feature (1)..(187): NCBI GI NO: 31206307 NR Description: ENSANGP00000016225 [Anopheles gambiae]
  misc_feature (1)..(187): NCBI GI NO: 27713326 NR Description: similar to gene rich cluster, C2f gene
  misc_feature (1)..(187): NCBI GI NO: 7305109 NR Description: gene rich cluster, C2f gene [Mus musculus]
  misc_feature (1)..(187): NCBI GI NO: 17555712 NR Description: Nucleolar Essential protein 1 (25.8 kD)
  misc_feature (1)..(187): NCBI GI NO: 24639698 NR Description: CG3527-PA [Drosophila melanogaster]
  misc_feature (1)..(187): NCBI GI NO: 2276396 NR Description: C2f [Homo sapiens]
  misc_feature (1)..(187): NCBI GI NO: 31652262 NR Description: C2f protein [Homo sapiens]
  misc_feature (1)..(187): NCBI GI NO: 39591849 NR Description: Hypothetical protein CBG18338
MQILNLDDHANYLRKQNRNPADYRPDIIHQALLAIFDSPLTKAGRLQAVYVRTEKGVLFEIKPHVRMPRTFKRFCGLMSQLLQKLSITAVGKREKLLNVIKNPVTQYLPVGVRKIGLSYSAEKAVNLFDYVAKSNDDEPLVFVVGAMAHGKVDKEYSDDYIQISGYPLSAACCLNRICSALEQKWNIQ

SEQ ID NO: 12374 - protein, 122 aa, Triticum aestivum
  peptide (1)..(122): Ceres Seq. ID no. 12615266
  misc_feature (1)..(115): Pfam Name: Pfam Description:  Suppressor Mra1
  misc_feature (1)..(121): NCBI GI NO: 15230180 NR Description: putative protein; protein id: At3g57000
  misc_feature (1)..(121): NCBI GI NO: 21593563 NR Description: unknown [Arabidopsis thaliana]
  misc_feature (1)..(121): NCBI GI NO: 31206307 NR Description: ENSANGP00000016225 [Anopheles gambiae]
  misc_feature (1)..(121): NCBI GI NO: 27713326 NR Description: similar to gene rich cluster, C2f gene
  misc_feature (1)..(121): NCBI GI NO: 7305109 NR Description: gene rich cluster, C2f gene [Mus musculus]
  misc_feature (1)..(121): NCBI GI NO: 17555712 NR Description: Nucleolar Essential protein 1 (25.8 kD)
  misc_feature (1)..(121): NCBI GI NO: 24639698 NR Description: CG3527-PA [Drosophila melanogaster]
  misc_feature (1)..(121): NCBI GI NO: 2276396 NR Description: C2f [Homo sapiens]
  misc_feature (1)..(121): NCBI GI NO: 31652262 NR Description: C2f protein [Homo sapiens]
  misc_feature (1)..(121): NCBI GI NO: 39591849 NR Description: Hypothetical protein CBG18338
MPRTFKRFCGLMSQLLQKLSITAVGKREKLLNVIKNPVTQYLPVGVRKIGLSYSAEKAVNLFDYVAKSNDDEPLVFVVGAMAHGKVDKEYSDDYIQISGYPLSAACCLNRICSALEQKWNIQ

SEQ ID NO: 12375 - protein, 111 aa, Triticum aestivum
  peptide (1)..(111): Ceres Seq. ID no. 12615267
  misc_feature (1)..(104): Pfam Name: Pfam Description:  Suppressor Mra1
  misc_feature (1)..(110): NCBI GI NO: 15230180 NR Description: putative protein; protein id: At3g57000
  misc_feature (1)..(110): NCBI GI NO: 21593563 NR Description: unknown [Arabidopsis thaliana]
  misc_feature (1)..(110): NCBI GI NO: 31206307 NR Description: ENSANGP00000016225 [Anopheles gambiae]
  misc_feature (1)..(110): NCBI GI NO: 27713326 NR Description: similar to gene rich cluster, C2f gene
  misc_feature (1)..(110): NCBI GI NO: 7305109 NR Description: gene rich cluster, C2f gene [Mus musculus]
  misc_feature (1)..(110): NCBI GI NO: 17555712 NR Description: Nucleolar Essential protein 1 (25.8 kD)
  misc_feature (1)..(110): NCBI GI NO: 24639698 NR Description: CG3527-PA [Drosophila melanogaster]
  misc_feature (1)..(110): NCBI GI NO: 2276396 NR Description: C2f [Homo sapiens]
  misc_feature (1)..(110): NCBI GI NO: 31652262 NR Description: C2f protein [Homo sapiens]
  misc_feature (1)..(110): NCBI GI NO: 39591849 NR Description: Hypothetical protein CBG18338
MSQLLQKLSITAVGKREKLLNVIKNPVTQYLPVGVRKIGLSYSAEKAVNLFDYVAKSNDDEPLVFVVGAMAHGKVDKEYSDDYIQISGYPLSAACCLNRICSALEQKWNIQ

SEQ ID NO: 12376 - DNA, 1336 bp, Triticum aestivum
  misc_feature (1)..(1336): Ceres Seq. ID no. 12625306
ccccctcctccccgtcttcccccctcagatctccggcgaccccccggcgaatcggcgccatgtcagggcagagccagcgcctgaacgtggtgccgacggtgacgatgctgggggtggtgaaggcgcggctgatcggcgcgacgcggggccacgcgctgctcaagaagaagtcggacgcgctcacggtgcagttccgcgccatcctcaagaagatcgtcgccaccaaggagtccatgggcgaggccatgcgcgcctcctccttctcgctcgccgaggccaagtacgtggccggcgacggcgtgcgccacgtcgtgctccagtccgtccgctccgcctcgctccgcgtccgctcccaccaggagaacgtcgccggggtcaagctgcccaagttcacccacttcgtcgaccccgccggcgcctcctccggcgggccctccggcgcctcccccagcctcaccggcctcgcccgcggggggcagcaggtctctgcctgccgcgccgcccacgtcaaggccatcgaggtgctcgtcgagctcgcctcgctccagacctccttcctcaccctcgacgaggccatcaagaccaccaaccgccgcgtcaacgccctcgagaacgtcgtcaagcccaggctcgagaacaccatcacctacatcaagggcgagctcgacgagctcgagcgcgaggacttcttccggctcaagaagatccagggatacaagaggagggaggtcgagcgccagatggccgcggccaagctcttcgccgaggagcagctcgccgaggatctcgccctcaagaggggcgtctccatcgggggcgccaccaacatactcgtcggcggcggagacaaggacgaagacatcatcttctgatccccacccctgctatccaattgttcaatcgtggtggaaacaataagttctggtgctggagccccagaatgacatctgtttatagagtggcggaggtttttgtttcaggctgtgtgcaacctgaattatggccatccaagacccaaaataatctctctctgtgtacttttgggaaccaaacattgctggtgaaactagtggctatgtgcagtagtaaaaattcttttgtaccgtattactgtatttcatttccctgcacgctcgttttagttgcatatttattcagacattgtgtatctggatttcggcatgcttcgctgtgaacctgctctgctgcagacttgtatccttctttttggccgtgtattctggggcatctactctattcttttctcaacttttcctggaggaaatagatgatgtgtgataacatggcaccaagataaatattaaattctgaactc

SEQ ID NO: 12377 - protein, 397 aa, Triticum aestivum
  peptide (1)..(397): Ceres Seq. ID no. 12625307
PLLPVFPPQISGDPPANRRHVRAEPAPERGADGDDAGGGEGAADRRDAGPRAAQEEVGRAHGAVPRHPQEDRRHQGVHGRGHARLLLLARRGQVRGRRRRAPRRAPVRPLRLAPRPLPPGERRRGQAAQVHPLRRPRRRLLRRALRRLPQPHRPRPRGAAGLCLPRRPRQGHRGARRARLAPDLLPHPRRGHQDHQPPRQRPRERRQAQAREHHHLHQGRARRARARGLLPAQEDPGIQEEGGRAPDGRGQALRRGAARRGSRPQEGRLHRGRHQHTRRRRRQGRRHHLLIPTPAIQLFNRGGNNKFWCWSPRMTSVYRVAEVFVSGCVQPELWPSKTQNNLSLCTFGNQTLLVKLVAMCSSKNSFVPYYCISFPCTLVLVAYLFRHCVSGFRHASL

SEQ ID NO: 12378 - protein, 289 aa, Triticum aestivum
  peptide (1)..(289): Ceres Seq. ID no. 12625308
  misc_feature (34)..(241): Pfam Name: Pfam Description:  ATP synthase subunit D
  misc_feature (20)..(289): NCBI GI NO: 38344879 NR Description: OSJNBa0033G05.3
  misc_feature (20)..(289): NCBI GI NO: 25529226 NR Description: H+-transporting two-sector ATPase (EC 3
  misc_feature (20)..(289): NCBI GI NO: 15231126 NR Description: v-ATPase subunit D (vATPD); protein id:At3g58730
  misc_feature (20)..(289): NCBI GI NO: 28278870 NR Description: Similar to ATPase
  misc_feature (20)..(248): NCBI GI NO: 28829327 NR Description: similar to Homo sapiens (Human)
  misc_feature (20)..(289): NCBI GI NO: 21355551 NR Description: CG8186-PA [Drosophila melanogaster]
  misc_feature (20)..(262): NCBI GI NO: 12963799 NR Description: ATPase, H+ transporting, V1 subunit D
  misc_feature (20)..(262): NCBI GI NO: 40786463 NR Description: ATPase
  misc_feature (20)..(289): NCBI GI NO: 5138993 NR Description: vacuolar H-ATPase subunit D [Homo sapiens]
  misc_feature (20)..(289): NCBI GI NO: 7706757 NR Description: ATPase
PSSPSSPLRSPATPRRIGAMSGQSQRLNVVPTVTMLGVVKARLIGATRGHALLKKKSDALTVQFRAILKKIVATKESMGEAMRASSFSLAEAKYVAGDGVRHVVLQSVRSASLRVRSHQENVAGVKLPKFTHFVDPAGASSGGPSGASPSLTGLARGGQQVSACRAAHVKAIEVLVELASLQTSFLTLDEAIKTTNRRVNALENVVKPRLENTITYIKGELDELEREDFFRLKKIQGYKRREVERQMAAAKLFAEEQLAEDLALKRGVSIGGATNILVGGGDKDEDIIF

SEQ ID NO: 12379 - protein, 270 aa, Triticum aestivum
  peptide (1)..(270): Ceres Seq. ID no. 12625309
  misc_feature (15)..(222): Pfam Name: Pfam Description:  ATP synthase subunit D
  misc_feature (1)..(270): NCBI GI NO: 38344879 NR Description: OSJNBa0033G05.3
  misc_feature (1)..(270): NCBI GI NO: 25529226 NR Description: H+-transporting two-sector ATPase (EC 3
  misc_feature (1)..(270): NCBI GI NO: 15231126 NR Description: v-ATPase subunit D (vATPD); protein id:At3g58730
  misc_feature (1)..(270): NCBI GI NO: 28278870 NR Description: Similar to ATPase
  misc_feature (1)..(229): NCBI GI NO: 28829327 NR Description: similar to Homo sapiens (Human)
  misc_feature (1)..(270): NCBI GI NO: 21355551 NR Description: CG8186-PA [Drosophila melanogaster]
  misc_feature (1)..(243): NCBI GI NO: 12963799 NR Description: ATPase, H+ transporting, V1 subunit D
  misc_feature (1)..(243): NCBI GI NO: 40786463 NR Description: ATPase
  misc_feature (1)..(270): NCBI GI NO: 5138993 NR Description: vacuolar H-ATPase subunit D [Homo sapiens]
  misc_feature (1)..(270): NCBI GI NO: 7706757 NR Description: ATPase
MSGQSQRLNVVPTVTMLGVVKARLIGATRGHALLKKKSDALTVQFRAILKKIVATKESMGEAMRASSFSLAEAKYVAGDGVRHVVLQSVRSASLRVRSHQENVAGVKLPKFTHFVDPAGASSGGPSGASPSLTGLARGGQQVSACRAAHVKAIEVLVELASLQTSFLTLDEAIKTTNRRVNALENVVKPRLENTITYIKGELDELEREDFFRLKKIQGYKRREVERQMAAAKLFAEEQLAEDLALKRGVSIGGATNILVGGGDKDEDIIF

SEQ ID NO: 12380 - DNA, 1001 bp, Triticum aestivum
  misc_feature (1)..(1001): Ceres Seq. ID no. 12615268
cccagtaggtctcgcccctcccgatccgaacccagacccaaaaccaacaccggcggcggctgcagcgatggcggcggcggcgatgaacacggacgtggaggcggtcgacttcgactccgacgacgacgatctcatggacgaggagggtgccatcgaaccctcgccggcccccgctccccgcctccgatctaccatcgcagggggcggcggcggcgacgacgatgccccgcgtaagactaaggggcgcggcttccgcgaggaccccaactcctcgtccgcgcaccgcgactcgcggttagctggcgcaggccgctctggcttcgacgccctcgcctccgatggcggccctggacccgtgcgctccattgaagggtggattgtactggttactggagttcatgaagaagctcaggaggaggacctccataatattttcggggattatggtcaggtcaagaacttgcatttgaatttggatcgccggactggatttgtgaagggatatgctctaattgagtatgagaactttgagcaagccaagcgtgcaataagagaatcagacggaactgagcttctatcgcagataataagtgttgactgggcatttagtaatggccctgtcaaacagagaagtactcggaagagatcaccgaggcctaatcgctcaaggagcccaccaaggagaagatacccttaggagcgacggaagtgcgagaatcatgggctttcagttgtttgcttgtcttatcgtaatttgacggcggcccttgtctctctgtaccaatttccggtagtagttgtatggcatcttcaaggtccttactttggtggatggagccatgtttgctcttgaagtttggcttgccagtttgagacaattgtagcctttgatgttggatccgtgatgtgttggattggaatgtttgtgccacaatttaatgaacttgaagatgggtaatttgtattattatttcttctatcattattttttactcatctgc

SEQ ID NO: 12381 - protein, 231 aa, Triticum aestivum
  peptide (1)..(231): Ceres Seq. ID no. 12615269
  misc_feature (127)..(198): Pfam Name: a.k.a. RRM, RBD, or RNP domain Pfam Description: RNA recognition motif.
  misc_feature (23)..(230): NCBI GI NO: 30524687 NR Description: salt tolerance protein 4 [Beta vulgaris]
  misc_feature (29)..(230): NCBI GI NO: 18403559 NR Description: RNA-binding protein, putative
  misc_feature (29)..(230): NCBI GI NO: 21536738 NR Description: RNA-binding protein, putative
  misc_feature (29)..(218): NCBI GI NO: 25405472 NR Description: probable RNA-binding protein 35994-37391
  misc_feature (77)..(229): NCBI GI NO: 34784590 NR Description: Unknown (protein for MGC:68591) [Xenopus laevis]
  misc_feature (77)..(229): NCBI GI NO: 11034807 NR Description: RNA-binding protein Y14 [Xenopus laevis]
  misc_feature (77)..(229): NCBI GI NO: 20804379 NR Description: RNA binding motif protein 8 [Oryzias latipes]
  misc_feature (77)..(229): NCBI GI NO: 20804381 NR Description: RNA binding motif protein 8 [Oryzias latipes]
  misc_feature (77)..(229): NCBI GI NO: 4826972 NR Description: RNA binding motif protein 8A
  misc_feature (77)..(229): NCBI GI NO: 10197630 NR Description: MDS014 [Homo sapiens]
PVGLAPPDPNPDPKPTPAAAAAMAAAAMNTDVEAVDFDSDDDDLMDEEGAIEPSPAPAPRLRSTIAGGGGGDDDAPRKTKGRGFREDPNSSSAHRDSRLAGAGRSGFDALASDGGPGPVRSIEGWIVLVTGVHEEAQEEDLHNIFGDYGQVKNLHLNLDRRTGFVKGYALIEYENFEQAKRAIRESDGTELLSQIISVDWAFSNGPVKQRSTRKRSPRPNRSRSPPRRRYP

SEQ ID NO: 12382 - protein, 209 aa, Triticum aestivum
  peptide (1)..(209): Ceres Seq. ID no. 12615270
  misc_feature (105)..(176): Pfam Name: a.k.a. RRM, RBD, or RNP domain Pfam Description: RNA recognition motif.
  misc_feature (1)..(208): NCBI GI NO: 30524687 NR Description: salt tolerance protein 4 [Beta vulgaris]
  misc_feature (7)..(208): NCBI GI NO: 18403559 NR Description: RNA-binding protein, putative
  misc_feature (7)..(208): NCBI GI NO: 21536738 NR Description: RNA-binding protein, putative
  misc_feature (7)..(196): NCBI GI NO: 25405472 NR Description: probable RNA-binding protein 35994-37391
  misc_feature (55)..(207): NCBI GI NO: 34784590 NR Description: Unknown (protein for MGC:68591) [Xenopus laevis]
  misc_feature (55)..(207): NCBI GI NO: 11034807 NR Description: RNA-binding protein Y14 [Xenopus laevis]
  misc_feature (55)..(207): NCBI GI NO: 20804379 NR Description: RNA binding motif protein 8 [Oryzias latipes]
  misc_feature (55)..(207): NCBI GI NO: 20804381 NR Description: RNA binding motif protein 8 [Oryzias latipes]
  misc_feature (55)..(207): NCBI GI NO: 4826972 NR Description: RNA binding motif protein 8A
  misc_feature (55)..(207): NCBI GI NO: 10197630 NR Description: MDS014 [Homo sapiens]
MAAAAMNTDVEAVDFDSDDDDLMDEEGAIEPSPAPAPRLRSTIAGGGGGDDDAPRKTKGRGFREDPNSSSAHRDSRLAGAGRSGFDALASDGGPGPVRSIEGWIVLVTGVHEEAQEEDLHNIFGDYGQVKNLHLNLDRRTGFVKGYALIEYENFEQAKRAIRESDGTELLSQIISVDWAFSNGPVKQRSTRKRSPRPNRSRSPPRRRYP

SEQ ID NO: 12383 - protein, 204 aa, Triticum aestivum
  peptide (1)..(204): Ceres Seq. ID no. 12615271
  misc_feature (100)..(171): Pfam Name: a.k.a. RRM, RBD, or RNP domain Pfam Description: RNA recognition motif.
  misc_feature (1)..(203): NCBI GI NO: 30524687 NR Description: salt tolerance protein 4 [Beta vulgaris]
  misc_feature (2)..(203): NCBI GI NO: 18403559 NR Description: RNA-binding protein, putative
  misc_feature (2)..(203): NCBI GI NO: 21536738 NR Description: RNA-binding protein, putative
  misc_feature (2)..(191): NCBI GI NO: 25405472 NR Description: probable RNA-binding protein 35994-37391
  misc_feature (50)..(202): NCBI GI NO: 34784590 NR Description: Unknown (protein for MGC:68591) [Xenopus laevis]
  misc_feature (50)..(202): NCBI GI NO: 11034807 NR Description: RNA-binding protein Y14 [Xenopus laevis]
  misc_feature (50)..(202): NCBI GI NO: 20804379 NR Description: RNA binding motif protein 8 [Oryzias latipes]
  misc_feature (50)..(202): NCBI GI NO: 20804381 NR Description: RNA binding motif protein 8 [Oryzias latipes]
  misc_feature (50)..(202): NCBI GI NO: 4826972 NR Description: RNA binding motif protein 8A
  misc_feature (50)..(202): NCBI GI NO: 10197630 NR Description: MDS014 [Homo sapiens]
MNTDVEAVDFDSDDDDLMDEEGAIEPSPAPAPRLRSTIAGGGGGDDDAPRKTKGRGFREDPNSSSAHRDSRLAGAGRSGFDALASDGGPGPVRSIEGWIVLVTGVHEEAQEEDLHNIFGDYGQVKNLHLNLDRRTGFVKGYALIEYENFEQAKRAIRESDGTELLSQIISVDWAFSNGPVKQRSTRKRSPRPNRSRSPPRRRYP

SEQ ID NO: 12384 - DNA, 1271 bp, Triticum aestivum
  misc_feature (1)..(1271): Ceres Seq. ID no. 14313459
gcactcaacacactctctgcttcagctaacattagcagtccagcgcacacacatacagatatcgagagtgtgtgtgtaagagagacattagatcgagagcgatggcaattcctgctgatgctgctgtctcgttgaacttcccggtgatcaacatggagaagcttgagaccggggagaggggcgcggccatggaggtcatccgcgacgcctgcgagaactggggattcttcgagctgctgaaccatggcatctcgcacgagctgatggacgaggtggagcgggtgagcaaggcgaactacacggcgtgccgagaggggcagttcaaggagtttgcggcgcggacgctggaggccggcgagaagggcgccgacgtgaaggacgtggactgggagagcaccttcttcgtccgccacctccccgcctccaaccttgccgacctgcccgacctcgaccaccactacaggcaactgatcaaggaattcgcgtcggagatcgagaagctggcagagaaggtgctggacctgctgtgcgagaacctgggtctggagcagggctacctgaagcgggcgttcgccgggtccaggggcccgacgttcggcaccaaggtgagcagctacccaccgtgcccacgccccgacctggttgacggcctccgcgcgcacaccgacgccggcggcgtcatcctgctgttccaggacgaccaggtgagcgggctgcagctccttaaggacggggcctgggttgaggtgccgcccatgcgccacgccatcgtcgtcaatatcggcgaccagctggaggtgatcaccaacgggcggtacaagagcgtgatgcaccgcgtgctcacccgcgccgacggcaaccgcatgtccatcgcgtcattctacaaccccggggccgacgccgtcatcttcccggccccggcgcttgtggccgctgccggcgccacggagaagaacgagggcgaggagggcggcgccgtgtacccgaagttcgtgttcgaggactacatgaacctgtacgtgcgccacaagttcgaggccaaggagccacggttcaaggccatgaaggcagacgccgcgcccatcgccatcgcgtgataacgccgcgcccatcgagtacaagagtattttgagacgtgtttactttcttttgggcgtgccatgtatccggttagctttatgggtaatgtattttcgagtccgactcacagattcttgtccgggcatttctattttgctgattatggcatgctgttacgtgaagttaggaac

SEQ ID NO: 12385 - protein, 331 aa, Triticum aestivum
  peptide (1)..(331): Ceres Seq. ID no. 14313460
  misc_feature (163)..(263): Pfam Name: II Pfam Description: 2OG-Fe
  misc_feature (7)..(331): NCBI GI NO: 7433198 NR Description: probable 1-aminocyclopropane-1-carboxylate oxidase
  misc_feature (12)..(323): NCBI GI NO: 1326182 NR Description: 1-aminocyclopropane-1-carboxylate oxidase
  misc_feature (12)..(323): NCBI GI NO: 2769652 NR Description: ACC oxidase [Musa acuminata]
  misc_feature (8)..(323): NCBI GI NO: 12862572 NR Description: 1-aminocyclopropane-1-carboxylate oxidase
  misc_feature (12)..(323): NCBI GI NO: 38043946 NR Description: 1-aminocyclopropane-1-carboxylate oxidase
  misc_feature (12)..(328): NCBI GI NO: 1771345 NR Description: 1-aminocyclopropane-1-carboxylate oxidase
  misc_feature (12)..(328): NCBI GI NO: 584711 NR Description: 1-aminocyclopropane-1-carboxylate oxidase 3
  misc_feature (13)..(323): NCBI GI NO: 1813891 NR Description: 1-aminocyclopropane-1-carboxylate oxidase
  misc_feature (12)..(331): NCBI GI NO: 30840954 NR Description: 1-aminocyclopropane-1-carboxylate oxidase 2
  misc_feature (12)..(330): NCBI GI NO: 642062 NR Description: 1-aminocyclopropane-1-carboxylate oxidase
MAIPADAAVSLNFPVINMEKLETGERGAAMEVIRDACENWGFFELLNHGISHELMDEVERVSKANYTACREGQFKEFAARTLEAGEKGADVKDVDWESTFFVRHLPASNLADLPDLDHHYRQLIKEFASEIEKLAEKVLDLLCENLGLEQGYLKRAFAGSRGPTFGTKVSSYPPCPRPDLVDGLRAHTDAGGVILLFQDDQVSGLQLLKDGAWVEVPPMRHAIVVNIGDQLEVITNGRYKSVMHRVLTRADGNRMSIASFYNPGADAVIFPAPALVAAAGATEKNEGEEGGAVYPKFVFEDYMNLYVRHKFEAKEPRFKAMKADAAPIAIA

SEQ ID NO: 12386 - protein, 314 aa, Triticum aestivum
  peptide (1)..(314): Ceres Seq. ID no. 14313461
  misc_feature (146)..(246): Pfam Name: II Pfam Description: 2OG-Fe
  misc_feature (1)..(314): NCBI GI NO: 7433198 NR Description: probable 1-aminocyclopropane-1-carboxylate oxidase
  misc_feature (1)..(306): NCBI GI NO: 1326182 NR Description: 1-aminocyclopropane-1-carboxylate oxidase
  misc_feature (1)..(306): NCBI GI NO: 2769652 NR Description: ACC oxidase [Musa acuminata]
  misc_feature (1)..(306): NCBI GI NO: 12862572 NR Description: 1-aminocyclopropane-1-carboxylate oxidase
  misc_feature (1)..(306): NCBI GI NO: 38043946 NR Description: 1-aminocyclopropane-1-carboxylate oxidase
  misc_feature (1)..(311): NCBI GI NO: 1771345 NR Description: 1-aminocyclopropane-1-carboxylate oxidase
  misc_feature (1)..(311): NCBI GI NO: 584711 NR Description: 1-aminocyclopropane-1-carboxylate oxidase 3
  misc_feature (1)..(306): NCBI GI NO: 1813891 NR Description: 1-aminocyclopropane-1-carboxylate oxidase
  misc_feature (1)..(314): NCBI GI NO: 30840954 NR Description: 1-aminocyclopropane-1-carboxylate oxidase 2
  misc_feature (1)..(313): NCBI GI NO: 642062 NR Description: 1-aminocyclopropane-1-carboxylate oxidase
MEKLETGERGAAMEVIRDACENWGFFELLNHGISHELMDEVERVSKANYTACREGQFKEFAARTLEAGEKGADVKDVDWESTFFVRHLPASNLADLPDLDHHYRQLIKEFASEIEKLAEKVLDLLCENLGLEQGYLKRAFAGSRGPTFGTKVSSYPPCPRPDLVDGLRAHTDAGGVILLFQDDQVSGLQLLKDGAWVEVPPMRHAIVVNIGDQLEVITNGRYKSVMHRVLTRADGNRMSIASFYNPGADAVIFPAPALVAAAGATEKNEGEEGGAVYPKFVFEDYMNLYVRHKFEAKEPRFKAMKADAAPIAIA

SEQ ID NO: 12387 - protein, 302 aa, Triticum aestivum
  peptide (1)..(302): Ceres Seq. ID no. 14313462
  misc_feature (134)..(234): Pfam Name: II Pfam Description: 2OG-Fe
  misc_feature (1)..(302): NCBI GI NO: 7433198 NR Description: probable 1-aminocyclopropane-1-carboxylate oxidase
  misc_feature (1)..(294): NCBI GI NO: 1326182 NR Description: 1-aminocyclopropane-1-carboxylate oxidase
  misc_feature (1)..(294): NCBI GI NO: 2769652 NR Description: ACC oxidase [Musa acuminata]
  misc_feature (1)..(294): NCBI GI NO: 12862572 NR Description: 1-aminocyclopropane-1-carboxylate oxidase
  misc_feature (1)..(294): NCBI GI NO: 38043946 NR Description: 1-aminocyclopropane-1-carboxylate oxidase
  misc_feature (1)..(299): NCBI GI NO: 1771345 NR Description: 1-aminocyclopropane-1-carboxylate oxidase
  misc_feature (1)..(299): NCBI GI NO: 584711 NR Description: 1-aminocyclopropane-1-carboxylate oxidase 3
  misc_feature (1)..(294): NCBI GI NO: 1813891 NR Description: 1-aminocyclopropane-1-carboxylate oxidase
  misc_feature (1)..(302): NCBI GI NO: 30840954 NR Description: 1-aminocyclopropane-1-carboxylate oxidase 2
  misc_feature (1)..(301): NCBI GI NO: 642062 NR Description: 1-aminocyclopropane-1-carboxylate oxidase
MEVIRDACENWGFFELLNHGISHELMDEVERVSKANYTACREGQFKEFAARTLEAGEKGADVKDVDWESTFFVRHLPASNLADLPDLDHHYRQLIKEFASEIEKLAEKVLDLLCENLGLEQGYLKRAFAGSRGPTFGTKVSSYPPCPRPDLVDGLRAHTDAGGVILLFQDDQVSGLQLLKDGAWVEVPPMRHAIVVNIGDQLEVITNGRYKSVMHRVLTRADGNRMSIASFYNPGADAVIFPAPALVAAAGATEKNEGEEGGAVYPKFVFEDYMNLYVRHKFEAKEPRFKAMKADAAPIAIA

SEQ ID NO: 12388 - DNA, 887 bp, Triticum aestivum
  misc_feature (1)..(887): Ceres Seq. ID no. 12615117
aaaccatttgtcgtgagaccatctctcaccataggtcaactgctttggaaaggcggaagtggaagctagggtttaagaaggtccaggacgaagtggatcacggcgatggcgtcggcgaaaatcctagcgcgggctggctcctccttcctcggccgcctcctcgcctccccgcctccgtctcttctgcggaccggacctcctcttccgtcgctgctccataggatccagccgcacgtcccgccgccgccggcgtcggtggacgcacacgacgcggaggtggtcgcgagactaacttcgctccccggggagatctccttcccctgcggcctcccctctctccggttcctcattgacgatggaattgatcctgttgctaatgaaccccttgagttacttcccaaaaggacttaccaacccagcaccatcaagcggaaacgaacccatggatttcgtgcacgtaaatcaaccacgggtgggcgtaaggtgattgctcggagaattgctaaaggaaggcacaaaatttcatggtaatgaaaacccatggcaccgatgggagtttcacctcagctttgaatgatgctaatgtgaacatctaggagcttacaatagatgtattctccttccgaggcggggttagagcaaagccaagagacacctgcctgaatttcttcaccaaacaaaacgtttgttccactgaataaacatgacaaggagatggttatcgatgattttactgctatttgagatatgtacttgtatgctagttcgactgcattatgcatttgcttgtgttgtcaaactgtcagagtagcatccttggggtcatttccgtccatcaaactatgatgttcgcgttttcccccctttaagaaaaaagttttgcgtgc

SEQ ID NO: 12389 - protein, 141 aa, Triticum aestivum
  peptide (1)..(141): Ceres Seq. ID no. 12615118
  misc_feature (98)..(140): Pfam Name: Pfam Description:  Ribosomal protein L34
  misc_feature (1)..(140): NCBI GI NO: 20521263 NR Description: B1129G05.2
  misc_feature (3)..(140): NCBI GI NO: 29824329 NR Description: unknown protein [Arabidopsis thaliana]
  misc_feature (97)..(140): NCBI GI NO: 24371607 NR Description: ribosomal protein L34 [Shewanella oneidensis MR-1]
  misc_feature (99)..(140): NCBI GI NO: 15839371 NR Description: 50S ribosomal protein L34
  misc_feature (99)..(140): NCBI GI NO: 24212875 NR Description: ribosomal protein L34
  misc_feature (99)..(140): NCBI GI NO: 39938733 NR Description: ribosomal protein L34 [Onion yellows phytoplasma]
  misc_feature (99)..(140): NCBI GI NO: 39933711 NR Description: possible ribosomal protein L34
  misc_feature (99)..(140): NCBI GI NO: 17988621 NR Description: LSU ribosomal protein L34P [Brucella melitensis]
  misc_feature (97)..(140): NCBI GI NO: 15640039 NR Description: ribosomal protein L34 [Vibrio cholerae]
  misc_feature (99)..(140): NCBI GI NO: 15603027 NR Description: RpL34 [Pasteurella multocida]
MASAKILARAGSSFLGRLLASPPPSLLRTGPPLPSLLHRIQPHVPPPPASVDAHDAEVVARLTSLPGEISFPCGLPSLRFLIDDGIDPVANEPLELLPKRTYQPSTIKRKRTHGFRARKSTTGGRKVIARRIAKGRHKISW

SEQ ID NO: 12390 - protein, 72 aa, Triticum aestivum
  peptide (1)..(72): Ceres Seq. ID no. 12615119
TICRETISHHRSTALERRKWKLGFKKVQDEVDHGDGVGENPSAGWLLLPRPPPRLPASVSSADRTSSSVAAP

SEQ ID NO: 12391 - DNA, 1815 bp, Triticum aestivum
  misc_feature (1)..(1815): Ceres Seq. ID no. 13598401
accaagcaaagcatccaaccatcagatatgcatatgaccagacctgaccaattgtgcgagatgtttctttgttcagataactataacaggaatggttctacctctagggccatacgaaaacccctctaaactggatatcacatccagccaaccactacaacagagctccaattaaacacccacgggctgtgcacacacagacgtcgcatatcagaatttcaaccacttcttctccttctccttcctggcgaccgcgttggtggccgaggcgtgcgtcgcctcggcgtcggcgagcgccttccgcgtctgctccagcttcctcgacgccgcatcatgcaccgccttgtccttgcggttgcgctgcaccatctcctccagccgcccgacctggctccgcagctccttcacctcgtcgtcgtacgcgagcagagaccttctgttgtcttctttcttgggatgcccattggcctgacccgatggcgactctttcctggccttggcggccgaggagccttctgacgtgtcctggctcaccagctggctgttcatgaagctaaagacggacctctccgcctcctcggccttggcggccctggtcagctccgcaaacttccggtcgcgcttcctttgcccgccccggctgcgcttcttgtctttctcacggtgtatgcttcggccgtcctcgcctgtggttgcagcgaccgcgtggtcgagtgattgcttggccggtagtaccttgactgggattggatcgagcatgccttggccggacacgcctagccccatgccctcccggtaacccatttttgccatcattttggaggcgacgcccctggtgtgctgttcccattttgcaaagatcacggtctcagactgaacaccagttaaatttgtggtttccaaacggccaagaccctgatggatggattcatcctcttgatcgccatcttcacttaactcagattcatcctcacttgagcctctttcatcatcttccccgctcacatcagcatattctgggatagaaagggaatcacccggaagcgttgcagtgctcccatcatcttgaaagaccacctgaccacgcttcaactcatcatcccacgactcaagttcagctctcctccaaaggccagaatggtgcccagaagctgccagtatgctggatcctgccaaggactgtcgccatgcagttggagtgaaccgtttcaaggatgaagtaggaatcacaacaccatgggacaagcggcagttattagcaaaccgacaccgttgctgcagaaagaacttgcacatcgacattttttctgatgtgggtgtcagaaatgagacccgtgcattgcctgaaccttcaagtcccagaatgcatccattataccaacgcccatcattgtgcctgaatctacactttgatccgactgaaaattcctgtggctccaatggttgtggctcaacatcatgtggatctaatggctcaatagcagcttcagttgatagcgatgctgactcctgatttggaaagatctcatcgatttgcttcactagcctagaacgcttcaaatgcagaagcccttcctctgcatccttaatcgcagacagaagttccccgtgcacctcgaggaggtccgcgttggaggcgtcggcggcgagggcctcgtcgacggcggcgagggaggaccgctgctcctccaggtgctgttccagctgcagctcgatctccgccgcctcgtcctcctccccctcgcccgccatggctcaccggtccaggcagcggtcggtcgggagaagagagaagggccgacgatttcgatgggt

SEQ ID NO: 12392 - protein, 117 aa, Triticum aestivum
  peptide (1)..(117): Ceres Seq. ID no. 13598402
  misc_feature (86)..(117): NCBI GI NO: 13592175 NR Description: ppg3 [Leishmania major]
MLDPAKDCRHAVGVNRFKDEVGITTPWDKRQLLANRHRCCRKNLHIDIFSDVGVRNETRALPEPSSPRMHPLYQRPSLCLNLHFDPTENSCGSNGCGSTSCGSNGSIAASVDSDADS

SEQ ID NO: 12393 - protein, 85 aa, Triticum aestivum
  peptide (1)..(85): Ceres Seq. ID no. 13598403
MQKPFLCILNRRQKFPVHLEEVRVGGVGGEGLVDGGEGGPLLLQVLFQLQLDLRRLVLLPLARHGSPVQAAVGREKREGPTISMG

SEQ ID NO: 12394 - protein, 83 aa, Triticum aestivum
  peptide (1)..(83): Ceres Seq. ID no. 13598404
  misc_feature (1)..(83): NCBI GI NO: 13592175 NR Description: ppg3 [Leishmania major]
MKLKTDLSASSALAALVSSANFRSRFLCPPRLRFLSFSRCMLRPSSPVVAATAWSSDCLAGSTLTGIGSSMPWPDTPSPMPSR

SEQ ID NO: 12395 - DNA, 1237 bp, Triticum aestivum
  misc_feature (1)..(1237): Ceres Seq. ID no. 13596918
agacggctcggcgattggcctcacggcgagctatctaggtcacgaggaatccactcccgactgccgttaggctggccggctggcttgttgccgcggacagccttggcgaatcacggtcctgataggcgcccctcctcccggcgatggggggtcgcaatcggcgatggccgacgaagcgccaccacgacgcctcttcgaaccctcgccccccgcctccgtattccggatacagtcacgtggataatcaatgccaagtcccattatgggaaagggaattttgcagtcttgttggtggcatttcgtggcagaggttctgcgagaacaagcactttgcctatatgtacaaggagatagagcagtgggatgactcgggagcttttgagaatttccagaacgcaaaatcaaggttctggtctcattaccatggccaaccttctgatataccttaccccaaccctgatctgtacattgatgaggtcgaccatcgttgcgaggtcgaccccgagttggtagctgacctggacaaggtgcgggtaccctttgaggcggacaacgagcccgccgtagctgccaataacaggtgtgcccagaaccagtcagggaactgggacatctatctagaaaagccgacccctgaggtgaacaagtgggaggcggacaactcggcatccaacgcaggttggggagcgagtcaggagcctctgagcagctggaacaaaatcagcaccggctggggcgaggccctggcggagcccggttggggcagctcaggcaacaaccattgcccagggaataactggagcagctcccatggagtatccagcaacaataacacatactaccaggatccaggcggcgcatatggcaggaaaaggaacagtggaggcgggtactcccagcagaggaacagcaagcagaggaaccaggctgagagccaccaccagaggggcagatggcaggatcacagggacagggggaggcatggcgagcggttcctgtttgacaataggccaaatgggcagcgagcagagcgcggcttctgagttggtggcggtgagtgtgcgagaaaccgtggaaaggttttggttgtatgataaatgatgcgcattttctagtgtcttttgtgcggagctgcagcttgtaatggttggatgttgcaacaacgctttacctgtaaggagatgtgtcaggttttgttgctgctctttgtgatatgttctgttttctctcttcctgt

SEQ ID NO: 12396 - protein, 299 aa, Triticum aestivum
  peptide (1)..(299): Ceres Seq. ID no. 13596919
  misc_feature (38)..(298): NCBI GI NO: 11357869 NR Description: hypothetical protein F8F6
  misc_feature (38)..(298): NCBI GI NO: 18414420 NR Description: expressed protein [Arabidopsis thaliana]
  misc_feature (24)..(191): NCBI GI NO: 34908952 NR Description: P0691E06.28
  misc_feature (1)..(272): NCBI GI NO: 30725308 NR Description: At3g51940 [Arabidopsis thaliana]
  misc_feature (1)..(272): NCBI GI NO: 30693555 NR Description: expressed protein [Arabidopsis thaliana]
  misc_feature (38)..(272): NCBI GI NO: 11357778 NR Description: hypothetical protein F4F15
MGGRNRRWPTKRHHDASSNPRPPPPYSGYSHVDNQCQVPLWEREFCSLVGGISWQRFCENKHFAYMYKEIEQWDDSGAFENFQNAKSRFWSHYHGQPSDIPYPNPDLYIDEVDHRCEVDPELVADLDKVRVPFEADNEPAVAANNRCAQNQSGNWDIYLEKPTPEVNKWEADNSASNAGWGASQEPLSSWNKISTGWGEALAEPGWGSSGNNHCPGNNWSSSHGVSSNNNTYYQDPGGAYGRKRNSGGGYSQQRNSKQRNQAESHHQRGRWQDHRDRGRHGERFLFDNRPNGQRAERGF

SEQ ID NO: 12397 - protein, 234 aa, Triticum aestivum
  peptide (1)..(234): Ceres Seq. ID no. 13596920
  misc_feature (1)..(233): NCBI GI NO: 11357869 NR Description: hypothetical protein F8F6
  misc_feature (1)..(233): NCBI GI NO: 18414420 NR Description: expressed protein [Arabidopsis thaliana]
  misc_feature (1)..(126): NCBI GI NO: 34908952 NR Description: P0691E06.28
  misc_feature (1)..(207): NCBI GI NO: 30725308 NR Description: At3g51940 [Arabidopsis thaliana]
  misc_feature (1)..(207): NCBI GI NO: 30693555 NR Description: expressed protein [Arabidopsis thaliana]
  misc_feature (1)..(207): NCBI GI NO: 11357778 NR Description: hypothetical protein F4F15
MYKEIEQWDDSGAFENFQNAKSRFWSHYHGQPSDIPYPNPDLYIDEVDHRCEVDPELVADLDKVRVPFEADNEPAVAANNRCAQNQSGNWDIYLEKPTPEVNKWEADNSASNAGWGASQEPLSSWNKISTGWGEALAEPGWGSSGNNHCPGNNWSSSHGVSSNNNTYYQDPGGAYGRKRNSGGGYSQQRNSKQRNQAESHHQRGRWQDHRDRGRHGERFLFDNRPNGQRAERGF

SEQ ID NO: 12398 - DNA, 837 bp, Triticum aestivum
  misc_feature (1)..(837): Ceres Seq. ID no. 13654825
  misc_feature (88)..(88): n is a, c, t, g, unknown, or other
ccttcttctctcccgctgaaacctttcttcacaaaatggcctcaactacactaacaaccctctccctccgcaacctctcttatcctanaccctcctcctcttcttaccctacgcacctctccgccaacccctcctccctccaattccccaacttctcccaccgcgccaccaccacgcgccgcgcccgcgtcgtcgtcgtctccgccgtcgaggcaccggagaaaatcaccaagctcggcgacgaaatcgcgggactcacgctcgaggaagccaagaacctcgtcgacttcctccaggacaagctcggcgtctccgcggcagcattcgcccccgtagccgtcgccgcgggtgccgtcggcgccgtggcggacgctccggcggcggtggaggagaagatggagttcgacgtgttgatcgaggaggtgccgagcaacgcgagaatcgcggtgattaaggcggtgagggcgctgactaacctggcgctgaaagaggcgaaggagttgatagaagggttgccgaagaagttcaaggaagggatttcgaaggacgaagctgaagatgcgaagaagcaacttgaagaagccggtgccaaggttaccattgcttagtactgtttagcagcagcatttgttttgcttcttcttttgttgtagctgagttcactagtacactgtaatctcctttccattttgtctggagttcaatcttatttgtaatgaggaaaaaatgagttcttattttttttttaatgcctctgaggtgtttgttgaaatggaggtgaagggttttaaattgctgaattggaaattggaaacacggtacttaactacttgctgg

SEQ ID NO: 12399 - protein, 201 aa, Triticum aestivum
  peptide (1)..(201): Ceres Seq. ID no. 13654826
  misc_feature (133)..(201): Pfam Name: Pfam Description:  Ribosomal protein L7/L12 C-terminal domain
  misc_feature (12)..(201): NCBI GI NO: 20020 NR Description: ribosomal protein L12-1a [Nicotiana tabacum]
  misc_feature (12)..(201): NCBI GI NO: 133088 NR Description: 50S RIBOSOMAL PROTEIN L12, CHLOROPLAST PRECURSOR
  misc_feature (12)..(201): NCBI GI NO: 548746 NR Description: 50S RIBOSOMAL PROTEIN L12, CHLOROPLAST PRECURSOR
  misc_feature (13)..(200): NCBI GI NO: 133085 NR Description: 50S RIBOSOMAL PROTEIN L12, CHLOROPLAST PRECURSOR
  misc_feature (12)..(201): NCBI GI NO: 15232276 NR Description: 50S ribosomal protein L12-3, chloroplast precursor
  misc_feature (12)..(201): NCBI GI NO: 21592776 NR Description: 50S ribosomal protein L12-C [Arabidopsis thaliana]
  misc_feature (12)..(201): NCBI GI NO: 541897 NR Description: ribosomal protein L12
  misc_feature (12)..(201): NCBI GI NO: 34912074 NR Description: putative ribosomal protein L12
  misc_feature (12)..(201): NCBI GI NO: 15232274 NR Description: 50S ribosomal protein L12-1, chloroplast precursor
  misc_feature (68)..(198): NCBI GI NO: 223560 NR Description: protein,chloroplast ribosomal
  misc_feature (29)..(29): Xaa is any aa, unknown or other
FFSPAETFLHKMASTTLTTLSLRNLSYPXPSSSSYPTHLSANPSSLQFPNFSHRATTTRRARVVVVSAVEAPEKITKLGDEIAGLTLEEAKNLVDFLQDKLGVSAAAFAPVAVAAGAVGAVADAPAAVEEKMEFDVLIEEVPSNARIAVIKAVRALTNLALKEAKELIEGLPKKFKEGISKDEAEDAKKQLEEAGAKVTIA

SEQ ID NO: 12400 - protein, 190 aa, Triticum aestivum
  peptide (1)..(190): Ceres Seq. ID no. 13654827
  misc_feature (122)..(190): Pfam Name: Pfam Description:  Ribosomal protein L7/L12 C-terminal domain
  misc_feature (1)..(190): NCBI GI NO: 20020 NR Description: ribosomal protein L12-1a [Nicotiana tabacum]
  misc_feature (1)..(190): NCBI GI NO: 133088 NR Description: 50S RIBOSOMAL PROTEIN L12, CHLOROPLAST PRECURSOR
  misc_feature (1)..(190): NCBI GI NO: 548746 NR Description: 50S RIBOSOMAL PROTEIN L12, CHLOROPLAST PRECURSOR
  misc_feature (2)..(189): NCBI GI NO: 133085 NR Description: 50S RIBOSOMAL PROTEIN L12, CHLOROPLAST PRECURSOR
  misc_feature (1)..(190): NCBI GI NO: 15232276 NR Description: 50S ribosomal protein L12-3, chloroplast precursor
  misc_feature (1)..(190): NCBI GI NO: 21592776 NR Description: 50S ribosomal protein L12-C [Arabidopsis thaliana]
  misc_feature (1)..(190): NCBI GI NO: 541897 NR Description: ribosomal protein L12
  misc_feature (1)..(190): NCBI GI NO: 34912074 NR Description: putative ribosomal protein L12
  misc_feature (1)..(190): NCBI GI NO: 15232274 NR Description: 50S ribosomal protein L12-1, chloroplast precursor
  misc_feature (57)..(187): NCBI GI NO: 223560 NR Description: protein,chloroplast ribosomal
  misc_feature (18)..(18): Xaa is any aa, unknown or other
MASTTLTTLSLRNLSYPXPSSSSYPTHLSANPSSLQFPNFSHRATTTRRARVVVVSAVEAPEKITKLGDEIAGLTLEEAKNLVDFLQDKLGVSAAAFAPVAVAAGAVGAVADAPAAVEEKMEFDVLIEEVPSNARIAVIKAVRALTNLALKEAKELIEGLPKKFKEGISKDEAEDAKKQLEEAGAKVTIA

SEQ ID NO: 12401 - DNA, 1234 bp, Triticum aestivum
  misc_feature (1)..(1234): Ceres Seq. ID no. 13598253
gattccccgtcccctttcttcattccctcttccgttgccggtgcgtccgcgtcctgtctctcccggccagcgatcgggaggggcgagggatggcctcccgtccccccaactccgccgacggcgagggccccgcagggaataacgtggaattgccatccctgccctttcatgttgttactaaacctagtcaactcccagttgagtttcttgagccctctgctgccaagaaattggtgattggatttgactgtgaaggtgttgacctttgccgccatggtgctctctgtatcatgcagattgcatttcctgacgctgtttacttggtcgatgctattgagggtggaaaagaactagttgaagcttgcaaaccagcacttgagtccaatcatatcaccaaagttattcatgactgtaaaagggacagtgaggcattgtatttccagtttggcattaaattacataatgtgatggatacacagatagcctattccctgattgaagagcaggaaggtaaaaagagagcatatgatgtttacatatccttcgtgagccttcttgccgatcctcgttattgtggaatgccatatcctgaaaaggaagaagtccgtacccttctaaggcaggacccaaatttctggaaaaataggcccttgtctgaaatgatgattcgagcagcgacagatgatgtgcgcttccttctcaatatacatgagaaaatgatggagaagttaagcaaagtatcttcatggcgtctggcagtacgaagtgagctatactgtaggtgcttttgcataaatgacaaccagcaggcagattggccgcctcttccaactgtccctgatgacattgaagctgaagctcgtgttcctgaagtggatatcctttcgctcttagatgtgcctcctggaaaaatgggtcgtgttattggcagaaaaggatcatcaataatggctgtgaaagaatcttgcaatgttgaaatccatatcggtggtgcaaagggacctccagatagggtgttcatcattggaccagtgaaggaagtcagaaaggcggaggccatcctgaggggccgaatgctgtaattctagagaaacgacttcttgatatagacttgaactgccatatcttttgaacacaagggatacagaaatgcatgtggatcgctgatccgtgacaacaataaaaataagagttggattaaaaaaaaaaaaaaaaaagcttatcgataccgtcg

SEQ ID NO: 12402 - protein, 359 aa, Triticum aestivum
  peptide (1)..(359): Ceres Seq. ID no. 15222279
  misc_feature (78)..(244): Pfam Name: Pfam Description:  3'-5' exonuclease
  misc_feature (76)..(359): NCBI GI NO: 34914238 NR Description: P0002B05.11
  misc_feature (34)..(359): NCBI GI NO: 18400976 NR Description: expressed protein [Arabidopsis thaliana]
  misc_feature (97)..(279): NCBI GI NO: 25407824 NR Description: hypothetical protein At2g25910
  misc_feature (275)..(341): NCBI GI NO: 25407824 NR Description: hypothetical protein At2g25910
  misc_feature (60)..(257): NCBI GI NO: 24762379 NR Description: egalitarian CG4051-PA [Drosophila melanogaster]
  misc_feature (60)..(257): NCBI GI NO: 33589402 NR Description: RE33408p [Drosophila melanogaster]
  misc_feature (60)..(257): NCBI GI NO: 38681451 NR Description: egalitarian [Drosophila melanogaster]
  misc_feature (106)..(262): NCBI GI NO: 23489160 NR Description: 3'-5' exonuclease, putative
  misc_feature (78)..(243): NCBI GI NO: 23612774 NR Description: exonuclease, putative [Plasmodium falciparum 3D7]
  misc_feature (78)..(248): NCBI GI NO: 23483550 NR Description: 3'-5' exonuclease, putative
FPVPFLHSLFRCRCVRVLSLPASDREGRGMASRPPNSADGEGPAGNNVELPSLPFHVVTKPSQLPVEFLEPSAAKKLVIGFDCEGVDLCRHGALCIMQIAFPDAVYLVDAIEGGKELVEACKPALESNHITKVIHDCKRDSEALYFQFGIKLHNVMDTQIAYSLIEEQEGKKRAYDVYISFVSLLADPRYCGMPYPEKEEVRTLLRQDPNFWKNRPLSEMMIRAATDDVRFLLNIHEKMMEKLSKVSSWRLAVRSELYCRCFCINDNQQADWPPLPTVPDDIEAEARVPEVDILSLLDVPPGKMGRVIGRKGSSIMAVKESCNVEIHIGGAKGPPDRVFIIGPVKEVRKAEAILRGRML

SEQ ID NO: 12403 - protein, 330 aa, Triticum aestivum
  peptide (1)..(330): Ceres Seq. ID no. 15222280
  misc_feature (49)..(215): Pfam Name: Pfam Description:  3'-5' exonuclease
  misc_feature (47)..(330): NCBI GI NO: 34914238 NR Description: P0002B05.11
  misc_feature (5)..(330): NCBI GI NO: 18400976 NR Description: expressed protein [Arabidopsis thaliana]
  misc_feature (68)..(250): NCBI GI NO: 25407824 NR Description: hypothetical protein At2g25910
  misc_feature (246)..(312): NCBI GI NO: 25407824 NR Description: hypothetical protein At2g25910
  misc_feature (31)..(228): NCBI GI NO: 24762379 NR Description: egalitarian CG4051-PA [Drosophila melanogaster]
  misc_feature (31)..(228): NCBI GI NO: 33589402 NR Description: RE33408p [Drosophila melanogaster]
  misc_feature (31)..(228): NCBI GI NO: 38681451 NR Description: egalitarian [Drosophila melanogaster]
  misc_feature (77)..(233): NCBI GI NO: 23489160 NR Description: 3'-5' exonuclease, putative
  misc_feature (49)..(214): NCBI GI NO: 23612774 NR Description: exonuclease, putative [Plasmodium falciparum 3D7]
  misc_feature (49)..(219): NCBI GI NO: 23483550 NR Description: 3'-5' exonuclease, putative
MASRPPNSADGEGPAGNNVELPSLPFHVVTKPSQLPVEFLEPSAAKKLVIGFDCEGVDLCRHGALCIMQIAFPDAVYLVDAIEGGKELVEACKPALESNHITKVIHDCKRDSEALYFQFGIKLHNVMDTQIAYSLIEEQEGKKRAYDVYISFVSLLADPRYCGMPYPEKEEVRTLLRQDPNFWKNRPLSEMMIRAATDDVRFLLNIHEKMMEKLSKVSSWRLAVRSELYCRCFCINDNQQADWPPLPTVPDDIEAEARVPEVDILSLLDVPPGKMGRVIGRKGSSIMAVKESCNVEIHIGGAKGPPDRVFIIGPVKEVRKAEAILRGRML

SEQ ID NO: 12404 - protein, 263 aa, Triticum aestivum
  peptide (1)..(263): Ceres Seq. ID no. 15222281
  misc_feature (1)..(148): Pfam Name: Pfam Description:  3'-5' exonuclease
  misc_feature (1)..(263): NCBI GI NO: 34914238 NR Description: P0002B05.11
  misc_feature (1)..(263): NCBI GI NO: 18400976 NR Description: expressed protein [Arabidopsis thaliana]
  misc_feature (1)..(183): NCBI GI NO: 25407824 NR Description: hypothetical protein At2g25910
  misc_feature (179)..(245): NCBI GI NO: 25407824 NR Description: hypothetical protein At2g25910
  misc_feature (1)..(161): NCBI GI NO: 24762379 NR Description: egalitarian CG4051-PA [Drosophila melanogaster]
  misc_feature (1)..(161): NCBI GI NO: 33589402 NR Description: RE33408p [Drosophila melanogaster]
  misc_feature (1)..(161): NCBI GI NO: 38681451 NR Description: egalitarian [Drosophila melanogaster]
  misc_feature (10)..(166): NCBI GI NO: 23489160 NR Description: 3'-5' exonuclease, putative
  misc_feature (1)..(147): NCBI GI NO: 23612774 NR Description: exonuclease, putative [Plasmodium falciparum 3D7]
  misc_feature (1)..(152): NCBI GI NO: 23483550 NR Description: 3'-5' exonuclease, putative
MQIAFPDAVYLVDAIEGGKELVEACKPALESNHITKVIHDCKRDSEALYFQFGIKLHNVMDTQIAYSLIEEQEGKKRAYDVYISFVSLLADPRYCGMPYPEKEEVRTLLRQDPNFWKNRPLSEMMIRAATDDVRFLLNIHEKMMEKLSKVSSWRLAVRSELYCRCFCINDNQQADWPPLPTVPDDIEAEARVPEVDILSLLDVPPGKMGRVIGRKGSSIMAVKESCNVEIHIGGAKGPPDRVFIIGPVKEVRKAEAILRGRML

SEQ ID NO: 12405 - DNA, 996 bp, Triticum aestivum
  misc_feature (1)..(996): Ceres Seq. ID no. 13503610
  misc_feature (850)..(850): n is a, c, t, g, unknown, or other
  misc_feature (851)..(851): n is a, c, t, g, unknown, or other
gcactccattcacggttcgccaaggtcaacaagagtagtgatagatagaagaggccaccatcaccatggatcggcagctgctgaggacggtgaagcaggcgaccaagaaccacgccggcctcatgtaccaccgtctcgtgggccacatcccccacctcctcgtggtcacgctgctcgtcgtcgtggcgccgcagctctcgacgctgacgccggagaaggtgcgcgccctttggaacacagcagtgaacgcgccggcgctggccatggcgtgctgggcggcggcgctggcggcgtacacgtacgcgtcgtcccgccctcagccagtgtatctagtggacctcgccgggtacaagccgccggtggagctggaggcgtcgcgcgccaagaccatcgtgcacttctcgcggtgcgggcggttcagcgagcagagcatggcgttccagaagcggatgctggagcggtcggggctgggcgaggcgacgcacttccccatgtcgctgatccgcctccccgtggacatgtgcgaccggacggccatggaggagtcccacgccgtgatcttcggcgtcgtcgacgaggtcctccgcaagaccggcgtggacgccggcgacgtgggcgtgctcatcttcaactccagcctgctcagcccgacgccgtccttcacgtcgctcatcgtgaaccgctacaagttccgcgacgacatcgtcacgcacaacctcagcggcatggggtgcagcgccggcatcatcgccatcgacctcgccaagcgcctgctccaggtacaccggaacacgtacgcgctggtggtgagcacggagaacatcaccctcaacgcctacatgggcaacannccgtccgatgctggtgaccaacacgctcttccgtgtcggcggcgcggcgatcctcctcaccaaccgggccggcgaccgggcgcggtccaagtaccagctgatccacaccgtgcgcacccaccgcggggcgcacgaccagagctac

SEQ ID NO: 12406 - protein, 310 aa, Triticum aestivum
  peptide (1)..(310): Ceres Seq. ID no. 13503611
  misc_feature (85)..(255): Pfam Name: Pfam Description:  Chalcone and stilbene synthases
  misc_feature (1)..(261): NCBI GI NO: 37534350 NR Description: putative beta-ketoacyl-CoA synthase
  misc_feature (1)..(261): NCBI GI NO: 34902606 NR Description: Putative fatty acid elongase
  misc_feature (7)..(264): NCBI GI NO: 9714501 NR Description: putative fatty acid elongase [Zea mays]
  misc_feature (19)..(264): NCBI GI NO: 14334714 NR Description: putative beta-ketoacyl-CoA synthase
  misc_feature (19)..(264): NCBI GI NO: 15239981 NR Description: beta-ketoacyl-CoA synthase, putative
  misc_feature (19)..(264): NCBI GI NO: 15219676 NR Description: beta-ketoacyl-CoA synthase, putative
  misc_feature (19)..(264): NCBI GI NO: 18377979 NR Description: putative beta-ketoacyl-CoA synthase
  misc_feature (1)..(264): NCBI GI NO: 1045614 NR Description: beta-ketoacyl-CoA synthase
  misc_feature (3)..(261): NCBI GI NO: 15226724 NR Description: very-long-chain fatty acid condensing enzyme
  misc_feature (1)..(264): NCBI GI NO: 15223556 NR Description: very-long-chain fatty acid condensing enzyme
  misc_feature (262)..(262): Xaa is any aa, unknown or other
MDRQLLRTVKQATKNHAGLMYHRLVGHIPHLLVVTLLVVVAPQLSTLTPEKVRALWNTAVNAPALAMACWAAALAAYTYASSRPQPVYLVDLAGYKPPVELEASRAKTIVHFSRCGRFSEQSMAFQKRMLERSGLGEATHFPMSLIRLPVDMCDRTAMEESHAVIFGVVDEVLRKTGVDAGDVGVLIFNSSLLSPTPSFTSLIVNRYKFRDDIVTHNLSGMGCSAGIIAIDLAKRLLQVHRNTYALVVSTENITLNAYMGNXPSDAGDQHALPCRRRGDPPHQPGRRPGAVQVPADPHRAHPPRGARPEL

SEQ ID NO: 12407 - protein, 291 aa, Triticum aestivum
  peptide (1)..(291): Ceres Seq. ID no. 13503612
  misc_feature (66)..(236): Pfam Name: Pfam Description:  Chalcone and stilbene synthases
  misc_feature (1)..(242): NCBI GI NO: 37534350 NR Description: putative beta-ketoacyl-CoA synthase
  misc_feature (1)..(242): NCBI GI NO: 34902606 NR Description: Putative fatty acid elongase
  misc_feature (1)..(245): NCBI GI NO: 9714501 NR Description: putative fatty acid elongase [Zea mays]
  misc_feature (1)..(245): NCBI GI NO: 14334714 NR Description: putative beta-ketoacyl-CoA synthase
  misc_feature (1)..(245): NCBI GI NO: 15239981 NR Description: beta-ketoacyl-CoA synthase, putative
  misc_feature (1)..(245): NCBI GI NO: 15219676 NR Description: beta-ketoacyl-CoA synthase, putative
  misc_feature (1)..(245): NCBI GI NO: 18377979 NR Description: putative beta-ketoacyl-CoA synthase
  misc_feature (1)..(245): NCBI GI NO: 1045614 NR Description: beta-ketoacyl-CoA synthase
  misc_feature (1)..(242): NCBI GI NO: 15226724 NR Description: very-long-chain fatty acid condensing enzyme
  misc_feature (1)..(245): NCBI GI NO: 15223556 NR Description: very-long-chain fatty acid condensing enzyme
  misc_feature (243)..(243): Xaa is any aa, unknown or other
MYHRLVGHIPHLLVVTLLVVVAPQLSTLTPEKVRALWNTAVNAPALAMACWAAALAAYTYASSRPQPVYLVDLAGYKPPVELEASRAKTIVHFSRCGRFSEQSMAFQKRMLERSGLGEATHFPMSLIRLPVDMCDRTAMEESHAVIFGVVDEVLRKTGVDAGDVGVLIFNSSLLSPTPSFTSLIVNRYKFRDDIVTHNLSGMGCSAGIIAIDLAKRLLQVHRNTYALVVSTENITLNAYMGNXPSDAGDQHALPCRRRGDPPHQPGRRPGAVQVPADPHRAHPPRGARPEL

SEQ ID NO: 12408 - protein, 288 aa, Triticum aestivum
  peptide (1)..(288): Ceres Seq. ID no. 13503613
  misc_feature (283)..(283): Xaa is any aa, unknown or other
  misc_feature (284)..(284): Xaa is any aa, unknown or other
HSIHGSPRSTRVVIDRRGHHHHGSAAAEDGEAGDQEPRRPHVPPSRGPHPPPPRGHAARRRGAAALDADAGEGARPLEHSSERAGAGHGVLGGGAGGVHVRVVPPSASVSSGPRRVQAAGGAGGVARQDHRALLAVRAVQRAEHGVPEADAGAVGAGRGDALPHVADPPPRGHVRPDGHGGVPRRDLRRRRRGPPQDRRGRRRRGRAHLQLQPAQPDAVLHVAHREPLQVPRRHRHAQPQRHGVQRRHHRHRPRQAPAPGTPEHVRAGGEHGEHHPQRLHGQXXVRCW

SEQ ID NO: 12409 - DNA, 1401 bp, Triticum aestivum
  misc_feature (1)..(1401): Ceres Seq. ID no. 13596581
gctcttctccagtccgcctccctatccccacctcctccacaacccccaccccaccccacccctcctccgctgcccatcccagcacagcggaagcgatcggcaatggcgtcctccacccagggccaggtcatcacctgcaaagcggcggtggcgtacgaggcgaacaagccgctggtggtcgaggacgtgcaggtggcgccgccgcaggccggcgaggtccgcatcaagatcctctccaccgcgctctgccacaccgactactacacctggagcggcaaggatcctgagggtctctttccttgcattctcggtcacgaggctgctggaattgttgagagtgtcggcgaaggggtgaccgacgtgcagcctggggaccatgtcatcccttgctaccaagcggaatgcagggactgcaagatgtgcaacagcgggaagaccaacctctgcggcaaagttcgcggcgccactggggttggggtcatgatgagcgaccgcaagagccgcttctcggttaatgggaagcccatctaccatttcatggggacgtccacgttcagtcagtacactgttgtgcatgacgtcagtgttgccaagatcaacccacaggcgcccctggataaggtctgcctgctcggctgtggtgtttctactggccttggagcagtatggaatactgcaaaggttgaagcaggttccattgttgctgtttttgggcttggcacagtcggacttgcagttgctgagggggcaaaatcagctggtgcttctcggattattggcattgacattgataccaagaagtttgatgttgctaagaactttggagtcacagagtttgtgaacccaaaagaccatgacaaaccaatccagcaggtccttgttgaccttacagatggtggtgtggattacagttttgagtgcatcggaaatgtttctatcatgagggctgcactcgaatgctgccacaagggctggggtacctctgttgtcgttggcgtagctgcgtctggccaggagattgccacacggccattccagctagtcactggccgtgtctggaagggaacagctttcggcggcttcaagagccgaagccaggtcccgtggctcgtcgagaagtacatgaacaaggaaatcaaggtggacgagtacatcacccacaacatgaaccttaccgacatcaacaaggcgttcgacctgctgcacgaaggcggctgcctgcggtgcgtgctggccatggagcactgaggatcctgctatgtgaagccgagcagtttgcgtcgtgtgaaattgtaatgcagatctatcctccgccctgggactatagaactcgtttggccccgtttggcctagaaactcttgaacacgaaccgctgctataataatatgttgtgttggatg

SEQ ID NO: 12410 - protein, 415 aa, Triticum aestivum
  peptide (1)..(415): Ceres Seq. ID no. 13596582
  misc_feature (35)..(414): NCBI GI NO: 3023271 NR Description: ALCOHOL DEHYDROGENASE CLASS III
  misc_feature (35)..(414): NCBI GI NO: 6225010 NR Description: ALCOHOL DEHYDROGENASE CLASS III
  misc_feature (38)..(411): NCBI GI NO: 2129562 NR Description: alcohol dehydrogenase (EC 1
  misc_feature (38)..(411): NCBI GI NO: 15240054 NR Description: alcohol dehydrogenase class III
  misc_feature (38)..(411): NCBI GI NO: 1498024 NR Description: glutathione-dependent formaldehyde dehydrogenase
  misc_feature (38)..(413): NCBI GI NO: 3121727 NR Description: ALCOHOL DEHYDROGENASE CLASS III
  misc_feature (39)..(411): NCBI GI NO: 18858257 NR Description: alcohol dehydrogenase 5 [Danio rerio]
  misc_feature (39)..(411): NCBI GI NO: 25283011 NR Description: alcohol dehydrogenase (EC 1.1.1.1) 3 - zebra fish
  misc_feature (39)..(411): NCBI GI NO: 5902742 NR Description: ALCOHOL DEHYDROGENASE CLASS III
  misc_feature (37)..(411): NCBI GI NO: 13448051 NR Description: alcohol dehydrogenase class 3
ALLQSASLSPPPPQPPPHPTPPPLPIPAQRKRSAMASSTQGQVITCKAAVAYEANKPLVVEDVQVAPPQAGEVRIKILSTALCHTDYYTWSGKDPEGLFPCILGHEAAGIVESVGEGVTDVQPGDHVIPCYQAECRDCKMCNSGKTNLCGKVRGATGVGVMMSDRKSRFSVNGKPIYHFMGTSTFSQYTVVHDVSVAKINPQAPLDKVCLLGCGVSTGLGAVWNTAKVEAGSIVAVFGLGTVGLAVAEGAKSAGASRIIGIDIDTKKFDVAKNFGVTEFVNPKDHDKPIQQVLVDLTDGGVDYSFECIGNVSIMRAALECCHKGWGTSVVVGVAASGQEIATRPFQLVTGRVWKGTAFGGFKSRSQVPWLVEKYMNKEIKVDEYITHNMNLTDINKAFDLLHEGGCLRCVLAMEH

SEQ ID NO: 12411 - protein, 381 aa, Triticum aestivum
  peptide (1)..(381): Ceres Seq. ID no. 13596583
  misc_feature (1)..(380): NCBI GI NO: 3023271 NR Description: ALCOHOL DEHYDROGENASE CLASS III
  misc_feature (1)..(380): NCBI GI NO: 6225010 NR Description: ALCOHOL DEHYDROGENASE CLASS III
  misc_feature (4)..(377): NCBI GI NO: 2129562 NR Description: alcohol dehydrogenase (EC 1
  misc_feature (4)..(377): NCBI GI NO: 15240054 NR Description: alcohol dehydrogenase class III
  misc_feature (4)..(377): NCBI GI NO: 1498024 NR Description: glutathione-dependent formaldehyde dehydrogenase
  misc_feature (4)..(379): NCBI GI NO: 3121727 NR Description: ALCOHOL DEHYDROGENASE CLASS III
  misc_feature (5)..(377): NCBI GI NO: 18858257 NR Description: alcohol dehydrogenase 5 [Danio rerio]
  misc_feature (5)..(377): NCBI GI NO: 25283011 NR Description: alcohol dehydrogenase (EC 1.1.1.1) 3 - zebra fish
  misc_feature (5)..(377): NCBI GI NO: 5902742 NR Description: ALCOHOL DEHYDROGENASE CLASS III
  misc_feature (3)..(377): NCBI GI NO: 13448051 NR Description: alcohol dehydrogenase class 3
MASSTQGQVITCKAAVAYEANKPLVVEDVQVAPPQAGEVRIKILSTALCHTDYYTWSGKDPEGLFPCILGHEAAGIVESVGEGVTDVQPGDHVIPCYQAECRDCKMCNSGKTNLCGKVRGATGVGVMMSDRKSRFSVNGKPIYHFMGTSTFSQYTVVHDVSVAKINPQAPLDKVCLLGCGVSTGLGAVWNTAKVEAGSIVAVFGLGTVGLAVAEGAKSAGASRIIGIDIDTKKFDVAKNFGVTEFVNPKDHDKPIQQVLVDLTDGGVDYSFECIGNVSIMRAALECCHKGWGTSVVVGVAASGQEIATRPFQLVTGRVWKGTAFGGFKSRSQVPWLVEKYMNKEIKVDEYITHNMNLTDINKAFDLLHEGGCLRCVLAMEH

SEQ ID NO: 12412 - protein, 276 aa, Triticum aestivum
  peptide (1)..(276): Ceres Seq. ID no. 13596584
  misc_feature (1)..(275): NCBI GI NO: 3023271 NR Description: ALCOHOL DEHYDROGENASE CLASS III
  misc_feature (1)..(275): NCBI GI NO: 6225010 NR Description: ALCOHOL DEHYDROGENASE CLASS III
  misc_feature (1)..(272): NCBI GI NO: 2129562 NR Description: alcohol dehydrogenase (EC 1
  misc_feature (1)..(272): NCBI GI NO: 15240054 NR Description: alcohol dehydrogenase class III
  misc_feature (1)..(272): NCBI GI NO: 1498024 NR Description: glutathione-dependent formaldehyde dehydrogenase
  misc_feature (1)..(274): NCBI GI NO: 3121727 NR Description: ALCOHOL DEHYDROGENASE CLASS III
  misc_feature (1)..(272): NCBI GI NO: 18858257 NR Description: alcohol dehydrogenase 5 [Danio rerio]
  misc_feature (1)..(272): NCBI GI NO: 25283011 NR Description: alcohol dehydrogenase (EC 1.1.1.1) 3 - zebra fish
  misc_feature (1)..(272): NCBI GI NO: 5902742 NR Description: ALCOHOL DEHYDROGENASE CLASS III
  misc_feature (1)..(272): NCBI GI NO: 13448051 NR Description: alcohol dehydrogenase class 3
MCNSGKTNLCGKVRGATGVGVMMSDRKSRFSVNGKPIYHFMGTSTFSQYTVVHDVSVAKINPQAPLDKVCLLGCGVSTGLGAVWNTAKVEAGSIVAVFGLGTVGLAVAEGAKSAGASRIIGIDIDTKKFDVAKNFGVTEFVNPKDHDKPIQQVLVDLTDGGVDYSFECIGNVSIMRAALECCHKGWGTSVVVGVAASGQEIATRPFQLVTGRVWKGTAFGGFKSRSQVPWLVEKYMNKEIKVDEYITHNMNLTDINKAFDLLHEGGCLRCVLAMEH

SEQ ID NO: 12413 - DNA, 1387 bp, Triticum aestivum
  misc_feature (1)..(1387): Ceres Seq. ID no. 13596585
cgaaaagcgcccagcaagcttgtatattcgctcagcctctctctctcttctccttacccagccgcctcgtgcccttgtcctctcccgtctccgaccgcgccgccgccactaggccacgaccgccgccccctcccccagcctcgcttcgctccggcggggatggaaaaccgcgatggttcctcattgccagactttcttgagctccagcgcacccgtgttctctgcaaggccgatgcccccactcatacagaggggtttcaatactcgggggcttttgctgctatgggagttgatactagtgtctcagttgagaagttctgcaagaactttaaaatcgagataaatcgacttacagatgaggatatggagtttgatatgattggcgttgatgcatcgatagctaatgctttccggagaatcctcattgcagaggttcctacaatggccattgagaaagtcttcatggttgacaatacatcagttatagcagatgaggtcctttcacaccgactaggccttattccacttgatgctgatccaaggctttttgattatatctctgatgatgtcccaaatgaaaggaatactattgtgtacaaactgcatgtttcatgtgaaaagggttcccaaagacttacagttaagtctggtcaattggagtggttgccagaaggcagtcaattaactatggcatctcctgcgcaatctggggacaatcagaggacctacacatcctttggtcaaagccaacagaatacctctgaaaggcctctcggtgtgaagtataatgacataacaattgccaggcttgggccaggacaggctattgagcttgaggcacatgctgttaagggagtggggaaagttcatgcgaagtggtctccagttgctacagcctggtacaggatgctccccgaggttgttcttctcaaagaaattaaaaatggtgatgcagaggagctagtgaaaagatgcccagttaatgtttttgacattgaagacctgggaaagggggagaagagagcagttgttgcaaagccaagagcatgcaccctttgtagggaatgtgtcagactggctgatgatcaagtagagctacggcgtgttagagaccacttcatttttacaatcgagtccaccggagctctaccgccggaggtgctcttcacagaggccgtgaagatccttgaggagaagtgcgagcgagtgatatccgaactttcctgagcccgacataaagttttcagtactgttctgatgcagtttttctattgctatgttgtgctgaggacgaaatcttagtgtactagtataggttactgtaaaacttctgcatccaatactctggagtcacattcagctaatttattaccgagccggtatatgc

SEQ ID NO: 12414 - protein, 408 aa, Triticum aestivum
  peptide (1)..(408): Ceres Seq. ID no. 13596586
  misc_feature (153)..(294): Pfam Name: Pfam Description:  RNA polymerase Rpb3/RpoA insert domain
  misc_feature (60)..(408): NCBI GI NO: 15219773 NR Description: RNA polymerase subunit [Arabidopsis thaliana]
  misc_feature (60)..(403): NCBI GI NO: 21592304 NR Description: RNA polymerase subunit [Arabidopsis thaliana]
  misc_feature (60)..(403): NCBI GI NO: 15219820 NR Description: RNA polymerase subunit [Arabidopsis thaliana]
  misc_feature (60)..(403): NCBI GI NO: 514322 NR Description: RNA polymerase subunit
  misc_feature (70)..(407): NCBI GI NO: 34193909 NR Description: RNA polymerase 1-1 [Danio rerio]
  misc_feature (66)..(407): NCBI GI NO: 3914807 NR Description: DNA-directed RNA polymerase I 40 kDa polypeptide
  misc_feature (82)..(407): NCBI GI NO: 14198113 NR Description: Unknown (protein for IMAGE:3448039) [Homo sapiens]
  misc_feature (66)..(407): NCBI GI NO: 19113623 NR Description: dna-directed rna polymerases i and iii polypeptide
  misc_feature (70)..(407): NCBI GI NO: 1914859 NR Description: homologous to 40kD subunit of RNA-polymerase I andIII
  misc_feature (66)..(407): NCBI GI NO: 6677787 NR Description: RNA polymerase 1-1; RNA polymerase 1-1
RKAPSKLVYSLSLSLSSPYPAASCPCPLPSPTAPPPLGHDRRPLPQPRFAPAGMENRDGSSLPDFLELQRTRVLCKADAPTHTEGFQYSGAFAAMGVDTSVSVEKFCKNFKIEINRLTDEDMEFDMIGVDASIANAFRRILIAEVPTMAIEKVFMVDNTSVIADEVLSHRLGLIPLDADPRLFDYISDDVPNERNTIVYKLHVSCEKGSQRLTVKSGQLEWLPEGSQLTMASPAQSGDNQRTYTSFGQSQQNTSERPLGVKYNDITIARLGPGQAIELEAHAVKGVGKVHAKWSPVATAWYRMLPEVVLLKEIKNGDAEELVKRCPVNVFDIEDLGKGEKRAVVAKPRACTLCRECVRLADDQVELRRVRDHFIFTIESTGALPPEVLFTEAVKILEEKCERVISELS

SEQ ID NO: 12415 - protein, 355 aa, Triticum aestivum
  peptide (1)..(355): Ceres Seq. ID no. 13596587
  misc_feature (100)..(241): Pfam Name: Pfam Description:  RNA polymerase Rpb3/RpoA insert domain
  misc_feature (7)..(355): NCBI GI NO: 15219773 NR Description: RNA polymerase subunit [Arabidopsis thaliana]
  misc_feature (7)..(350): NCBI GI NO: 21592304 NR Description: RNA polymerase subunit [Arabidopsis thaliana]
  misc_feature (7)..(350): NCBI GI NO: 15219820 NR Description: RNA polymerase subunit [Arabidopsis thaliana]
  misc_feature (7)..(350): NCBI GI NO: 514322 NR Description: RNA polymerase subunit
  misc_feature (17)..(354): NCBI GI NO: 34193909 NR Description: RNA polymerase 1-1 [Danio rerio]
  misc_feature (13)..(354): NCBI GI NO: 3914807 NR Description: DNA-directed RNA polymerase I 40 kDa polypeptide
  misc_feature (29)..(354): NCBI GI NO: 14198113 NR Description: Unknown (protein for IMAGE:3448039) [Homo sapiens]
  misc_feature (13)..(354): NCBI GI NO: 19113623 NR Description: dna-directed rna polymerases i and iii polypeptide
  misc_feature (17)..(354): NCBI GI NO: 1914859 NR Description: homologous to 40kD subunit of RNA-polymerase I andIII
  misc_feature (13)..(354): NCBI GI NO: 6677787 NR Description: RNA polymerase 1-1; RNA polymerase 1-1
MENRDGSSLPDFLELQRTRVLCKADAPTHTEGFQYSGAFAAMGVDTSVSVEKFCKNFKIEINRLTDEDMEFDMIGVDASIANAFRRILIAEVPTMAIEKVFMVDNTSVIADEVLSHRLGLIPLDADPRLFDYISDDVPNERNTIVYKLHVSCEKGSQRLTVKSGQLEWLPEGSQLTMASPAQSGDNQRTYTSFGQSQQNTSERPLGVKYNDITIARLGPGQAIELEAHAVKGVGKVHAKWSPVATAWYRMLPEVVLLKEIKNGDAEELVKRCPVNVFDIEDLGKGEKRAVVAKPRACTLCRECVRLADDQVELRRVRDHFIFTIESTGALPPEVLFTEAVKILEEKCERVISELS

SEQ ID NO: 12416 - protein, 314 aa, Triticum aestivum
  peptide (1)..(314): Ceres Seq. ID no. 13596588
  misc_feature (59)..(200): Pfam Name: Pfam Description:  RNA polymerase Rpb3/RpoA insert domain
  misc_feature (1)..(314): NCBI GI NO: 15219773 NR Description: RNA polymerase subunit [Arabidopsis thaliana]
  misc_feature (1)..(309): NCBI GI NO: 21592304 NR Description: RNA polymerase subunit [Arabidopsis thaliana]
  misc_feature (1)..(309): NCBI GI NO: 15219820 NR Description: RNA polymerase subunit [Arabidopsis thaliana]
  misc_feature (1)..(309): NCBI GI NO: 514322 NR Description: RNA polymerase subunit
  misc_feature (1)..(313): NCBI GI NO: 34193909 NR Description: RNA polymerase 1-1 [Danio rerio]
  misc_feature (1)..(313): NCBI GI NO: 3914807 NR Description: DNA-directed RNA polymerase I 40 kDa polypeptide
  misc_feature (1)..(313): NCBI GI NO: 14198113 NR Description: Unknown (protein for IMAGE:3448039) [Homo sapiens]
  misc_feature (1)..(313): NCBI GI NO: 19113623 NR Description: dna-directed rna polymerases i and iii polypeptide
  misc_feature (1)..(313): NCBI GI NO: 1914859 NR Description: homologous to 40kD subunit of RNA-polymerase I andIII
  misc_feature (1)..(313): NCBI GI NO: 6677787 NR Description: RNA polymerase 1-1; RNA polymerase 1-1
MGVDTSVSVEKFCKNFKIEINRLTDEDMEFDMIGVDASIANAFRRILIAEVPTMAIEKVFMVDNTSVIADEVLSHRLGLIPLDADPRLFDYISDDVPNERNTIVYKLHVSCEKGSQRLTVKSGQLEWLPEGSQLTMASPAQSGDNQRTYTSFGQSQQNTSERPLGVKYNDITIARLGPGQAIELEAHAVKGVGKVHAKWSPVATAWYRMLPEVVLLKEIKNGDAEELVKRCPVNVFDIEDLGKGEKRAVVAKPRACTLCRECVRLADDQVELRRVRDHFIFTIESTGALPPEVLFTEAVKILEEKCERVISELS

SEQ ID NO: 12417 - DNA, 686 bp, Triticum aestivum
  misc_feature (1)..(686): Ceres Seq. ID no. 15175026
atcgatccgtggcatggctcgccgactctgccgtctccccgccctaaaccctagccccgccgctctcctccgtccctcatcctccccgacgccgacgccctccttccccgccttcccccgcctcttctcctcctcatccgcaggcgattccagcatggtggtcgtcggctcggcggactccttcgaggacatccacgccaaggtgcaagtggagaagctccccgccgtcttctactacacggcggtctggtgcgggccgtgtcgggcgatggcacctgtgatcgagaagatgagcaggcagtaccccaagataccagtctacaaggtcgacatcgacatggagggacttgggaccagacttagtaacctgaaaatattctctgtcccaactttccacttctatcacaaaggcgagaagagcagcgaagtggttggtgctgacgtgaagaagcttgaagctgccatggaaagtcttcacaagcaacagtgaagttgacttggagtgggggacagttcttttgcatgaagagttggagaggctgtaatgcttgtgatttgcgtgtttgacatggaaacttccgccttacgatcttgtttcgatatctggatacacactggccgcaaaacatcgatatctggatttatgccacgcttgagcacagcttttgtgcaatttctgcacgtct

SEQ ID NO: 12418 - protein, 162 aa, Triticum aestivum
  peptide (1)..(162): Ceres Seq. ID no. 15175027
  misc_feature (52)..(160): Pfam Name: Pfam Description:  Thioredoxin
  misc_feature (40)..(160): NCBI GI NO: 15226875 NR Description: thioredoxin family [Arabidopsis thaliana]
  misc_feature (66)..(160): NCBI GI NO: 26453152 NR Description: putative thioredoxin [Arabidopsis thaliana]
  misc_feature (40)..(160): NCBI GI NO: 18397764 NR Description: thioredoxin family [Arabidopsis thaliana]
  misc_feature (54)..(160): NCBI GI NO: 9755396 NR Description: F17F8.6 [Arabidopsis thaliana]
  misc_feature (74)..(158): NCBI GI NO: 464883 NR Description: Thioredoxin
  misc_feature (60)..(157): NCBI GI NO: 267114 NR Description: Thioredoxin 1
  misc_feature (43)..(152): NCBI GI NO: 14581677 NR Description: Hsp70 interacting protein/thioredoxin chimera
  misc_feature (51)..(153): NCBI GI NO: 17943429 NR Description: Chain A
  misc_feature (51)..(153): NCBI GI NO: 1729934 NR Description: Thioredoxin H-type (TRX-H) (Thioredoxin CH1)
  misc_feature (51)..(153): NCBI GI NO: 1942873 NR Description: Thioredoxin H (Oxidized Form), Nmr, 23 Structures
SIRGMARRLCRLPALNPSPAALLRPSSSPTPTPSFPAFPRLFSSSSAGDSSMVVVGSADSFEDIHAKVQVEKLPAVFYYTAVWCGPCRAMAPVIEKMSRQYPKIPVYKVDIDMEGLGTRLSNLKIFSVPTFHFYHKGEKSSEVVGADVKKLEAAMESLHKQQ

SEQ ID NO: 12419 - protein, 158 aa, Triticum aestivum
  peptide (1)..(158): Ceres Seq. ID no. 15175028
  misc_feature (48)..(156): Pfam Name: Pfam Description:  Thioredoxin
  misc_feature (36)..(156): NCBI GI NO: 15226875 NR Description: thioredoxin family [Arabidopsis thaliana]
  misc_feature (62)..(156): NCBI GI NO: 26453152 NR Description: putative thioredoxin [Arabidopsis thaliana]
  misc_feature (36)..(156): NCBI GI NO: 18397764 NR Description: thioredoxin family [Arabidopsis thaliana]
  misc_feature (50)..(156): NCBI GI NO: 9755396 NR Description: F17F8.6 [Arabidopsis thaliana]
  misc_feature (70)..(154): NCBI GI NO: 464883 NR Description: Thioredoxin
  misc_feature (56)..(153): NCBI GI NO: 267114 NR Description: Thioredoxin 1
  misc_feature (39)..(148): NCBI GI NO: 14581677 NR Description: Hsp70 interacting protein/thioredoxin chimera
  misc_feature (47)..(149): NCBI GI NO: 17943429 NR Description: Chain A
  misc_feature (47)..(149): NCBI GI NO: 1729934 NR Description: Thioredoxin H-type (TRX-H) (Thioredoxin CH1)
  misc_feature (47)..(149): NCBI GI NO: 1942873 NR Description: Thioredoxin H (Oxidized Form), Nmr, 23 Structures
MARRLCRLPALNPSPAALLRPSSSPTPTPSFPAFPRLFSSSSAGDSSMVVVGSADSFEDIHAKVQVEKLPAVFYYTAVWCGPCRAMAPVIEKMSRQYPKIPVYKVDIDMEGLGTRLSNLKIFSVPTFHFYHKGEKSSEVVGADVKKLEAAMESLHKQQ

SEQ ID NO: 12420 - protein, 111 aa, Triticum aestivum
  peptide (1)..(111): Ceres Seq. ID no. 15175029
  misc_feature (1)..(109): Pfam Name: Pfam Description:  Thioredoxin
  misc_feature (1)..(109): NCBI GI NO: 15226875 NR Description: thioredoxin family [Arabidopsis thaliana]
  misc_feature (15)..(109): NCBI GI NO: 26453152 NR Description: putative thioredoxin [Arabidopsis thaliana]
  misc_feature (1)..(109): NCBI GI NO: 18397764 NR Description: thioredoxin family [Arabidopsis thaliana]
  misc_feature (3)..(109): NCBI GI NO: 9755396 NR Description: F17F8.6 [Arabidopsis thaliana]
  misc_feature (23)..(107): NCBI GI NO: 464883 NR Description: Thioredoxin
  misc_feature (9)..(106): NCBI GI NO: 267114 NR Description: Thioredoxin 1
  misc_feature (1)..(101): NCBI GI NO: 14581677 NR Description: Hsp70 interacting protein/thioredoxin chimera
  misc_feature (1)..(102): NCBI GI NO: 17943429 NR Description: Chain A
  misc_feature (1)..(102): NCBI GI NO: 1729934 NR Description: Thioredoxin H-type (TRX-H) (Thioredoxin CH1)
  misc_feature (1)..(102): NCBI GI NO: 1942873 NR Description: Thioredoxin H (Oxidized Form), Nmr, 23 Structures
MVVVGSADSFEDIHAKVQVEKLPAVFYYTAVWCGPCRAMAPVIEKMSRQYPKIPVYKVDIDMEGLGTRLSNLKIFSVPTFHFYHKGEKSSEVVGADVKKLEAAMESLHKQQ

SEQ ID NO: 12421 - DNA, 1029 bp, Triticum aestivum
  misc_feature (1)..(1029): Ceres Seq. ID no. 15175034
gaaaccaacaccatccgcggcgaccccttcttcccttccctgagacacttctccccaaagcgaacccagctgaaaagaagcgagacgcgccgcgccgcaccgcgttgcctttgtatatcgtggctctatttagctcaagaggagaggagaggagaggcgcgcggggaggggaaggagatcaaatcagatcaaaccgtaggaaaccatcgattgatcgagcagcggcggcgacgcggaagcaggaggggaggggggatggcggtggcgtatcgcgcggaggaggagtacgactacctgttcaaggtagtgctgatcggggacagcggcgtgggcaagtccaacctgctgtcgcgcttcgccagggacgagttcagcctcgacaccaggtccaccatcggcgtcgagttcgccaccaagaccgtccgcgtcgacggcaagctcgtcaaggcgcagatctgggacaccgccggccaagaaaggtaccgggccatcaccagcgcgtactaccggggcgccgtgggcgcgctcgtggtgtacgacgtgacgcgccacatcacgttcgagaacgcggagcggtggctgacggagctccgcgaccacacggacgccaacatcgtggtgatgctggtcgggaacaaggcggacctgcgccacctgagggccgtctcgcccgaggaggccagggccttcgcggagcgccaccgcaccttctccatggagacctccgcgctggaggccaccaacgtggaggacgccttcaccgaggtgctcggcgagatctaccgcgtcgtcagcaagaaggccctcgacatcggcgacgaccccgccgcgccgcctaggggcaagaccatcgacgttggcggcaaggacgacgtcaccccggtgaacacgggcggctgctgctcggcctagtcaaactctctccctctctatctctctctgccggagacggtggtaggtgatgccgtgtgtgtgcgtgctagggtgtaacaggcatgttgcgaccgtgatgattattggttattggtc

SEQ ID NO: 12422 - protein, 303 aa, Triticum aestivum
  peptide (1)..(303): Ceres Seq. ID no. 15175035
  misc_feature (101)..(262): Pfam Name: Pfam Description:  Ras family
  misc_feature (87)..(303): NCBI GI NO: 34910940 NR Description: putative GTP-binding protein
  misc_feature (89)..(303): NCBI GI NO: 7438432 NR Description: GTP-binding protein - garden pea
  misc_feature (89)..(302): NCBI GI NO: 15239462 NR Description: GTP-binding protein, putative
  misc_feature (86)..(303): NCBI GI NO: 3024504 NR Description: RAS-RELATED PROTEIN RAB11B
  misc_feature (89)..(303): NCBI GI NO: 15218719 NR Description: GTP-binding protein, putative
  misc_feature (89)..(303): NCBI GI NO: 15232477 NR Description: Ras family GTP-binding protein, putative
  misc_feature (97)..(303): NCBI GI NO: 7438389 NR Description: GTP-binding protein, ras-like
  misc_feature (89)..(303): NCBI GI NO: 1370156 NR Description: RAB11H [Lotus corniculatus var. japonicus]
  misc_feature (89)..(302): NCBI GI NO: 15233873 NR Description: GTP-binding protein, putative
  misc_feature (82)..(301): NCBI GI NO: 132521 NR Description: RAS-RELATED PROTEIN RGP1
ETNTIRGDPFFPSLRHFSPKRTQLKRSETRRAAPRCLCISWLYLAQEERRGEARGEGKEIKSDQTVGNHRLIEQRRRRGSRRGGGMAVAYRAEEEYDYLFKVVLIGDSGVGKSNLLSRFARDEFSLDTRSTIGVEFATKTVRVDGKLVKAQIWDTAGQERYRAITSAYYRGAVGALVVYDVTRHITFENAERWLTELRDHTDANIVVMLVGNKADLRHLRAVSPEEARAFAERHRTFSMETSALEATNVEDAFTEVLGEIYRVVSKKALDIGDDPAAPPRGKTIDVGGKDDVTPVNTGGCCSA

SEQ ID NO: 12423 - protein, 278 aa, Triticum aestivum
  peptide (1)..(278): Ceres Seq. ID no. 15175036
NQHHPRRPLLPFPETLLPKANPAEKKRDAPRRTALPLYIVALFSSRGEERRGARGGEGDQIRSNRRKPSIDRAAAATRKQEGRGDGGGVSRGGGVRLPVQGSADRGQRRGQVQPAVALRQGRVQPRHQVHHRRRVRHQDRPRRRQARQGADLGHRRPRKVPGHHQRVLPGRRGRARGVRRDAPHHVRERGAVADGAPRPHGRQHRGDAGREQGGPAPPEGRLARGGQGLRGAPPHLLHGDLRAGGHQRGGRLHRGARRDLPRRQQEGPRHRRRPRRAA

SEQ ID NO: 12424 - protein, 218 aa, Triticum aestivum
  peptide (1)..(218): Ceres Seq. ID no. 15175037
  misc_feature (16)..(177): Pfam Name: Pfam Description:  Ras family
  misc_feature (2)..(218): NCBI GI NO: 34910940 NR Description: putative GTP-binding protein
  misc_feature (4)..(218): NCBI GI NO: 7438432 NR Description: GTP-binding protein - garden pea
  misc_feature (4)..(217): NCBI GI NO: 15239462 NR Description: GTP-binding protein, putative
  misc_feature (1)..(218): NCBI GI NO: 3024504 NR Description: RAS-RELATED PROTEIN RAB11B
  misc_feature (4)..(218): NCBI GI NO: 15218719 NR Description: GTP-binding protein, putative
  misc_feature (4)..(218): NCBI GI NO: 15232477 NR Description: Ras family GTP-binding protein, putative
  misc_feature (12)..(218): NCBI GI NO: 7438389 NR Description: GTP-binding protein, ras-like
  misc_feature (4)..(218): NCBI GI NO: 1370156 NR Description: RAB11H [Lotus corniculatus var. japonicus]
  misc_feature (4)..(217): NCBI GI NO: 15233873 NR Description: GTP-binding protein, putative
  misc_feature (1)..(216): NCBI GI NO: 132521 NR Description: RAS-RELATED PROTEIN RGP1
MAVAYRAEEEYDYLFKVVLIGDSGVGKSNLLSRFARDEFSLDTRSTIGVEFATKTVRVDGKLVKAQIWDTAGQERYRAITSAYYRGAVGALVVYDVTRHITFENAERWLTELRDHTDANIVVMLVGNKADLRHLRAVSPEEARAFAERHRTFSMETSALEATNVEDAFTEVLGEIYRVVSKKALDIGDDPAAPPRGKTIDVGGKDDVTPVNTGGCCSA

SEQ ID NO: 12425 - DNA, 887 bp, Triticum aestivum
  misc_feature (1)..(887): Ceres Seq. ID no. 15175022
agagtccttcccgagcgcggacagcgggctcctaccagcagcgtctccctccgacctccctggagcagccgctcacgcccagcaacgtcgccgcccggatctacgccgtcgaccattccataggcagggcatcaacactgtcaattgcagaggcttggacctgcttcggcatccagtagagcaaacaagaaggtcaagccggaaacaaatatttcatcctcgttcggacttctcatctcgcaatggaagccaagttctttcggttcctgaagcttgttggagttggcttcaaagccaggacagagcgcgaaggccgcgagttgtttctgaaactgggctacagccatgaggtgcagttcaccgctccacctgccgtccgcgtcttctgcttcaagcccaacataatatgctgtactggcattgacaagcatagagtgcaccatttcgctggagctgtccgatgcagtaaacctccagaagtgtacaaggggaagggcatactgtacatcgacgaggtcataaagctgaagccggggaagaaacagcagaagaagtaacacatgggtaaacctccccatttgacttctagcttgtttagacgccccatcacatttgtggtgccgcggatttcatgtggtttttctcgtgccgggttttggctagccctagtaccatgctggacttcgtaataatactctgtatgctatgggaatcatctggtgagcatgtactgtatgacttgcataccgtgggggcggatcagcacatttgaacatttgtgtttttgttttgggctggctagatgcatgtaacagcccaatgtgtttgttgatgtcactactttcttcatattttctctacacaatattagctcgttgctttgttac

SEQ ID NO: 12426 - protein, 115 aa, Triticum aestivum
  peptide (1)..(115): Ceres Seq. ID no. 15175023
ESFPSADSGLLPAASPSDLPGAAAHAQQRRRPDLRRRPFHRQGINTVNCRGLDLLRHPVEQTRRSSRKQIFHPRSDFSSRNGSQVLSVPEACWSWLQSQDRARRPRVVSETGLQP

SEQ ID NO: 12427 - protein, 104 aa, Triticum aestivum
  peptide (1)..(104): Ceres Seq. ID no. 15175024
  misc_feature (12)..(88): Pfam Name: Pfam Description:  Ribosomal protein L6
  misc_feature (1)..(102): NCBI GI NO: 18398731 NR Description: ribosomal protein L6p family
  misc_feature (1)..(102): NCBI GI NO: 25411865 NR Description: probable ribosomal protein L6
  misc_feature (1)..(101): NCBI GI NO: 11467124 NR Description: rpl6 [Marchantia polymorpha]
  misc_feature (1)..(101): NCBI GI NO: 38638291 NR Description: ribosomal protein L6 [Chara vulgaris]
  misc_feature (1)..(101): NCBI GI NO: 22550351 NR Description: ribosomal protein L6 [Chaetosphaeridium globosum]
  misc_feature (1)..(101): NCBI GI NO: 11466518 NR Description: ribosomal protein L6 [Reclinomonas americana]
  misc_feature (1)..(100): NCBI GI NO: 3980237 NR Description: ribosomal protein L6 [Thermotoga maritima]
  misc_feature (1)..(100): NCBI GI NO: 15644233 NR Description: ribosomal protein L6 [Thermotoga maritima]
  misc_feature (6)..(101): NCBI GI NO: 6066163 NR Description: ribosomal protein L6 [Nephroselmis olivacea]
  misc_feature (1)..(99): NCBI GI NO: 23022259 NR Description: hypothetical protein
MEAKFFRFLKLVGVGFKARTEREGRELFLKLGYSHEVQFTAPPAVRVFCFKPNIICCTGIDKHRVHHFAGAVRCSKPPEVYKGKGILYIDEVIKLKPGKKQQKK

SEQ ID NO: 12428 - protein, 58 aa, Triticum aestivum
  peptide (1)..(58): Ceres Seq. ID no. 15175025
  misc_feature (28)..(58): NCBI GI NO: 22979003 NR Description: hypothetical protein [Ralstonia metallidurans]
  misc_feature (17)..(58): NCBI GI NO: 34849407 NR Description: ribosomal protein L6 [Spiroplasma kunkelii]
SPSRARTAGSYQQRLPPTSLEQPLTPSNVAARIYAVDHSIGRASTLSIAEAWTCFGIQ

SEQ ID NO: 12429 - DNA, 1276 bp, Triticum aestivum
  misc_feature (1)..(1276): Ceres Seq. ID no. 12615976
agccagggcaaacagagaggacggacggaagaagtaagttccaggcagaggagacagagtgaccgacggagggaaggttccacctacccaccgagcgatcgaccgggcgggcggcgatccatggcggcgaacgggcatcagatccagccggcggaggaggcgatgaagctcatcatcgacaccgatcccggcatagacgacagcgtggcgatcatgatggcgttccaagcgccgggcgtggaggtcctagggctcaccaccatcttcggcaactgcaccaccgcatacgccacccgcaacgccttgatactgtgtgagaaggcaggccgccccgacgtgccggtggcggagggcagcgccgagcctctcaagggagggaagccgcaagttgccgactttgttcacggatccgatggcctcgggaacgtatcagttcctgaacctaccaccaagaaagcagagcaaaccgccgcagagtttctggtcgacaaggtgtcgcagttccccggggaggtctcggtgctcgccttgggccctctgaccaacctcgcattggccatcaagatggacccctcctttgtgagcaaggtgaagaagatagtggtgctgggtggagccttctttgcagcagggaatgccaccccttcagccgaggcaaacatccacagcgacccagaggcggcggacatggtgttcacgtcgggcgcggacatcgccgtggtcggcctcaacatcaccacccaggtgagcttcacggaggcggacctgtcggagctgaggaggtccgggggcaagcaggcgcagttcctctgcgacatctgcaagttctacagcgactggcacctccactcgtacggcgaccccgccgtgttcctgcacgacccggtgagcctcgcggcgctggtccggccggagctcttcacgttcaggaagggcgtggtgcgggtggagacccagggcatctgcagaggccacacctccatggacatggggctcaagaagttcaagtcggagaacgcgtggtcgggctacacgcccatctcggtggcgtggacggtggacaaggccaaggtggtcgccttcgtcaaggagctcctcaaaaattaatcaggagttcatgatctgtatatctggtcatcaaatgatttgaaaccgtagagatccgtcggtcgatcgacccgtaatttatgtgtaccccattctgacgcacttcatgcagacacattgtctcgtggaattattgaactgctcgtcgtgaattgtcatgatggaaccc

SEQ ID NO: 12430 - protein, 368 aa, Triticum aestivum
  peptide (1)..(368): Ceres Seq. ID no. 12615977
  misc_feature (56)..(366): Pfam Name: Pfam Description:  Inosine-uridine preferring nucleoside hydrolase
  misc_feature (56)..(367): NCBI GI NO: 18404099 NR Description: expressed protein; protein id: At2g36310
  misc_feature (69)..(313): NCBI GI NO: 25321061 NR Description: hypothetical protein At2g36310
  misc_feature (290)..(335): NCBI GI NO: 25321061 NR Description: hypothetical protein At2g36310
  misc_feature (56)..(366): NCBI GI NO: 30089728 NR Description: putative inosine-uridine preferring nucleosidehydrolase
  misc_feature (56)..(366): NCBI GI NO: 18390550 NR Description: expressed protein; protein id: At1g05620
  misc_feature (56)..(256): NCBI GI NO: 25321071 NR Description: hypothetical protein
  misc_feature (255)..(366): NCBI GI NO: 25321071 NR Description: hypothetical protein
  misc_feature (56)..(366): NCBI GI NO: 15966659 NR Description: PUTATIVE NUCLEOSIDE HYDROLASE PROTEIN
  misc_feature (44)..(363): NCBI GI NO: 15888904 NR Description: AGR_C_2923p [Agrobacterium tumefaciens]
  misc_feature (56)..(363): NCBI GI NO: 17935486 NR Description: inosine-uridine preferring nucleoside hydrolase
SQGKQRGRTEEVSSRQRRQSDRRREGSTYPPSDRPGGRRSMAANGHQIQPAEEAMKLIIDTDPGIDDSVAIMMAFQAPGVEVLGLTTIFGNCTTAYATRNALILCEKAGRPDVPVAEGSAEPLKGGKPQVADFVHGSDGLGNVSVPEPTTKKAEQTAAEFLVDKVSQFPGEVSVLALGPLTNLALAIKMDPSFVSKVKKIVVLGGAFFAAGNATPSAEANIHSDPEAADMVFTSGADIAVVGLNITTQVSFTEADLSELRRSGGKQAQFLCDICKFYSDWHLHSYGDPAVFLHDPVSLAALVRPELFTFRKGVVRVETQGICRGHTSMDMGLKKFKSENAWSGYTPISVAWTVDKAKVVAFVKELLKN

SEQ ID NO: 12431 - protein, 328 aa, Triticum aestivum
  peptide (1)..(328): Ceres Seq. ID no. 12615978
  misc_feature (16)..(326): Pfam Name: Pfam Description:  Inosine-uridine preferring nucleoside hydrolase
  misc_feature (16)..(327): NCBI GI NO: 18404099 NR Description: expressed protein; protein id: At2g36310
  misc_feature (29)..(273): NCBI GI NO: 25321061 NR Description: hypothetical protein At2g36310
  misc_feature (250)..(295): NCBI GI NO: 25321061 NR Description: hypothetical protein At2g36310
  misc_feature (16)..(326): NCBI GI NO: 30089728 NR Description: putative inosine-uridine preferring nucleosidehydrolase
  misc_feature (16)..(326): NCBI GI NO: 18390550 NR Description: expressed protein; protein id: At1g05620
  misc_feature (16)..(216): NCBI GI NO: 25321071 NR Description: hypothetical protein
  misc_feature (215)..(326): NCBI GI NO: 25321071 NR Description: hypothetical protein
  misc_feature (16)..(326): NCBI GI NO: 15966659 NR Description: PUTATIVE NUCLEOSIDE HYDROLASE PROTEIN
  misc_feature (4)..(323): NCBI GI NO: 15888904 NR Description: AGR_C_2923p [Agrobacterium tumefaciens]
  misc_feature (16)..(323): NCBI GI NO: 17935486 NR Description: inosine-uridine preferring nucleoside hydrolase
MAANGHQIQPAEEAMKLIIDTDPGIDDSVAIMMAFQAPGVEVLGLTTIFGNCTTAYATRNALILCEKAGRPDVPVAEGSAEPLKGGKPQVADFVHGSDGLGNVSVPEPTTKKAEQTAAEFLVDKVSQFPGEVSVLALGPLTNLALAIKMDPSFVSKVKKIVVLGGAFFAAGNATPSAEANIHSDPEAADMVFTSGADIAVVGLNITTQVSFTEADLSELRRSGGKQAQFLCDICKFYSDWHLHSYGDPAVFLHDPVSLAALVRPELFTFRKGVVRVETQGICRGHTSMDMGLKKFKSENAWSGYTPISVAWTVDKAKVVAFVKELLKN

SEQ ID NO: 12432 - protein, 314 aa, Triticum aestivum
  peptide (1)..(314): Ceres Seq. ID no. 12615979
  misc_feature (2)..(312): Pfam Name: Pfam Description:  Inosine-uridine preferring nucleoside hydrolase
  misc_feature (2)..(313): NCBI GI NO: 18404099 NR Description: expressed protein; protein id: At2g36310
  misc_feature (15)..(259): NCBI GI NO: 25321061 NR Description: hypothetical protein At2g36310
  misc_feature (236)..(281): NCBI GI NO: 25321061 NR Description: hypothetical protein At2g36310
  misc_feature (2)..(312): NCBI GI NO: 30089728 NR Description: putative inosine-uridine preferring nucleosidehydrolase
  misc_feature (2)..(312): NCBI GI NO: 18390550 NR Description: expressed protein; protein id: At1g05620
  misc_feature (2)..(202): NCBI GI NO: 25321071 NR Description: hypothetical protein
  misc_feature (201)..(312): NCBI GI NO: 25321071 NR Description: hypothetical protein
  misc_feature (2)..(312): NCBI GI NO: 15966659 NR Description: PUTATIVE NUCLEOSIDE HYDROLASE PROTEIN
  misc_feature (1)..(309): NCBI GI NO: 15888904 NR Description: AGR_C_2923p [Agrobacterium tumefaciens]
  misc_feature (2)..(309): NCBI GI NO: 17935486 NR Description: inosine-uridine preferring nucleoside hydrolase
MKLIIDTDPGIDDSVAIMMAFQAPGVEVLGLTTIFGNCTTAYATRNALILCEKAGRPDVPVAEGSAEPLKGGKPQVADFVHGSDGLGNVSVPEPTTKKAEQTAAEFLVDKVSQFPGEVSVLALGPLTNLALAIKMDPSFVSKVKKIVVLGGAFFAAGNATPSAEANIHSDPEAADMVFTSGADIAVVGLNITTQVSFTEADLSELRRSGGKQAQFLCDICKFYSDWHLHSYGDPAVFLHDPVSLAALVRPELFTFRKGVVRVETQGICRGHTSMDMGLKKFKSENAWSGYTPISVAWTVDKAKVVAFVKELLKN

SEQ ID NO: 12433 - DNA, 1251 bp, Triticum aestivum
  misc_feature (1)..(1251): Ceres Seq. ID no. 12615291
cttttttttccagcacagctagcagccagcgagttctttgcccgtctataaatgagccaaaacccaagccaacccgaggcacaaagctctacaaccagaagccaaaaccgaaccgaggaagcagcagcagatcaaaccgcagacgaagacaccgtcgcaagagaacgagagaatggcggccatctcctccacctcctacttctcctcgcagccgcagctgccggcgtccggaggcggcagcaacggccggcagccgcggaggcgtcggatggggggcagctgcgtcatgctcgaggcggccgctgcctctggtagtggtggtggcggcgtggtggtggggaggacgaggagcctgacggaggaggacctggaggagctcaagggctgcctcgacctcggcttcggcttctcctaccaccagatcccgggcctctgcgggacgctccccggcctggagctctgctactccatgacgcggaggttcctcgacgagcagaggacggtggtcgggcagctggagcccgttgcggcggcggcgcccatcccggactggaagatctccggccctggtgatagtccagaggaagtgaaagctaggctcaagtattgggcccagacagtggcatgcacagtcaaactatgcagctgatggagattggtagtgtgctggttctctcttaacatatatgctactacaagctgaactggaggtggctgaagttgaagaacgatgcttatatggtattgggcttggtgggcaagtgcagaggaggtgcttctgcttcgtgttatcgaggcgacagaactgaccactgcttttgccaaacttcggaggggggagaggattgctgacaacatggaactgagaaatcgcgaggcggtccgcagtcgagcttttctgaaagcatcagaagcttgccgttcctcgtgaggtgacttgtctctacatggcgcagcggttgcaagtgcctgagacctctgcttgtttctgctcttccttgtagtgctcactaggtgctccggttgcaccgtgctgctccggcttgagctttgcaaatccttgggtggatttgttcaattataattttgttttattgctcctttcaccttagatttgctttggagcagtagaccttgtataggacttgcatgtacgtatctgttgattctgctgtactgcactcggagggtgcagaaacagtttctgaaataaatttctgcgtccagcctaacagcaaactgtggctgttg

SEQ ID NO: 12434 - protein, 158 aa, Triticum aestivum
  peptide (1)..(158): Ceres Seq. ID no. 12615292
  misc_feature (1)..(143): NCBI GI NO: 34907664 NR Description: P0506A10.18
  misc_feature (20)..(158): NCBI GI NO: 30684991 NR Description: expressed protein [Arabidopsis thaliana]
  misc_feature (1)..(158): NCBI GI NO: 25406874 NR Description: hypothetical protein
  misc_feature (2)..(158): NCBI GI NO: 30689349 NR Description: expressed protein [Arabidopsis thaliana]
  misc_feature (2)..(155): NCBI GI NO: 25408860 NR Description: hypothetical protein At2g43340
  misc_feature (1)..(151): NCBI GI NO: 15221309 NR Description: unknown protein; protein id: At1g05870.1
  misc_feature (20)..(134): NCBI GI NO: 25408168 NR Description: hypothetical protein At2g31560
  misc_feature (61)..(154): NCBI GI NO: 15228829 NR Description: hypothetical protein; protein id: At3g22690.1
  misc_feature (55)..(155): NCBI GI NO: 18418346 NR Description: Expressed protein; protein id: At4g33985
  misc_feature (55)..(155): NCBI GI NO: 21617998 NR Description: unknown [Arabidopsis thaliana]
MAAISSTSYFSSQPQLPASGGGSNGRQPRRRRMGGSCVMLEAAAASGSGGGGVVVGRTRSLTEEDLEELKGCLDLGFGFSYHQIPGLCGTLPGLELCYSMTRRFLDEQRTVVGQLEPVAAAAPIPDWKISGPGDSPEEVKARLKYWAQTVACTVKLCS

SEQ ID NO: 12435 - protein, 126 aa, Triticum aestivum
  peptide (1)..(126): Ceres Seq. ID no. 12615293
  misc_feature (1)..(111): NCBI GI NO: 34907664 NR Description: P0506A10.18
  misc_feature (1)..(126): NCBI GI NO: 30684991 NR Description: expressed protein [Arabidopsis thaliana]
  misc_feature (1)..(126): NCBI GI NO: 25406874 NR Description: hypothetical protein
  misc_feature (1)..(126): NCBI GI NO: 30689349 NR Description: expressed protein [Arabidopsis thaliana]
  misc_feature (1)..(123): NCBI GI NO: 25408860 NR Description: hypothetical protein At2g43340
  misc_feature (1)..(119): NCBI GI NO: 15221309 NR Description: unknown protein; protein id: At1g05870.1
  misc_feature (1)..(102): NCBI GI NO: 25408168 NR Description: hypothetical protein At2g31560
  misc_feature (29)..(122): NCBI GI NO: 15228829 NR Description: hypothetical protein; protein id: At3g22690.1
  misc_feature (23)..(123): NCBI GI NO: 18418346 NR Description: Expressed protein; protein id: At4g33985
  misc_feature (23)..(123): NCBI GI NO: 21617998 NR Description: unknown [Arabidopsis thaliana]
MGGSCVMLEAAAASGSGGGGVVVGRTRSLTEEDLEELKGCLDLGFGFSYHQIPGLCGTLPGLELCYSMTRRFLDEQRTVVGQLEPVAAAAPIPDWKISGPGDSPEEVKARLKYWAQTVACTVKLCS

SEQ ID NO: 12436 - protein, 120 aa, Triticum aestivum
  peptide (1)..(120): Ceres Seq. ID no. 12615294
  misc_feature (1)..(105): NCBI GI NO: 34907664 NR Description: P0506A10.18
  misc_feature (1)..(120): NCBI GI NO: 30684991 NR Description: expressed protein [Arabidopsis thaliana]
  misc_feature (1)..(120): NCBI GI NO: 25406874 NR Description: hypothetical protein
  misc_feature (1)..(120): NCBI GI NO: 30689349 NR Description: expressed protein [Arabidopsis thaliana]
  misc_feature (1)..(117): NCBI GI NO: 25408860 NR Description: hypothetical protein At2g43340
  misc_feature (1)..(113): NCBI GI NO: 15221309 NR Description: unknown protein; protein id: At1g05870.1
  misc_feature (1)..(96): NCBI GI NO: 25408168 NR Description: hypothetical protein At2g31560
  misc_feature (23)..(116): NCBI GI NO: 15228829 NR Description: hypothetical protein; protein id: At3g22690.1
  misc_feature (17)..(117): NCBI GI NO: 18418346 NR Description: Expressed protein; protein id: At4g33985
  misc_feature (17)..(117): NCBI GI NO: 21617998 NR Description: unknown [Arabidopsis thaliana]
MLEAAAASGSGGGGVVVGRTRSLTEEDLEELKGCLDLGFGFSYHQIPGLCGTLPGLELCYSMTRRFLDEQRTVVGQLEPVAAAAPIPDWKISGPGDSPEEVKARLKYWAQTVACTVKLCS

SEQ ID NO: 12437 - DNA, 1428 bp, Triticum aestivum
  misc_feature (1)..(1428): Ceres Seq. ID no. 13596593
actcaccaacttttcctttgctggtttgttctcttgcgctttcccgaaaggaggaaagggggagaaaaaaatcgcacccaaatccttcgagcagaaccaaatccgtcacgactccacgagcgctcgagcagggcaacacagattcgcgcagcccacctcgtcgagcattccccatcagatcggatcgaatccggcggcggtgatggcggcggagaagctggccccggcgaaggtgctctactgcggcgtgtgcggcctccccgcggagtactgcgagttcggccccgacttcgagcgctgcaagccgtggctccgcgcccacgcgcccggcgtctaccccgacgagctcgtggcctcctcctccggcggcgatgataaggacgtcggcaaggtcggcgagcgcctccagggcgtcagcatctccaccgccgacggctccacaagcgcagggggtgcttcggcatcttctaagactgaagaggtgaaacgactgcccggtggcaagctcaagaaaaaggacaagcaagaggttattattgagaagattgtccgcaacaagcgcaagtgtgtcactgtggtgaaaggcctggatttgtttggtgtaaagctgagtgatgcttcaaagaagcttggaaagaagtttgctactggagcttcggttgtcaagggcccaactgagaaggagcaaatcgatgtccaaggagacatatcatatgatgttgtggacttcattacagctacatggcctgatgttcctgaatccgccgtatatttcatagaagatggaaggaaggttgctgctgcttgattgcatatggtttacaaggcaatacaccagtggagctacaaatatgatagaaatataaggcaagagatggccgttaaggcatgcctgtcaaatgggttctttatccttactcccaagacacaactcgctccattttgacttgtgggtcagttcacaagtggtgttttaattactgctggcatgtcgccttcgtgtatcatcttttatttgatagccgagttcctcctgcaggcaagtatgacatccatatgtggtttatatatgtttaatgtgcttttgaatcctagtttcagaacaattcagtaccaactatctgtggacctgcagagataagtgcagattagtagtgctccagtctcctgtgctttcataggaacagtctggtgttttgtgttactttgtattgcatccagcaagttataacctacttttagggagatagatcgttgtcggtgtgcaccattggtattttgtcatcattttgttgcagagtcctgtgtgaagcccattattataaaaaagaagcaagatagatctggatgatgcatcatgaattagtgtggccatgtaattattataaaagtatttccgataaattgccattttcattaaacttgttc

SEQ ID NO: 12438 - protein, 268 aa, Triticum aestivum
  peptide (1)..(268): Ceres Seq. ID no. 13596594
  misc_feature (25)..(259): NCBI GI NO: 34903554 NR Description: P0001B06.29
  misc_feature (70)..(267): NCBI GI NO: 22326739 NR Description: expressed protein [Arabidopsis thaliana]
  misc_feature (155)..(267): NCBI GI NO: 11357422 NR Description: hypothetical protein F14F18
  misc_feature (70)..(161): NCBI GI NO: 11357422 NR Description: hypothetical protein F14F18
  misc_feature (68)..(261): NCBI GI NO: 19113595 NR Description: hypothetical protein [Schizosaccharomyces pombe]
  misc_feature (152)..(264): NCBI GI NO: 18859973 NR Description: CG9099-PA [Drosophila melanogaster]
  misc_feature (75)..(125): NCBI GI NO: 18859973 NR Description: CG9099-PA [Drosophila melanogaster]
  misc_feature (75)..(264): NCBI GI NO: 34872329 NR Description: similar to density-regulated protein
  misc_feature (77)..(244): NCBI GI NO: 6322474 NR Description: Hypothetical ORF; Yjr014wp
  misc_feature (75)..(241): NCBI GI NO: 4755083 NR Description: density regulated protein drp1 [Homo sapiens]
LTNFSFAGLFSCAFPKGGKGEKKIAPKSFEQNQIRHDSTSARAGQHRFAQPTSSSIPHQIGSNPAAVMAAEKLAPAKVLYCGVCGLPAEYCEFGPDFERCKPWLRAHAPGVYPDELVASSSGGDDKDVGKVGERLQGVSISTADGSTSAGGASASSKTEEVKRLPGGKLKKKDKQEVIIEKIVRNKRKCVTVVKGLDLFGVKLSDASKKLGKKFATGASVVKGPTEKEQIDVQGDISYDVVDFITATWPDVPESAVYFIEDGRKVAAA

SEQ ID NO: 12439 - protein, 201 aa, Triticum aestivum
  peptide (1)..(201): Ceres Seq. ID no. 13596595
  misc_feature (1)..(192): NCBI GI NO: 34903554 NR Description: P0001B06.29
  misc_feature (3)..(200): NCBI GI NO: 22326739 NR Description: expressed protein [Arabidopsis thaliana]
  misc_feature (88)..(200): NCBI GI NO: 11357422 NR Description: hypothetical protein F14F18
  misc_feature (3)..(94): NCBI GI NO: 11357422 NR Description: hypothetical protein F14F18
  misc_feature (1)..(194): NCBI GI NO: 19113595 NR Description: hypothetical protein [Schizosaccharomyces pombe]
  misc_feature (85)..(197): NCBI GI NO: 18859973 NR Description: CG9099-PA [Drosophila melanogaster]
  misc_feature (8)..(58): NCBI GI NO: 18859973 NR Description: CG9099-PA [Drosophila melanogaster]
  misc_feature (8)..(197): NCBI GI NO: 34872329 NR Description: similar to density-regulated protein
  misc_feature (10)..(177): NCBI GI NO: 6322474 NR Description: Hypothetical ORF; Yjr014wp
  misc_feature (8)..(174): NCBI GI NO: 4755083 NR Description: density regulated protein drp1 [Homo sapiens]
MAAEKLAPAKVLYCGVCGLPAEYCEFGPDFERCKPWLRAHAPGVYPDELVASSSGGDDKDVGKVGERLQGVSISTADGSTSAGGASASSKTEEVKRLPGGKLKKKDKQEVIIEKIVRNKRKCVTVVKGLDLFGVKLSDASKKLGKKFATGASVVKGPTEKEQIDVQGDISYDVVDFITATWPDVPESAVYFIEDGRKVAAA

SEQ ID NO: 12440 - DNA, 1399 bp, Triticum aestivum
  misc_feature (1)..(1399): Ceres Seq. ID no. 12578315
ccaacacttgccttgcattgttaatgcgtgcggctgcagcgggcatagatcgaatataattgagatcgtcaatgccttccacagaatcggccgccggcgtggcctgggaccgccggcgtgagctgcaggcgtttgacgacaccaaggcgggcgtcaagggcctcgtggacgccggcgtcacggccctcccgcccatcttccgccactcgccggagtccctggagagcatcacgtcctcaaaccatgtcgcgggggccatcccgaccgtcgacctagcggccccgcgacgcgaggacgcggtcgccctggtgcggcacgcggccaggacggtgggcttctttcaggtggtcaaccatggcgtgccggccgagctcatggccggcatgctcgagggggtgcgccggttcaacgagggacccgccgaggcgaagcaggccatctacagcagggaccaagctcgcaaggtgcgtttcgcctccaacttcgacctcttctcgtcggcggcggccaactggcgcgacaccctcttcttccacctcgctccggacccggcaccttccgaagagctgcccgaggctgtcagggatgtggtcacggagtacggccacgcggtgaccaaggtggggctgtccgtgctggagctgctgtcggagtcccttggcctgagcagcgaccacctgcgcgacatggactgcgcggagaacctcaacgccgtgtgccaatactacccaccgtgtccggagccgtatctcacttggggcaccaagaggcacaccgacccgggcttcctcaccgtcctcctgcaagacggcatgggcggcctccaggtgctcgtcgacggcaagacctgggtggatgtccctcccgtgcccggcgctttcatcatcaacatcggcgaccttcttcagctcgtcagcaatgaccagttcaggagcgtggagcaccgagtcctggcgaacaagagcaaagacaccgctagggtctctgtggcgtccttcttcaacaccaacattgagagatcgacgaggttgtatggccccatcaccgatggacgcaaccccccgatctacaggagcgtcaccgctagagagttcatcgcaacgtttaatcgcataggccttgatggtcgctcgctcgaccagtaccggttggaccgggatactcccacacctgccgtggaggggtgtgaatgaagcgggcatttccgtttctttataatttatttgcaagtttaaatttaagcattttcaaataagggaacgtactcgctttctcaactaaagtgtcagaaccgtggacaaaagtctctcgctccaccaaagtatgagcagcaccacaaaagtgagagactgttggaaagatgccccagacgcaataataaagttattaagtattatcc

SEQ ID NO: 12441 - protein, 373 aa, Triticum aestivum
  peptide (1)..(373): Ceres Seq. ID no. 12578316
  misc_feature (210)..(310): Pfam Name: II Pfam Description: 2OG-Fe
  misc_feature (3)..(360): NCBI GI NO: 29123084 NR Description: 2-oxoglutarate-dependent oxygenase [Zea mays]
  misc_feature (13)..(367): NCBI GI NO: 40253423 NR Description: putative 2-oxoglutarate-dependent oxygenase
  misc_feature (13)..(367): NCBI GI NO: 31193909 NR Description: putative dioxygenase
  misc_feature (13)..(367): NCBI GI NO: 40253431 NR Description: putative 2-oxoglutarate-dependent oxygenase
  misc_feature (13)..(360): NCBI GI NO: 40253419 NR Description: putative 2-oxoglutarate-dependent oxygenase
  misc_feature (1)..(354): NCBI GI NO: 15221544 NR Description: oxidoreductase, putative; protein id: At1g06640
  misc_feature (1)..(354): NCBI GI NO: 30679748 NR Description: 2-oxoglutarate-dependent dioxygenase, putative
  misc_feature (1)..(286): NCBI GI NO: 25406927 NR Description: protein F12K11.6 [imported] - Arabidopsis thaliana
  misc_feature (277)..(354): NCBI GI NO: 25406927 NR Description: protein F12K11.6 [imported] - Arabidopsis thaliana
  misc_feature (13)..(367): NCBI GI NO: 40253427 NR Description: putative 2-oxoglutarate-dependent oxygenase
MPSTESAAGVAWDRRRELQAFDDTKAGVKGLVDAGVTALPPIFRHSPESLESITSSNHVAGAIPTVDLAAPRREDAVALVRHAARTVGFFQVVNHGVPAELMAGMLEGVRRFNEGPAEAKQAIYSRDQARKVRFASNFDLFSSAAANWRDTLFFHLAPDPAPSEELPEAVRDVVTEYGHAVTKVGLSVLELLSESLGLSSDHLRDMDCAENLNAVCQYYPPCPEPYLTWGTKRHTDPGFLTVLLQDGMGGLQVLVDGKTWVDVPPVPGAFIINIGDLLQLVSNDQFRSVEHRVLANKSKDTARVSVASFFNTNIERSTRLYGPITDGRNPPIYRSVTAREFIATFNRIGLDGRSLDQYRLDRDTPTPAVEGCE

SEQ ID NO: 12442 - protein, 272 aa, Triticum aestivum
  peptide (1)..(272): Ceres Seq. ID no. 12578317
  misc_feature (109)..(209): Pfam Name: II Pfam Description: 2OG-Fe
  misc_feature (1)..(259): NCBI GI NO: 29123084 NR Description: 2-oxoglutarate-dependent oxygenase [Zea mays]
  misc_feature (1)..(266): NCBI GI NO: 40253423 NR Description: putative 2-oxoglutarate-dependent oxygenase
  misc_feature (1)..(266): NCBI GI NO: 31193909 NR Description: putative dioxygenase
  misc_feature (1)..(266): NCBI GI NO: 40253431 NR Description: putative 2-oxoglutarate-dependent oxygenase
  misc_feature (1)..(259): NCBI GI NO: 40253419 NR Description: putative 2-oxoglutarate-dependent oxygenase
  misc_feature (1)..(253): NCBI GI NO: 15221544 NR Description: oxidoreductase, putative; protein id: At1g06640
  misc_feature (1)..(253): NCBI GI NO: 30679748 NR Description: 2-oxoglutarate-dependent dioxygenase, putative
  misc_feature (1)..(185): NCBI GI NO: 25406927 NR Description: protein F12K11.6 [imported] - Arabidopsis thaliana
  misc_feature (176)..(253): NCBI GI NO: 25406927 NR Description: protein F12K11.6 [imported] - Arabidopsis thaliana
  misc_feature (1)..(266): NCBI GI NO: 40253427 NR Description: putative 2-oxoglutarate-dependent oxygenase
MAGMLEGVRRFNEGPAEAKQAIYSRDQARKVRFASNFDLFSSAAANWRDTLFFHLAPDPAPSEELPEAVRDVVTEYGHAVTKVGLSVLELLSESLGLSSDHLRDMDCAENLNAVCQYYPPCPEPYLTWGTKRHTDPGFLTVLLQDGMGGLQVLVDGKTWVDVPPVPGAFIINIGDLLQLVSNDQFRSVEHRVLANKSKDTARVSVASFFNTNIERSTRLYGPITDGRNPPIYRSVTAREFIATFNRIGLDGRSLDQYRLDRDTPTPAVEGCE

SEQ ID NO: 12443 - protein, 269 aa, Triticum aestivum
  peptide (1)..(269): Ceres Seq. ID no. 12578318
  misc_feature (106)..(206): Pfam Name: II Pfam Description: 2OG-Fe
  misc_feature (1)..(256): NCBI GI NO: 29123084 NR Description: 2-oxoglutarate-dependent oxygenase [Zea mays]
  misc_feature (1)..(263): NCBI GI NO: 40253423 NR Description: putative 2-oxoglutarate-dependent oxygenase
  misc_feature (1)..(263): NCBI GI NO: 31193909 NR Description: putative dioxygenase
  misc_feature (1)..(263): NCBI GI NO: 40253431 NR Description: putative 2-oxoglutarate-dependent oxygenase
  misc_feature (1)..(256): NCBI GI NO: 40253419 NR Description: putative 2-oxoglutarate-dependent oxygenase
  misc_feature (1)..(250): NCBI GI NO: 15221544 NR Description: oxidoreductase, putative; protein id: At1g06640
  misc_feature (1)..(250): NCBI GI NO: 30679748 NR Description: 2-oxoglutarate-dependent dioxygenase, putative
  misc_feature (1)..(182): NCBI GI NO: 25406927 NR Description: protein F12K11.6 [imported] - Arabidopsis thaliana
  misc_feature (173)..(250): NCBI GI NO: 25406927 NR Description: protein F12K11.6 [imported] - Arabidopsis thaliana
  misc_feature (1)..(263): NCBI GI NO: 40253427 NR Description: putative 2-oxoglutarate-dependent oxygenase
MLEGVRRFNEGPAEAKQAIYSRDQARKVRFASNFDLFSSAAANWRDTLFFHLAPDPAPSEELPEAVRDVVTEYGHAVTKVGLSVLELLSESLGLSSDHLRDMDCAENLNAVCQYYPPCPEPYLTWGTKRHTDPGFLTVLLQDGMGGLQVLVDGKTWVDVPPVPGAFIINIGDLLQLVSNDQFRSVEHRVLANKSKDTARVSVASFFNTNIERSTRLYGPITDGRNPPIYRSVTAREFIATFNRIGLDGRSLDQYRLDRDTPTPAVEGCE

SEQ ID NO: 12444 - DNA, 1370 bp, Triticum aestivum
  misc_feature (1)..(1370): Ceres Seq. ID no. 12615972
actaccccgctgccgttaccactctccacgagaccgcagccgattagagccgttgctccaggaacgcagctcgcccgcaccgcgccacgcgacagctcgctcgctagcccgtatgtcgtgggcgccatggccggctcgcggcgcgacgcggaccagaaggagaaggccccgccggcggcgccgccgcagcagcagccggggcgcgaggaggagagggagtgggtgccgtggatcgtgccggtcttcgtggccgccaacgtcgccctgttcgccgtggcgatgtacgccaacaactgccccgcgcacgcgcgcggcggccgcggcggcaggaagtgcgtcggcgcggggttcctccgccgcttcgccttccagccgctcagccagaacccgctcctcgggccctcctccgccacattgcagaagctgggcgcgctcgtgtgggacaaggtggtgcacgagcaccaggggtggagactcgtgacctgcatctggctccacgccggcgtcgtccacctgctcgccaacatgctcagcctcgtgctcgtcgggctcaggctggagcagcagttcggatttgtgagagtcggcgtcatctacctcgtctccggcgtcgggggcagcgtgatgtcgtccctgttcatcagagacaacatctccgtgggcgcgtccggtgcgctcttcgggctcctcggagccatgctctcagagctcttcaccaactggaccatctacaccaacaaggcggcggcgctggtgacgttgctgttcgtgatcgcggtcaatctggcgatcggcatcctgccgcacgtggacaacttcgcgcacatcggggggttcctcacggggttcctcctcgggttcgtactgctcatgcgcccgcactacggctgggcgcagcgctacgtgctgccgtcctccgtcaaggacgtcggccggaagttcctggcctaccagtgggctctgctcgccctggcctcggtcctggtcgtcatcgggctggcggttgggatggcgatgctcttccgaggggtgaacggcaacgagcactgcgagtggtgccactacctcagctgcgtgccgaccgccagatggagctgcgggaaatgaaatgggagcaagcaacttcatggacctccatattacttcgttcttttccgcacaggcattttgatgcgcagatgctgtatatacgagtactgctatataacggattacacccctggatttactcgatgattgtttccttcggttgttggacttgaaaaacggggaatatcttgaatcttacacctgcatgtgcctgacagcgcggctgccttttaaatttgtgtgccaaacagatccatctttatataatttacccaatgatt

SEQ ID NO: 12445 - protein, 368 aa, Triticum aestivum
  peptide (1)..(368): Ceres Seq. ID no. 12615973
  misc_feature (32)..(367): NCBI GI NO: 37536172 NR Description: putative membrane protein
  misc_feature (70)..(366): NCBI GI NO: 294845 NR Description: membrane protein
  misc_feature (71)..(366): NCBI GI NO: 15221690 NR Description: membrane protein, putative; protein id: At1g63120
  misc_feature (45)..(366): NCBI GI NO: 15240744 NR Description: membrane protein; protein id: At5g07250
  misc_feature (58)..(368): NCBI GI NO: 38344377 NR Description: OSJNBb0032E06.11
  misc_feature (67)..(368): NCBI GI NO: 30693911 NR Description: membrane protein, Rhomboid family
  misc_feature (67)..(366): NCBI GI NO: 15222058 NR Description: membrane protein, putative; protein id:At1g12750
  misc_feature (67)..(366): NCBI GI NO: 25402744 NR Description: protein T12C24.28
  misc_feature (67)..(368): NCBI GI NO: 11357824 NR Description: hypothetical protein F5K20
  misc_feature (54)..(365): NCBI GI NO: 15236387 NR Description: putative membrane protein; protein id: At4g23070.1
TTPLPLPLSTRPQPIRAVAPGTQLARTAPRDSSLASPYVVGAMAGSRRDADQKEKAPPAAPPQQQPGREEEREWVPWIVPVFVAANVALFAVAMYANNCPAHARGGRGGRKCVGAGFLRRFAFQPLSQNPLLGPSSATLQKLGALVWDKVVHEHQGWRLVTCIWLHAGVVHLLANMLSLVLVGLRLEQQFGFVRVGVIYLVSGVGGSVMSSLFIRDNISVGASGALFGLLGAMLSELFTNWTIYTNKAAALVTLLFVIAVNLAIGILPHVDNFAHIGGFLTGFLLGFVLLMRPHYGWAQRYVLPSSVKDVGRKFLAYQWALLALASVLVVIGLAVGMAMLFRGVNGNEHCEWCHYLSCVPTARWSCGK

SEQ ID NO: 12446 - protein, 326 aa, Triticum aestivum
  peptide (1)..(326): Ceres Seq. ID no. 12615974
  misc_feature (1)..(325): NCBI GI NO: 37536172 NR Description: putative membrane protein
  misc_feature (28)..(324): NCBI GI NO: 294845 NR Description: membrane protein
  misc_feature (29)..(324): NCBI GI NO: 15221690 NR Description: membrane protein, putative; protein id: At1g63120
  misc_feature (3)..(324): NCBI GI NO: 15240744 NR Description: membrane protein; protein id: At5g07250
  misc_feature (16)..(326): NCBI GI NO: 38344377 NR Description: OSJNBb0032E06.11
  misc_feature (25)..(326): NCBI GI NO: 30693911 NR Description: membrane protein, Rhomboid family
  misc_feature (25)..(324): NCBI GI NO: 15222058 NR Description: membrane protein, putative; protein id:At1g12750
  misc_feature (25)..(324): NCBI GI NO: 25402744 NR Description: protein T12C24.28
  misc_feature (25)..(326): NCBI GI NO: 11357824 NR Description: hypothetical protein F5K20
  misc_feature (12)..(323): NCBI GI NO: 15236387 NR Description: putative membrane protein; protein id: At4g23070.1
MAGSRRDADQKEKAPPAAPPQQQPGREEEREWVPWIVPVFVAANVALFAVAMYANNCPAHARGGRGGRKCVGAGFLRRFAFQPLSQNPLLGPSSATLQKLGALVWDKVVHEHQGWRLVTCIWLHAGVVHLLANMLSLVLVGLRLEQQFGFVRVGVIYLVSGVGGSVMSSLFIRDNISVGASGALFGLLGAMLSELFTNWTIYTNKAAALVTLLFVIAVNLAIGILPHVDNFAHIGGFLTGFLLGFVLLMRPHYGWAQRYVLPSSVKDVGRKFLAYQWALLALASVLVVIGLAVGMAMLFRGVNGNEHCEWCHYLSCVPTARWSCGK

SEQ ID NO: 12447 - protein, 275 aa, Triticum aestivum
  peptide (1)..(275): Ceres Seq. ID no. 12615975
  misc_feature (1)..(274): NCBI GI NO: 37536172 NR Description: putative membrane protein
  misc_feature (1)..(273): NCBI GI NO: 294845 NR Description: membrane protein
  misc_feature (1)..(273): NCBI GI NO: 15221690 NR Description: membrane protein, putative; protein id: At1g63120
  misc_feature (1)..(273): NCBI GI NO: 15240744 NR Description: membrane protein; protein id: At5g07250
  misc_feature (1)..(275): NCBI GI NO: 38344377 NR Description: OSJNBb0032E06.11
  misc_feature (1)..(275): NCBI GI NO: 30693911 NR Description: membrane protein, Rhomboid family
  misc_feature (1)..(273): NCBI GI NO: 15222058 NR Description: membrane protein, putative; protein id:At1g12750
  misc_feature (1)..(273): NCBI GI NO: 25402744 NR Description: protein T12C24.28
  misc_feature (1)..(275): NCBI GI NO: 11357824 NR Description: hypothetical protein F5K20
  misc_feature (1)..(272): NCBI GI NO: 15236387 NR Description: putative membrane protein; protein id: At4g23070.1
MYANNCPAHARGGRGGRKCVGAGFLRRFAFQPLSQNPLLGPSSATLQKLGALVWDKVVHEHQGWRLVTCIWLHAGVVHLLANMLSLVLVGLRLEQQFGFVRVGVIYLVSGVGGSVMSSLFIRDNISVGASGALFGLLGAMLSELFTNWTIYTNKAAALVTLLFVIAVNLAIGILPHVDNFAHIGGFLTGFLLGFVLLMRPHYGWAQRYVLPSSVKDVGRKFLAYQWALLALASVLVVIGLAVGMAMLFRGVNGNEHCEWCHYLSCVPTARWSCGK

SEQ ID NO: 12448 - DNA, 1132 bp, Triticum aestivum
  misc_feature (1)..(1132): Ceres Seq. ID no. 13654847
aaacgagatcagcgtctcgtgaatcctacggcccattcccccccgatcccctcccactttttcgtgctttactccaaagcgcaaggcgccttctcgcttccgcccctctccttcctcctcgccctcctctccgcccgccgcctgctcgccgtccgatccgccgccccccgtccgtctccatgggtctgctgtccaacaggatcgggaaggagagcctgaaggcgggggatcacatctactcgtggagggccgcgtgggtctacgcgcatcacggaatatatgtgggcgatgataaggtgattcattttaccagaggaagggaccaagaagtcggaacaggaactgtcattgattttcttcttgtgagctctggccctaataggagcaccacaccatgcttagtatgcagcagcgaagaagccaccaccgccgcggagacaaatggtgtgacttcctcttgcctcagctgtttcctggcagggggtgccctctatcgtttcgagtatgacgtcaacccggcactcttccttgccaaagtgcgaggagggacctgcacgcttgccgccactgatcccggcgaggtggttgtccgacgcgccaaatacttgttgaccaatggtttcaggtgctacagcctgttcaagaacaactgcgaggactttgcgatatactgcaagactggtctgcttgtggctgagcagggcaacgtcgggctcgggcagagtgggcaggctgtgtccatcatcggcggccctcttgctgctgtggtttcaacccctttccgcctagtaaccacaaacatctatggagtggcagtgatggctgttggggtgtattgtgtcagcaggtacgcaggtgacattggcaaccgccgagacgtgctgaaactggaagtggaggacctgactgccgggctcgcaagcggccggattcgtccagcgaacatcagtcagctggcaactccggggcaagtccaggctccggcagtgaccacactcgttgctgcttagaatgcagcactgatgttgtaaaatatggagatgtatacatcaccatcactactgctatatgtaccaccggaatagttgttcaaacctgctaaaactgtgccaagagtgaaatcccatcagca

SEQ ID NO: 12449 - protein, 335 aa, Triticum aestivum
  peptide (1)..(335): Ceres Seq. ID no. 13654848
  misc_feature (164)..(247): Pfam Name: Pfam Description:  NC domain
  misc_feature (60)..(321): NCBI GI NO: 18415178 NR Description: expressed protein [Arabidopsis thaliana]
  misc_feature (91)..(321): NCBI GI NO: 9758417 NR Description: gb|AAF32477
  misc_feature (60)..(306): NCBI GI NO: 18396282 NR Description: expressed protein [Arabidopsis thaliana]
  misc_feature (60)..(306): NCBI GI NO: 21594170 NR Description: unknown [Arabidopsis thaliana]
  misc_feature (60)..(305): NCBI GI NO: 18378812 NR Description: expressed protein [Arabidopsis thaliana]
  misc_feature (60)..(305): NCBI GI NO: 21592684 NR Description: unknown [Arabidopsis thaliana]
  misc_feature (60)..(253): NCBI GI NO: 15237330 NR Description: expressed protein [Arabidopsis thaliana]
  misc_feature (256)..(303): NCBI GI NO: 15237330 NR Description: expressed protein [Arabidopsis thaliana]
  misc_feature (60)..(305): NCBI GI NO: 22328196 NR Description: expressed protein [Arabidopsis thaliana]
  misc_feature (60)..(260): NCBI GI NO: 15237327 NR Description: hypothetical protein [Arabidopsis thaliana]
TRSASRESYGPFPPDPLPLFRALLQSARRLLASAPLLPPRPPLRPPPARRPIRRPPSVSMGLLSNRIGKESLKAGDHIYSWRAAWVYAHHGIYVGDDKVIHFTRGRDQEVGTGTVIDFLLVSSGPNRSTTPCLVCSSEEATTAAETNGVTSSCLSCFLAGGALYRFEYDVNPALFLAKVRGGTCTLAATDPGEVVVRRAKYLLTNGFRCYSLFKNNCEDFAIYCKTGLLVAEQGNVGLGQSGQAVSIIGGPLAAVVSTPFRLVTTNIYGVAVMAVGVYCVSRYAGDIGNRRDVLKLEVEDLTAGLASGRIRPANISQLATPGQVQAPAVTTLVAA

SEQ ID NO: 12450 - protein, 276 aa, Triticum aestivum
  peptide (1)..(276): Ceres Seq. ID no. 13654849
  misc_feature (105)..(188): Pfam Name: Pfam Description:  NC domain
  misc_feature (1)..(262): NCBI GI NO: 18415178 NR Description: expressed protein [Arabidopsis thaliana]
  misc_feature (32)..(262): NCBI GI NO: 9758417 NR Description: gb|AAF32477
  misc_feature (1)..(247): NCBI GI NO: 18396282 NR Description: expressed protein [Arabidopsis thaliana]
  misc_feature (1)..(247): NCBI GI NO: 21594170 NR Description: unknown [Arabidopsis thaliana]
  misc_feature (1)..(246): NCBI GI NO: 18378812 NR Description: expressed protein [Arabidopsis thaliana]
  misc_feature (1)..(246): NCBI GI NO: 21592684 NR Description: unknown [Arabidopsis thaliana]
  misc_feature (1)..(194): NCBI GI NO: 15237330 NR Description: expressed protein [Arabidopsis thaliana]
  misc_feature (197)..(244): NCBI GI NO: 15237330 NR Description: expressed protein [Arabidopsis thaliana]
  misc_feature (1)..(246): NCBI GI NO: 22328196 NR Description: expressed protein [Arabidopsis thaliana]
  misc_feature (1)..(201): NCBI GI NO: 15237327 NR Description: hypothetical protein [Arabidopsis thaliana]
MGLLSNRIGKESLKAGDHIYSWRAAWVYAHHGIYVGDDKVIHFTRGRDQEVGTGTVIDFLLVSSGPNRSTTPCLVCSSEEATTAAETNGVTSSCLSCFLAGGALYRFEYDVNPALFLAKVRGGTCTLAATDPGEVVVRRAKYLLTNGFRCYSLFKNNCEDFAIYCKTGLLVAEQGNVGLGQSGQAVSIIGGPLAAVVSTPFRLVTTNIYGVAVMAVGVYCVSRYAGDIGNRRDVLKLEVEDLTAGLASGRIRPANISQLATPGQVQAPAVTTLVAA

SEQ ID NO: 12451 - DNA, 1738 bp, Triticum aestivum
  misc_feature (1)..(1738): Ceres Seq. ID no. 15176122
ccaagcgccaaaccctctccccatccgtcttcctcgtgctctccgcccctccccttctcccctcccatcctctcctctctttatacgcctccgccccgagctctcctcccccattccgccgcattacgtcgcgcacacgggcaggggagagccggcagcggagagagagcaggagacgagatggcggccgcgtccttcaccgccgccaagttcctggcgccggcggccgcgagatccggcggcgaccgggcgcccttccccgcgccgtccgcgttctccatgcgctcgctccgccacaggcccgccaggcgcctcagctccgtcctggccgtctcctccgacgtgctcaaggccgcgcccgccgccgccgcgtacccggctgtgacacgcgaagaggcattggagctttacgaggacatgatccttggccgtaacttcgaagacatgtgcgcgcaaatgtactaccgtggcaagatgtttggtttcgtccatctttacaacgggcaggaggccgtctccaccggcttcatcaagcagctgaaccaacccgactgtgtcgtcagcacgtaccgtgaccacgtccacgcgctgtccaagggtgtcccggcccgtgcagtcatggccgagctctttggcaaggccactggctgctgccgtggacagggtggttccatgcacatgttctctgaaccccacaacctccttggaggctttgccttcattggcgagggcatccctgtcgccactggcgctgcctttgccgccaagtaccgccatgaggtgctcaagcagtctagccctgatgggcttgatgtcacacttgcattctttggggacggtacctgtaacaacggccagttctttgagtgcctgaacatggctcagctgtggaagcttccgattatttttgttgtggagaacaacctatgggcaatcgggatgtctcaccttaggtctacttcagatcccgagatctggaagaagggcccagcattcggaatgcctggggtacacgtcgatgggatggatgtcctgaaggtcagggaggtggctaaggaggcaattgacagggcaaggagaggtgaaggaccaactctagtggaatgtgaaacttaccggttcagaggccactctcttgctgatccagatgaactcaggaggcccgatgagaaatctcactacgccgcaagggaccccatcacctccctgaagaagtacatcatcgagcagaacctcgcgtccgaagccgagctgaagaacatcgagaagaagattgacgacgtcgtcgaagaggctgtggagtttgccgacgcgagcccgctgcccccacggagccagctgctggagaacgtgtttgccgatcccaagggcttcggcatcggccccgacggcaagtacaggtgcgaggaccccaagttcacccaaggcacggcgcaagtctaagggccgctgctgcagaagcagcttgtttacgcctcttttctcatgtactacctctctagctacctgcccctagttttgtcgatcccgccgtcgatttcttgtgttgttagaggtcacatatcactgtaattcattgctcgctgtgccaccgtgcggcgtctgatgcccccagttttttttacccaagaaatgttccccagtccagttgttgttctacagtaactctacatctgtctggtttgtagtaattggtacagatattggaagagatgtgaaacataatagtatctgttgt

SEQ ID NO: 12452 - protein, 480 aa, Triticum aestivum
  peptide (1)..(480): Ceres Seq. ID no. 15176123
  misc_feature (138)..(445): Pfam Name: Pfam Description:  Dehydrogenase E1 component
  misc_feature (62)..(480): NCBI GI NO: 38344868 NR Description: OSJNBa0020P07.11
  misc_feature (91)..(480): NCBI GI NO: 15223294 NR Description: pyruvate dehydrogenase E1 alpha subunit
  misc_feature (91)..(469): NCBI GI NO: 6715645 NR Description: T25K16.8 [Arabidopsis thaliana]
  misc_feature (128)..(454): NCBI GI NO: 11465733 NR Description: pyruvate dehydrogenase E1 component alpha subunit
  misc_feature (128)..(454): NCBI GI NO: 17230200 NR Description: pyruvate dehydrogenase E1 component, alpha subunit
  misc_feature (128)..(454): NCBI GI NO: 23128827 NR Description: hypothetical protein [Nostoc punctiforme]
  misc_feature (127)..(454): NCBI GI NO: 16331186 NR Description: pyruvate dehydrogenase E1 component, alpha subunit
  misc_feature (128)..(454): NCBI GI NO: 23041416 NR Description: hypothetical protein
  misc_feature (261)..(432): NCBI GI NO: 23508447 NR Description: pyruvate dehydrogenase E1 component
  misc_feature (128)..(260): NCBI GI NO: 23508447 NR Description: pyruvate dehydrogenase E1 component
PSAKPSPHPSSSCSPPLPFSPPILSSLYTPPPRALLPHSAALRRAHGQGRAGSGERAGDEMAAASFTAAKFLAPAAARSGGDRAPFPAPSAFSMRSLRHRPARRLSSVLAVSSDVLKAAPAAAAYPAVTREEALELYEDMILGRNFEDMCAQMYYRGKMFGFVHLYNGQEAVSTGFIKQLNQPDCVVSTYRDHVHALSKGVPARAVMAELFGKATGCCRGQGGSMHMFSEPHNLLGGFAFIGEGIPVATGAAFAAKYRHEVLKQSSPDGLDVTLAFFGDGTCNNGQFFECLNMAQLWKLPIIFVVENNLWAIGMSHLRSTSDPEIWKKGPAFGMPGVHVDGMDVLKVREVAKEAIDRARRGEGPTLVECETYRFRGHSLADPDELRRPDEKSHYAARDPITSLKKYIIEQNLASEAELKNIEKKIDDVVEEAVEFADASPLPPRSQLLENVFADPKGFGIGPDGKYRCEDPKFTQGTAQV

SEQ ID NO: 12453 - protein, 420 aa, Triticum aestivum
  peptide (1)..(420): Ceres Seq. ID no. 15176124
  misc_feature (78)..(385): Pfam Name: Pfam Description:  Dehydrogenase E1 component
  misc_feature (2)..(420): NCBI GI NO: 38344868 NR Description: OSJNBa0020P07.11
  misc_feature (31)..(420): NCBI GI NO: 15223294 NR Description: pyruvate dehydrogenase E1 alpha subunit
  misc_feature (31)..(409): NCBI GI NO: 6715645 NR Description: T25K16.8 [Arabidopsis thaliana]
  misc_feature (68)..(394): NCBI GI NO: 11465733 NR Description: pyruvate dehydrogenase E1 component alpha subunit
  misc_feature (68)..(394): NCBI GI NO: 17230200 NR Description: pyruvate dehydrogenase E1 component, alpha subunit
  misc_feature (68)..(394): NCBI GI NO: 23128827 NR Description: hypothetical protein [Nostoc punctiforme]
  misc_feature (67)..(394): NCBI GI NO: 16331186 NR Description: pyruvate dehydrogenase E1 component, alpha subunit
  misc_feature (68)..(394): NCBI GI NO: 23041416 NR Description: hypothetical protein
  misc_feature (201)..(372): NCBI GI NO: 23508447 NR Description: pyruvate dehydrogenase E1 component
  misc_feature (68)..(200): NCBI GI NO: 23508447 NR Description: pyruvate dehydrogenase E1 component
MAAASFTAAKFLAPAAARSGGDRAPFPAPSAFSMRSLRHRPARRLSSVLAVSSDVLKAAPAAAAYPAVTREEALELYEDMILGRNFEDMCAQMYYRGKMFGFVHLYNGQEAVSTGFIKQLNQPDCVVSTYRDHVHALSKGVPARAVMAELFGKATGCCRGQGGSMHMFSEPHNLLGGFAFIGEGIPVATGAAFAAKYRHEVLKQSSPDGLDVTLAFFGDGTCNNGQFFECLNMAQLWKLPIIFVVENNLWAIGMSHLRSTSDPEIWKKGPAFGMPGVHVDGMDVLKVREVAKEAIDRARRGEGPTLVECETYRFRGHSLADPDELRRPDEKSHYAARDPITSLKKYIIEQNLASEAELKNIEKKIDDVVEEAVEFADASPLPPRSQLLENVFADPKGFGIGPDGKYRCEDPKFTQGTAQV

SEQ ID NO: 12454 - protein, 387 aa, Triticum aestivum
  peptide (1)..(387): Ceres Seq. ID no. 15176125
  misc_feature (45)..(352): Pfam Name: Pfam Description:  Dehydrogenase E1 component
  misc_feature (1)..(387): NCBI GI NO: 38344868 NR Description: OSJNBa0020P07.11
  misc_feature (1)..(387): NCBI GI NO: 15223294 NR Description: pyruvate dehydrogenase E1 alpha subunit
  misc_feature (1)..(376): NCBI GI NO: 6715645 NR Description: T25K16.8 [Arabidopsis thaliana]
  misc_feature (35)..(361): NCBI GI NO: 11465733 NR Description: pyruvate dehydrogenase E1 component alpha subunit
  misc_feature (35)..(361): NCBI GI NO: 17230200 NR Description: pyruvate dehydrogenase E1 component, alpha subunit
  misc_feature (35)..(361): NCBI GI NO: 23128827 NR Description: hypothetical protein [Nostoc punctiforme]
  misc_feature (34)..(361): NCBI GI NO: 16331186 NR Description: pyruvate dehydrogenase E1 component, alpha subunit
  misc_feature (35)..(361): NCBI GI NO: 23041416 NR Description: hypothetical protein
  misc_feature (168)..(339): NCBI GI NO: 23508447 NR Description: pyruvate dehydrogenase E1 component
  misc_feature (35)..(167): NCBI GI NO: 23508447 NR Description: pyruvate dehydrogenase E1 component
MRSLRHRPARRLSSVLAVSSDVLKAAPAAAAYPAVTREEALELYEDMILGRNFEDMCAQMYYRGKMFGFVHLYNGQEAVSTGFIKQLNQPDCVVSTYRDHVHALSKGVPARAVMAELFGKATGCCRGQGGSMHMFSEPHNLLGGFAFIGEGIPVATGAAFAAKYRHEVLKQSSPDGLDVTLAFFGDGTCNNGQFFECLNMAQLWKLPIIFVVENNLWAIGMSHLRSTSDPEIWKKGPAFGMPGVHVDGMDVLKVREVAKEAIDRARRGEGPTLVECETYRFRGHSLADPDELRRPDEKSHYAARDPITSLKKYIIEQNLASEAELKNIEKKIDDVVEEAVEFADASPLPPRSQLLENVFADPKGFGIGPDGKYRCEDPKFTQGTAQV

SEQ ID NO: 12455 - DNA, 941 bp, Triticum aestivum
  misc_feature (1)..(941): Ceres Seq. ID no. 13654854
aagcggcgccggcggctagcgagatcgcggcggtgggtgtgatcggcgcggggcagatgggctcgggcatcgcccagctcgccgccgccgccggctgcggcgtcttcctcctcgactccgaccccgcggccctctcccgtgccgtcgcctccatctcctcctccctcggccgcctcgtctccaagggccagctctcccaggctgcgtgcgatgattccgtcaagcggataaagtgcgtctccgatgtgcaagagctgcggggcgtggatctggtgattgaggccatcgttgagtccgaagacgtcaagaagaagctgttcgtggagctggacaggatcaccaaaccttctgccattcttgcgtccaacaccagctccatttctataacccggctcgcctcagctactagccgcccctctcaggtgataggcatgcacttttttaaccctcctcctataatgaagctggttgaaataatacgaggagctgatacatccgaagaggttttctctcaaggtaaatctttctctgaaaggattgggaagaccgttatatgctcacaagattatcccggcttcatggtaaaccgcatcctaatgccgatgattaatgaagcattttgggcactttacactggggtagcaaccaaagaggacatcgacgcagggatgaagctcggcacgaatcatccaatggggcctctgcagcttgctgacttcatagggttagatgtttgcctttcagtacttagggtgctccacaacgggctaggagataacaagtacagcccttgccctcttcttgtccaatatgtcgatgccggacgacttggaaagaagcgcggactaggtgtatctcttacaggagaaactcttcatccgttaaacccaaatcatctctgtaaaaatatcagcgcggctgttgagcaaagaaatgaagtt

SEQ ID NO: 12456 - protein, 313 aa, Triticum aestivum
  peptide (1)..(313): Ceres Seq. ID no. 13654855
  misc_feature (5)..(189): Pfam Name: Pfam Description:  3-hydroxyacyl-CoA dehydrogenase
  misc_feature (5)..(284): NCBI GI NO: 34908888 NR Description: putative 3-hydroxybutyryl-CoA dehydrogenase
  misc_feature (6)..(296): NCBI GI NO: 15232545 NR Description: 3-hydroxybutyryl-CoA dehydrogenase, putative
  misc_feature (8)..(294): NCBI GI NO: 17986383 NR Description: 3-HYDROXYBUTYRYL-COA DEHYDROGENASE
  misc_feature (8)..(294): NCBI GI NO: 23502817 NR Description: 3-hydroxybutyryl-CoA dehydrogenase
  misc_feature (8)..(293): NCBI GI NO: 23013719 NR Description: hypothetical protein
  misc_feature (8)..(283): NCBI GI NO: 15966398 NR Description: PROBABLE 3-HYDROXYBUTYRYL-COA DEHYDROGENASE PROTEIN
  misc_feature (6)..(294): NCBI GI NO: 13473014 NR Description: 3-hydroxybutyryl-CoA dehydrogenase
  misc_feature (8)..(283): NCBI GI NO: 23053816 NR Description: hypothetical protein [Geobacter metallireducens]
  misc_feature (8)..(293): NCBI GI NO: 22967143 NR Description: hypothetical protein [Rhodospirillum rubrum]
  misc_feature (5)..(283): NCBI GI NO: 27376490 NR Description: 3-hydroxybutyryl-CoA dehydrogenase
AAPAASEIAAVGVIGAGQMGSGIAQLAAAAGCGVFLLDSDPAALSRAVASISSSLGRLVSKGQLSQAACDDSVKRIKCVSDVQELRGVDLVIEAIVESEDVKKKLFVELDRITKPSAILASNTSSISITRLASATSRPSQVIGMHFFNPPPIMKLVEIIRGADTSEEVFSQGKSFSERIGKTVICSQDYPGFMVNRILMPMINEAFWALYTGVATKEDIDAGMKLGTNHPMGPLQLADFIGLDVCLSVLRVLHNGLGDNKYSPCPLLVQYVDAGRLGKKRGLGVSLTGETLHPLNPNHLCKNISAAVEQRNEV

SEQ ID NO: 12457 - protein, 295 aa, Triticum aestivum
  peptide (1)..(295): Ceres Seq. ID no. 13654856
  misc_feature (1)..(171): Pfam Name: Pfam Description:  3-hydroxyacyl-CoA dehydrogenase
  misc_feature (1)..(266): NCBI GI NO: 34908888 NR Description: putative 3-hydroxybutyryl-CoA dehydrogenase
  misc_feature (1)..(278): NCBI GI NO: 15232545 NR Description: 3-hydroxybutyryl-CoA dehydrogenase, putative
  misc_feature (1)..(276): NCBI GI NO: 17986383 NR Description: 3-HYDROXYBUTYRYL-COA DEHYDROGENASE
  misc_feature (1)..(276): NCBI GI NO: 23502817 NR Description: 3-hydroxybutyryl-CoA dehydrogenase
  misc_feature (1)..(275): NCBI GI NO: 23013719 NR Description: hypothetical protein
  misc_feature (1)..(265): NCBI GI NO: 15966398 NR Description: PROBABLE 3-HYDROXYBUTYRYL-COA DEHYDROGENASE PROTEIN
  misc_feature (1)..(276): NCBI GI NO: 13473014 NR Description: 3-hydroxybutyryl-CoA dehydrogenase
  misc_feature (1)..(265): NCBI GI NO: 23053816 NR Description: hypothetical protein [Geobacter metallireducens]
  misc_feature (1)..(275): NCBI GI NO: 22967143 NR Description: hypothetical protein [Rhodospirillum rubrum]
  misc_feature (1)..(265): NCBI GI NO: 27376490 NR Description: 3-hydroxybutyryl-CoA dehydrogenase
MGSGIAQLAAAAGCGVFLLDSDPAALSRAVASISSSLGRLVSKGQLSQAACDDSVKRIKCVSDVQELRGVDLVIEAIVESEDVKKKLFVELDRITKPSAILASNTSSISITRLASATSRPSQVIGMHFFNPPPIMKLVEIIRGADTSEEVFSQGKSFSERIGKTVICSQDYPGFMVNRILMPMINEAFWALYTGVATKEDIDAGMKLGTNHPMGPLQLADFIGLDVCLSVLRVLHNGLGDNKYSPCPLLVQYVDAGRLGKKRGLGVSLTGETLHPLNPNHLCKNISAAVEQRNEV

SEQ ID NO: 12458 - protein, 170 aa, Triticum aestivum
  peptide (1)..(170): Ceres Seq. ID no. 13654857
  misc_feature (48)..(141): Pfam Name: Pfam Description:  3-hydroxyacyl-CoA dehydrogenase
  misc_feature (1)..(141): NCBI GI NO: 34908888 NR Description: putative 3-hydroxybutyryl-CoA dehydrogenase
  misc_feature (1)..(153): NCBI GI NO: 15232545 NR Description: 3-hydroxybutyryl-CoA dehydrogenase, putative
  misc_feature (1)..(151): NCBI GI NO: 17986383 NR Description: 3-HYDROXYBUTYRYL-COA DEHYDROGENASE
  misc_feature (1)..(151): NCBI GI NO: 23502817 NR Description: 3-hydroxybutyryl-CoA dehydrogenase
  misc_feature (1)..(150): NCBI GI NO: 23013719 NR Description: hypothetical protein
  misc_feature (1)..(140): NCBI GI NO: 15966398 NR Description: PROBABLE 3-HYDROXYBUTYRYL-COA DEHYDROGENASE PROTEIN
  misc_feature (1)..(151): NCBI GI NO: 13473014 NR Description: 3-hydroxybutyryl-CoA dehydrogenase
  misc_feature (1)..(140): NCBI GI NO: 23053816 NR Description: hypothetical protein [Geobacter metallireducens]
  misc_feature (1)..(150): NCBI GI NO: 22967143 NR Description: hypothetical protein [Rhodospirillum rubrum]
  misc_feature (1)..(140): NCBI GI NO: 27376490 NR Description: 3-hydroxybutyryl-CoA dehydrogenase
MHFFNPPPIMKLVEIIRGADTSEEVFSQGKSFSERIGKTVICSQDYPGFMVNRILMPMINEAFWALYTGVATKEDIDAGMKLGTNHPMGPLQLADFIGLDVCLSVLRVLHNGLGDNKYSPCPLLVQYVDAGRLGKKRGLGVSLTGETLHPLNPNHLCKNISAAVEQRNEV

SEQ ID NO: 12459 - DNA, 1102 bp, Triticum aestivum
  misc_feature (1)..(1102): Ceres Seq. ID no. 12615217
actctccactcggccttcccctcgctaccactccgcctgctgccgcgccatggcgctccacgccgtctcccctgcggcggcggcctccccaccctgcgccctctcctctgcccgtctgccccagcgcccaggttgtggttgtctctcaaaccgttcatccctgttaagttcgtccacaaacttcatgaaatttcagtatggagcagtgggtttctttggtgtgcctttggttcttcaacactcggacaagagagcagttttgaggcatgccactaatgaagaaattgaggaagaaaagatgatcgttgaagaacaagctaaagaaaagatggagaaggccattgaaacagttcaatcgaacttcaataccgtcaggactgggcgggcaaacccgtctatgctcgacaggattgaggttgagtactatggaactcctgtaaacttgaagactattgcacagataaataccccagatgcgacttctcttcttatccaaccatatgacaagtcttgcctcaagctcattgagaaagctatagttgctgcaaatattggggtaacaccaagcaatgatggagaagtgatacgagtcactgtcccaccattgacatctgaccgcagaaaggaaatgacaaaaaccgtagccaagttatctgaagaaggcaaggttgctatcagaaacataagacgagatgcaatcaaagcctacgataagctagagaaggaaaagaaactttctgaagataatgtgaaggatttatcagccgatctacaaaaaatcacagacgagtacatgaagaaggttgaagccatccaaaagcaaaaggaacaggagctgagcaaggtttagatccagacccgactccgactgaacaaaaactggctacatgttttctgaagccctcctctggtcatcggatggctgccagtgcgatggggtgcactcgttgggttgttggagtctcgctaagactgatggatgcaaagttgagacagtgttgctgcgtccctcctttcccttttgtaattaggccttccccgtcttcctgtccgactgccattgtcaatatttccatgaattaaattctgtgatgtgcactcc

SEQ ID NO: 12460 - protein, 282 aa, Triticum aestivum
  peptide (1)..(282): Ceres Seq. ID no. 12615218
  misc_feature (116)..(279): Pfam Name: Pfam Description:  Ribosome recycling factor
  misc_feature (19)..(282): NCBI GI NO: 34394208 NR Description: putative Ribosome recycling factor
  misc_feature (45)..(282): NCBI GI NO: 7388105 NR Description: Ribosome recycling factor, chloroplast precursor
  misc_feature (47)..(282): NCBI GI NO: 18412657 NR Description: putative protein; protein id: At3g63190
  misc_feature (56)..(282): NCBI GI NO: 7404451 NR Description: RIBOSOME RECYCLING FACTOR, CHLOROPLAST PRECURSOR
  misc_feature (48)..(282): NCBI GI NO: 11277801 NR Description: hypothetical protein F16M2
  misc_feature (128)..(282): NCBI GI NO: 629661 NR Description: ribosome releasing factor - carrot
  misc_feature (105)..(282): NCBI GI NO: 17228703 NR Description: ribosome recycling factor [Nostoc sp. PCC 7120]
  misc_feature (100)..(282): NCBI GI NO: 23126085 NR Description: hypothetical protein [Nostoc punctiforme]
  misc_feature (104)..(282): NCBI GI NO: 23041074 NR Description: hypothetical protein
  misc_feature (107)..(282): NCBI GI NO: 22297803 NR Description: ribosome releasing factor
LSTRPSPRYHSACCRAMALHAVSPAAAASPPCALSSARLPQRPGCGCLSNRSSLLSSSTNFMKFQYGAVGFFGVPLVLQHSDKRAVLRHATNEEIEEEKMIVEEQAKEKMEKAIETVQSNFNTVRTGRANPSMLDRIEVEYYGTPVNLKTIAQINTPDATSLLIQPYDKSCLKLIEKAIVAANIGVTPSNDGEVIRVTVPPLTSDRRKEMTKTVAKLSEEGKVAIRNIRRDAIKAYDKLEKEKKLSEDNVKDLSADLQKITDEYMKKVEAIQKQKEQELSKV

SEQ ID NO: 12461 - protein, 266 aa, Triticum aestivum
  peptide (1)..(266): Ceres Seq. ID no. 12615219
  misc_feature (100)..(263): Pfam Name: Pfam Description:  Ribosome recycling factor
  misc_feature (3)..(266): NCBI GI NO: 34394208 NR Description: putative Ribosome recycling factor
  misc_feature (29)..(266): NCBI GI NO: 7388105 NR Description: Ribosome recycling factor, chloroplast precursor
  misc_feature (31)..(266): NCBI GI NO: 18412657 NR Description: putative protein; protein id: At3g63190
  misc_feature (40)..(266): NCBI GI NO: 7404451 NR Description: RIBOSOME RECYCLING FACTOR, CHLOROPLAST PRECURSOR
  misc_feature (32)..(266): NCBI GI NO: 11277801 NR Description: hypothetical protein F16M2
  misc_feature (112)..(266): NCBI GI NO: 629661 NR Description: ribosome releasing factor - carrot
  misc_feature (89)..(266): NCBI GI NO: 17228703 NR Description: ribosome recycling factor [Nostoc sp. PCC 7120]
  misc_feature (84)..(266): NCBI GI NO: 23126085 NR Description: hypothetical protein [Nostoc punctiforme]
  misc_feature (88)..(266): NCBI GI NO: 23041074 NR Description: hypothetical protein
  misc_feature (91)..(266): NCBI GI NO: 22297803 NR Description: ribosome releasing factor
MALHAVSPAAAASPPCALSSARLPQRPGCGCLSNRSSLLSSSTNFMKFQYGAVGFFGVPLVLQHSDKRAVLRHATNEEIEEEKMIVEEQAKEKMEKAIETVQSNFNTVRTGRANPSMLDRIEVEYYGTPVNLKTIAQINTPDATSLLIQPYDKSCLKLIEKAIVAANIGVTPSNDGEVIRVTVPPLTSDRRKEMTKTVAKLSEEGKVAIRNIRRDAIKAYDKLEKEKKLSEDNVKDLSADLQKITDEYMKKVEAIQKQKEQELSKV

SEQ ID NO: 12462 - protein, 221 aa, Triticum aestivum
  peptide (1)..(221): Ceres Seq. ID no. 12615220
  misc_feature (55)..(218): Pfam Name: Pfam Description:  Ribosome recycling factor
  misc_feature (1)..(221): NCBI GI NO: 34394208 NR Description: putative Ribosome recycling factor
  misc_feature (1)..(221): NCBI GI NO: 7388105 NR Description: Ribosome recycling factor, chloroplast precursor
  misc_feature (1)..(221): NCBI GI NO: 18412657 NR Description: putative protein; protein id: At3g63190
  misc_feature (1)..(221): NCBI GI NO: 7404451 NR Description: RIBOSOME RECYCLING FACTOR, CHLOROPLAST PRECURSOR
  misc_feature (1)..(221): NCBI GI NO: 11277801 NR Description: hypothetical protein F16M2
  misc_feature (67)..(221): NCBI GI NO: 629661 NR Description: ribosome releasing factor - carrot
  misc_feature (44)..(221): NCBI GI NO: 17228703 NR Description: ribosome recycling factor [Nostoc sp. PCC 7120]
  misc_feature (39)..(221): NCBI GI NO: 23126085 NR Description: hypothetical protein [Nostoc punctiforme]
  misc_feature (43)..(221): NCBI GI NO: 23041074 NR Description: hypothetical protein
  misc_feature (46)..(221): NCBI GI NO: 22297803 NR Description: ribosome releasing factor
MKFQYGAVGFFGVPLVLQHSDKRAVLRHATNEEIEEEKMIVEEQAKEKMEKAIETVQSNFNTVRTGRANPSMLDRIEVEYYGTPVNLKTIAQINTPDATSLLIQPYDKSCLKLIEKAIVAANIGVTPSNDGEVIRVTVPPLTSDRRKEMTKTVAKLSEEGKVAIRNIRRDAIKAYDKLEKEKKLSEDNVKDLSADLQKITDEYMKKVEAIQKQKEQELSKV

SEQ ID NO: 12463 - DNA, 1360 bp, Triticum aestivum
  misc_feature (1)..(1360): Ceres Seq. ID no. 14313451
attcatccatccatcttgccgagcgctacaatggcgagcatcagaagtgtctcccctctcctcgctccgctcgccgccgcggccacggtgctcgccgtgttgatgtctgcgccggtgtccgccaggagcttgccggagggcctcccggacatcaagccgctgctgtccaacccgtggtcggcgttccagaacctgtccggctgccagttcggggaccagcggcaggggctcgcgaggctcaaggactacctcagccgcttcggctacctccccgcgccgccggccaagttcaacgacatgttcgacgccgacatggagtccgccatccggacctaccagcacaacttcggcctcgaggccacgggccagctggacgcgtccaccgtcgccaagatgatgtccccgcgctgcggcgtcgccgacatcatcaacggcacctccgccatgggcaagacgacggtccacggccggaacctctactcctacttcccggggtccccctcgtggccgcgctccaagaagagcctccggtacgccatcacggcggccaccgagacgaccatcgaccgggccacgctgagcaaggtgttcgccagcgccttcgcacgctggtcggcggccaccacgctcaacttcaccgagacggcgtcggcgtccgacgccgacatcaccatcgggttccactcgggcgaccacggcgacggcgaggccttcgacgggccgctgggcacgttggcgcacgccttctcgcccaccgacggccggttccacctggacgcgtcggaggcctgggtggccggcggcgacgtgtcgcgcgcctcgctggacgccgccgtcgacctggagtcggtggccgtgcacgagatcggccacctgctggggctcggccactcgtcggtggagggcgccatcatgtacccgaccatcacgtcgcgcacgcagaaggtggagctggccaaagacgacgtcgacggcatccagagcctctacggcggcaaccccaacttcaagggcgtcacgccgccggccaccagcagcgaggagacccacagcgccgccccgcgcgcgctctccggcccgtggagcggcctggccggggcggctgcgctcgcactagccttgtcgtgctagttcttcttgcgtcgatcgattcacgaccatttttttaacgggcatatattcactttgctctaggatttgtgttgtacaaacattagtcactgggtgtgcaagatagtgtagatacgtgaattttgcgtgtatagatcgaatcatatagtacgatagtggtgcgcccatgtggccatgtgatatcatatgagttttgcagaatgtgccattgtgagttgtcaaaaaaaat

SEQ ID NO: 12464 - protein, 388 aa, Triticum aestivum
  peptide (1)..(388): Ceres Seq. ID no. 14313452
SSIHLAERYNGEHQKCLPSPRSARRRGHGARRVDVCAGVRQELAGGPPGHQAAAVQPVVGVPEPVRLPVRGPAAGAREAQGLPQPLRLPPRAAGQVQRHVRRRHGVRHPDLPAQLRPRGHGPAGRVHRRQDDVPALRRRRHHQRHLRHGQDDGPRPEPLLLLPGVPLVAALQEEPPVRHHGGHRDDHRPGHAEQGVRQRLRTLVGGHHAQLHRDGVGVRRRHHHRVPLGRPRRRRGLRRAAGHVGARLLAHRRPVPPGRVGGLGGRRRRVARLAGRRRRPGVGGRARDRPPAGARPLVGGGRHHVPDHHVAHAEGGAGQRRRRRHPEPLRRQPQLQGRHAAGHQQRGDPQRRPARALRPVERPGRGGCARTSLVVLVLLASIDSRPFF

SEQ ID NO: 12465 - protein, 376 aa, Triticum aestivum
  peptide (1)..(376): Ceres Seq. ID no. 14313453
  misc_feature (163)..(269): Pfam Name: Pfam Description:  Matrixin
  misc_feature (34)..(375): NCBI GI NO: 15223067 NR Description: matrix metallo proteinase -related
  misc_feature (29)..(375): NCBI GI NO: 15218963 NR Description: metallo proteinase -related [Arabidopsis thaliana]
  misc_feature (40)..(364): NCBI GI NO: 7488435 NR Description: zinc metalloproteinase homolog F3I6
  misc_feature (40)..(364): NCBI GI NO: 30688744 NR Description: metallo proteinase -related [Arabidopsis thaliana]
  misc_feature (56)..(363): NCBI GI NO: 15235820 NR Description: proteinase like protein [Arabidopsis thaliana]
  misc_feature (56)..(363): NCBI GI NO: 28393482 NR Description: putative proteinase [Arabidopsis thaliana]
  misc_feature (56)..(363): NCBI GI NO: 21553383 NR Description: proteinase like protein [Arabidopsis thaliana]
  misc_feature (25)..(370): NCBI GI NO: 37536782 NR Description: putative metalloproteinase
  misc_feature (71)..(334): NCBI GI NO: 2827777 NR Description: Metalloendoproteinase 1 precursor (SMEP1)
  misc_feature (77)..(370): NCBI GI NO: 25455788 NR Description: metalloproteinase (EC 3.4.24.-)
IHPSILPSATMASIRSVSPLLAPLAAAATVLAVLMSAPVSARSLPEGLPDIKPLLSNPWSAFQNLSGCQFGDQRQGLARLKDYLSRFGYLPAPPAKFNDMFDADMESAIRTYQHNFGLEATGQLDASTVAKMMSPRCGVADIINGTSAMGKTTVHGRNLYSYFPGSPSWPRSKKSLRYAITAATETTIDRATLSKVFASAFARWSAATTLNFTETASASDADITIGFHSGDHGDGEAFDGPLGTLAHAFSPTDGRFHLDASEAWVAGGDVSRASLDAAVDLESVAVHEIGHLLGLGHSSVEGAIMYPTITSRTQKVELAKDDVDGIQSLYGGNPNFKGVTPPATSSEETHSAAPRALSGPWSGLAGAAALALALSC

SEQ ID NO: 12466 - protein, 366 aa, Triticum aestivum
  peptide (1)..(366): Ceres Seq. ID no. 14313454
  misc_feature (153)..(259): Pfam Name: Pfam Description:  Matrixin
  misc_feature (24)..(365): NCBI GI NO: 15223067 NR Description: matrix metallo proteinase -related
  misc_feature (19)..(365): NCBI GI NO: 15218963 NR Description: metallo proteinase -related [Arabidopsis thaliana]
  misc_feature (30)..(354): NCBI GI NO: 7488435 NR Description: zinc metalloproteinase homolog F3I6
  misc_feature (30)..(354): NCBI GI NO: 30688744 NR Description: metallo proteinase -related [Arabidopsis thaliana]
  misc_feature (46)..(353): NCBI GI NO: 15235820 NR Description: proteinase like protein [Arabidopsis thaliana]
  misc_feature (46)..(353): NCBI GI NO: 21553383 NR Description: proteinase like protein [Arabidopsis thaliana]
  misc_feature (46)..(353): NCBI GI NO: 28393482 NR Description: putative proteinase [Arabidopsis thaliana]
  misc_feature (15)..(360): NCBI GI NO: 37536782 NR Description: putative metalloproteinase
  misc_feature (61)..(324): NCBI GI NO: 2827777 NR Description: Metalloendoproteinase 1 precursor (SMEP1)
  misc_feature (67)..(360): NCBI GI NO: 25455788 NR Description: metalloproteinase (EC 3.4.24.-)
MASIRSVSPLLAPLAAAATVLAVLMSAPVSARSLPEGLPDIKPLLSNPWSAFQNLSGCQFGDQRQGLARLKDYLSRFGYLPAPPAKFNDMFDADMESAIRTYQHNFGLEATGQLDASTVAKMMSPRCGVADIINGTSAMGKTTVHGRNLYSYFPGSPSWPRSKKSLRYAITAATETTIDRATLSKVFASAFARWSAATTLNFTETASASDADITIGFHSGDHGDGEAFDGPLGTLAHAFSPTDGRFHLDASEAWVAGGDVSRASLDAAVDLESVAVHEIGHLLGLGHSSVEGAIMYPTITSRTQKVELAKDDVDGIQSLYGGNPNFKGVTPPATSSEETHSAAPRALSGPWSGLAGAAALALALSC

SEQ ID NO: 12467 - DNA, 1056 bp, Triticum aestivum
  misc_feature (1)..(1056): Ceres Seq. ID no. 13585286
cttcgcgtttcttccccccacagtctcttttactctccccttctccttccccaagccaagcaaaggcagcagaggccaagaaatgggcgaccgggcgtacgggccgtcctccaagccggtccctgtggcggcaccgcggtccgccaacggcacggcgaacggcggcggtgtagggacacctcggcctccgtccatggtgcccggtcgcgtcccgccgccgccgatgtaccgaccaaagccgatgcaaccgccaccgggccgtcggcggagcgggcgcgggtggtgctgcgcgtgttgcctgtggctgacgctggtgttggtggggctggtgttccttggagcaatagcgttgggggtgttctacgtgatttaccacccggagcttccgaccttcgccgtgacgtcgctccgtctggcggcgctgaacgtctccgactccgactccgtcacctcccgcatcgagttcacggtgaccgcgcgcaaccccaacgagaagatcgcgttcgtgtacggcgacatcggggctgccttcgcggccgacggcacggacatcggggacggcaccgtgccgggcttcctccaccccagccgcaacacgacggtcatcaaggggtcggcttcggcggccgccgcgacggtggacccggtgcaggcggccagtctcagatccaagaagtcccatgcgatgtcagtggagatggactccaaggtgggtttccagatcgggcagttcaagtcgaagcgcatcagcgtccgtgtgctgtgcggtggcttcagcgcggggctggccaagccggcgccctccccggcgccgatcatcgtggccgcggcgcctgcgccgacccggtcaaaaatcaggctgtcgtcgtcttccaccggaggcggcgggtcggcgacgacggacgcaaagtgtaagctccgcgtcaagatctggatttggacgttttgatgcatctgcgggtagggagaggagggatttttttcggtttggtttaacctttttcacactgtatgtggatttattggagtatagtctatatgattttatcttcctct

SEQ ID NO: 12468 - protein, 315 aa, Triticum aestivum
  peptide (1)..(315): Ceres Seq. ID no. 13585287
  misc_feature (28)..(315): NCBI GI NO: 34914304 NR Description: B1151A10.19
  misc_feature (32)..(315): NCBI GI NO: 34903552 NR Description: P0001B06.28
  misc_feature (36)..(288): NCBI GI NO: 15239804 NR Description: expressed protein [Arabidopsis thaliana]
  misc_feature (36)..(288): NCBI GI NO: 21536796 NR Description: unknown [Arabidopsis thaliana]
  misc_feature (30)..(285): NCBI GI NO: 11762174 NR Description: At1g17620 [Arabidopsis thaliana]
  misc_feature (30)..(285): NCBI GI NO: 18394509 NR Description: expressed protein [Arabidopsis thaliana]
  misc_feature (60)..(259): NCBI GI NO: 25408980 NR Description: hypothetical protein At2g46300
  misc_feature (60)..(259): NCBI GI NO: 30690312 NR Description: expressed protein [Arabidopsis thaliana]
  misc_feature (60)..(259): NCBI GI NO: 26449684 NR Description: unknown protein [Arabidopsis thaliana]
  misc_feature (67)..(255): NCBI GI NO: 15221846 NR Description: hypothetical protein [Arabidopsis thaliana]
FAFLPPTVSFTLPFSFPKPSKGSRGQEMGDRAYGPSSKPVPVAAPRSANGTANGGGVGTPRPPSMVPGRVPPPPMYRPKPMQPPPGRRRSGRGWCCACCLWLTLVLVGLVFLGAIALGVFYVIYHPELPTFAVTSLRLAALNVSDSDSVTSRIEFTVTARNPNEKIAFVYGDIGAAFAADGTDIGDGTVPGFLHPSRNTTVIKGSASAAAATVDPVQAASLRSKKSHAMSVEMDSKVGFQIGQFKSKRISVRVLCGGFSAGLAKPAPSPAPIIVAAAPAPTRSKIRLSSSSTGGGGSATTDAKCKLRVKIWIWTF

SEQ ID NO: 12469 - protein, 304 aa, Triticum aestivum
  peptide (1)..(304): Ceres Seq. ID no. 13585288
LRVSSPHSLFYSPLLLPQAKQRQQRPRNGRPGVRAVLQAGPCGGTAVRQRHGERRRCRDTSASVHGARSRPAAADVPTKADATATGPSAERARVVLRVLPVADAGVGGAGVPWSNSVGGVLRDLPPGASDLRRDVAPSGGAERLRLRLRHLPHRVHGDRAQPQREDRVRVRRHRGCLRGRRHGHRGRHRAGLPPPQPQHDGHQGVGFGGRRDGGPGAGGQSQIQEVPCDVSGDGLQGGFPDRAVQVEAHQRPCAVRWLQRGAGQAGALPGADHRGRGACADPVKNQAVVVFHRRRRVGDDGRKV

SEQ ID NO: 12470 - protein, 288 aa, Triticum aestivum
  peptide (1)..(288): Ceres Seq. ID no. 13585289
  misc_feature (1)..(288): NCBI GI NO: 34914304 NR Description: B1151A10.19
  misc_feature (5)..(288): NCBI GI NO: 34903552 NR Description: P0001B06.28
  misc_feature (9)..(261): NCBI GI NO: 15239804 NR Description: expressed protein [Arabidopsis thaliana]
  misc_feature (9)..(261): NCBI GI NO: 21536796 NR Description: unknown [Arabidopsis thaliana]
  misc_feature (3)..(258): NCBI GI NO: 11762174 NR Description: At1g17620 [Arabidopsis thaliana]
  misc_feature (3)..(258): NCBI GI NO: 18394509 NR Description: expressed protein [Arabidopsis thaliana]
  misc_feature (33)..(232): NCBI GI NO: 25408980 NR Description: hypothetical protein At2g46300
  misc_feature (33)..(232): NCBI GI NO: 30690312 NR Description: expressed protein [Arabidopsis thaliana]
  misc_feature (33)..(232): NCBI GI NO: 26449684 NR Description: unknown protein [Arabidopsis thaliana]
  misc_feature (40)..(228): NCBI GI NO: 15221846 NR Description: hypothetical protein [Arabidopsis thaliana]
MGDRAYGPSSKPVPVAAPRSANGTANGGGVGTPRPPSMVPGRVPPPPMYRPKPMQPPPGRRRSGRGWCCACCLWLTLVLVGLVFLGAIALGVFYVIYHPELPTFAVTSLRLAALNVSDSDSVTSRIEFTVTARNPNEKIAFVYGDIGAAFAADGTDIGDGTVPGFLHPSRNTTVIKGSASAAAATVDPVQAASLRSKKSHAMSVEMDSKVGFQIGQFKSKRISVRVLCGGFSAGLAKPAPSPAPIIVAAAPAPTRSKIRLSSSSTGGGGSATTDAKCKLRVKIWIWTF

SEQ ID NO: 12471 - DNA, 1312 bp, Triticum aestivum
  misc_feature (1)..(1312): Ceres Seq. ID no. 13583590
gaacccttgctcgactgcgactgcgattgcgtcccggcggtagccgctgccgtccggccgcgctgctatggcgagttagacgtcgcggccctcattgatccccgttacggatttccccttcttccccggggatcccgcctgccctaccaccgaatcgtgctgctccattgccttggaaggtcgccgccgccgccgcccgttcctccttccgtcacaatacaaggtgatcaatggcgtcaggtgcacctggtatcatgctccgacacctttccaaaacacttgctgtaagcccagcagtggcatctggtatgaccagccagcatcaccagcttcaacagcgtgcaccagtgggtggcacatccaaaggcaaggctaagctcaaagccggcctgcctttgaagcgcagcgtcatagcaaagaaggggggcgcgcctgccactgctgggagcggtggtgctggccgtggtcgtcgtgaagccattgagcgcattactcagattgcagagtcttgtctgaagtcctctactcctctacggcacttgtcccccaaggagtgtcttcgcgaggcaaaacgtgaggagcttggactcatctccaaggaacgacaacgtgaacttgatattgccaaggctaaagccaagtccaaaggtaccattggaggtgatggtggccgtgttctgatgggtccacctggccttgactatatcagtcttggccttgtagatgagaagaccatccctacttatgagctgacagttgaggatggtcggcgtcttgccaaagaatacagccgtgtgctaatgcaacgacaccgtgcacgccaaactgcggaatcaacacttttgagcctcaagaaggaggccgttgctgcactccccgagaagctgcaagctgctgctatggttcctgacatgacaccattccctgcaaaccggtacatggcaacactcacgccaccaattgaagggtatattgaaaaggtgcgagatgctgccaagaagtattctgtgaaagagaagcttcgctgagttcaattcaatccatataaggtggctgagagttctggaactttttcttatgttgtattcttgagaatctgtcagttttgctgacttcgtgctgtttttgcctctaataatcagatagcggtaataaactgccacgattttgctttgcaagaccatgttattttggctgaatctttttactccagttttgctgtgtagcacaaattgatatgttgaactaaaatcaagaaaagtttgttgctttgaaatgatgcttatactgaaagtatcctgccaaggttact

SEQ ID NO: 12472 - protein, 265 aa, Triticum aestivum
  peptide (1)..(265): Ceres Seq. ID no. 15222763
  misc_feature (9)..(265): NCBI GI NO: 34914612 NR Description: P0520B06.19
  misc_feature (29)..(265): NCBI GI NO: 15235571 NR Description: expressed protein [Arabidopsis thaliana]
  misc_feature (29)..(246): NCBI GI NO: 15233539 NR Description: hypothetical protein [Arabidopsis thaliana]
MASGAPGIMLRHLSKTLAVSPAVASGMTSQHHQLQQRAPVGGTSKGKAKLKAGLPLKRSVIAKKGGAPATAGSGGAGRGRREAIERITQIAESCLKSSTPLRHLSPKECLREAKREELGLISKERQRELDIAKAKAKSKGTIGGDGGRVLMGPPGLDYISLGLVDEKTIPTYELTVEDGRRLAKEYSRVLMQRHRARQTAESTLLSLKKEAVAALPEKLQAAAMVPDMTPFPANRYMATLTPPIEGYIEKVRDAAKKYSVKEKLR

SEQ ID NO: 12473 - protein, 257 aa, Triticum aestivum
  peptide (1)..(257): Ceres Seq. ID no. 15222764
  misc_feature (1)..(257): NCBI GI NO: 34914612 NR Description: P0520B06.19
  misc_feature (21)..(257): NCBI GI NO: 15235571 NR Description: expressed protein [Arabidopsis thaliana]
  misc_feature (21)..(238): NCBI GI NO: 15233539 NR Description: hypothetical protein [Arabidopsis thaliana]
MLRHLSKTLAVSPAVASGMTSQHHQLQQRAPVGGTSKGKAKLKAGLPLKRSVIAKKGGAPATAGSGGAGRGRREAIERITQIAESCLKSSTPLRHLSPKECLREAKREELGLISKERQRELDIAKAKAKSKGTIGGDGGRVLMGPPGLDYISLGLVDEKTIPTYELTVEDGRRLAKEYSRVLMQRHRARQTAESTLLSLKKEAVAALPEKLQAAAMVPDMTPFPANRYMATLTPPIEGYIEKVRDAAKKYSVKEKLR

SEQ ID NO: 12474 - protein, 239 aa, Triticum aestivum
  peptide (1)..(239): Ceres Seq. ID no. 15222765
  misc_feature (1)..(239): NCBI GI NO: 34914612 NR Description: P0520B06.19
  misc_feature (3)..(239): NCBI GI NO: 15235571 NR Description: expressed protein [Arabidopsis thaliana]
  misc_feature (3)..(220): NCBI GI NO: 15233539 NR Description: hypothetical protein [Arabidopsis thaliana]
MTSQHHQLQQRAPVGGTSKGKAKLKAGLPLKRSVIAKKGGAPATAGSGGAGRGRREAIERITQIAESCLKSSTPLRHLSPKECLREAKREELGLISKERQRELDIAKAKAKSKGTIGGDGGRVLMGPPGLDYISLGLVDEKTIPTYELTVEDGRRLAKEYSRVLMQRHRARQTAESTLLSLKKEAVAALPEKLQAAAMVPDMTPFPANRYMATLTPPIEGYIEKVRDAAKKYSVKEKLR

SEQ ID NO: 12475 - DNA, 1206 bp, Triticum aestivum
  misc_feature (1)..(1206): Ceres Seq. ID no. 13596601
agaacatcctaatcgaaaaccgatctagtatccctcaaagcttccatggagaaggcgccaggcacgagcatcgaggctatcatccgacggcttaggctccaccaggcgcctccctccccttactccggcgatccctcaacagcggcgacccccgccgcagccaacctgtttcagccgcggagagccgccgtactggtctgcctcttccacgacgctgccggcgagctgcgtgtcctccttaccaagcgcgcttcctccctctccacccactccggggaggttgcattgcccggaggaaaggcagaggagggtgatgctgatgatgcagcaacggcattaagggaggcaaaggaggagattgggcttgatccagccttggtcactgtcgtctcctcgcttgagcacttcttgtccaagcatcttctggtagttgttcctgttgttggcatactctcagatatacaggctttcaaacctgtccttaatgttgatgaggtggacgacatttttgatgtacccctagagatgttcctcaaggatgagcgcaggagatccgaggagcgagaatggatggggcaggcgttcacacttcaccacttcgattatgagaaaggcgacaagacgtatgtaatctgggggctgactgctggcatcctgattcacgcggcttcagttgtataccagcggccaccagactttgctgagcgaagggtacaattcaacctgccgaagtactcacaggagtcttctccaatgccatgatcaggattaggatgcgcactcagttacatgcctgattcagcacacagaagactacatacaccaaaagaaatggtatagaatctaaaaggtttccaaatcatgtgttgttatacaattcattcattcttctatgcgccacgaccctgcgattgatgtgaagtgcgataccctggtggttcagctgcgacgatgatcatgcaggccgggccgcatcaagcaatggattacgatgcattcgatggtgtgcagcttgccacacacagcgactaaaaatcaaacgttcgacaaacatatttgtattctattctttgcataataatacattgcaagaacattaacattcagaaaattatttggtgctaatttgagtacactccaaaaatttgctccgctgcttctgtactatggttgctcctttcttgtactatattatttcccccgtct

SEQ ID NO: 12476 - protein, 238 aa, Triticum aestivum
  peptide (1)..(238): Ceres Seq. ID no. 15221931
  misc_feature (45)..(178): Pfam Name: Pfam Description:  NUDIX domain
  misc_feature (1)..(238): NCBI GI NO: 40253324 NR Description: putative phosphohydrolase
  misc_feature (42)..(238): NCBI GI NO: 18396900 NR Description: MutT/nudix family protein [Arabidopsis thaliana]
  misc_feature (42)..(229): NCBI GI NO: 30690557 NR Description: MutT/nudix family protein [Arabidopsis thaliana]
  misc_feature (42)..(238): NCBI GI NO: 10764850 NR Description: F1K23.5 [Arabidopsis thaliana]
  misc_feature (42)..(229): NCBI GI NO: 26450576 NR Description: unknown protein [Arabidopsis thaliana]
  misc_feature (42)..(232): NCBI GI NO: 18403412 NR Description: MutT/nudix family protein [Arabidopsis thaliana]
  misc_feature (42)..(228): NCBI GI NO: 21553389 NR Description: unknown [Arabidopsis thaliana]
  misc_feature (42)..(228): NCBI GI NO: 15242543 NR Description: MutT/nudix family protein [Arabidopsis thaliana]
  misc_feature (47)..(212): NCBI GI NO: 23470438 NR Description: hypothetical protein
  misc_feature (44)..(218): NCBI GI NO: 34851788 NR Description: similar to coenzyme A diphosphatase
MEKAPGTSIEAIIRRLRLHQAPPSPYSGDPSTAATPAAANLFQPRRAAVLVCLFHDAAGELRVLLTKRASSLSTHSGEVALPGGKAEEGDADDAATALREAKEEIGLDPALVTVVSSLEHFLSKHLLVVVPVVGILSDIQAFKPVLNVDEVDDIFDVPLEMFLKDERRRSEEREWMGQAFTLHHFDYEKGDKTYVIWGLTAGILIHAASVVYQRPPDFAERRVQFNLPKYSQESSPMP

SEQ ID NO: 12477 - DNA, 1658 bp, Triticum aestivum
  misc_feature (1)..(1658): Ceres Seq. ID no. 13596635
agcgcaccacggtcgacctaccgcgcaggaccaccgagcccctcccttctcccgtgcctgctgcggatcccctttcctttgccttctctcctccagtcagctcctcttccgcgcgtgtggtggccgatggcggcggcggcggacacttccgcggcttccacgaccgggctcgcgctctcggaggcgagcatcaactgggagaggttggacaagacaaagtttcatgtcattggagcaatcctatttacggcccagcaaggtgttctgcacccaacagctgttgtgaagactagaatgcaggttgccgaaggaggactttcacatatgtctggctttgtcgtttttagaaagatattgaggagtgatggcatccctggtgttttcagaggatttggcaccagtgcagttggagctctgcctggacgaatcttggctctaacttcactagagatctccaaagaaatggcatttaaatactctgagcatttcgatatgtccgaggcatcaaggattgctgttgctaatggtgtagcaggcttagtgtcaagtaccttttcaagttcatattctgtacccctagatgtggtttgtcagagactcatggttcagggattgccagggatgcaaacatatagaggcccatttgatgtgataaataaggttgtcaggagtgaaggcctccggggcctttaccgaggttttggaattacccttttaactcaatcaccagcttctgccctttggtggagttcatatggtggggctcaacatgctatctggaggagcttgggctatggaaatggtacgcagaagaaaccctcccatacagaacttgttgctgtgcaagcaacagctggaacaattgctggagcttgctcatcgattatcactacaccaatagataccatcaagacccggcttcaggtaatggacaactacgggagtggaaggccatccgtcatgaagactaccaggctgctactgcgagaagaaggttggagaggtttataccgagggtttggaccacgctttcttaacatgtctctttggggtacatcaatgattgtcacatatgagctaataaaaagactttctgtgaaacctgagcaatgaaccttttggcttctgctccgcctatctggtcatcatttccgttttggccatctagtgaattccttttggtacagggattggcatgtaacactggttggaaattcttgatgcaagtccccttataaagtctgacatgtttctgtacggaactaccctgtaaatacctccaagtgcaagggtgctcgtttcagatgagagccagaggatcgatctgggcactggagcgccttgtagttgttgagcaaaaatttccctgtaagtgctgaagggagctcgtttcaggatgagagccagaggctggatctgggtactgagcaccttgtagttgttcagcaaaaattccggaaacatagttttgtgtcttcccatctaattggcatagttaccccacttgaattttcaatttcgcattacttttgtagctcacttcttgggatgagatgtggcatgtccaaatcaatttagcatcatcagtgaggtggtaggctgcaatgtataccttgtcgagtgtcgacattctacagtgagaggtagatactttcttt

SEQ ID NO: 12478 - protein, 370 aa, Triticum aestivum
  peptide (1)..(370): Ceres Seq. ID no. 13596636
  misc_feature (116)..(369): NCBI GI NO: 34894824 NR Description: P0554D10.15
  misc_feature (48)..(370): NCBI GI NO: 21326111 NR Description: putative mitochondrial carrier protein
  misc_feature (48)..(364): NCBI GI NO: 18417739 NR Description: mitochondrial carrier protein family
  misc_feature (48)..(364): NCBI GI NO: 21553961 NR Description: putative mitochondrial carrier protein
  misc_feature (48)..(261): NCBI GI NO: 11358653 NR Description: probable mitochondrial carrier protein -Arabidopsis thaliana
  misc_feature (261)..(364): NCBI GI NO: 11358653 NR Description: probable mitochondrial carrier protein -Arabidopsis thaliana
  misc_feature (48)..(370): NCBI GI NO: 12061241 NR Description: 36I5.1 [Oryza sativa (japonica cultivar-group)]
  misc_feature (49)..(370): NCBI GI NO: 18496651 NR Description: putative mitochondrial carrier protein
  misc_feature (49)..(370): NCBI GI NO: 12278522 NR Description: putative mitochondrial carrier protein
  misc_feature (49)..(370): NCBI GI NO: 21594326 NR Description: mitochondrial carrier-like protein
SAPRSTYRAGPPSPSLLPCLLRIPFPLPSLLQSAPLPRVWWPMAAAADTSAASTTGLALSEASINWERLDKTKFHVIGAILFTAQQGVLHPTAVVKTRMQVAEGGLSHMSGFVVFRKILRSDGIPGVFRGFGTSAVGALPGRILALTSLEISKEMAFKYSEHFDMSEASRIAVANGVAGLVSSTFSSSYSVPLDVVCQRLMVQGLPGMQTYRGPFDVINKVVRSEGLRGLYRGFGITLLTQSPASALWWSSYGGAQHAIWRSLGYGNGTQKKPSHTELVAVQATAGTIAGACSSIITTPIDTIKTRLQVMDNYGSGRPSVMKTTRLLLREEGWRGLYRGFGPRFLNMSLWGTSMIVTYELIKRLSVKPEQ

SEQ ID NO: 12479 - protein, 328 aa, Triticum aestivum
  peptide (1)..(328): Ceres Seq. ID no. 13596637
  misc_feature (74)..(327): NCBI GI NO: 34894824 NR Description: P0554D10.15
  misc_feature (6)..(328): NCBI GI NO: 21326111 NR Description: putative mitochondrial carrier protein
  misc_feature (6)..(322): NCBI GI NO: 18417739 NR Description: mitochondrial carrier protein family
  misc_feature (6)..(322): NCBI GI NO: 21553961 NR Description: putative mitochondrial carrier protein
  misc_feature (6)..(219): NCBI GI NO: 11358653 NR Description: probable mitochondrial carrier protein -Arabidopsis thaliana
  misc_feature (219)..(322): NCBI GI NO: 11358653 NR Description: probable mitochondrial carrier protein -Arabidopsis thaliana
  misc_feature (6)..(328): NCBI GI NO: 12061241 NR Description: 36I5.1 [Oryza sativa (japonica cultivar-group)]
  misc_feature (7)..(328): NCBI GI NO: 18496651 NR Description: putative mitochondrial carrier protein
  misc_feature (7)..(328): NCBI GI NO: 12278522 NR Description: putative mitochondrial carrier protein
  misc_feature (7)..(328): NCBI GI NO: 21594326 NR Description: mitochondrial carrier-like protein
MAAAADTSAASTTGLALSEASINWERLDKTKFHVIGAILFTAQQGVLHPTAVVKTRMQVAEGGLSHMSGFVVFRKILRSDGIPGVFRGFGTSAVGALPGRILALTSLEISKEMAFKYSEHFDMSEASRIAVANGVAGLVSSTFSSSYSVPLDVVCQRLMVQGLPGMQTYRGPFDVINKVVRSEGLRGLYRGFGITLLTQSPASALWWSSYGGAQHAIWRSLGYGNGTQKKPSHTELVAVQATAGTIAGACSSIITTPIDTIKTRLQVMDNYGSGRPSVMKTTRLLLREEGWRGLYRGFGPRFLNMSLWGTSMIVTYELIKRLSVKPEQ

SEQ ID NO: 12480 - protein, 272 aa, Triticum aestivum
  peptide (1)..(272): Ceres Seq. ID no. 13596638
  misc_feature (18)..(271): NCBI GI NO: 34894824 NR Description: P0554D10.15
  misc_feature (1)..(272): NCBI GI NO: 21326111 NR Description: putative mitochondrial carrier protein
  misc_feature (1)..(266): NCBI GI NO: 18417739 NR Description: mitochondrial carrier protein family
  misc_feature (1)..(266): NCBI GI NO: 21553961 NR Description: putative mitochondrial carrier protein
  misc_feature (1)..(163): NCBI GI NO: 11358653 NR Description: probable mitochondrial carrier protein -Arabidopsis thaliana
  misc_feature (163)..(266): NCBI GI NO: 11358653 NR Description: probable mitochondrial carrier protein -Arabidopsis thaliana
  misc_feature (1)..(272): NCBI GI NO: 12061241 NR Description: 36I5.1 [Oryza sativa (japonica cultivar-group)]
  misc_feature (1)..(272): NCBI GI NO: 18496651 NR Description: putative mitochondrial carrier protein
  misc_feature (1)..(272): NCBI GI NO: 12278522 NR Description: putative mitochondrial carrier protein
  misc_feature (1)..(272): NCBI GI NO: 21594326 NR Description: mitochondrial carrier-like protein
MQVAEGGLSHMSGFVVFRKILRSDGIPGVFRGFGTSAVGALPGRILALTSLEISKEMAFKYSEHFDMSEASRIAVANGVAGLVSSTFSSSYSVPLDVVCQRLMVQGLPGMQTYRGPFDVINKVVRSEGLRGLYRGFGITLLTQSPASALWWSSYGGAQHAIWRSLGYGNGTQKKPSHTELVAVQATAGTIAGACSSIITTPIDTIKTRLQVMDNYGSGRPSVMKTTRLLLREEGWRGLYRGFGPRFLNMSLWGTSMIVTYELIKRLSVKPEQ

SEQ ID NO: 12481 - DNA, 1095 bp, Triticum aestivum
  misc_feature (1)..(1095): Ceres Seq. ID no. 12544053
  misc_feature (1046)..(1046): n is a, c, t, g, unknown, or other
ttagttatacccacatgagagatgagactatttatgattgagctccttgctggagcagaacgggagacgcccattgctgcagctacttcacccactttgctcacgttatctgactccgactgatttgatttgtctgaagtacagtgtgccttcccttgtttcaaaggatgaggcatcagagagtgctactaaagttaacttggatagtaagttggatgatgtagctgacaaagaacctgggggttcagaagacacactggttgcatctgatagcaagaaggacccgtttaaacggcggcaagaactgttggtgaaaagcgagctttttgaggttctcatcgagacttgcattgaaaatgttggagagttacttagaacaaacttcggcaaagatgtattatacgaggttgctgtaggtggaaaaaataatgtcttggagggggtcaccgacaggatccacgtgcttcacaatgctatagcttctgacgcagaacgcccgaggacagaagatgttgagcatgcctttgataactaccactcgagccgcgtaatcagaaagatgatacttgattgtcctgcgtttgctgctaccctatggaaaaaagccctcaaagggaagtgcaagtcatttgcagatggattcagctccaaggtggtggctgcctatctggaatcttcggattccaaggtgaaggatcttgcgaaatccgaggtgcagccgctcatcgacggtggcatactgaagattccagaccataaagcagcggagaagaagtgagtcttctctcaacgggcctctcaccatcgccagcaacacaaagcaggccgaggcggcgaccgtgcttgcgtgttagatgaaagagtgtaatacatacatccgcggtcatcctactggaggtgtatgttcaattttggcactggataccaatggactcgaaatacatacagtcgttaagggtttaggttaatacttgactgttactggggaggtttgctgcgatatattcgtgtgatgtggcataagtttgaccgttcgccatcacatntaagcagacgatgtgaccaaagtagatttcatttgcatattggcatgcc

SEQ ID NO: 12482 - protein, 72 aa, Triticum aestivum
  peptide (1)..(72): Ceres Seq. ID no. 12544054
  misc_feature (1)..(71): NCBI GI NO: 34897258 NR Description: unknown protein
  misc_feature (1)..(70): NCBI GI NO: 18401257 NR Description: expressed protein; protein id: At3g16810
MILDCPAFAATLWKKALKGKCKSFADGFSSKVVAAYLESSDSKVKDLAKSEVQPLIDGGILKIPDHKAAEKK

SEQ ID NO: 12483 - protein, 54 aa, Triticum aestivum
  peptide (1)..(54): Ceres Seq. ID no. 12544055
MEKSPQREVQVICRWIQLQGGGCLSGIFGFQGEGSCEIRGAAAHRRWHTEDSRP

SEQ ID NO: 12484 - protein, 37 aa, Triticum aestivum
  peptide (1)..(37): Ceres Seq. ID no. 12544056
MKECNTYIRGHPTGGVCSILALDTNGLEIHTVVKGLG

SEQ ID NO: 12485 - DNA, 457 bp, Triticum aestivum
  misc_feature (1)..(457): Ceres Seq. ID no. 15175006
atcattgctctgtcagttcccttctttgcgcttgtgatggctctgattggttctttattcgcgatgcttgtgacctacattcttccttgcgcctgctttctggccatcctcaaggcaaaagcgacttggtatcagactgcgacatgctcattcatcatcgccgtaggggttacctgcgcctgcgtggggacatactcatccctctccgggattgtccagaactacgcaacctgattctccctacatacataattgagaagattgctcgttcaaccgcgttattatacatataattaagcatatgtatgagcgagagtggaggattcaaattttgccgaacaatgaattatgtccatcgatatataaatgttgtatgattaaatttgtattgctgttaaatttgtggcaaccccgataactttgcattattattgttaaatttgtgtgttgatggatc

SEQ ID NO: 12486 - protein, 96 aa, Triticum aestivum
  peptide (1)..(96): Ceres Seq. ID no. 15175007
HCSVSSLLCACDGSDWFFIRDACDLHSSLRLLSGHPQGKSDLVSDCDMLIHHRRRGYLRLRGDILIPLRDCPELRNLILPTYIIEKIARSTALLYI

SEQ ID NO: 12487 - protein, 77 aa, Triticum aestivum
  peptide (1)..(77): Ceres Seq. ID no. 15175008
  misc_feature (1)..(75): NCBI GI NO: 32488047 NR Description: OSJNBa0014F04.26
  misc_feature (1)..(69): NCBI GI NO: 11358406 NR Description: hypothetical protein T7H20
  misc_feature (1)..(69): NCBI GI NO: 30679549 NR Description: amino acid transporter family
  misc_feature (1)..(72): NCBI GI NO: 11358405 NR Description: hypothetical protein T7H20
  misc_feature (1)..(72): NCBI GI NO: 22326569 NR Description: amino acid transporter family
  misc_feature (1)..(73): NCBI GI NO: 25408639 NR Description: hypothetical protein At2g39130
  misc_feature (1)..(73): NCBI GI NO: 15292735 NR Description: unknown protein [Arabidopsis thaliana]
  misc_feature (1)..(73): NCBI GI NO: 30687791 NR Description: amino acid transporter family
  misc_feature (3)..(75): NCBI GI NO: 23397299 NR Description: unknown protein [Arabidopsis thaliana]
  misc_feature (3)..(75): NCBI GI NO: 18405629 NR Description: amino acid transporter family
IIALSVPFFALVMALIGSLFAMLVTYILPCACFLAILKAKATWYQTATCSFIIAVGVTCACVGTYSSLSGIVQNYAT

SEQ ID NO: 12488 - protein, 65 aa, Triticum aestivum
  peptide (1)..(65): Ceres Seq. ID no. 15175009
  misc_feature (1)..(63): NCBI GI NO: 32488047 NR Description: OSJNBa0014F04.26
  misc_feature (1)..(57): NCBI GI NO: 11358406 NR Description: hypothetical protein T7H20
  misc_feature (1)..(57): NCBI GI NO: 30679549 NR Description: amino acid transporter family
  misc_feature (1)..(60): NCBI GI NO: 11358405 NR Description: hypothetical protein T7H20
  misc_feature (1)..(60): NCBI GI NO: 22326569 NR Description: amino acid transporter family
  misc_feature (1)..(61): NCBI GI NO: 25408639 NR Description: hypothetical protein At2g39130
  misc_feature (1)..(61): NCBI GI NO: 15292735 NR Description: unknown protein [Arabidopsis thaliana]
  misc_feature (1)..(61): NCBI GI NO: 30687791 NR Description: amino acid transporter family
  misc_feature (1)..(63): NCBI GI NO: 23397299 NR Description: unknown protein [Arabidopsis thaliana]
  misc_feature (1)..(63): NCBI GI NO: 18405629 NR Description: amino acid transporter family
MALIGSLFAMLVTYILPCACFLAILKAKATWYQTATCSFIIAVGVTCACVGTYSSLSGIVQNYAT

SEQ ID NO: 12489 - protein, 49 aa, Triticum aestivum
  peptide (1)..(49): Ceres Seq. ID no. 15175010
MLIHHRRRGYLRLRGDILIPLRDCPELRNLILPTYIIEKIARSTALLYI

SEQ ID NO: 12490 - DNA, 862 bp, Triticum aestivum
  misc_feature (1)..(862): Ceres Seq. ID no. 15226850
accaaatcaatcaaacgcggtcttcctccctgagacgcacgcaccgcacctcaccgccccgcgtcgcgagatctcaaatccccgatccgaccccaccggcggcgatggccggcaaggagctgagcgacgagcaggttgcgtcgatgcgggaggccttctccctcttcgacactgacggcgacggccgcatcgccccctcggagctcggcgtcctcatgcgctccctgggtgggaacccgacgcaggcgcagctccgcgacatcaccgcccaggagaagctcacggcgcccttcgacttcaagcgattcctcgaactcatgcgcgcccacctccgcccggagccgttcgaccgcccgctccgcgacgccttccgcgtcctcgacaaggacgcgtcgggcaccgtctccgtcgcggacctccgccacgtcctcacctccatcggcgagaagctcgagccccatgagttcgacgagtggatccgcgaggtcgacgtcgccgcggacggcaccatccgctacgacgacttcatccgccgcatcgtcgccaagtagtggattgatccgtctcccagcctgctcagacttcttcgtatttaataactcctccttcgcgtgattttatttcgtatcatctcatctgatctgctgcgcttctgttttgtgctttggtttcgttgtggttccccaaccgccctagggtttggataaaaatggtgtgattatggattaatggatctgtccgatggtattgcaatgtaaagcatggatcctgttactttctgtgattgattgattgcttaatcagaaaccagtgaaatgcgccagtttatgcattcatgttaatacagcctatgatttgtttt

SEQ ID NO: 12491 - protein, 182 aa, Triticum aestivum
  peptide (1)..(182): Ceres Seq. ID no. 15226851
  misc_feature (47)..(75): Pfam Name: Pfam Description:  EF hand
  misc_feature (35)..(182): NCBI GI NO: 29367559 NR Description: putative serine/threonine kinase
  misc_feature (37)..(182): NCBI GI NO: 28629126 NR Description: putative serine/threonine kinase [Vitis vinifera]
  misc_feature (37)..(182): NCBI GI NO: 15221284 NR Description: calmodulin, putative [Arabidopsis thaliana]
  misc_feature (37)..(181): NCBI GI NO: 25402719 NR Description: protein F5O11.4 [imported] - Arabidopsis thaliana
  misc_feature (35)..(182): NCBI GI NO: 15221593 NR Description: calmodulin, putative [Arabidopsis thaliana]
  misc_feature (24)..(181): NCBI GI NO: 6630454 NR Description: F23N19.18 [Arabidopsis thaliana]
  misc_feature (39)..(182): NCBI GI NO: 1076793 NR Description: calmodulin cam2 - maize
  misc_feature (39)..(182): NCBI GI NO: 4959645 NR Description: calmodulin mutant SYNCAM31 [synthetic construct]
  misc_feature (38)..(182): NCBI GI NO: 115525 NR Description: CALMODULIN
  misc_feature (39)..(182): NCBI GI NO: 4959151 NR Description: calmodulin mutant SYNCAM48 [synthetic construct]
QINQTRSSSLRRTHRTSPPRVARSQIPDPTPPAAMAGKELSDEQVASMREAFSLFDTDGDGRIAPSELGVLMRSLGGNPTQAQLRDITAQEKLTAPFDFKRFLELMRAHLRPEPFDRPLRDAFRVLDKDASGTVSVADLRHVLTSIGEKLEPHEFDEWIREVDVAADGTIRYDDFIRRIVAK

SEQ ID NO: 12492 - protein, 148 aa, Triticum aestivum
  peptide (1)..(148): Ceres Seq. ID no. 15226852
  misc_feature (13)..(41): Pfam Name: Pfam Description:  EF hand
  misc_feature (1)..(148): NCBI GI NO: 29367559 NR Description: putative serine/threonine kinase
  misc_feature (3)..(148): NCBI GI NO: 28629126 NR Description: putative serine/threonine kinase [Vitis vinifera]
  misc_feature (3)..(148): NCBI GI NO: 15221284 NR Description: calmodulin, putative [Arabidopsis thaliana]
  misc_feature (3)..(147): NCBI GI NO: 25402719 NR Description: protein F5O11.4 [imported] - Arabidopsis thaliana
  misc_feature (1)..(148): NCBI GI NO: 15221593 NR Description: calmodulin, putative [Arabidopsis thaliana]
  misc_feature (1)..(147): NCBI GI NO: 6630454 NR Description: F23N19.18 [Arabidopsis thaliana]
  misc_feature (5)..(148): NCBI GI NO: 1076793 NR Description: calmodulin cam2 - maize
  misc_feature (5)..(148): NCBI GI NO: 4959645 NR Description: calmodulin mutant SYNCAM31 [synthetic construct]
  misc_feature (4)..(148): NCBI GI NO: 115525 NR Description: CALMODULIN
  misc_feature (5)..(148): NCBI GI NO: 4959151 NR Description: calmodulin mutant SYNCAM48 [synthetic construct]
MAGKELSDEQVASMREAFSLFDTDGDGRIAPSELGVLMRSLGGNPTQAQLRDITAQEKLTAPFDFKRFLELMRAHLRPEPFDRPLRDAFRVLDKDASGTVSVADLRHVLTSIGEKLEPHEFDEWIREVDVAADGTIRYDDFIRRIVAK

SEQ ID NO: 12493 - protein, 135 aa, Triticum aestivum
  peptide (1)..(135): Ceres Seq. ID no. 15226853
  misc_feature (1)..(28): Pfam Name: Pfam Description:  EF hand
  misc_feature (1)..(135): NCBI GI NO: 29367559 NR Description: putative serine/threonine kinase
  misc_feature (1)..(135): NCBI GI NO: 28629126 NR Description: putative serine/threonine kinase [Vitis vinifera]
  misc_feature (1)..(135): NCBI GI NO: 15221284 NR Description: calmodulin, putative [Arabidopsis thaliana]
  misc_feature (1)..(134): NCBI GI NO: 25402719 NR Description: protein F5O11.4 [imported] - Arabidopsis thaliana
  misc_feature (1)..(135): NCBI GI NO: 15221593 NR Description: calmodulin, putative [Arabidopsis thaliana]
  misc_feature (1)..(134): NCBI GI NO: 6630454 NR Description: F23N19.18 [Arabidopsis thaliana]
  misc_feature (1)..(135): NCBI GI NO: 1076793 NR Description: calmodulin cam2 - maize
  misc_feature (1)..(135): NCBI GI NO: 4959645 NR Description: calmodulin mutant SYNCAM31 [synthetic construct]
  misc_feature (1)..(135): NCBI GI NO: 115525 NR Description: CALMODULIN
  misc_feature (1)..(135): NCBI GI NO: 4959151 NR Description: calmodulin mutant SYNCAM48 [synthetic construct]
MREAFSLFDTDGDGRIAPSELGVLMRSLGGNPTQAQLRDITAQEKLTAPFDFKRFLELMRAHLRPEPFDRPLRDAFRVLDKDASGTVSVADLRHVLTSIGEKLEPHEFDEWIREVDVAADGTIRYDDFIRRIVAK

SEQ ID NO: 12494 - DNA, 1424 bp, Triticum aestivum
  misc_feature (1)..(1424): Ceres Seq. ID no. 12615223
agtaaagaaacctaaccgccgccgccagcaccaccacgtccgggtccagggcattcagagccgagatggcgtccgcgtcgccgtcgtgggtcatcctgggccgcgtggccaaggtgtcggccgccgacgccgatcttcctccgggcgccgacctctccctcgcgctgccgccgccgccgcgcgtcgcgctcctcaccatccccccgcgcatcttcccgggccaaaccacctccgacaacttcccctccgtcctcgccgtcgaccgctccggcctcctcctcctccacgcctcccagggccccgccgcgggccccgccatcgtcgacctccccggccgccaggaggtctgctggcgcccattcgtcgcgggctacttcgtcctcgactccaaatccgcctcggccttcccgctccccaaccccgagcgcatcatgaacccgggccgcctcggcctcatcgcctcccccgagggcgcaggccgctacatggtcgctgagctccagccggtcgccggcggcgagcaggccgacctcctctgcttctcgtcgcaatccgggcagtgggacaggaagaccgtcgcctacccgcttccatcccgccccttgacggacaacggcgtggtctcgcactccgggaggctctggtgggtcgacctctcctggggcctcatcacctgcgaccccttcgcggacgcgcctgtgctgagcttcgtcccactcccgccgcgcaaggcgctcaagtacggggtagattgtgcagtgctcgacaagtaccgccgcgtcgctgtcagccgcggcaagctgcggttcgtggacatgtacaagaaccgtagcagcttcggctctggcacagatcagcgtgtggacgctcgccgatccggactccaccgagtggacgctggagtatgaagcgaccttttcggagatctttaatgatgcgagcttcaaggcgactcgtctgacaaggcagctcccggtgctcgcgctcatccatcccagggaccccgacgtggtctacttcttcctggacaggcacctgttcagcgtcgacgtgcctgaccgcagggtcgtgcagtgcgagctttacgagctggttgaggagctatccagcaaaagcatcgccacccgtttcgttcacgcttggaggctgccaccggctctccgctcagctgcggatgccgttgcggagaagctaaacgcaggaggaaatcaagaaatcattgatgccgctgcagtctcaacttgccaaactgaagttgaagtcggtggcggcgacacgcctgagtccaagcggcgtaggctagagtgacctgagcttgttgagatctgttcttgtagtctctctgtttcaatatcttgtaggcatcaccttcccagaaaaaaaaaacttgtaggctttgctagagagctggtaaccccagcatg

SEQ ID NO: 12495 - protein, 280 aa, Triticum aestivum
  peptide (1)..(280): Ceres Seq. ID no. 12615224
  misc_feature (1)..(253): NCBI GI NO: 34904558 NR Description: B1008C01.10
  misc_feature (1)..(251): NCBI GI NO: 34904588 NR Description: B1008C01.27
  misc_feature (4)..(262): NCBI GI NO: 34904504 NR Description: OSJNBa0010K01.14
  misc_feature (5)..(250): NCBI GI NO: 34904496 NR Description: OSJNBa0010K01.9
  misc_feature (1)..(253): NCBI GI NO: 34904568 NR Description: B1008C01.16
  misc_feature (8)..(253): NCBI GI NO: 34904586 NR Description: B1008C01.26
  misc_feature (7)..(279): NCBI GI NO: 34904594 NR Description: B1008C01.30
  misc_feature (5)..(251): NCBI GI NO: 34904566 NR Description: B1008C01.15
  misc_feature (25)..(279): NCBI GI NO: 34904596 NR Description: OSJNBa0004G10.9
  misc_feature (1)..(164): NCBI GI NO: 34904596 NR Description: OSJNBa0004G10.9
MASASPSWVILGRVAKVSAADADLPPGADLSLALPPPPRVALLTIPPRIFPGQTTSDNFPSVLAVDRSGLLLLHASQGPAAGPAIVDLPGRQEVCWRPFVAGYFVLDSKSASAFPLPNPERIMNPGRLGLIASPEGAGRYMVAELQPVAGGEQADLLCFSSQSGQWDRKTVAYPLPSRPLTDNGVVSHSGRLWWVDLSWGLITCDPFADAPVLSFVPLPPRKALKYGVDCAVLDKYRRVAVSRGKLRFVDMYKNRSSFGSGTDQRVDARRSGLHRVDAGV

SEQ ID NO: 12496 - protein, 164 aa, Triticum aestivum
  peptide (1)..(164): Ceres Seq. ID no. 12615225
  misc_feature (50)..(160): NCBI GI NO: 28574875 NR Description: CG13731-PA [Drosophila melanogaster]
VKKPNRRRQHHHVRVQGIQSRDGVRVAVVGHPGPRGQGVGRRRRSSSGRRPLPRAAAAAARRAPHHPPAHLPGPNHLRQLPLRPRRRPLRPPPPPRLPGPRRGPRHRRPPRPPGGLLAPIRRGLLRPRLQIRLGLPAPQPRAHHEPGPPRPHRLPRGRRPLHGR

SEQ ID NO: 12497 - protein, 158 aa, Triticum aestivum
  peptide (1)..(158): Ceres Seq. ID no. 12615226
  misc_feature (1)..(131): NCBI GI NO: 34904558 NR Description: B1008C01.10
  misc_feature (1)..(129): NCBI GI NO: 34904588 NR Description: B1008C01.27
  misc_feature (1)..(140): NCBI GI NO: 34904504 NR Description: OSJNBa0010K01.14
  misc_feature (1)..(128): NCBI GI NO: 34904496 NR Description: OSJNBa0010K01.9
  misc_feature (1)..(131): NCBI GI NO: 34904568 NR Description: B1008C01.16
  misc_feature (1)..(131): NCBI GI NO: 34904586 NR Description: B1008C01.26
  misc_feature (1)..(157): NCBI GI NO: 34904594 NR Description: B1008C01.30
  misc_feature (1)..(129): NCBI GI NO: 34904566 NR Description: B1008C01.15
  misc_feature (1)..(157): NCBI GI NO: 34904596 NR Description: OSJNBa0004G10.9
  misc_feature (1)..(42): NCBI GI NO: 34904596 NR Description: OSJNBa0004G10.9
MNPGRLGLIASPEGAGRYMVAELQPVAGGEQADLLCFSSQSGQWDRKTVAYPLPSRPLTDNGVVSHSGRLWWVDLSWGLITCDPFADAPVLSFVPLPPRKALKYGVDCAVLDKYRRVAVSRGKLRFVDMYKNRSSFGSGTDQRVDARRSGLHRVDAGV

SEQ ID NO: 12498 - DNA, 1258 bp, Triticum aestivum
  misc_feature (1)..(1258): Ceres Seq. ID no. 13598249
ctctctggacgagggagaatcttgtactagtcccactcccccctcccgtcgccgtcgccgccggcccaaaccaaaccctagccgcctgcccgccggcgggcgccaggccatggaccgcaagcgcatcaacgacgcgctcgacaggcacctgcgggcggccacggagcggtcgtcgccctccacctcccgcggcgccaagcccaagccgccccccgccgccgcccccaaacccaaagagcagctggattcggacagcagcgaggggggcagcgtcggcgggtcctcggaggcggacgacaccttctggatcaactggttctgcgccatgaggggcaacgagttcttcgccgaggtggatgatgactacatccaggacgacttcaatctctgcggcctcagcgcccaggtcccctactacgaccacgcccttgatctcatcctcgacctcgagcccgtccagggggatgtgtttgccgatgaccagaatgagctgatagtggcgtccgcggagatgctttacgggttgatccacgcccggtacatcttgaccaccaagggcttggctgccatgctggagaagttcaagaactgcgactttggaaggtgcccccgcgtgtcctgctctggtcagccctgtcttccaatgggccagtccgatatccctaggtccagtaccgtcaagatatattgtcccaaatgcgaagatctctactacccaagatccaagcaccaagccaatacagacggcgcatactttgggacgacgtttcctcatattttcatgatgacccactcacaattgaagccacagaagccagcgcagcaatacgttccccggatattcggcttcaaagtccacaagaaaacatgacggtatcgtggtggcgtactgccttgggcttgtttcgcctagtatgtcaccaggaacgatgaggacccgcactatagctgggcatggaaaaatgctttggccggttcaagacgacaaggcaccgaacaactatggcacattctttctctgtatgaagacctgctcttgggaaaagaaatctcgaggaggtctgatcaagctgtcagatccatgtcatgttgggtatttggatgatcccggtgagacggcaatgggtttgtgcctctgctctgttttgattttgaatgttcgtccaaacagggcatatgttgctggatctgttgtgtatcctaatgtatttcgctcttcattctgtggtgccgagaaatcggacggctgagactgctg

SEQ ID NO: 12499 - protein, 289 aa, Triticum aestivum
  peptide (1)..(289): Ceres Seq. ID no. 13598250
  misc_feature (98)..(276): Pfam Name: Pfam Description:  Casein kinase II regulatory subunit
  misc_feature (32)..(289): NCBI GI NO: 37536920 NR Description: putative casein kinase II beta subunit
  misc_feature (32)..(288): NCBI GI NO: 15224934 NR Description: casein kinase II beta chain, putative
  misc_feature (31)..(287): NCBI GI NO: 11527004 NR Description: protein kinase CK2 regulatory subunit CK2B3
  misc_feature (37)..(287): NCBI GI NO: 21261784 NR Description: protein kinase Ck2 regulatory subunit 2
  misc_feature (32)..(288): NCBI GI NO: 30689795 NR Description: casein kinase II beta chain, putative
  misc_feature (37)..(287): NCBI GI NO: 11527002 NR Description: protein kinase CK2 regulatory subunit CK2B2
  misc_feature (32)..(287): NCBI GI NO: 15232283 NR Description: casein kinase II beta chain, putative
  misc_feature (46)..(287): NCBI GI NO: 34901776 NR Description: OJ1058_B11.17
  misc_feature (58)..(287): NCBI GI NO: 29367573 NR Description: possible protein kinase CK2 regulatory subunit
  misc_feature (38)..(287): NCBI GI NO: 11527000 NR Description: protein kinase CK2 regulatory subunit CK2B1
SLDEGESCTSPTPPSRRRRRRPKPNPSRLPAGGRQAMDRKRINDALDRHLRAATERSSPSTSRGAKPKPPPAAAPKPKEQLDSDSSEGGSVGGSSEADDTFWINWFCAMRGNEFFAEVDDDYIQDDFNLCGLSAQVPYYDHALDLILDLEPVQGDVFADDQNELIVASAEMLYGLIHARYILTTKGLAAMLEKFKNCDFGRCPRVSCSGQPCLPMGQSDIPRSSTVKIYCPKCEDLYYPRSKHQANTDGAYFGTTFPHIFMMTHSQLKPQKPAQQYVPRIFGFKVHKKT

SEQ ID NO: 12500 - protein, 253 aa, Triticum aestivum
  peptide (1)..(253): Ceres Seq. ID no. 13598251
  misc_feature (62)..(240): Pfam Name: Pfam Description:  Casein kinase II regulatory subunit
  misc_feature (1)..(253): NCBI GI NO: 37536920 NR Description: putative casein kinase II beta subunit
  misc_feature (1)..(252): NCBI GI NO: 15224934 NR Description: casein kinase II beta chain, putative
  misc_feature (1)..(251): NCBI GI NO: 11527004 NR Description: protein kinase CK2 regulatory subunit CK2B3
  misc_feature (1)..(251): NCBI GI NO: 21261784 NR Description: protein kinase Ck2 regulatory subunit 2
  misc_feature (1)..(252): NCBI GI NO: 30689795 NR Description: casein kinase II beta chain, putative
  misc_feature (1)..(251): NCBI GI NO: 11527002 NR Description: protein kinase CK2 regulatory subunit CK2B2
  misc_feature (1)..(251): NCBI GI NO: 15232283 NR Description: casein kinase II beta chain, putative
  misc_feature (10)..(251): NCBI GI NO: 34901776 NR Description: OJ1058_B11.17
  misc_feature (22)..(251): NCBI GI NO: 29367573 NR Description: possible protein kinase CK2 regulatory subunit
  misc_feature (2)..(251): NCBI GI NO: 11527000 NR Description: protein kinase CK2 regulatory subunit CK2B1
MDRKRINDALDRHLRAATERSSPSTSRGAKPKPPPAAAPKPKEQLDSDSSEGGSVGGSSEADDTFWINWFCAMRGNEFFAEVDDDYIQDDFNLCGLSAQVPYYDHALDLILDLEPVQGDVFADDQNELIVASAEMLYGLIHARYILTTKGLAAMLEKFKNCDFGRCPRVSCSGQPCLPMGQSDIPRSSTVKIYCPKCEDLYYPRSKHQANTDGAYFGTTFPHIFMMTHSQLKPQKPAQQYVPRIFGFKVHKKT

SEQ ID NO: 12501 - protein, 181 aa, Triticum aestivum
  peptide (1)..(181): Ceres Seq. ID no. 13598252
  misc_feature (1)..(168): Pfam Name: Pfam Description:  Casein kinase II regulatory subunit
  misc_feature (1)..(181): NCBI GI NO: 37536920 NR Description: putative casein kinase II beta subunit
  misc_feature (1)..(180): NCBI GI NO: 15224934 NR Description: casein kinase II beta chain, putative
  misc_feature (1)..(179): NCBI GI NO: 11527004 NR Description: protein kinase CK2 regulatory subunit CK2B3
  misc_feature (1)..(179): NCBI GI NO: 21261784 NR Description: protein kinase Ck2 regulatory subunit 2
  misc_feature (1)..(180): NCBI GI NO: 30689795 NR Description: casein kinase II beta chain, putative
  misc_feature (1)..(179): NCBI GI NO: 11527002 NR Description: protein kinase CK2 regulatory subunit CK2B2
  misc_feature (1)..(179): NCBI GI NO: 15232283 NR Description: casein kinase II beta chain, putative
  misc_feature (1)..(179): NCBI GI NO: 34901776 NR Description: OJ1058_B11.17
  misc_feature (1)..(179): NCBI GI NO: 29367573 NR Description: possible protein kinase CK2 regulatory subunit
  misc_feature (1)..(179): NCBI GI NO: 11527000 NR Description: protein kinase CK2 regulatory subunit CK2B1
MRGNEFFAEVDDDYIQDDFNLCGLSAQVPYYDHALDLILDLEPVQGDVFADDQNELIVASAEMLYGLIHARYILTTKGLAAMLEKFKNCDFGRCPRVSCSGQPCLPMGQSDIPRSSTVKIYCPKCEDLYYPRSKHQANTDGAYFGTTFPHIFMMTHSQLKPQKPAQQYVPRIFGFKVHKKT

SEQ ID NO: 12502 - DNA, 1424 bp, Triticum aestivum
  misc_feature (1)..(1424): Ceres Seq. ID no. 12615230
ctaaaccacccctgaaaaccctcagacgaacgaaagacctagcgctcctctcccttcgtctctcgcgactggcggcggcggtcgaacgaggccacccgacggcggcagagcgagtaggtgctttccaagcttcgccagaggtgtaaacccttcgctagaggcctcagtccctttcccgcgcggcttgagcaagatgagcaagatggcgatcagggttcccaagtccatgcgcgccaagcgtgagctcctcaagcacgcgcccaagctcgttgagaatggcaagaagatgcttattcttcatggtacaaagaccagcgcagttttgaactctgtgctggcagatcttttccacctgaagcgtgatcatgctgtcaagtacaccaagaagaacgacagcatcaggccatttgagagcgggggtgaaacttccctggagttcttctcccttaaatctgactgcagcctcttagtgtatggttctcattcaaagaagaggcccaacaatcttgttctgggaaggacttacgatcaccacatatatgacctcgttgaagtgggagttgagaactacaaatccatagaatcctatgcatatgataaaaagttggcacctaaacttgggacaaagcctttctttgctttcattggggagcactttgagagtgttgaaggactgaagcatttgaaggaaatgctgcttgatcatttcaaaggagaggtggtagagaatctgaaccttgctggtgtagatcggatattcgtgtgcacagcaatttctcctactaccgtctacatgatgcactgcgctctccgtctaaaaaggtcaggcacatctattcctagaatggagctggttgaagttgggccttcagtggacctggtacttaggcggcaccgacaagcagctgaaagtttacagaaagaagctatgaaggctcctggtcatgctaagaaggtgaaaaatgtcaccaataatccagttgaaggcaagcagggcaggatctacattccagaccaggaggtctcaaaattgaccgtaacaagcaacataaagggtctgaagcgggagcgccgtgacgccaagaaaaacaaggagcactcgaagaagcaaaaggtggccgaaaaccctgagtgaccactggagaaggctagtatctgtaaccggtcagtttaaggactttcggtcgataggttcagtggtaaatagtccagtaccatcttttaaggctatcaaacctgtgtacggacttaggcatcagtatcgaggcagcctctctatcagacataagcatgaaattttggagcaacatatgctacaagtattttttttactgttgttattcgcccctgatattagccaatcagagacgactgttgtgatgacatggttaagtttggttatcatggacattatgccttttctg

SEQ ID NO: 12503 - protein, 313 aa, Triticum aestivum; identical to SEQ ID NO: 7001
  peptide (1)..(313): Ceres Seq. ID no. 12615231
  misc_feature (5)..(313): NCBI GI NO: 34914658 NR Description: P0504D03.20
  misc_feature (4)..(309): NCBI GI NO: 18403828 NR Description: expressed protein; protein id: At3g23620
  misc_feature (4)..(309): NCBI GI NO: 21554561 NR Description: unknown [Arabidopsis thaliana]
  misc_feature (9)..(307): NCBI GI NO: 39930469 NR Description: brix domain containing 1 [Homo sapiens]
  misc_feature (6)..(311): NCBI GI NO: 7670547 NR Description: unnamed protein product [Mus musculus]
  misc_feature (9)..(311): NCBI GI NO: 18203123 NR Description: Brix domain containing protein 1
  misc_feature (9)..(311): NCBI GI NO: 31982662 NR Description: RIKEN cDNA 2810470K21 [Mus musculus]
  misc_feature (9)..(307): NCBI GI NO: 27705690 NR Description: similar to RIKEN cDNA 2810470K21 gene
  misc_feature (9)..(311): NCBI GI NO: 12850727 NR Description: unnamed protein product [Mus musculus]
  misc_feature (9)..(307): NCBI GI NO: 28461332 NR Description: Similar to RIKEN cDNA 2810470K21 gene

SEQ ID NO: 12504 - protein, 310 aa, Triticum aestivum; identical to SEQ ID NO: 7002
  peptide (1)..(310): Ceres Seq. ID no. 12615232
  misc_feature (2)..(310): NCBI GI NO: 34914658 NR Description: P0504D03.20
  misc_feature (1)..(306): NCBI GI NO: 18403828 NR Description: expressed protein; protein id: At3g23620
  misc_feature (1)..(306): NCBI GI NO: 21554561 NR Description: unknown [Arabidopsis thaliana]
  misc_feature (6)..(304): NCBI GI NO: 39930469 NR Description: brix domain containing 1 [Homo sapiens]
  misc_feature (3)..(308): NCBI GI NO: 7670547 NR Description: unnamed protein product [Mus musculus]
  misc_feature (6)..(308): NCBI GI NO: 18203123 NR Description: Brix domain containing protein 1
  misc_feature (6)..(308): NCBI GI NO: 31982662 NR Description: RIKEN cDNA 2810470K21 [Mus musculus]
  misc_feature (6)..(304): NCBI GI NO: 27705690 NR Description: similar to RIKEN cDNA 2810470K21 gene
  misc_feature (6)..(308): NCBI GI NO: 12850727 NR Description: unnamed protein product [Mus musculus]
  misc_feature (6)..(304): NCBI GI NO: 28461332 NR Description: Similar to RIKEN cDNA 2810470K21 gene

SEQ ID NO: 12505 - protein, 302 aa, Triticum aestivum; identical to SEQ ID NO: 7003
  peptide (1)..(302): Ceres Seq. ID no. 12615233
  misc_feature (1)..(302): NCBI GI NO: 34914658 NR Description: P0504D03.20
  misc_feature (1)..(298): NCBI GI NO: 18403828 NR Description: expressed protein; protein id: At3g23620
  misc_feature (1)..(298): NCBI GI NO: 21554561 NR Description: unknown [Arabidopsis thaliana]
  misc_feature (1)..(296): NCBI GI NO: 39930469 NR Description: brix domain containing 1 [Homo sapiens]
  misc_feature (1)..(300): NCBI GI NO: 7670547 NR Description: unnamed protein product [Mus musculus]
  misc_feature (1)..(300): NCBI GI NO: 18203123 NR Description: Brix domain containing protein 1
  misc_feature (1)..(300): NCBI GI NO: 31982662 NR Description: RIKEN cDNA 2810470K21 [Mus musculus]
  misc_feature (1)..(296): NCBI GI NO: 27705690 NR Description: similar to RIKEN cDNA 2810470K21 gene
  misc_feature (1)..(300): NCBI GI NO: 12850727 NR Description: unnamed protein product [Mus musculus]
  misc_feature (1)..(296): NCBI GI NO: 28461332 NR Description: Similar to RIKEN cDNA 2810470K21 gene

SEQ ID NO: 12506 - DNA, 1051 bp, Triticum aestivum
  misc_feature (1)..(1051): Ceres Seq. ID no. 12615311
  misc_feature (488)..(488): n is a, c, t, g, unknown, or other
  misc_feature (557)..(557): n is a, c, t, g, unknown, or other
agtaaagcagtaagcaattccactcccgccgccacctccctctactccggcgctcccgcggctgctccggcctcttctgcatgttcaacacccacgaggaccaggccggctgcgacgaggtgatggtggaggtggaggtccgggcggcgcagaacgtgctggaggcgtgcgcgcagacggtgaccatggagcgggtggtcttcacctcctccgtcaccgccgtcgtctggaaggacgacgaccacaagcccgtcgacgccttcgacgagcggaactggagcgacctcaacctctgcaggaagcgcaagttgtggcatgcgctggccaagacgctgtcggagaagacggcctgggccttggccatggacagaggggtggacatggtggccatcaacgccggcctgctcaccgggccggggctctcctccgcccacccctgcctcaagggggtccccgagatgtacgagcacggcgtcctcgtcaccgtngacgccgacttcctcgccgacgcccacgtggccgcctacgagtgccccacggccttcggccgctacctntgcttcaacaacgtcgtgtgccggcccgaggacgccctccagttcgcccagatgctcaccccgtccgctccatgctacccgccgagtgatgagctgaaggtgatcccccaaaggattcagaacaagaagctgaacaacctgatggtggagtttgccagtgccatatacggggacttggattagagaatcactagttcattgatttacatctcaagggcagctagggttgtattctttatgtacctaaatatctgtattctttttcctcctgaaaagggaaatatggttggtcagatgtacaaatttgtacaaggccaagcatgccgcatgtattccaccacttttaccaggatggtaggagcatttgagccagtgcttagcaatgtagtagtaatccttaggtccaacaaaagggaaaataagtccacagttatgttactactgccttgtacagcagcattatatgaatatgatgaacaaatgttgaaagcttc

SEQ ID NO: 12507 - protein, 219 aa, Triticum aestivum
  peptide (1)..(219): Ceres Seq. ID no. 12615312
  misc_feature (1)..(219): NCBI GI NO: 37537132 NR Description: putative cinnamoyl-CoA reductase
  misc_feature (1)..(207): NCBI GI NO: 25412171 NR Description: probable cinnamoyl CoA reductase
  misc_feature (1)..(207): NCBI GI NO: 18400407 NR Description: putative cinnamoyl CoA reductase
  misc_feature (1)..(207): NCBI GI NO: 21553382 NR Description: putative cinnamoyl CoA reductase
  misc_feature (1)..(213): NCBI GI NO: 15234751 NR Description: cinnamoyl-CoA reductase - like protein
  misc_feature (1)..(213): NCBI GI NO: 21553548 NR Description: cinnamoyl-CoA reductase-like protein
  misc_feature (1)..(178): NCBI GI NO: 34911590 NR Description: putative cinnamoyl CoA reductase
  misc_feature (1)..(210): NCBI GI NO: 9964087 NR Description: cinnamoyl CoA reductase [Lolium perenne]
  misc_feature (1)..(167): NCBI GI NO: 15241467 NR Description: cinnamoyl CoA reductase - like protein
  misc_feature (1)..(167): NCBI GI NO: 21553833 NR Description: cinnamoyl CoA reductase-like protein
  misc_feature (136)..(136): Xaa is any aa, unknown or other
  misc_feature (159)..(159): Xaa is any aa, unknown or other
MFNTHEDQAGCDEVMVEVEVRAAQNVLEACAQTVTMERVVFTSSVTAVVWKDDDHKPVDAFDERNWSDLNLCRKRKLWHALAKTLSEKTAWALAMDRGVDMVAINAGLLTGPGLSSAHPCLKGVPEMYEHGVLVTXDADFLADAHVAAYECPTAFGRYXCFNNVVCRPEDALQFAQMLTPSAPCYPPSDELKVIPQRIQNKKLNNLMVEFASAIYGDLD

SEQ ID NO: 12508 - protein, 205 aa, Triticum aestivum
  peptide (1)..(205): Ceres Seq. ID no. 12615313
  misc_feature (1)..(205): NCBI GI NO: 37537132 NR Description: putative cinnamoyl-CoA reductase
  misc_feature (1)..(193): NCBI GI NO: 25412171 NR Description: probable cinnamoyl CoA reductase
  misc_feature (1)..(193): NCBI GI NO: 18400407 NR Description: putative cinnamoyl CoA reductase
  misc_feature (1)..(193): NCBI GI NO: 21553382 NR Description: putative cinnamoyl CoA reductase
  misc_feature (1)..(199): NCBI GI NO: 15234751 NR Description: cinnamoyl-CoA reductase - like protein
  misc_feature (1)..(199): NCBI GI NO: 21553548 NR Description: cinnamoyl-CoA reductase-like protein
  misc_feature (1)..(164): NCBI GI NO: 34911590 NR Description: putative cinnamoyl CoA reductase
  misc_feature (1)..(196): NCBI GI NO: 9964087 NR Description: cinnamoyl CoA reductase [Lolium perenne]
  misc_feature (1)..(153): NCBI GI NO: 15241467 NR Description: cinnamoyl CoA reductase - like protein
  misc_feature (1)..(153): NCBI GI NO: 21553833 NR Description: cinnamoyl CoA reductase-like protein
  misc_feature (122)..(122): Xaa is any aa, unknown or other
  misc_feature (145)..(145): Xaa is any aa, unknown or other
MVEVEVRAAQNVLEACAQTVTMERVVFTSSVTAVVWKDDDHKPVDAFDERNWSDLNLCRKRKLWHALAKTLSEKTAWALAMDRGVDMVAINAGLLTGPGLSSAHPCLKGVPEMYEHGVLVTXDADFLADAHVAAYECPTAFGRYXCFNNVVCRPEDALQFAQMLTPSAPCYPPSDELKVIPQRIQNKKLNNLMVEFASAIYGDLD

SEQ ID NO: 12509 - protein, 184 aa, Triticum aestivum
  peptide (1)..(184): Ceres Seq. ID no. 12615314
  misc_feature (1)..(184): NCBI GI NO: 37537132 NR Description: putative cinnamoyl-CoA reductase
  misc_feature (1)..(172): NCBI GI NO: 25412171 NR Description: probable cinnamoyl CoA reductase
  misc_feature (1)..(172): NCBI GI NO: 18400407 NR Description: putative cinnamoyl CoA reductase
  misc_feature (1)..(172): NCBI GI NO: 21553382 NR Description: putative cinnamoyl CoA reductase
  misc_feature (1)..(178): NCBI GI NO: 15234751 NR Description: cinnamoyl-CoA reductase - like protein
  misc_feature (1)..(178): NCBI GI NO: 21553548 NR Description: cinnamoyl-CoA reductase-like protein
  misc_feature (1)..(143): NCBI GI NO: 34911590 NR Description: putative cinnamoyl CoA reductase
  misc_feature (1)..(175): NCBI GI NO: 9964087 NR Description: cinnamoyl CoA reductase [Lolium perenne]
  misc_feature (1)..(132): NCBI GI NO: 15241467 NR Description: cinnamoyl CoA reductase - like protein
  misc_feature (1)..(132): NCBI GI NO: 21553833 NR Description: cinnamoyl CoA reductase-like protein
  misc_feature (101)..(101): Xaa is any aa, unknown or other
  misc_feature (124)..(124): Xaa is any aa, unknown or other
MERVVFTSSVTAVVWKDDDHKPVDAFDERNWSDLNLCRKRKLWHALAKTLSEKTAWALAMDRGVDMVAINAGLLTGPGLSSAHPCLKGVPEMYEHGVLVTXDADFLADAHVAAYECPTAFGRYXCFNNVVCRPEDALQFAQMLTPSAPCYPPSDELKVIPQRIQNKKLNNLMVEFASAIYGDLD

SEQ ID NO: 12510 - DNA, 1328 bp, Triticum aestivum
  misc_feature (1)..(1328): Ceres Seq. ID no. 13596902
cctaatcgaaaagtcgccgctaaccactgcttcctctgctccgcacccaaatctcagatcgagccccgcaagtcaaccgccgatggccgcctccaccggcagccgccgcttcaagatcttcgcggccgccgacggcttcggggagccgctcaaggacgccgtcgtcgcgcacctccgcgcccactcctccgtcgccgacgtcgtcgacctcggcgtcgacaagtactactccgcggccgccgccgtcgcccgcagcgtctcctcctcggtccccgaccccgcgctcgagccccgcggcgtcgtcgtctgcggcaccggcgccggcgtcaccatcttcgccaacaagtaccccggcgtgtacgccacccactgcagctccgccgccgacgccgtcaacacccgctccatcaacgcctgcaacgtcctcgccctctccggcatggccaccccgccggaggccgccgcggtcatcgccgacgcctggctcgccacccccttccgcgccccctgccccgcgtccggcgacgccccttggccggaggacattcagaagttctttgacgttgcccccggcgagatggcctccatccccgagggattggcggcccctcctgcgccggactccgcctgcgccatctgctgcctgaggaaggggatggagttcgagccggtggacatcatgcccggcggcgagatgcggattgtgcgggagagccccacttcggcctacgtgcggttcaaagctggaagcgtggagccggcccaccaccacaccttcggccacgacctggtggtgatcaagggcaagaagaaggtgtggaacttgaccaagaaggagagctatggcctcgtcgacggggacttcctgttcacgcctgctggggacgtgcaccgtgtcaagtacttggaggacacggagttcttcatccgctgggatgggcactgggacatattcctcgatgaagacctcgagaccgcacgcaatgccatcgatgcagagctcggtgtgatcgacagtgacaagtgaggagggcatggtgatgcgcctggatgagttatcttgaggagacatgtgaaggtgctatctcgttgttccaccttttctccatgttcacttctacaatgtttgttgcttgtgctgtgcctatactggtgctggtgacatgttttcaaatatgtatgttgctggacgatttgccatgcttgtcgaataaagtggtgataatggtagtaatgctaccttgttatggttgcacaaaaaaaaaaaaaaaaaagcttatcgataccgtcgactgtttaaacacaataaagttggaacgggagggggg

SEQ ID NO: 12511 - protein, 341 aa, Triticum aestivum
  peptide (1)..(341): Ceres Seq. ID no. 13596903
  misc_feature (99)..(176): Pfam Name: Pfam Description:  Ribose/Galactose Isomerase
  misc_feature (28)..(335): NCBI GI NO: 34913680 NR Description: putative DNA-damage-repair/toleration proteinDRT102
  misc_feature (29)..(333): NCBI GI NO: 18397039 NR Description: DNA-damage-repair/toleration protein DRT102
  misc_feature (111)..(333): NCBI GI NO: 1169199 NR Description: DNA-damage-repair/toleration protein DRT102
LIEKSPLTTASSAPHPNLRSSPASQPPMAASTGSRRFKIFAAADGFGEPLKDAVVAHLRAHSSVADVVDLGVDKYYSAAAAVARSVSSSVPDPALEPRGVVVCGTGAGVTIFANKYPGVYATHCSSAADAVNTRSINACNVLALSGMATPPEAAAVIADAWLATPFRAPCPASGDAPWPEDIQKFFDVAPGEMASIPEGLAAPPAPDSACAICCLRKGMEFEPVDIMPGGEMRIVRESPTSAYVRFKAGSVEPAHHHTFGHDLVVIKGKKKVWNLTKKESYGLVDGDFLFTPAGDVHRVKYLEDTEFFIRWDGHWDIFLDEDLETARNAIDAELGVIDSDK

SEQ ID NO: 12512 - protein, 314 aa, Triticum aestivum
  peptide (1)..(314): Ceres Seq. ID no. 13596904
  misc_feature (72)..(149): Pfam Name: Pfam Description:  Ribose/Galactose Isomerase
  misc_feature (1)..(308): NCBI GI NO: 34913680 NR Description: putative DNA-damage-repair/toleration proteinDRT102
  misc_feature (2)..(306): NCBI GI NO: 18397039 NR Description: DNA-damage-repair/toleration protein DRT102
  misc_feature (84)..(306): NCBI GI NO: 1169199 NR Description: DNA-damage-repair/toleration protein DRT102
MAASTGSRRFKIFAAADGFGEPLKDAVVAHLRAHSSVADVVDLGVDKYYSAAAAVARSVSSSVPDPALEPRGVVVCGTGAGVTIFANKYPGVYATHCSSAADAVNTRSINACNVLALSGMATPPEAAAVIADAWLATPFRAPCPASGDAPWPEDIQKFFDVAPGEMASIPEGLAAPPAPDSACAICCLRKGMEFEPVDIMPGGEMRIVRESPTSAYVRFKAGSVEPAHHHTFGHDLVVIKGKKKVWNLTKKESYGLVDGDFLFTPAGDVHRVKYLEDTEFFIRWDGHWDIFLDEDLETARNAIDAELGVIDSDK

SEQ ID NO: 12513 - protein, 195 aa, Triticum aestivum
  peptide (1)..(195): Ceres Seq. ID no. 13596905
  misc_feature (1)..(189): NCBI GI NO: 34913680 NR Description: putative DNA-damage-repair/toleration proteinDRT102
  misc_feature (1)..(187): NCBI GI NO: 18397039 NR Description: DNA-damage-repair/toleration protein DRT102
  misc_feature (1)..(187): NCBI GI NO: 1169199 NR Description: DNA-damage-repair/toleration protein DRT102
MATPPEAAAVIADAWLATPFRAPCPASGDAPWPEDIQKFFDVAPGEMASIPEGLAAPPAPDSACAICCLRKGMEFEPVDIMPGGEMRIVRESPTSAYVRFKAGSVEPAHHHTFGHDLVVIKGKKKVWNLTKKESYGLVDGDFLFTPAGDVHRVKYLEDTEFFIRWDGHWDIFLDEDLETARNAIDAELGVIDSDK

SEQ ID NO: 12514 - DNA, 1742 bp, Triticum aestivum
  misc_feature (1)..(1742): Ceres Seq. ID no. 14303604
accgagccctccgccccgccccgcgcccgacccgaaaccccagccgatcggcggcggccggccggcggagatgtcgctgacggaggtcaggatcggcgaggaggtgtggctcacctgcctctcccacgccctcaccaccgagaccgaggaggtcatgggcctcctcctcggcgacgtcgtgtcctccagcaagggcggctccacggcggtgatatggggcgcgtcgccgcagatgaggtgcgagcggaagaaggaccgcgtcgaggtcaaccccgagctgctcgccgccgcgtcggcgcaggccgaggtaatgacggccaccatcgggaagacgacccgggtgatcggctggtaccactcgcacccgcatatcaccgtcctgccttcccatgtagatgtgcgtacccaggctatgtttcagttgctagatccaggctttgttgggctgatattttcctgttttagtgaagatgctcaaaaggttgggaaaatccaagtgattgccttccagtcacttgatgggacacagaacacacagcgtgctattgttcctgttattaccaatcctgtcattaaccttgaaccatcttggagttcatccgatagctcattagcattgattgagggcattgaacaggacactggagattctagagcttcaaacggaagcaaggtctggggaagatctcaggatatggatctatatccttctttggacacaaatcattcggcaagacatctaccaatagaaaacgctattgttcctttcgaaccggaaaacagtgctgggccctctattgatcaagatggttcagatctgtccccaagcatacaggaggctttgcaccggtcaaccatggacataagtggtgcagagtataaaaggaaggaggtgccacttaaagtattccctacaaggcatctgctaaagctggacactacgttgagttcgtactgtgatatgcagcgtgtcctttttgaagaggaacaatcagcatataaccaagccatgcttcagaatatttgtgatgggaagatgcacccacttacatctatgcaccatacctccacatataatgcttctctatgcaaactgatggaatactgcttgagccctgctataactgtgcttcaggaccgtgtgaaagaaaacgaacttcggttagctatgctagtggaggaggctaaacaactggaggccgagcagagcacgaaaactggctctcctcgccgtgcgatgcccggagggactaccagtggcatcacttcgccaaggggccaggacaagtacccttccggcagacaagggggccctataagccctagcagcagcggccggaggaaggctccttgactcggaccttgctcgccattatgtcatgatggatagtccgattctgggccctgcctgatgctttctggaaccccaaacctgtcccttggcgcgaggggtgaagtcgcaatgcaaatgtacatacccatctcctttcagtgcctggcccgccgtccttctgtggaagtaaccaaccaacagtggttcccttttgctttgtgttgtccttgcgccaaatccttttgcctggttgcgctgagcttgtaatgtgtactcactgacgcgacgagtctcggggcagtggttgcgctgagcttgtaatgtgtactcactggcgcgacgagtctcgggcaggctttctagttggaagaaactcttgtaccaatcctgttgtcgaaatgttcagggg

SEQ ID NO: 12515 - protein, 450 aa, Triticum aestivum
  peptide (1)..(450): Ceres Seq. ID no. 14303605
  misc_feature (24)..(145): Pfam Name: Pfam Description:  Mov34/MPN/PAD-1 family
  misc_feature (24)..(419): NCBI GI NO: 20147355 NR Description: At1g80210/F18B13_28 [Arabidopsis thaliana]
  misc_feature (24)..(426): NCBI GI NO: 19715647 NR Description: AT3g06820/F3E22_4 [Arabidopsis thaliana]
  misc_feature (31)..(426): NCBI GI NO: 30680023 NR Description: expressed protein [Arabidopsis thaliana]
  misc_feature (31)..(341): NCBI GI NO: 7549631 NR Description: unknown protein [Arabidopsis thaliana]
  misc_feature (370)..(426): NCBI GI NO: 7549631 NR Description: unknown protein [Arabidopsis thaliana]
  misc_feature (133)..(340): NCBI GI NO: 25406643 NR Description: hypothetical protein F18B13.28
  misc_feature (370)..(419): NCBI GI NO: 25406643 NR Description: hypothetical protein F18B13.28
  misc_feature (31)..(66): NCBI GI NO: 25406643 NR Description: hypothetical protein F18B13.28
  misc_feature (31)..(340): NCBI GI NO: 15220090 NR Description: hypothetical protein [Arabidopsis thaliana]
  misc_feature (370)..(419): NCBI GI NO: 15220090 NR Description: hypothetical protein [Arabidopsis thaliana]
PSPPPRPAPDPKPQPIGGGRPAEMSLTEVRIGEEVWLTCLSHALTTETEEVMGLLLGDVVSSSKGGSTAVIWGASPQMRCERKKDRVEVNPELLAAASAQAEVMTATIGKTTRVIGWYHSHPHITVLPSHVDVRTQAMFQLLDPGFVGLIFSCFSEDAQKVGKIQVIAFQSLDGTQNTQRAIVPVITNPVINLEPSWSSSDSSLALIEGIEQDTGDSRASNGSKVWGRSQDMDLYPSLDTNHSARHLPIENAIVPFEPENSAGPSIDQDGSDLSPSIQEALHRSTMDISGAEYKRKEVPLKVFPTRHLLKLDTTLSSYCDMQRVLFEEEQSAYNQAMLQNICDGKMHPLTSMHHTSTYNASLCKLMEYCLSPAITVLQDRVKENELRLAMLVEEAKQLEAEQSTKTGSPRRAMPGGTTSGITSPRGQDKYPSGRQGGPISPSSSGRRKAP

SEQ ID NO: 12516 - protein, 427 aa, Triticum aestivum
  peptide (1)..(427): Ceres Seq. ID no. 14303606
  misc_feature (1)..(122): Pfam Name: Pfam Description:  Mov34/MPN/PAD-1 family
  misc_feature (1)..(396): NCBI GI NO: 20147355 NR Description: At1g80210/F18B13_28 [Arabidopsis thaliana]
  misc_feature (1)..(403): NCBI GI NO: 19715647 NR Description: AT3g06820/F3E22_4 [Arabidopsis thaliana]
  misc_feature (8)..(403): NCBI GI NO: 30680023 NR Description: expressed protein [Arabidopsis thaliana]
  misc_feature (8)..(318): NCBI GI NO: 7549631 NR Description: unknown protein [Arabidopsis thaliana]
  misc_feature (347)..(403): NCBI GI NO: 7549631 NR Description: unknown protein [Arabidopsis thaliana]
  misc_feature (110)..(317): NCBI GI NO: 25406643 NR Description: hypothetical protein F18B13.28
  misc_feature (347)..(396): NCBI GI NO: 25406643 NR Description: hypothetical protein F18B13.28
  misc_feature (8)..(43): NCBI GI NO: 25406643 NR Description: hypothetical protein F18B13.28
  misc_feature (8)..(317): NCBI GI NO: 15220090 NR Description: hypothetical protein [Arabidopsis thaliana]
  misc_feature (347)..(396): NCBI GI NO: 15220090 NR Description: hypothetical protein [Arabidopsis thaliana]
MSLTEVRIGEEVWLTCLSHALTTETEEVMGLLLGDVVSSSKGGSTAVIWGASPQMRCERKKDRVEVNPELLAAASAQAEVMTATIGKTTRVIGWYHSHPHITVLPSHVDVRTQAMFQLLDPGFVGLIFSCFSEDAQKVGKIQVIAFQSLDGTQNTQRAIVPVITNPVINLEPSWSSSDSSLALIEGIEQDTGDSRASNGSKVWGRSQDMDLYPSLDTNHSARHLPIENAIVPFEPENSAGPSIDQDGSDLSPSIQEALHRSTMDISGAEYKRKEVPLKVFPTRHLLKLDTTLSSYCDMQRVLFEEEQSAYNQAMLQNICDGKMHPLTSMHHTSTYNASLCKLMEYCLSPAITVLQDRVKENELRLAMLVEEAKQLEAEQSTKTGSPRRAMPGGTTSGITSPRGQDKYPSGRQGGPISPSSSGRRKAP

SEQ ID NO: 12517 - protein, 399 aa, Triticum aestivum
  peptide (1)..(399): Ceres Seq. ID no. 14303607
  misc_feature (1)..(94): Pfam Name: Pfam Description:  Mov34/MPN/PAD-1 family
  misc_feature (1)..(368): NCBI GI NO: 20147355 NR Description: At1g80210/F18B13_28 [Arabidopsis thaliana]
  misc_feature (1)..(375): NCBI GI NO: 19715647 NR Description: AT3g06820/F3E22_4 [Arabidopsis thaliana]
  misc_feature (1)..(375): NCBI GI NO: 30680023 NR Description: expressed protein [Arabidopsis thaliana]
  misc_feature (1)..(290): NCBI GI NO: 7549631 NR Description: unknown protein [Arabidopsis thaliana]
  misc_feature (319)..(375): NCBI GI NO: 7549631 NR Description: unknown protein [Arabidopsis thaliana]
  misc_feature (82)..(289): NCBI GI NO: 25406643 NR Description: hypothetical protein F18B13.28
  misc_feature (319)..(368): NCBI GI NO: 25406643 NR Description: hypothetical protein F18B13.28
  misc_feature (1)..(15): NCBI GI NO: 25406643 NR Description: hypothetical protein F18B13.28
  misc_feature (1)..(289): NCBI GI NO: 15220090 NR Description: hypothetical protein [Arabidopsis thaliana]
  misc_feature (319)..(368): NCBI GI NO: 15220090 NR Description: hypothetical protein [Arabidopsis thaliana]
MGLLLGDVVSSSKGGSTAVIWGASPQMRCERKKDRVEVNPELLAAASAQAEVMTATIGKTTRVIGWYHSHPHITVLPSHVDVRTQAMFQLLDPGFVGLIFSCFSEDAQKVGKIQVIAFQSLDGTQNTQRAIVPVITNPVINLEPSWSSSDSSLALIEGIEQDTGDSRASNGSKVWGRSQDMDLYPSLDTNHSARHLPIENAIVPFEPENSAGPSIDQDGSDLSPSIQEALHRSTMDISGAEYKRKEVPLKVFPTRHLLKLDTTLSSYCDMQRVLFEEEQSAYNQAMLQNICDGKMHPLTSMHHTSTYNASLCKLMEYCLSPAITVLQDRVKENELRLAMLVEEAKQLEAEQSTKTGSPRRAMPGGTTSGITSPRGQDKYPSGRQGGPISPSSSGRRKAP

SEQ ID NO: 12518 - DNA, 1485 bp, Triticum aestivum
  misc_feature (1)..(1485): Ceres Seq. ID no. 12615948
attcgccccccaaaccaaaaccaaatccctcgccaaaatccccaatccccggccatggcgacgagcccgcctccgccgctccgctcccgccggacgctggagctgccagacgacgtcatggaggagatcttcctccgcctaccggcggacaaccccgccagcctcgcccgcgtcgccggcggctgcaagagctggctggccatggtctcggaccccaacttcgcccccgcctaccgcaggctccgcgacgcgccgcccatgctgggcttcctctacaactaccgctacaccgacgagggagcgccctactggacgtcccacttccgcgccgccgcggccctccccccgcgggtgcgccgcgaccgcaagcactggcgcgctctcgactcccgccacggcctcgtcctcttcgacacccctgagagtgacggccacctcgtcgtctccgacctcgtcaccggcgagcactggaaaatcgacggccacatcacgttcccggatgcgtgtaatgctacagtgctctgcgccagggacggatgtgaccaccgtgattgccatggcggccctttcctcgtggcctgcgtggactccgtcgtggcaggggaccggaggataacctgcgccatgttctactcatcagttactggcaagtggatcgacccgatcttcgtcgagcaacccaatgtcatcgatgccagggggcacagtgctgtgctgggaaataaggtctatgtcccctgtgtgaaggatggcagtgtcgtggagtacaacacgcgtgagaacaagctatctgtgatcaaggcgccatttgaggtccaggaccagaagattgagctcatgggggtggaggacggaatgctgctgtttgcgtctgtggtgaagcctagactctacctatggtcaatggaggctggtcccagaggagctgcgggacgggcacaaagcaggttcatcgagctcgggccgttgctccctcgtcctgtcctcgtggacaacaccgaagtgtcggcggttggttttgcggaaggtgttggtgtcatcttcatcaagacaaaagttgggttgtacacaattcatctcaaatcaaaacaaagcaaccaggtgcaccgagggtacatcaataaggtcatgccctacatgagcttctacactggagcatgggagcctttgccagcatctgatgaaacttaacgcgcagttgttgatgctacaatgatataaccaaatggcgccaggacttgggtttactttttctgcccaggaagaatttgaagtgaacttgagcctcattcactgccggttgtgttgaacagtttggttagagtggatgcgcttttgtcctatttgtgcttgtgccataaacttgagtttgtttgttcgtccgagttgggtgcggctcaaactgtccgtcaggagaaattttagcgatcagttgacggttttgtggcaaaaaaaaaaaaaaaaaaaaaaagaaaaaaaaaaaaa

SEQ ID NO: 12519 - protein, 396 aa, Triticum aestivum
  peptide (1)..(396): Ceres Seq. ID no. 12615949
  misc_feature (35)..(384): NCBI GI NO: 34395380 NR Description: unknown protein
  misc_feature (22)..(384): NCBI GI NO: 35215058 NR Description: hypothetical protein
  misc_feature (34)..(384): NCBI GI NO: 34915420 NR Description: contains EST C98814
  misc_feature (34)..(394): NCBI GI NO: 34915424 NR Description: hypothetical protein~similar to Oryza sativachromosome1
  misc_feature (34)..(394): NCBI GI NO: 33146558 NR Description: unknown protein
  misc_feature (29)..(383): NCBI GI NO: 34914028 NR Description: OJ1014_G12.29
  misc_feature (34)..(383): NCBI GI NO: 34394503 NR Description: unknown protein
  misc_feature (157)..(383): NCBI GI NO: 34394502 NR Description: hypothetical protein
  misc_feature (34)..(142): NCBI GI NO: 34394502 NR Description: hypothetical protein
  misc_feature (34)..(290): NCBI GI NO: 34915428 NR Description: hypothetical protein~similar to Oryza sativachromosome1
IRPPNQNQIPRQNPQSPAMATSPPPPLRSRRTLELPDDVMEEIFLRLPADNPASLARVAGGCKSWLAMVSDPNFAPAYRRLRDAPPMLGFLYNYRYTDEGAPYWTSHFRAAAALPPRVRRDRKHWRALDSRHGLVLFDTPESDGHLVVSDLVTGEHWKIDGHITFPDACNATVLCARDGCDHRDCHGGPFLVACVDSVVAGDRRITCAMFYSSVTGKWIDPIFVEQPNVIDARGHSAVLGNKVYVPCVKDGSVVEYNTRENKLSVIKAPFEVQDQKIELMGVEDGMLLFASVVKPRLYLWSMEAGPRGAAGRAQSRFIELGPLLPRPVLVDNTEVSAVGFAEGVGVIFIKTKVGLYTIHLKSKQSNQVHRGYINKVMPYMSFYTGAWEPLPASDET

SEQ ID NO: 12520 - protein, 378 aa, Triticum aestivum
  peptide (1)..(378): Ceres Seq. ID no. 12615950
  misc_feature (17)..(366): NCBI GI NO: 34395380 NR Description: unknown protein
  misc_feature (4)..(366): NCBI GI NO: 35215058 NR Description: hypothetical protein
  misc_feature (16)..(366): NCBI GI NO: 34915420 NR Description: contains EST C98814
  misc_feature (16)..(376): NCBI GI NO: 34915424 NR Description: hypothetical protein~similar to Oryza sativachromosome1
  misc_feature (16)..(376): NCBI GI NO: 33146558 NR Description: unknown protein
  misc_feature (11)..(365): NCBI GI NO: 34914028 NR Description: OJ1014_G12.29
  misc_feature (16)..(365): NCBI GI NO: 34394503 NR Description: unknown protein
  misc_feature (139)..(365): NCBI GI NO: 34394502 NR Description: hypothetical protein
  misc_feature (16)..(124): NCBI GI NO: 34394502 NR Description: hypothetical protein
  misc_feature (16)..(272): NCBI GI NO: 34915428 NR Description: hypothetical protein~similar to Oryza sativachromosome1
MATSPPPPLRSRRTLELPDDVMEEIFLRLPADNPASLARVAGGCKSWLAMVSDPNFAPAYRRLRDAPPMLGFLYNYRYTDEGAPYWTSHFRAAAALPPRVRRDRKHWRALDSRHGLVLFDTPESDGHLVVSDLVTGEHWKIDGHITFPDACNATVLCARDGCDHRDCHGGPFLVACVDSVVAGDRRITCAMFYSSVTGKWIDPIFVEQPNVIDARGHSAVLGNKVYVPCVKDGSVVEYNTRENKLSVIKAPFEVQDQKIELMGVEDGMLLFASVVKPRLYLWSMEAGPRGAAGRAQSRFIELGPLLPRPVLVDNTEVSAVGFAEGVGVIFIKTKVGLYTIHLKSKQSNQVHRGYINKVMPYMSFYTGAWEPLPASDET

SEQ ID NO: 12521 - protein, 357 aa, Triticum aestivum
  peptide (1)..(357): Ceres Seq. ID no. 12615951
  misc_feature (1)..(345): NCBI GI NO: 34395380 NR Description: unknown protein
  misc_feature (1)..(345): NCBI GI NO: 35215058 NR Description: hypothetical protein
  misc_feature (1)..(345): NCBI GI NO: 34915420 NR Description: contains EST C98814
  misc_feature (1)..(355): NCBI GI NO: 34915424 NR Description: hypothetical protein~similar to Oryza sativachromosome1
  misc_feature (1)..(355): NCBI GI NO: 33146558 NR Description: unknown protein
  misc_feature (1)..(344): NCBI GI NO: 34914028 NR Description: OJ1014_G12.29
  misc_feature (1)..(344): NCBI GI NO: 34394503 NR Description: unknown protein
  misc_feature (118)..(344): NCBI GI NO: 34394502 NR Description: hypothetical protein
  misc_feature (1)..(103): NCBI GI NO: 34394502 NR Description: hypothetical protein
  misc_feature (1)..(251): NCBI GI NO: 34915428 NR Description: hypothetical protein~similar to Oryza sativachromosome1
MEEIFLRLPADNPASLARVAGGCKSWLAMVSDPNFAPAYRRLRDAPPMLGFLYNYRYTDEGAPYWTSHFRAAAALPPRVRRDRKHWRALDSRHGLVLFDTPESDGHLVVSDLVTGEHWKIDGHITFPDACNATVLCARDGCDHRDCHGGPFLVACVDSVVAGDRRITCAMFYSSVTGKWIDPIFVEQPNVIDARGHSAVLGNKVYVPCVKDGSVVEYNTRENKLSVIKAPFEVQDQKIELMGVEDGMLLFASVVKPRLYLWSMEAGPRGAAGRAQSRFIELGPLLPRPVLVDNTEVSAVGFAEGVGVIFIKTKVGLYTIHLKSKQSNQVHRGYINKVMPYMSFYTGAWEPLPASDET

SEQ ID NO: 12522 - DNA, 759 bp, Triticum aestivum
  misc_feature (1)..(759): Ceres Seq. ID no. 13654942
ccatcaagctagcagcacggcattaaactaatttgacagcgatcccgatccgtcatcacatctcacacgagacagtcgttcgatccgtccgtggagcagccatggcgcagctgatggacaaggccaaggggttcgtggccgagaagatatcgggggtgcagaagccggaggcggacctgtcggacatgtcggtgcagcacgttggccgcgacggcgccaccctgtccggccgcctcgacgtgcgcaacccctactcgcacaccatccccatctgcgagatcagctactccctcaagagcgccggccgcgacgtggcctccgggaccatgccggacccggggtcgctggtggccagcgacaccaccagcctcgacataccggtgaaggtgccgtacgacttcctgatgagcctggtgaaggacgccggcaaggactgggacctcgactacgagatgcgcgtcggcctcaccgtcgacctccccatcgtcggcaacttcacgctgccgctcaccaaggccggcgagctcaagctccccacgctctccgacctgttctaaacttaccgccgcacccagctaagtaggttcgaccgtgccgtactagctgctgcgctctccatcgcctgtacgggtgatgggtagtactgggctgggcgagcgggacgatcgatcgctgcctagctctgtttttacttcggatcgcggtgtgggtgtgcacgacgtaataatgatgtattgcgtgttgtatttctagactttt

SEQ ID NO: 12523 - protein, 151 aa, Triticum aestivum
  peptide (1)..(151): Ceres Seq. ID no. 13654943
  misc_feature (2)..(151): Pfam Name: Pfam Description:  Late embryogenesis abundant protein
  misc_feature (1)..(151): NCBI GI NO: 34904186 NR Description: putative late embryogenesis abundant protein LEA14-A
  misc_feature (1)..(151): NCBI GI NO: 1170745 NR Description: Late embryogenesis abundant protein Lea14-A
  misc_feature (1)..(151): NCBI GI NO: 1170746 NR Description: Desiccation protectant protein Lea14 homolog
  misc_feature (5)..(151): NCBI GI NO: 7595792 NR Description: late-embryogenesis abundant protein
  misc_feature (1)..(151): NCBI GI NO: 4585271 NR Description: seed maturation protein PM22
  misc_feature (1)..(150): NCBI GI NO: 34912834 NR Description: putative embryogenesis-abundant protein
  misc_feature (1)..(151): NCBI GI NO: 15223413 NR Description: expressed protein [Arabidopsis thaliana]
  misc_feature (1)..(151): NCBI GI NO: 5823249 NR Description: water stress-induced ER5 protein [Capsicum annuum]
  misc_feature (1)..(151): NCBI GI NO: 3850842 NR Description: Lea protein [Pseudotsuga menziesii]
  misc_feature (1)..(151): NCBI GI NO: 15225930 NR Description: desiccation related protein -related
MAQLMDKAKGFVAEKISGVQKPEADLSDMSVQHVGRDGATLSGRLDVRNPYSHTIPICEISYSLKSAGRDVASGTMPDPGSLVASDTTSLDIPVKVPYDFLMSLVKDAGKDWDLDYEMRVGLTVDLPIVGNFTLPLTKAGELKLPTLSDLF

SEQ ID NO: 12524 - protein, 147 aa, Triticum aestivum
  peptide (1)..(147): Ceres Seq. ID no. 13654944
  misc_feature (1)..(147): Pfam Name: Pfam Description:  Late embryogenesis abundant protein
  misc_feature (1)..(147): NCBI GI NO: 34904186 NR Description: putative late embryogenesis abundant protein LEA14-A
  misc_feature (1)..(147): NCBI GI NO: 1170745 NR Description: Late embryogenesis abundant protein Lea14-A
  misc_feature (1)..(147): NCBI GI NO: 1170746 NR Description: Desiccation protectant protein Lea14 homolog
  misc_feature (1)..(147): NCBI GI NO: 7595792 NR Description: late-embryogenesis abundant protein
  misc_feature (1)..(147): NCBI GI NO: 4585271 NR Description: seed maturation protein PM22
  misc_feature (1)..(146): NCBI GI NO: 34912834 NR Description: putative embryogenesis-abundant protein
  misc_feature (1)..(147): NCBI GI NO: 15223413 NR Description: expressed protein [Arabidopsis thaliana]
  misc_feature (1)..(147): NCBI GI NO: 5823249 NR Description: water stress-induced ER5 protein [Capsicum annuum]
  misc_feature (1)..(147): NCBI GI NO: 3850842 NR Description: Lea protein [Pseudotsuga menziesii]
  misc_feature (1)..(147): NCBI GI NO: 15225930 NR Description: desiccation related protein -related
MDKAKGFVAEKISGVQKPEADLSDMSVQHVGRDGATLSGRLDVRNPYSHTIPICEISYSLKSAGRDVASGTMPDPGSLVASDTTSLDIPVKVPYDFLMSLVKDAGKDWDLDYEMRVGLTVDLPIVGNFTLPLTKAGELKLPTLSDLF

SEQ ID NO: 12525 - protein, 123 aa, Triticum aestivum
  peptide (1)..(123): Ceres Seq. ID no. 13654945
  misc_feature (1)..(123): Pfam Name: Pfam Description:  Late embryogenesis abundant protein
  misc_feature (1)..(123): NCBI GI NO: 34904186 NR Description: putative late embryogenesis abundant protein LEA14-A
  misc_feature (1)..(123): NCBI GI NO: 1170745 NR Description: Late embryogenesis abundant protein Lea14-A
  misc_feature (1)..(123): NCBI GI NO: 1170746 NR Description: Desiccation protectant protein Lea14 homolog
  misc_feature (1)..(123): NCBI GI NO: 7595792 NR Description: late-embryogenesis abundant protein
  misc_feature (1)..(123): NCBI GI NO: 4585271 NR Description: seed maturation protein PM22
  misc_feature (1)..(122): NCBI GI NO: 34912834 NR Description: putative embryogenesis-abundant protein
  misc_feature (1)..(123): NCBI GI NO: 15223413 NR Description: expressed protein [Arabidopsis thaliana]
  misc_feature (1)..(123): NCBI GI NO: 5823249 NR Description: water stress-induced ER5 protein [Capsicum annuum]
  misc_feature (1)..(123): NCBI GI NO: 3850842 NR Description: Lea protein [Pseudotsuga menziesii]
  misc_feature (1)..(123): NCBI GI NO: 15225930 NR Description: desiccation related protein -related
MSVQHVGRDGATLSGRLDVRNPYSHTIPICEISYSLKSAGRDVASGTMPDPGSLVASDTTSLDIPVKVPYDFLMSLVKDAGKDWDLDYEMRVGLTVDLPIVGNFTLPLTKAGELKLPTLSDLF

SEQ ID NO: 12526 - DNA, 693 bp, Triticum aestivum
  misc_feature (1)..(693): Ceres Seq. ID no. 12615235
attctcgttccaatccaccactccgccgctagggtttttaggttttaatcccacagcagcggcggccgtcggcggcgacaaccaaaaccccgcgtcatctccagcgaactcgagcgagagagatgaggctcctcacgcacaacttcttggcgtcgaacgtgaagggcgtgagcacgggctacccgctcgcgctggaggtcgccaagacgtccatcaaggaggtggagctcaacgtcgacttcctccgcgggatccttcccaagatcgactggagagcgctcttcgcagccaccagcgccgcggggttcccggagctcctcgccgcggagcagccgcccgaggccgagctcttcgccgagggcgccgcggaggtcgagggcagcgctatccgccgcctccaccacgcgctcctcgagatccacgtcgaggagggcaccctcgtctgccccgacagcggccgctccttccccatcctgaagggcgtccccaatatgcttctccatgaggacgaggtgcggcactgactcgcgcgtagcaggccggttgccttgcttgcttgtttgctcgtgccacatacggttatgcacttccagggcttggactcctaagattgtgtgtatgaactatcttagtatgaattgtggatcttgaagtcgtaccttgataaatactactcctacctgtgacgttttc

SEQ ID NO: 12527 - protein, 167 aa, Triticum aestivum
  peptide (1)..(167): Ceres Seq. ID no. 12615236
  misc_feature (41)..(167): NCBI GI NO: 88462 NR Description: proline-rich phosphoprotein
FSFQSTTPPLGFLGFNPTAAAAVGGDNQNPASSPANSSERDEAPHAQLLGVEREGREHGLPARAGGRQDVHQGGGAQRRLPPRDPSQDRLESALRSHQRRGVPGAPRRGAAARGRALRRGRRGGRGQRYPPPPPRAPRDPRRGGHPRLPRQRPLLPHPEGRPQYASP

SEQ ID NO: 12528 - protein, 133 aa, Triticum aestivum
  peptide (1)..(133): Ceres Seq. ID no. 12615237
  misc_feature (1)..(133): NCBI GI NO: 22535669 NR Description: contains ESTsAU070845
  misc_feature (1)..(131): NCBI GI NO: 18395095 NR Description: Expressed protein; protein id: At1g22270
  misc_feature (1)..(131): NCBI GI NO: 25518574 NR Description: hypothetical protein T16E15
  misc_feature (1)..(131): NCBI GI NO: 15218237 NR Description: unknown protein; protein id: At1g78190.1
  misc_feature (9)..(131): NCBI GI NO: 30725332 NR Description: At1g78190 [Arabidopsis thaliana]
  misc_feature (1)..(130): NCBI GI NO: 27661288 NR Description: similar to RIKEN cDNA 0610038D11
  misc_feature (1)..(130): NCBI GI NO: 13385802 NR Description: RIKEN cDNA 0610038D11 [Mus musculus]
  misc_feature (1)..(129): NCBI GI NO: 16740612 NR Description: RIKEN cDNA 0610038D11 gene [Mus musculus]
  misc_feature (1)..(131): NCBI GI NO: 21358217 NR Description: CG12975-PA [Drosophila melanogaster]
  misc_feature (1)..(130): NCBI GI NO: 12833869 NR Description: unnamed protein product [Mus musculus]
MRLLTHNFLASNVKGVSTGYPLALEVAKTSIKEVELNVDFLRGILPKIDWRALFAATSAAGFPELLAAEQPPEAELFAEGAAEVEGSAIRRLHHALLEIHVEEGTLVCPDSGRSFPILKGVPNMLLHEDEVRH

SEQ ID NO: 12529 - DNA, 1148 bp, Triticum aestivum
  misc_feature (1)..(1148): Ceres Seq. ID no. 12615238
atcgaaacctccaccaactctgacgcacgttgattgagcgagagccacttggatcaccatgaccgccacctcgcggccacagcatcccaacgggagcctagccccggcctccgacggcggcgagtccttcgccaagttcttcgagtgctggatcttggagcagtcccgtgacctggccgcgctccgcgccgcggccacggcgcggcccgacgacgctgacctccggcgcctcgtcgatcgtgtcctcggccactacgagcactactaccgcgccaagtccgcggccgcctccgccgatgtgctccccatgttcgcgccctcgtggatctccgccaccgagagcctctacctctggtgcggcggctggcgccccacttccgcgatccagctgctctactccaagtccggcctgcagctcgaggcccagctcccggccttcctcgacggcggcagcctcggggacggtgacctgggcggcctctccgcggagcagctccaggccgccgaccagctgcagcgccgcaccatccggagggaacgggagatcgaggaggccgccgccggcgcgcaggagtcgttggcgacgacgaagatggtggagctcgccggaaagggagggatggacgcggcggaggggatggagctggagatggatgccaaggcggaggcgatgaagcgcgtgctggagatggcggacgggctgaggctggagacgctgcgcggcgtggtggggctgctccggcctgcccaggccgtgcacttcctcgtggccgccgcggagctccacctcgccgtgcacaagttcggccggcgcaaggacggcgccgcggcggcggagtgagcctgcaggctactggtggcgcgcgcaagtggttgctctgctccgcgcaacgctcgtcgtctagctagctccgagctgccttcgttttgcctggtcaacgcgaggtgtcgcgataagctttgaccgtgatccccttctgtttggtcagcatgtgcgttctgccattgtgtgaaacctgtggtaacttgtacgaagtgggctagctacttgtgtatgtataatgcacaagctcatgccatggtggtttagctacttgtatgtatgtgtaatgcattattatggaaaatggaggcgtaaaggggtggcc

SEQ ID NO: 12530 - protein, 260 aa, Triticum aestivum
  peptide (1)..(260): Ceres Seq. ID no. 12615239
  misc_feature (7)..(259): NCBI GI NO: 34896008 NR Description: ESTs AU057825
  misc_feature (22)..(258): NCBI GI NO: 688423 NR Description: tumor-related protein
  misc_feature (23)..(260): NCBI GI NO: 15231945 NR Description: hypothetical protein; protein id: At3g14880.1
  misc_feature (23)..(260): NCBI GI NO: 8777471 NR Description: tumor-related protein-like [Arabidopsis thaliana]
  misc_feature (17)..(260): NCBI GI NO: 15233979 NR Description: putative protein; protein id: At4g18690.1
  misc_feature (33)..(254): NCBI GI NO: 30694832 NR Description: tumor-related protein-like [Arabidopsis thaliana]
  misc_feature (33)..(254): NCBI GI NO: 9758930 NR Description: tumor-related protein-like [Arabidopsis thaliana]
  misc_feature (35)..(254): NCBI GI NO: 15233977 NR Description: putative protein; protein id: At4g18680.1
  misc_feature (22)..(253): NCBI GI NO: 7486277 NR Description: hypothetical protein F28A21
  misc_feature (22)..(253): NCBI GI NO: 30684489 NR Description: expressed protein [Arabidopsis thaliana]
MTATSRPQHPNGSLAPASDGGESFAKFFECWILEQSRDLAALRAAATARPDDADLRRLVDRVLGHYEHYYRAKSAAASADVLPMFAPSWISATESLYLWCGGWRPTSAIQLLYSKSGLQLEAQLPAFLDGGSLGDGDLGGLSAEQLQAADQLQRRTIRREREIEEAAAGAQESLATTKMVELAGKGGMDAAEGMELEMDAKAEAMKRVLEMADGLRLETLRGVVGLLRPAQAVHFLVAAAELHLAVHKFGRRKDGAAAAE

SEQ ID NO: 12531 - protein, 177 aa, Triticum aestivum
  peptide (1)..(177): Ceres Seq. ID no. 12615240
  misc_feature (1)..(176): NCBI GI NO: 34896008 NR Description: ESTs AU057825
  misc_feature (1)..(175): NCBI GI NO: 688423 NR Description: tumor-related protein
  misc_feature (1)..(177): NCBI GI NO: 15231945 NR Description: hypothetical protein; protein id: At3g14880.1
  misc_feature (1)..(177): NCBI GI NO: 8777471 NR Description: tumor-related protein-like [Arabidopsis thaliana]
  misc_feature (1)..(177): NCBI GI NO: 15233979 NR Description: putative protein; protein id: At4g18690.1
  misc_feature (1)..(171): NCBI GI NO: 30694832 NR Description: tumor-related protein-like [Arabidopsis thaliana]
  misc_feature (1)..(171): NCBI GI NO: 9758930 NR Description: tumor-related protein-like [Arabidopsis thaliana]
  misc_feature (1)..(171): NCBI GI NO: 15233977 NR Description: putative protein; protein id: At4g18680.1
  misc_feature (1)..(170): NCBI GI NO: 7486277 NR Description: hypothetical protein F28A21
  misc_feature (1)..(170): NCBI GI NO: 30684489 NR Description: expressed protein [Arabidopsis thaliana]
MFAPSWISATESLYLWCGGWRPTSAIQLLYSKSGLQLEAQLPAFLDGGSLGDGDLGGLSAEQLQAADQLQRRTIRREREIEEAAAGAQESLATTKMVELAGKGGMDAAEGMELEMDAKAEAMKRVLEMADGLRLETLRGVVGLLRPAQAVHFLVAAAELHLAVHKFGRRKDGAAAAE

SEQ ID NO: 12532 - DNA, 1463 bp, Triticum aestivum
  misc_feature (1)..(1463): Ceres Seq. ID no. 14302314
ccgtctccccccacagaaagtgagaacgccaagagcgtcaagctgagggaaagatgagggagctggtctcctcctccacctcctcccccaccgcggccctcgtcgccgccggccacgcggcgctccggggatggtgggaggaggtcaacgagtcgccggcgtggcaggacggcgccttcttctccctcaccgccgcctacgccctcgtctccgccgtcgcgctgattcagctggtgaggatccagcgcagagtgcccgagttcggctggaccacgcagaaggtgttccacctcatgaacttcgtcgtcaatggggttcgtgccgttgtattcggattccatgcctatgtcttcctcctccaaacaaaagtttataagttggtgttactagacctccccggcttgttgttcttctcggcctacaccttacttgttcttttctgggcagaaatatatcatcaggctaggagtctccccaccgataagttaaggattatatacctagccgttaatagcatcgtatatgcaattcagatctgtatttgggtgtaccttggaataaacgacaatgcgttggttgagctggtgagcaaaatcttcatcgtatctgtctccgctgtggcccttcttggtttcgcagtatatggtggaaggttgtttgtcttgctgagacgtttccccattgaatcaaaggggcgaaaaaagaagctttatgaggttgggactgtgacgacaatctgctgcacctgtttcctgataagatgcatcgtggtggccgtatctgcatttgatgctgatgtttctttggaggttttagatcatccaatcctagatttcttctattatatgttgacagagatactgccttccgcgctggtccttttcatccttcggaagcttccacctaagcgagtatcggcgcaatatcaccctattaactagaggtttttgtgcttatgtatgatgttatgcttagaataatggatgaacttggaattgcccaaaattttacatgtctggtgcgagctgaatgctggtgtttgagctgtgtgttttccaaaatcatcgaagtgttgtcgatggatcatgcaatgtgcagtccaggggccctataaaagtgaattttccgtcttctgcttgttctgtttctggtggaatttggttgagagccttgctctagtagaggagaaaatcctagtggattccctgatgtttatccgagtcgttttgtgattgcacttgccatgtttaccatcagagtgttgctggttatgccgactggagcttaatatttgtaaaatgttaccagtctcttgaattatgtgtgtattgtagagggcctcaaaagtcatatttgtaagtgtaactggtttggagtagatgatgtcctgcgcgttgccaaatttcatttcaagaatgtgagaaatacttggcatgattgcaatagtatttgtaatcgtactg

SEQ ID NO: 12533 - protein, 295 aa, Triticum aestivum
  peptide (1)..(295): Ceres Seq. ID no. 14302315
  misc_feature (16)..(295): NCBI GI NO: 34394174 NR Description: putative transmembrane protein(TOM3)
  misc_feature (1)..(294): NCBI GI NO: 34896982 NR Description: unknown protein [Oryza sativa]
  misc_feature (23)..(294): NCBI GI NO: 18415765 NR Description: TOM1 protein [Arabidopsis thaliana]
  misc_feature (58)..(281): NCBI GI NO: 14091866 NR Description: Putative transmembrane protein [Oryza sativa]
  misc_feature (1)..(295): NCBI GI NO: 37536460 NR Description: putative transmembrane protein
  misc_feature (3)..(294): NCBI GI NO: 18395323 NR Description: TOM3 protein [Arabidopsis thaliana]
  misc_feature (7)..(294): NCBI GI NO: 21537264 NR Description: unknown [Arabidopsis thaliana]
  misc_feature (14)..(295): NCBI GI NO: 34902220 NR Description: Putative transmembrane protein
  misc_feature (13)..(294): NCBI GI NO: 7262697 NR Description: Contains similarity to an unknown protein fromArabidopsis thaliana gb|AC005936
  misc_feature (42)..(295): NCBI GI NO: 28828114 NR Description: hypothetical protein [Dictyostelium discoideum]
MRELVSSSTSSPTAALVAAGHAALRGWWEEVNESPAWQDGAFFSLTAAYALVSAVALIQLVRIQRRVPEFGWTTQKVFHLMNFVVNGVRAVVFGFHAYVFLLQTKVYKLVLLDLPGLLFFSAYTLLVLFWAEIYHQARSLPTDKLRIIYLAVNSIVYAIQICIWVYLGINDNALVELVSKIFIVSVSAVALLGFAVYGGRLFVLLRRFPIESKGRKKKLYEVGTVTTICCTCFLIRCIVVAVSAFDADVSLEVLDHPILDFFYYMLTEILPSALVLFILRKLPPKRVSAQYHPIN

SEQ ID NO: 12534 - protein, 215 aa, Triticum aestivum
  peptide (1)..(215): Ceres Seq. ID no. 14302316
  misc_feature (1)..(215): NCBI GI NO: 34394174 NR Description: putative transmembrane protein(TOM3)
  misc_feature (1)..(214): NCBI GI NO: 34896982 NR Description: unknown protein [Oryza sativa]
  misc_feature (1)..(214): NCBI GI NO: 18415765 NR Description: TOM1 protein [Arabidopsis thaliana]
  misc_feature (1)..(201): NCBI GI NO: 14091866 NR Description: Putative transmembrane protein [Oryza sativa]
  misc_feature (1)..(215): NCBI GI NO: 37536460 NR Description: putative transmembrane protein
  misc_feature (1)..(214): NCBI GI NO: 18395323 NR Description: TOM3 protein [Arabidopsis thaliana]
  misc_feature (1)..(214): NCBI GI NO: 21537264 NR Description: unknown [Arabidopsis thaliana]
  misc_feature (1)..(215): NCBI GI NO: 34902220 NR Description: Putative transmembrane protein
  misc_feature (1)..(214): NCBI GI NO: 7262697 NR Description: Contains similarity to an unknown protein fromArabidopsis thaliana gb|AC005936
  misc_feature (1)..(215): NCBI GI NO: 28828114 NR Description: hypothetical protein [Dictyostelium discoideum]
MNFVVNGVRAVVFGFHAYVFLLQTKVYKLVLLDLPGLLFFSAYTLLVLFWAEIYHQARSLPTDKLRIIYLAVNSIVYAIQICIWVYLGINDNALVELVSKIFIVSVSAVALLGFAVYGGRLFVLLRRFPIESKGRKKKLYEVGTVTTICCTCFLIRCIVVAVSAFDADVSLEVLDHPILDFFYYMLTEILPSALVLFILRKLPPKRVSAQYHPIN

SEQ ID NO: 12535 - DNA, 1344 bp, Triticum aestivum
  misc_feature (1)..(1344): Ceres Seq. ID no. 13654928
actaaaaaagacttggccttttctattccaagtctctcttcccccatctctgcttctcttcttctcctgcacagtccacactgttcatctcctcttcgatccccaaatcccaagctgaccaaccaagaccccgccccgcatggagtggacggccccgaagtccaccccgctctccccgccccacctcctctgggactggggcgacgccgccgcgccgggctcctccggcgaggcggcggggaggcgcgggaaggagaagcgggccaggggggagggggccggcggaggaggaggaggaggaggagggggcgtgaggtgccaggtggagggctgcggggtcgagctccgcgacgcgaaggagtaccaccggaagcaccgggtctgcgaggcccacaccaagtccccccgcgtcgtcgtcgccggccaggagcgccgcttctgccagcagtgcagccggttccatgggctgtcggagttcgaccagaagaagaggagctgccggaggcgactgtccgatcacaatgctcggcgccggaagccacagccggacgcattctcctttgcaccggcaaggctcccgtcgtcattgatgtttgatgatagacggcaaataagttttgtctggaataaagatccacttagtcatggaaggcctttcccatgttctccatgggacagcccatctgacttcaagctcccgcaagtgaaggaaataagagaagtatcaatcaatgggcaagttcattttgataaatctcatctacccaatgctgttccagcactgagtcatgacatacctgagctgctaccaatgaaaggtccggacgcatctgtaaccgcttcgaaattaggtggagcaccggatcttcagcgtgctctctctcttctgtcagctagttcttgtggattacctgatcctgtacagcaagcatcttgtctcgtccaattcactggtgctagccaaaacagccggggcccttcaccacatggaggtagccctccgtcggtgtcctgtgccgaaggacagcccatggcgccatcgcctcagtttgtccgtttcaccatggacggcgccagcagtggctatgaatccactttcttcggcgtaaaccggatgaattgatgcgcgagacacacaagcttctgtacgattttggatctacagccaggaagagcttatgcaagaactgctcctgtcaagaaaatctcactgttcatgttacctacatactcattggtcaccttgttatttttccattgtacaaccctgctgccatttgttggctcttttgaaaccattgttgatgaatctggacatgatttgtttcatgaagtgatgacttg

SEQ ID NO: 12536 - protein, 327 aa, Triticum aestivum
  peptide (1)..(327): Ceres Seq. ID no. 13654929
  misc_feature (60)..(136): Pfam Name: Pfam Description:  SBP domain
  misc_feature (60)..(254): NCBI GI NO: 25456646 NR Description: squamosa promoter binding protein 2
  misc_feature (59)..(270): NCBI GI NO: 18396302 NR Description: squamosa-promoter binding protein 2 -related
  misc_feature (59)..(270): NCBI GI NO: 25403307 NR Description: protein F17L21.14
  misc_feature (60)..(188): NCBI GI NO: 15239820 NR Description: squamosa promoter binding protein-related 2
  misc_feature (21)..(302): NCBI GI NO: 28411864 NR Description: putative SBP-domain protein 5
  misc_feature (59)..(254): NCBI GI NO: 9802546 NR Description: F17L21.15 [Arabidopsis thaliana]
  misc_feature (59)..(254): NCBI GI NO: 18650611 NR Description: At1g27370/F17L21_16 [Arabidopsis thaliana]
  misc_feature (59)..(254): NCBI GI NO: 22329813 NR Description: squamosa-promoter binding protein 2 -related
  misc_feature (27)..(145): NCBI GI NO: 15028115 NR Description: putative squamosa-promoter binding protein
  misc_feature (27)..(145): NCBI GI NO: 15227896 NR Description: squamosa-promoter binding protein -related
MEWTAPKSTPLSPPHLLWDWGDAAAPGSSGEAAGRRGKEKRARGEGAGGGGGGGGGGVRCQVEGCGVELRDAKEYHRKHRVCEAHTKSPRVVVAGQERRFCQQCSRFHGLSEFDQKKRSCRRRLSDHNARRRKPQPDAFSFAPARLPSSLMFDDRRQISFVWNKDPLSHGRPFPCSPWDSPSDFKLPQVKEIREVSINGQVHFDKSHLPNAVPALSHDIPELLPMKGPDASVTASKLGGAPDLQRALSLLSASSCGLPDPVQQASCLVQFTGASQNSRGPSPHGGSPPSVSCAEGQPMAPSPQFVRFTMDGASSGYESTFFGVNRMN

SEQ ID NO: 12537 - protein, 198 aa, Triticum aestivum
  peptide (1)..(198): Ceres Seq. ID no. 13654930
TKKDLAFSIPSLSSPISASLLLLHSPHCSSPLRSPNPKLTNQDPAPHGVDGPEVHPALPAPPPLGLGRRRRAGLLRRGGGEAREGEAGQGGGGRRRRRRRRRGREVPGGGLRGRAPRREGVPPEAPGLRGPHQVPPRRRRRPGAPLLPAVQPVPWAVGVRPEEEELPEATVRSQCSAPEATAGRILLCTGKAPVVIDV

SEQ ID NO: 12538 - protein, 177 aa, Triticum aestivum
  peptide (1)..(177): Ceres Seq. ID no. 13654931
  misc_feature (1)..(104): NCBI GI NO: 25456646 NR Description: squamosa promoter binding protein 2
  misc_feature (1)..(120): NCBI GI NO: 18396302 NR Description: squamosa-promoter binding protein 2 -related
  misc_feature (1)..(120): NCBI GI NO: 25403307 NR Description: protein F17L21.14
  misc_feature (1)..(38): NCBI GI NO: 15239820 NR Description: squamosa promoter binding protein-related 2
  misc_feature (1)..(152): NCBI GI NO: 28411864 NR Description: putative SBP-domain protein 5
  misc_feature (1)..(104): NCBI GI NO: 9802546 NR Description: F17L21.15 [Arabidopsis thaliana]
  misc_feature (1)..(104): NCBI GI NO: 22329813 NR Description: squamosa-promoter binding protein 2 -related
  misc_feature (1)..(104): NCBI GI NO: 18650611 NR Description: At1g27370/F17L21_16 [Arabidopsis thaliana]
  misc_feature (1)..(106): NCBI GI NO: 25352582 NR Description: squamosa promoter binding protein-homolog 5
  misc_feature (1)..(119): NCBI GI NO: 18423163 NR Description: expressed protein [Arabidopsis thaliana]
MFDDRRQISFVWNKDPLSHGRPFPCSPWDSPSDFKLPQVKEIREVSINGQVHFDKSHLPNAVPALSHDIPELLPMKGPDASVTASKLGGAPDLQRALSLLSASSCGLPDPVQQASCLVQFTGASQNSRGPSPHGGSPPSVSCAEGQPMAPSPQFVRFTMDGASSGYESTFFGVNRMN

SEQ ID NO: 12539 - DNA, 1219 bp, Triticum aestivum
  misc_feature (1)..(1219): Ceres Seq. ID no. 15175441
aaggcagcagcccatagcccaagctcacgacacgcagcgacgcagcgctcagcagcggagcagccgccaccgggcaccgtcacaacagccgccgtccgccgcggtgccggccaccggccaccggcacgcgcatcagccgccacccacacagcagcgcggcgactcggcgagtcgtccaaagccgacccacgacggcacgaccctagcggcacacagcagcggcgagccagcgacccagatcccgcagcatcttcgcataactgcagttcggcggtgccgcttggggattctgttgcccggcgatgtcggcgacgccgctccccccaccgccgccggccgacggcccggcggcactcccgcccccgccggggacggacatgacggggatctgcttccgcgaccagctgtggctcaacacctacccgctggaccgcaacctcgtcttcgactacttcgccctctcccccttctacgacatcacctgcaacaacgagtccctccgctcgcgccaaatccaccccctcgacatgtcccagctcacgaagatgaccgggttggagtacgtgctgagcgaagtgatggagccgcacctgttcgtgatgcgcaagcagaagaggacgaactccgagaagtctgaccccctgctcgcctactacatcctcgacggttccatctaccaggcgccgctgcttggcagcgttttcgcctcccgcataagtagggctatgcatcacatatcaaaagcattttcaacggcatgctcaaaattggagaagattggtaatgcggaaacagaggctgatgcggcagcttctgaatcaaaggcccagaaggaaacaattgacttgaaggagttgaaacgagtggatcacatcctcatgtctttgcaacggaagctgcctcctgctcctccccctccaccctttccggatggttatgtcccatcagaacaagagaaagggccagatgatctgttggcctcggaggcattgcctcctgcaattgaccccatcattgatcaagggccagcaaaaagaccaagatttcaatgagattgtgccgttgatcaagtaaaattaccgccacactaatgttatgttgtattgcaaatcataagtagaaatttgtaattcctgagctgtgaaggtgcagaccgttttctgaatgtacacttcgactgatccttgatagctctgtaaggcccagtttgtggttttct

SEQ ID NO: 12540 - protein, 249 aa, Triticum aestivum
  peptide (1)..(249): Ceres Seq. ID no. 15175442
  misc_feature (13)..(248): NCBI GI NO: 22331241 NR Description: expressed protein [Arabidopsis thaliana]
  misc_feature (25)..(249): NCBI GI NO: 3329506 NR Description: RNA polymerase transcriptional regulation mediator
  misc_feature (25)..(249): NCBI GI NO: 29840782 NR Description: RNA polymerase transcriptional regulation mediator
  misc_feature (25)..(249): NCBI GI NO: 30583885 NR Description: Homo sapiens mediator of RNA polymerase IItranscription
  misc_feature (25)..(249): NCBI GI NO: 34867365 NR Description: similar to RNA polymerase II transcriptionalregulation mediator
  misc_feature (26)..(249): NCBI GI NO: 5360103 NR Description: NY-REN-28 antigen [Homo sapiens]
  misc_feature (25)..(154): NCBI GI NO: 4885481 NR Description: mediator of RNA polymerase II transcription
  misc_feature (25)..(154): NCBI GI NO: 26354242 NR Description: unnamed protein product [Mus musculus]
  misc_feature (42)..(205): NCBI GI NO: 28573123 NR Description: CG9473-PB [Drosophila melanogaster]
  misc_feature (29)..(154): NCBI GI NO: 31235097 NR Description: ENSANGP00000011842 [Anopheles gambiae]
MSATPLPPPPPADGPAALPPPPGTDMTGICFRDQLWLNTYPLDRNLVFDYFALSPFYDITCNNESLRSRQIHPLDMSQLTKMTGLEYVLSEVMEPHLFVMRKQKRTNSEKSDPLLAYYILDGSIYQAPLLGSVFASRISRAMHHISKAFSTACSKLEKIGNAETEADAAASESKAQKETIDLKELKRVDHILMSLQRKLPPAPPPPPFPDGYVPSEQEKGPDDLLASEALPPAIDPIIDQGPAKRPRFQ

SEQ ID NO: 12541 - protein, 224 aa, Triticum aestivum
  peptide (1)..(224): Ceres Seq. ID no. 15175443
  misc_feature (1)..(223): NCBI GI NO: 22331241 NR Description: expressed protein [Arabidopsis thaliana]
  misc_feature (1)..(224): NCBI GI NO: 3329506 NR Description: RNA polymerase transcriptional regulation mediator
  misc_feature (1)..(224): NCBI GI NO: 29840782 NR Description: RNA polymerase transcriptional regulation mediator
  misc_feature (1)..(224): NCBI GI NO: 30583885 NR Description: Homo sapiens mediator of RNA polymerase IItranscription
  misc_feature (1)..(224): NCBI GI NO: 34867365 NR Description: similar to RNA polymerase II transcriptionalregulation mediator
  misc_feature (1)..(224): NCBI GI NO: 5360103 NR Description: NY-REN-28 antigen [Homo sapiens]
  misc_feature (1)..(129): NCBI GI NO: 4885481 NR Description: mediator of RNA polymerase II transcription
  misc_feature (1)..(129): NCBI GI NO: 26354242 NR Description: unnamed protein product [Mus musculus]
  misc_feature (17)..(180): NCBI GI NO: 28573123 NR Description: CG9473-PB [Drosophila melanogaster]
  misc_feature (4)..(129): NCBI GI NO: 31235097 NR Description: ENSANGP00000011842 [Anopheles gambiae]
MTGICFRDQLWLNTYPLDRNLVFDYFALSPFYDITCNNESLRSRQIHPLDMSQLTKMTGLEYVLSEVMEPHLFVMRKQKRTNSEKSDPLLAYYILDGSIYQAPLLGSVFASRISRAMHHISKAFSTACSKLEKIGNAETEADAAASESKAQKETIDLKELKRVDHILMSLQRKLPPAPPPPPFPDGYVPSEQEKGPDDLLASEALPPAIDPIIDQGPAKRPRFQ

SEQ ID NO: 12542 - protein, 211 aa, Triticum aestivum
  peptide (1)..(211): Ceres Seq. ID no. 15175444
RQQPIAQAHDTQRRSAQQRSSRHRAPSQQPPSAAVPATGHRHAHQPPPTQQRGDSASRPKPTHDGTTLAAHSSGEPATQIPQHLRITAVRRCRLGILLPGDVGDAAPPTAAGRRPGGTPAPAGDGHDGDLLPRPAVAQHLPAGPQPRLRLLRPLPLLRHHLQQRVPPLAPNPPPRHVPAHEDDRVGVRAERSDGAAPVRDAQAEEDELREV

SEQ ID NO: 12543 - DNA, 956 bp, Triticum aestivum
  misc_feature (1)..(956): Ceres Seq. ID no. 13654885
cctaaccaaaaagtcactggctagcttattcacatctcttttcttgagacattctcttgatccacatatttacctacctctctagctagaaacaaagcttgctcggcaacaatggctgcaggtggagcttctcttattgctgctgctgttttctccgtgctgatcatgtcttccctgggggatctgatgcctttatgcagcgattgcgagacgctgtgccgtaccaactgcaccgcggaggctgaagccaattgcgccaattactgcaacgacacccaagcaacagcagggtactgcgaaggttgcatgggcgcctacttcgaccagcactgcaatcccgagtgtctcaaaaattgcagcaaccgctgcaagaagaaggtgcttccgaggcctttatgcagcgactgcgacacggtatgcagtaccaagtgcgctgaggagcttgaaaccacctgcagccaagactgcgaccccaggcgcagcggtcaggcggcctgccagcgtcagctcttcaagcggtgcaacgcagagggtacctgctgcagtagcgacggcacatgcacttgtgactgcgagaccgaagctcgaaagcagtgcgtgggcgtcagcgacaactccaataattgcgaagtttgcaagcgcagccagttcgaccaggactgtcatcccacctgtaacaccgattgcaatggcaactgcaagaagaagaaagggtgccgcgggcacgcatagggaaaacatgtaactgggggccctgcattgcgtaggaaataacatggctccttgtagtcgtgcgtagatttcgatttctgtaaacgccacgacctggttttgtgggatggcacaggaggagtatgggtggtggcgcatcacccccagcttttggccgaggatttatattctgtatttctatttatgttttctgaacaatgaatcacaatgtgaaattatggttg

SEQ ID NO: 12544 - protein, 206 aa, Triticum aestivum
  peptide (1)..(206): Ceres Seq. ID no. 13654886
  misc_feature (74)..(196): Pfam Name: Pfam Description:  Keratin, high sulfur B2 protein
  misc_feature (1)..(192): NCBI GI NO: 39593357 NR Description: Hypothetical protein CBG09623
  misc_feature (29)..(197): NCBI GI NO: 39589133 NR Description: Hypothetical protein CBG00905
  misc_feature (28)..(196): NCBI GI NO: 17535157 NR Description: Cysteine rich repeat containing protein
MAAGGASLIAAAVFSVLIMSSLGDLMPLCSDCETLCRTNCTAEAEANCANYCNDTQATAGYCEGCMGAYFDQHCNPECLKNCSNRCKKKVLPRPLCSDCDTVCSTKCAEELETTCSQDCDPRRSGQAACQRQLFKRCNAEGTCCSSDGTCTCDCETEARKQCVGVSDNSNNCEVCKRSQFDQDCHPTCNTDCNGNCKKKKGCRGHA

SEQ ID NO: 12545 - protein, 188 aa, Triticum aestivum
  peptide (1)..(188): Ceres Seq. ID no. 13654887
  misc_feature (56)..(178): Pfam Name: Pfam Description:  Keratin, high sulfur B2 protein
  misc_feature (1)..(174): NCBI GI NO: 39593357 NR Description: Hypothetical protein CBG09623
  misc_feature (11)..(179): NCBI GI NO: 39589133 NR Description: Hypothetical protein CBG00905
  misc_feature (10)..(178): NCBI GI NO: 17535157 NR Description: Cysteine rich repeat containing protein
MSSLGDLMPLCSDCETLCRTNCTAEAEANCANYCNDTQATAGYCEGCMGAYFDQHCNPECLKNCSNRCKKKVLPRPLCSDCDTVCSTKCAEELETTCSQDCDPRRSGQAACQRQLFKRCNAEGTCCSSDGTCTCDCETEARKQCVGVSDNSNNCEVCKRSQFDQDCHPTCNTDCNGNCKKKKGCRGHA

SEQ ID NO: 12546 - protein, 181 aa, Triticum aestivum
  peptide (1)..(181): Ceres Seq. ID no. 13654888
  misc_feature (49)..(171): Pfam Name: Pfam Description:  Keratin, high sulfur B2 protein
  misc_feature (1)..(167): NCBI GI NO: 39593357 NR Description: Hypothetical protein CBG09623
  misc_feature (4)..(172): NCBI GI NO: 39589133 NR Description: Hypothetical protein CBG00905
  misc_feature (3)..(171): NCBI GI NO: 17535157 NR Description: Cysteine rich repeat containing protein
MPLCSDCETLCRTNCTAEAEANCANYCNDTQATAGYCEGCMGAYFDQHCNPECLKNCSNRCKKKVLPRPLCSDCDTVCSTKCAEELETTCSQDCDPRRSGQAACQRQLFKRCNAEGTCCSSDGTCTCDCETEARKQCVGVSDNSNNCEVCKRSQFDQDCHPTCNTDCNGNCKKKKGCRGHA

SEQ ID NO: 12547 - DNA, 987 bp, Triticum aestivum
  misc_feature (1)..(987): Ceres Seq. ID no. 15174990
atcctcttccactccgccgcaaccccttccttcctcaacacccgcaacatccttgctcgtcgtttcctccgcctctctctcctctcctcacgcgctctcccctcccctctgaagccgcgactcttctgaaccctaaaccgtagatccccgcgcagcaggagcgagatttactcccgcaagcatgagtcgccacccgagcactaagtgggcgcagaggctggacaaggtttacttgacgattgagctgcccgacgcaaaggatgtcaagctcaacctgaggcctgatggccatttcaacttctcagcaaaggcccctgctgatgacatgcagtatgagcttgaccttgagctctttgatgctgtcagtgttgaggagagccaagcggctgttgccccgagggctatatgctaccttgtcaagaaagctgagggcaagtggtggcctaggctgctcaagaaggaaggtaggccgcctgtgttcctgaaggttgactgggataaatggcaagatgaggatgatgaagatgccggatttggtgactttggtgatatggacttctcgaagctggacatgggaggtggtgatgacgatgatgatgagattgaggaggaggatgaagacaatgtggttgacagtgctaacaaaggtgatgtagatgctgagagagagccggggagcaagggaggggaagctccatcagctgctggtgaagaagcaaagccataagattggaggcgatggcatcggtcgttacaacttatgatgatcatgagatctgtttctagacgcgaggtagaattttggtgtgcccctgaagttgggtagtagaggtggtgttggtagcttttggcttggggctatctgtagtgttcaacgttattctgcaccttttgtttactagtaaattttatgtgctttgcacgtcacttaaatatataaaagcatgggaaaatacatttgaatatgtatttcctttcctagaatct

SEQ ID NO: 12548 - protein, 181 aa, Triticum aestivum
  peptide (1)..(181): Ceres Seq. ID no. 15174991
  misc_feature (1)..(181): NCBI GI NO: 40882701 NR Description: putative ripening regulated protein
  misc_feature (1)..(167): NCBI GI NO: 12231292 NR Description: ripening regulated protein DDTFR8
  misc_feature (1)..(174): NCBI GI NO: 11934654 NR Description: p23 [Brassica napus]
  misc_feature (1)..(133): NCBI GI NO: 38637531 NR Description: putative p23 co-chaperone
  misc_feature (1)..(133): NCBI GI NO: 11229591 NR Description: p23 co-chaperone [Arabidopsis thaliana]
  misc_feature (1)..(133): NCBI GI NO: 30679149 NR Description: glycine-rich protein [Arabidopsis thaliana]
  misc_feature (3)..(133): NCBI GI NO: 7487014 NR Description: hypothetical protein T14P8
  misc_feature (1)..(137): NCBI GI NO: 22330824 NR Description: p23 {Brassica napus} -related
  misc_feature (1)..(171): NCBI GI NO: 17556837 NR Description: butyrate-induced transcript 1 like (19
  misc_feature (1)..(168): NCBI GI NO: 39586555 NR Description: Hypothetical protein CBG21192
MSRHPSTKWAQRLDKVYLTIELPDAKDVKLNLRPDGHFNFSAKAPADDMQYELDLELFDAVSVEESQAAVAPRAICYLVKKAEGKWWPRLLKKEGRPPVFLKVDWDKWQDEDDEDAGFGDFGDMDFSKLDMGGGDDDDDEIEEEDEDNVVDSANKGDVDAEREPGSKGGEAPSAAGEEAKP

SEQ ID NO: 12549 - protein, 133 aa, Triticum aestivum
  peptide (1)..(133): Ceres Seq. ID no. 15174992
  misc_feature (1)..(133): NCBI GI NO: 40882701 NR Description: putative ripening regulated protein
  misc_feature (1)..(119): NCBI GI NO: 12231292 NR Description: ripening regulated protein DDTFR8
  misc_feature (1)..(126): NCBI GI NO: 11934654 NR Description: p23 [Brassica napus]
  misc_feature (1)..(85): NCBI GI NO: 38637531 NR Description: putative p23 co-chaperone
  misc_feature (1)..(85): NCBI GI NO: 11229591 NR Description: p23 co-chaperone [Arabidopsis thaliana]
  misc_feature (1)..(85): NCBI GI NO: 30679149 NR Description: glycine-rich protein [Arabidopsis thaliana]
  misc_feature (1)..(85): NCBI GI NO: 7487014 NR Description: hypothetical protein T14P8
  misc_feature (1)..(89): NCBI GI NO: 22330824 NR Description: p23 {Brassica napus} -related
  misc_feature (1)..(123): NCBI GI NO: 17556837 NR Description: butyrate-induced transcript 1 like (19
  misc_feature (1)..(120): NCBI GI NO: 39586555 NR Description: Hypothetical protein CBG21192
MQYELDLELFDAVSVEESQAAVAPRAICYLVKKAEGKWWPRLLKKEGRPPVFLKVDWDKWQDEDDEDAGFGDFGDMDFSKLDMGGGDDDDDEIEEEDEDNVVDSANKGDVDAEREPGSKGGEAPSAAGEEAKP

SEQ ID NO: 12550 - DNA, 1060 bp, Triticum aestivum
  misc_feature (1)..(1060): Ceres Seq. ID no. 12615329
agcagcaaggaatcgagatccaatcacctcccctcccctccactcctcccccgcggcaagagagatccagccagatccgtccagttccatggcgaccgccggcaacgccccccgctcccgcaagcgcgtcgaggccaccgtcctcaagcgcgcgcgcgacggaagcgccttcacccgctgcgaggcgtgcaacaaggacgtagccatcgtcctcatcgacctgcacagctgcagcctcgactccaagatacgcctcagcctcgagtcgcaggtggtggagaaggccgtcgagatccaggagaagaagaggaagacgccctccgctgccgccggaggcaaggggaagaagaagagcaaggcagacggagatggtgccaagaagccaaaggcaaagcgcccaccaactgccttcttcctcttcatgaaggacttcagggttgagttcaaggcctctcaccctgacgagaagggtgttgccgccgttggcaaggcagcaggggagaagtggaaatccatgaccgaagaggagaagaagccctacaatgaccaggccaaggagctcaaggcccagtttgccaatggcgagggcagcgcggagaacaatgtgggagatgaggagaaggcagatgcggatgcagaggaggtggaggatgcggagcaggaggtggataagccagaagatgccccagaggacgaagaggaggaagaggagaagaacgagctggatgatgacatctagacggagctgaagaagggtgctcgttttcccgttttgtaaatggcaggtgttctatctgtcctgggcaacctgaatctcggcctaaactctaggagcagcagtagtgaatgttgtggctggttgcagtctgtttatcattgttatggaatggaaggaaagcagggttgatgtggtggtcgatgaatgactgaatctttctgtcactgcattgcatctgcaatatgtttgaaactagaattttgttaagatccagaagacaatataatctgctccaatactaggatattgatgttgttctacacaaaataaagatggatcaag

SEQ ID NO: 12551 - protein, 245 aa, Triticum aestivum
  peptide (1)..(245): Ceres Seq. ID no. 12615330
  misc_feature (131)..(197): Pfam Name: high mobility group Pfam Description: HMG
  misc_feature (33)..(245): NCBI GI NO: 38637289 NR Description: putative HMG type nucleosome/chromatin assemblyfactor D
  misc_feature (31)..(244): NCBI GI NO: 18420676 NR Description: expressed protein; protein id: At5g23420
  misc_feature (85)..(245): NCBI GI NO: 17017396 NR Description: HMG type nucleosome/chromatin assembly factor D
  misc_feature (31)..(244): NCBI GI NO: 9759080 NR Description: gene_id:K19M13.4~unknown protein
  misc_feature (101)..(238): NCBI GI NO: 18700443 NR Description: high mobility group box protein 2
  misc_feature (88)..(244): NCBI GI NO: 541968 NR Description: high mobility group protein HMG-1 - garden pea
  misc_feature (99)..(244): NCBI GI NO: 3885888 NR Description: high mobility group protein [Oryza sativa]
  misc_feature (102)..(244): NCBI GI NO: 15231065 NR Description: high mobility group protein 2-like
  misc_feature (108)..(238): NCBI GI NO: 7446227 NR Description: high mobility group protein HMGc2 - maize
  misc_feature (104)..(244): NCBI GI NO: 123378 NR Description: DNA-BINDING PROTEIN MNB1B (HMG1-LIKE PROTEIN)
AARNRDPITSPPLHSSPAAREIQPDPSSSMATAGNAPRSRKRVEATVLKRARDGSAFTRCEACNKDVAIVLIDLHSCSLDSKIRLSLESQVVEKAVEIQEKKRKTPSAAAGGKGKKKSKADGDGAKKPKAKRPPTAFFLFMKDFRVEFKASHPDEKGVAAVGKAAGEKWKSMTEEEKKPYNDQAKELKAQFANGEGSAENNVGDEEKADADAEEVEDAEQEVDKPEDAPEDEEEEEEKNELDDDI

SEQ ID NO: 12552 - protein, 216 aa, Triticum aestivum
  peptide (1)..(216): Ceres Seq. ID no. 12615331
  misc_feature (102)..(168): Pfam Name: high mobility group Pfam Description: HMG
  misc_feature (4)..(216): NCBI GI NO: 38637289 NR Description: putative HMG type nucleosome/chromatin assemblyfactor D
  misc_feature (2)..(215): NCBI GI NO: 18420676 NR Description: expressed protein; protein id: At5g23420
  misc_feature (56)..(216): NCBI GI NO: 17017396 NR Description: HMG type nucleosome/chromatin assembly factor D
  misc_feature (2)..(215): NCBI GI NO: 9759080 NR Description: gene_id:K19M13.4~unknown protein
  misc_feature (72)..(209): NCBI GI NO: 18700443 NR Description: high mobility group box protein 2
  misc_feature (59)..(215): NCBI GI NO: 541968 NR Description: high mobility group protein HMG-1 - garden pea
  misc_feature (70)..(215): NCBI GI NO: 3885888 NR Description: high mobility group protein [Oryza sativa]
  misc_feature (73)..(215): NCBI GI NO: 15231065 NR Description: high mobility group protein 2-like
  misc_feature (79)..(209): NCBI GI NO: 7446227 NR Description: high mobility group protein HMGc2 - maize
  misc_feature (75)..(215): NCBI GI NO: 123378 NR Description: DNA-BINDING PROTEIN MNB1B (HMG1-LIKE PROTEIN)
MATAGNAPRSRKRVEATVLKRARDGSAFTRCEACNKDVAIVLIDLHSCSLDSKIRLSLESQVVEKAVEIQEKKRKTPSAAAGGKGKKKSKADGDGAKKPKAKRPPTAFFLFMKDFRVEFKASHPDEKGVAAVGKAAGEKWKSMTEEEKKPYNDQAKELKAQFANGEGSAENNVGDEEKADADAEEVEDAEQEVDKPEDAPEDEEEEEEKNELDDDI

SEQ ID NO: 12553 - protein, 146 aa, Triticum aestivum
  peptide (1)..(146): Ceres Seq. ID no. 12615332
SSKESRSNHLPSPPLLPRGKRDPARSVQFHGDRRQRPPLPQARRGHRPQARARRKRLHPLRGVQQGRSHRPHRPAQLQPRLQDTPQPRVAGGGEGRRDPGEEEEDALRCRRRQGEEEEQGRRRWCQEAKGKAPTNCLLPLHEGLQG

SEQ ID NO: 12554 - DNA, 1129 bp, Triticum aestivum
  misc_feature (1)..(1129): Ceres Seq. ID no. 13596643
atcaaccattcatctattcatgtccaagctagaagaggcaatccatcggtgtgcgctgtaaagatctggggtgttggggtttggccacagactcatccagatggccttcgcagtctcggacgagctactgggcacgttcgtgcccatcgcggtgtactggctctactcggggctgtacatcgtgctggacgcgctggggacggccgactgctaccgcctccaccccaaggaggacgaggagacgaggaacataccctccaagcgcaccgtcctcaagggcgtcctcctccaacaggccgtccaggtcgccgtctccctcatcgtcttcaagatcaccggcgatggaagccacgacacgagggagcagcctccggcaccggtgatagcgctgcagttcgtcgtggcgatgttcgccatggacacgtggcaatacttcgtgcacaggtatctccacaccaacaagttcctgtacaagcacgtccacgcgcagcaccacaccatcctggtgccctacgccttcggggcgctctacagccacccgcttgagggcctgctcatggacacggccagcggcgccgtcggcttcctcgcgtccgggatgaccccccggaccgccatcttcttcatctcgttcggcgccatcaagaccgtcgacgaccactgtggcctctggctgcccggcaacgtcttccacgctgtcttcgccaacaacagcgccttccacaacatccaccaccagctctacggcaacaagcacaacttctcgcagcccttcttcgtcgtgtgggacaagatcctcggaacgtacatgcccttcacgctccagagccgtgagggtggaggggtagaggcgcgcccggttaagcacgcccttgcggcgcacgagcagcacaagtccgattgagcagctggtttggtttcccctgatatatatgcatgttcacttggcaagatatatagaacttcactacagccgtacgtgctcatgttctcgcactaataatgtggtttctcactatttatatgttgtgctcccttatgaatattatatcttgtgctccctataaaaaaaaaaaaaaaaaagcttatcgatatgtttaaacacaataaagttggaacgggagggggg

SEQ ID NO: 12555 - protein, 267 aa, Triticum aestivum
  peptide (1)..(267): Ceres Seq. ID no. 13596644
  misc_feature (1)..(255): NCBI GI NO: 22330531 NR Description: acid phosphatase, putative [Arabidopsis thaliana]
  misc_feature (1)..(255): NCBI GI NO: 25404823 NR Description: probable sterol desaturase T6C23.16
  misc_feature (1)..(255): NCBI GI NO: 18394095 NR Description: sterol desaturase domain-containing protein
  misc_feature (1)..(255): NCBI GI NO: 25511716 NR Description: F14L17.5 protein - Arabidopsis thaliana
  misc_feature (10)..(255): NCBI GI NO: 34913184 NR Description: similar to acid phosphatase
  misc_feature (95)..(258): NCBI GI NO: 34911990 NR Description: P0694A04.28
  misc_feature (1)..(96): NCBI GI NO: 34911990 NR Description: P0694A04.28
  misc_feature (38)..(202): NCBI GI NO: 5360721 NR Description: acid phosphatase [Lupinus albus]
  misc_feature (96)..(235): NCBI GI NO: 40746027 NR Description: hypothetical protein AN0640.2
  misc_feature (5)..(75): NCBI GI NO: 40746027 NR Description: hypothetical protein AN0640.2
MAFAVSDELLGTFVPIAVYWLYSGLYIVLDALGTADCYRLHPKEDEETRNIPSKRTVLKGVLLQQAVQVAVSLIVFKITGDGSHDTREQPPAPVIALQFVVAMFAMDTWQYFVHRYLHTNKFLYKHVHAQHHTILVPYAFGALYSHPLEGLLMDTASGAVGFLASGMTPRTAIFFISFGAIKTVDDHCGLWLPGNVFHAVFANNSAFHNIHHQLYGNKHNFSQPFFVVWDKILGTYMPFTLQSREGGGVEARPVKHALAAHEQHKSD

SEQ ID NO: 12556 - protein, 181 aa, Triticum aestivum
  peptide (1)..(181): Ceres Seq. ID no. 13596645
INHSSIHVQARRGNPSVCAVKIWGVGVWPQTHPDGLRSLGRATGHVRAHRGVLALLGAVHRAGRAGDGRLLPPPPQGGRGDEEHTLQAHRPQGRPPPTGRPGRRLPHRLQDHRRWKPRHEGAASGTGDSAAVRRGDVRHGHVAILRAQVSPHQQVPVQARPRAAPHHPGALRLRGALQPPA

SEQ ID NO: 12557 - protein, 165 aa, Triticum aestivum
  peptide (1)..(165): Ceres Seq. ID no. 13596646
  misc_feature (1)..(153): NCBI GI NO: 22330531 NR Description: acid phosphatase, putative [Arabidopsis thaliana]
  misc_feature (1)..(153): NCBI GI NO: 25404823 NR Description: probable sterol desaturase T6C23.16
  misc_feature (1)..(153): NCBI GI NO: 18394095 NR Description: sterol desaturase domain-containing protein
  misc_feature (1)..(153): NCBI GI NO: 25511716 NR Description: F14L17.5 protein - Arabidopsis thaliana
  misc_feature (1)..(153): NCBI GI NO: 34913184 NR Description: similar to acid phosphatase
  misc_feature (1)..(156): NCBI GI NO: 34911990 NR Description: P0694A04.28
  misc_feature (1)..(100): NCBI GI NO: 5360721 NR Description: acid phosphatase [Lupinus albus]
  misc_feature (1)..(133): NCBI GI NO: 40746027 NR Description: hypothetical protein AN0640.2
  misc_feature (1)..(136): NCBI GI NO: 19113281 NR Description: hypothetical integral membrane protein
  misc_feature (1)..(133): NCBI GI NO: 37722567 NR Description: sphinganine hydroxylase [Pichia ciferrii]
MFAMDTWQYFVHRYLHTNKFLYKHVHAQHHTILVPYAFGALYSHPLEGLLMDTASGAVGFLASGMTPRTAIFFISFGAIKTVDDHCGLWLPGNVFHAVFANNSAFHNIHHQLYGNKHNFSQPFFVVWDKILGTYMPFTLQSREGGGVEARPVKHALAAHEQHKSD

SEQ ID NO: 12558 - DNA, 530 bp, Triticum aestivum
  misc_feature (1)..(530): Ceres Seq. ID no. 13583396
aaaaaatcaacctcccagcacgaaccaacccaatccctgctacatagtcagtcagtctttgcaaccatgaggccacaggtgctgctcgccgcgctggccgtcgtcctcctcctcgcagcagctctgcccttcgcccacagccaaggtgcgaccccaagcgcgtcgctgtgctgcaacaactgcggcacctgcactaggtccatcccgcccaggtgtacgtgcatggatgcgtcgcccagcggctgcaacccgtcctgcaagacctgcgacaagaccaccgtcgccggccgtgacagcttccagtgcaaggaccgcgtcgcaaacttctgccagcgcagctgcactaagcccgcgtgactcgacctgttgtcgccagaataatgccgattagcttgttcttttcctttgtttttgcagtatttaagagttccctctgcatcttgctctggtagatgcagagaagaaatgagagttggatgcatgctcgttgttccttcttgtgtctgaaataaagagcatattctttgccc

SEQ ID NO: 12559 - protein, 118 aa, Triticum aestivum
  peptide (1)..(118): Ceres Seq. ID no. 13583397
  misc_feature (57)..(83): Pfam Name: Pfam Description:  Bowman-Birk serine protease inhibitor family
  misc_feature (50)..(118): NCBI GI NO: 14285484 NR Description: BOWMAN-BIRK TYPE TRYPSIN INHIBITOR (WTI)
  misc_feature (47)..(118): NCBI GI NO: 34897400 NR Description: putative Bowman-Birk serine protease inhibitor
  misc_feature (46)..(114): NCBI GI NO: 100119 NR Description: proteinase inhibitor - cowpea (fragments)
  misc_feature (47)..(114): NCBI GI NO: 100120 NR Description: proteinase inhibitor - cowpea
  misc_feature (47)..(114): NCBI GI NO: 28569590 NR Description: trypsin inhibitor
  misc_feature (47)..(114): NCBI GI NO: 16555417 NR Description: trypsin proteinase inhibitor [Phaseolus vulgaris]
  misc_feature (47)..(114): NCBI GI NO: 28569586 NR Description: trypsin inhibitor
  misc_feature (47)..(114): NCBI GI NO: 28569588 NR Description: trypsin inhibitor
  misc_feature (47)..(114): NCBI GI NO: 28569584 NR Description: trypsin inhibitor
  misc_feature (47)..(114): NCBI GI NO: 124034 NR Description: BOWMAN-BIRK TYPE PROTEINASE INHIBITOR DE-4
KKSTSQHEPTQSLLHSQSVFATMRPQVLLAALAVVLLLAAALPFAHSQGATPSASLCCNNCGTCTRSIPPRCTCMDASPSGCNPSCKTCDKTTVAGRDSFQCKDRVANFCQRSCTKPA

SEQ ID NO: 12560 - protein, 96 aa, Triticum aestivum
  peptide (1)..(96): Ceres Seq. ID no. 13583398
  misc_feature (35)..(61): Pfam Name: Pfam Description:  Bowman-Birk serine protease inhibitor family
  misc_feature (28)..(96): NCBI GI NO: 14285484 NR Description: BOWMAN-BIRK TYPE TRYPSIN INHIBITOR (WTI)
  misc_feature (25)..(96): NCBI GI NO: 34897400 NR Description: putative Bowman-Birk serine protease inhibitor
  misc_feature (24)..(92): NCBI GI NO: 100119 NR Description: proteinase inhibitor - cowpea (fragments)
  misc_feature (25)..(92): NCBI GI NO: 100120 NR Description: proteinase inhibitor - cowpea
  misc_feature (25)..(92): NCBI GI NO: 28569590 NR Description: trypsin inhibitor
  misc_feature (25)..(92): NCBI GI NO: 16555417 NR Description: trypsin proteinase inhibitor [Phaseolus vulgaris]
  misc_feature (25)..(92): NCBI GI NO: 28569586 NR Description: trypsin inhibitor
  misc_feature (25)..(92): NCBI GI NO: 28569588 NR Description: trypsin inhibitor
  misc_feature (25)..(92): NCBI GI NO: 28569584 NR Description: trypsin inhibitor
  misc_feature (25)..(92): NCBI GI NO: 124034 NR Description: BOWMAN-BIRK TYPE PROTEINASE INHIBITOR DE-4
MRPQVLLAALAVVLLLAAALPFAHSQGATPSASLCCNNCGTCTRSIPPRCTCMDASPSGCNPSCKTCDKTTVAGRDSFQCKDRVANFCQRSCTKPA

SEQ ID NO: 12561 - DNA, 1406 bp, Triticum aestivum
  misc_feature (1)..(1406): Ceres Seq. ID no. 13596519
actcctcacttcactcgcctcccgcgtcgcccgccgatcgagtgcacccacccaccacagtgccctgtgcccgaggccattccgtacgcactggagatggcgcgcaggagcggagtcttgtcgcgcttggccgtcgtcgtcgtcgcggcctactgcctcgccgcggcgacgcccggtgctgccgactggatgaggggctcggccacgttctacggagggagcaacgccgccggcaccatgggcggcgcttgcgggtacggcaacctgtactcgacggggtacgggacggacacggcggcgctgagcacgtccctcttcaacgacggggcggcgtgcggggagtgctaccaggtgcagtgcgaccagggcagctccccgaactgcaagccgggggtgacggtcaccatcaccgccaccaacctctgcccgacggactactccaagcccaacgacaacggcggctggtgcaacccgccgcgcaagcacctggacatggcgcagcccgcgtgggagcgcatcggcgtctaccgcgccggcatcgtgcccatcctgttccagcgggtgtcctgctccaggagcggcggcgtgcggttcaccatcaacggcaacagctacttcgagctggtgctcatcaccaacgtcggcgggccggggtcggtcagggcggtgcagatcaaggggtcccgcaccgggtggaccaccatgtcccggaactggggcgcgaactggcagtccaacagctacctcaacgggcagtccatctccttcgccgtcaccgccaccaacggccagaaggtggtcttccaggacgtggcgcccagcaactgggggttcggccagaccttcaccaactccggccagttctactagcgattcccgcgcgccgccgtgcgtgcgtgcgcgccggcgccggagcggtcgcctttcctttccgtttacgccttttcgatttcgcatttgggaagttaagtaagatttgcctcattctcatggatgggaagtggtaggtagtaggtagctaggtgccgcgcgtagggcggtttgcatggctgaggtgcctgatcgatcaattacccgccgtgcctgccgccttgcttgcgatgaccggctgatgtgctagctgaaatggcgccccgatcctcgctgcaaggcgcggactgtttactgttgaccaccgatccattgatgattttaatttatatagaatgtgatggccaaaatggggtggacatcgaagtgtgtggtctgaagtaaacgattaattggatcactacgttattacatgtgcgtaaagtgtccttagtcggagaatcaatgtactccctcactctatgaataagtgtacttccaccctttttttactaaaagaaaaaaaaaaaaaaaaaagcttatcgataccgtcgacc

SEQ ID NO: 12562 - protein, 334 aa, Triticum aestivum
  peptide (1)..(334): Ceres Seq. ID no. 13596520
SSLHSPPASPADRVHPPTTVPCARGHSVRTGDGAQERSLVALGRRRRRGLLPRRGDARCCRLDEGLGHVLRREQRRRHHGRRLRVRQPVLDGVRDGHGGAEHVPLQRRGGVRGVLPGAVRPGQLPELQAGGDGHHHRHQPLPDGLLQAQRQRRLVQPAAQAPGHGAARVGAHRRLPRRHRAHPVPAGVLLQERRRAVHHQRQQLLRAGAHHQRRRAGVGQGGADQGVPHRVDHHVPELGRELAVQQLPQRAVHLLRRHRHQRPEGGLPGRGAQQLGVRPDLHQLRPVLLAIPARRRACVRAGAGAVAFPFRLRLFDFAFGKLSKICLILMDGKW

SEQ ID NO: 12563 - protein, 289 aa, Triticum aestivum
  peptide (1)..(289): Ceres Seq. ID no. 13596521
  misc_feature (196)..(273): Pfam Name: Pfam Description:  Pollen allergen
  misc_feature (36)..(289): NCBI GI NO: 9967922 NR Description: expansin [Festuca pratensis]
  misc_feature (45)..(289): NCBI GI NO: 16517035 NR Description: alpha-expansin [Oryza sativa]
  misc_feature (31)..(288): NCBI GI NO: 14193755 NR Description: alpha-expansin 3 [Zea mays]
  misc_feature (60)..(288): NCBI GI NO: 4027895 NR Description: alpha-expansin precursor [Nicotiana tabacum]
  misc_feature (33)..(288): NCBI GI NO: 7489469 NR Description: expansin - rice
  misc_feature (43)..(288): NCBI GI NO: 4027891 NR Description: alpha-expansin precursor [Nicotiana tabacum]
  misc_feature (38)..(288): NCBI GI NO: 27464177 NR Description: expansin [Glycine max]
  misc_feature (33)..(288): NCBI GI NO: 18855018 NR Description: putative alpha-expansin precursor [Oryza sativa]
  misc_feature (43)..(288): NCBI GI NO: 11191999 NR Description: expansin [Lycopersicon esculentum]
  misc_feature (53)..(288): NCBI GI NO: 20149056 NR Description: putative expansin [Capsicum annuum]
TPHFTRLPRRPPIECTHPPQCPVPEAIPYALEMARRSGVLSRLAVVVVAAYCLAAATPGAADWMRGSATFYGGSNAAGTMGGACGYGNLYSTGYGTDTAALSTSLFNDGAACGECYQVQCDQGSSPNCKPGVTVTITATNLCPTDYSKPNDNGGWCNPPRKHLDMAQPAWERIGVYRAGIVPILFQRVSCSRSGGVRFTINGNSYFELVLITNVGGPGSVRAVQIKGSRTGWTTMSRNWGANWQSNSYLNGQSISFAVTATNGQKVVFQDVAPSNWGFGQTFTNSGQFY

SEQ ID NO: 12564 - protein, 257 aa, Triticum aestivum
  peptide (1)..(257): Ceres Seq. ID no. 13596522
  misc_feature (164)..(241): Pfam Name: Pfam Description:  Pollen allergen
  misc_feature (4)..(257): NCBI GI NO: 9967922 NR Description: expansin [Festuca pratensis]
  misc_feature (13)..(257): NCBI GI NO: 16517035 NR Description: alpha-expansin [Oryza sativa]
  misc_feature (1)..(256): NCBI GI NO: 14193755 NR Description: alpha-expansin 3 [Zea mays]
  misc_feature (28)..(256): NCBI GI NO: 4027895 NR Description: alpha-expansin precursor [Nicotiana tabacum]
  misc_feature (1)..(256): NCBI GI NO: 7489469 NR Description: expansin - rice
  misc_feature (11)..(256): NCBI GI NO: 4027891 NR Description: alpha-expansin precursor [Nicotiana tabacum]
  misc_feature (6)..(256): NCBI GI NO: 27464177 NR Description: expansin [Glycine max]
  misc_feature (1)..(256): NCBI GI NO: 18855018 NR Description: putative alpha-expansin precursor [Oryza sativa]
  misc_feature (11)..(256): NCBI GI NO: 11191999 NR Description: expansin [Lycopersicon esculentum]
  misc_feature (21)..(256): NCBI GI NO: 20149056 NR Description: putative expansin [Capsicum annuum]
MARRSGVLSRLAVVVVAAYCLAAATPGAADWMRGSATFYGGSNAAGTMGGACGYGNLYSTGYGTDTAALSTSLFNDGAACGECYQVQCDQGSSPNCKPGVTVTITATNLCPTDYSKPNDNGGWCNPPRKHLDMAQPAWERIGVYRAGIVPILFQRVSCSRSGGVRFTINGNSYFELVLITNVGGPGSVRAVQIKGSRTGWTTMSRNWGANWQSNSYLNGQSISFAVTATNGQKVVFQDVAPSNWGFGQTFTNSGQFY

SEQ ID NO: 12565 - DNA, 736 bp, Triticum aestivum
  misc_feature (1)..(736): Ceres Seq. ID no. 13598417
aaaggacaagagcgcaaaaccccaccacggaccctcgccgtcgctgtctccgtctcccatctcgccggcgctagctagggcaccggtcgccctccccctccgacgatgtcgacgccctctgatccagcggcgtccgcccagcccccctccaccgcggccacctccagcagcggcctcaccttcaagctccaccccctcgtcatcgtgaacgtctccgaccactacacccgcgtcaaggcccaggcctccttccccgccgaggccccgtcgccgggcaaggcgcaggcctcctgctccgccgaaggctccccgccccccgcggagccgccgagagtcttcgggtgcgtgatcggggtgcagcgcggccggacggtcgagatcttcaacagcttcgagctcgtcctcgaccccgtcaccggcacgctcgagcgcgccttcctggagaagaagctcgagctctataagaaggtgttccctgagttctatgtgttgggctggtactctactgggagcgatgtgcaggatactgacatcctaatccacaaggctctgatggacattaatgaaagccctgtttatcttctcttggatcctgcaatcaaccactcccagaaggatctacctgtgacaatttatgagagtgagttgcatgttatcgatgggggcccccagctcatctttgtcaaatcaaattacacaattgagactgtagaagcagagaggatatctgtagatc

SEQ ID NO: 12566 - protein, 210 aa, Triticum aestivum
  peptide (1)..(210): Ceres Seq. ID no. 13598418
  misc_feature (21)..(155): Pfam Name: Pfam Description:  Mov34/MPN/PAD-1 family
  misc_feature (17)..(209): NCBI GI NO: 9758401 NR Description: transcription factor-like
  misc_feature (17)..(209): NCBI GI NO: 18423847 NR Description: COP9 complex subunit 6 CSN6, putative
  misc_feature (17)..(209): NCBI GI NO: 18056665 NR Description: CSN complex subunit 6A [Arabidopsis thaliana]
  misc_feature (17)..(209): NCBI GI NO: 7486780 NR Description: hypothetical protein M3E9
  misc_feature (17)..(209): NCBI GI NO: 17940314 NR Description: COP9 signalosome subunit 6 [Arabidopsis thaliana]
  misc_feature (17)..(209): NCBI GI NO: 18416749 NR Description: COP9 signalosome subunit 6
  misc_feature (114)..(209): NCBI GI NO: 28393281 NR Description: putative COP9 complex subunit 6 CSN6
  misc_feature (114)..(209): NCBI GI NO: 19347926 NR Description: unknown protein [Arabidopsis thaliana]
  misc_feature (74)..(209): NCBI GI NO: 27663420 NR Description: similar to COP9 complex subunit 6
  misc_feature (11)..(52): NCBI GI NO: 27663420 NR Description: similar to COP9 complex subunit 6
MSTPSDPAASAQPPSTAATSSSGLTFKLHPLVIVNVSDHYTRVKAQASFPAEAPSPGKAQASCSAEGSPPPAEPPRVFGCVIGVQRGRTVEIFNSFELVLDPVTGTLERAFLEKKLELYKKVFPEFYVLGWYSTGSDVQDTDILIHKALMDINESPVYLLLDPAINHSQKDLPVTIYESELHVIDGGPQLIFVKSNYTIETVEAERISVD

SEQ ID NO: 12567 - DNA, 1444 bp, Triticum aestivum
  misc_feature (1)..(1444): Ceres Seq. ID no. 13596523
acaacaccacaattcactcctcttgctccgctcctctcctctcccgccggcgaccatggcgaaggccgcaacagcagcagcagcggcgcctctccacagcggcctcccggacgagatcgccatctgggagatcctcgtccgcctgccccccaaatcgctcctccgctgtcgcgccgtctgccgcgcctggcgcagcgccacctccgcccgcgacttcctcctcgcccaccacgcccgccagcccgccctccccctcgcctgcggcctggaagacgacggtggcagctgctactacctggcggcccagcaccagcccgtcgcccggcttgccaaggccttctatctgtgcgcctcctgcgacggcctcctcctcctctccaagcgcaaccagctctccatctgcaacccggccactcgtcagtatgctcccctgccggcgagttctgccttcattccgttgggaatgtaccggcaccgccccacaggcgagtaccgaatactgctgtacaaggaaattggtcttccagcgaccgacgggcaagatgcctgccacatcttcgcattgggctctgtccagccgccgaggagcatcgggtcgctgcaggaggcggagcaactgaggttcagcggggtacctgtcccgttccgcggtaacctgcattggcacctgaataagcattggtacctacaaaagtattggtacttgcccgagaatcatgagagcagaagcaacattataattgtattcgacaccacagccgagaggtttcgtgagatgtgtgctccggttgttcctgaccaccataaactgtttgagatggatggcatgctcggcatgtccagctttaacaatacatggccaatcattgatgtctggatgatgcaggagcaggactatgaaagtgaggtctggaccttgaaataccgagttgaattgtccaatgcagatcttctccttgtgcagtttggtcagtttgtcgattattggaatgtggtggtcgcctcttgtgatggcgctgtgcttgtgctggtcaagtttggcaagtctatacttcagtttgatattgatggcaagttggtcagttttcatcacaaagacctcttagttactcaacatcggctcaagcaaactcttgttccacataccttctttccgagactagatggtcattccgtgaatgcttggcctttcatctgagtggtgttgagtgagttggtccttcttagaggccaacctgtctttatccttgaagcctgcaatatgtatgaatttgatccaccatgagccctagcttctttatcgatgtaatgcaaagttatgatcaagaacctcctactgtaatatgattgcatgaaattcatatttctttggatatggttttgggctgaagtggctaacggacaagctgatgctaaaattaccaactctttaggttagtgtttg

SEQ ID NO: 12568 - protein, 398 aa, Triticum aestivum
  peptide (1)..(398): Ceres Seq. ID no. 13596524
  misc_feature (34)..(77): Pfam Name: Pfam Description:  F-box domain
  misc_feature (23)..(398): NCBI GI NO: 38346536 NR Description: OSJNBa0040D17.11
  misc_feature (1)..(398): NCBI GI NO: 38346527 NR Description: OSJNBa0040D17.2
  misc_feature (19)..(361): NCBI GI NO: 38346045 NR Description: OSJNBa0059D20.17
  misc_feature (100)..(398): NCBI GI NO: 38346045 NR Description: OSJNBa0059D20.17
  misc_feature (34)..(384): NCBI GI NO: 37533944 NR Description: hypothetical protein
  misc_feature (10)..(384): NCBI GI NO: 37530720 NR Description: unknown protein
  misc_feature (108)..(300): NCBI GI NO: 38344215 NR Description: OSJNBb0026E15.3
  misc_feature (19)..(88): NCBI GI NO: 38344215 NR Description: OSJNBb0026E15.3
  misc_feature (153)..(398): NCBI GI NO: 38346044 NR Description: OSJNBa0059D20.16
  misc_feature (11)..(377): NCBI GI NO: 33146635 NR Description: unknown protein
QHHNSLLLLRSSPLPPATMAKAATAAAAAPLHSGLPDEIAIWEILVRLPPKSLLRCRAVCRAWRSATSARDFLLAHHARQPALPLACGLEDDGGSCYYLAAQHQPVARLAKAFYLCASCDGLLLLSKRNQLSICNPATRQYAPLPASSAFIPLGMYRHRPTGEYRILLYKEIGLPATDGQDACHIFALGSVQPPRSIGSLQEAEQLRFSGVPVPFRGNLHWHLNKHWYLQKYWYLPENHESRSNIIIVFDTTAERFREMCAPVVPDHHKLFEMDGMLGMSSFNNTWPIIDVWMMQEQDYESEVWTLKYRVELSNADLLLVQFGQFVDYWNVVVASCDGAVLVLVKFGKSILQFDIDGKLVSFHHKDLLVTQHRLKQTLVPHTFFPRLDGHSVNAWPFI

SEQ ID NO: 12569 - protein, 380 aa, Triticum aestivum
  peptide (1)..(380): Ceres Seq. ID no. 13596525
  misc_feature (16)..(59): Pfam Name: Pfam Description:  F-box domain
  misc_feature (5)..(380): NCBI GI NO: 38346536 NR Description: OSJNBa0040D17.11
  misc_feature (1)..(380): NCBI GI NO: 38346527 NR Description: OSJNBa0040D17.2
  misc_feature (1)..(343): NCBI GI NO: 38346045 NR Description: OSJNBa0059D20.17
  misc_feature (82)..(380): NCBI GI NO: 38346045 NR Description: OSJNBa0059D20.17
  misc_feature (16)..(366): NCBI GI NO: 37533944 NR Description: hypothetical protein
  misc_feature (1)..(366): NCBI GI NO: 37530720 NR Description: unknown protein
  misc_feature (90)..(282): NCBI GI NO: 38344215 NR Description: OSJNBb0026E15.3
  misc_feature (1)..(70): NCBI GI NO: 38344215 NR Description: OSJNBb0026E15.3
  misc_feature (135)..(380): NCBI GI NO: 38346044 NR Description: OSJNBa0059D20.16
  misc_feature (1)..(359): NCBI GI NO: 33146635 NR Description: unknown protein
MAKAATAAAAAPLHSGLPDEIAIWEILVRLPPKSLLRCRAVCRAWRSATSARDFLLAHHARQPALPLACGLEDDGGSCYYLAAQHQPVARLAKAFYLCASCDGLLLLSKRNQLSICNPATRQYAPLPASSAFIPLGMYRHRPTGEYRILLYKEIGLPATDGQDACHIFALGSVQPPRSIGSLQEAEQLRFSGVPVPFRGNLHWHLNKHWYLQKYWYLPENHESRSNIIIVFDTTAERFREMCAPVVPDHHKLFEMDGMLGMSSFNNTWPIIDVWMMQEQDYESEVWTLKYRVELSNADLLLVQFGQFVDYWNVVVASCDGAVLVLVKFGKSILQFDIDGKLVSFHHKDLLVTQHRLKQTLVPHTFFPRLDGHSVNAWPFI

SEQ ID NO: 12570 - protein, 244 aa, Triticum aestivum
  peptide (1)..(244): Ceres Seq. ID no. 13596526
  misc_feature (1)..(244): NCBI GI NO: 38346536 NR Description: OSJNBa0040D17.11
  misc_feature (1)..(244): NCBI GI NO: 38346527 NR Description: OSJNBa0040D17.2
  misc_feature (1)..(207): NCBI GI NO: 38346045 NR Description: OSJNBa0059D20.17
  misc_feature (1)..(244): NCBI GI NO: 38346045 NR Description: OSJNBa0059D20.17
  misc_feature (1)..(230): NCBI GI NO: 37533944 NR Description: hypothetical protein
  misc_feature (1)..(230): NCBI GI NO: 37530720 NR Description: unknown protein
  misc_feature (1)..(146): NCBI GI NO: 38344215 NR Description: OSJNBb0026E15.3
  misc_feature (1)..(244): NCBI GI NO: 38346044 NR Description: OSJNBa0059D20.16
  misc_feature (1)..(223): NCBI GI NO: 33146635 NR Description: unknown protein
  misc_feature (1)..(168): NCBI GI NO: 34900696 NR Description: hypothetical protein~predicted by FGENESH etc.
MYRHRPTGEYRILLYKEIGLPATDGQDACHIFALGSVQPPRSIGSLQEAEQLRFSGVPVPFRGNLHWHLNKHWYLQKYWYLPENHESRSNIIIVFDTTAERFREMCAPVVPDHHKLFEMDGMLGMSSFNNTWPIIDVWMMQEQDYESEVWTLKYRVELSNADLLLVQFGQFVDYWNVVVASCDGAVLVLVKFGKSILQFDIDGKLVSFHHKDLLVTQHRLKQTLVPHTFFPRLDGHSVNAWPFI

SEQ ID NO: 12571 - DNA, 594 bp, Triticum aestivum
  misc_feature (1)..(594): Ceres Seq. ID no. 13596527
atcaacccatccatccaccgagcgatcggcactcccactctaagagctccgagccagccaacaatggcgtcctctccgctgctcgtggcgcttgtgatggtctcggcgtgcttcctggccgtgtccggccagaagttcaacgccatctacagcttcggcgactccatgtcggacaccggcaacctctgcgtcaacgggccccccgccggcctcaccctcacccagcccccctacggcgagaccttctttggccgtgccacctgccgctgctccgacggccgcctcgtcgtcgacttcctcgccgagaagttcgggctgccgctgctgaagccgtcgaagcagggcggcgcggacttcaagcagggcgccaacatggccatcatcggcgccaccgccatgggctccagcttcttccagtcgctcggcgtcggcgacaagatctggaacaacgggcccctcgacacccagatccagtggttccagaacctcctcccctccgtctgcggctcatcgtgcaagacgtacctgtccaagtccctgttcgtgctgggcgagctgggcgggaacgactacaacgcgcagctcttcggcggc

SEQ ID NO: 12572 - protein, 198 aa, Triticum aestivum
  peptide (1)..(198): Ceres Seq. ID no. 13596528
  misc_feature (49)..(197): Pfam Name: Pfam Description:  GDSL-like Lipase/Acylhydrolase
  misc_feature (27)..(197): NCBI GI NO: 34903956 NR Description: OSJNBa0038J17.23
  misc_feature (21)..(196): NCBI GI NO: 34903958 NR Description: OSJNBa0038J17.24
  misc_feature (30)..(197): NCBI GI NO: 34903978 NR Description: unnamed protein product
  misc_feature (44)..(171): NCBI GI NO: 34898072 NR Description: Similar to putative lipase (AC006232)
  misc_feature (45)..(195): NCBI GI NO: 15242538 NR Description: GDSL-motif lipase/hydrolase protein
  misc_feature (45)..(195): NCBI GI NO: 21553708 NR Description: GDSL-motif lipase/hydrolase-like protein
  misc_feature (43)..(197): NCBI GI NO: 34912612 NR Description: P0046B10.23
  misc_feature (27)..(191): NCBI GI NO: 34903986 NR Description: unnamed protein product
  misc_feature (27)..(197): NCBI GI NO: 34903962 NR Description: OSJNBa0038J17.26
  misc_feature (27)..(197): NCBI GI NO: 34911800 NR Description: lipase-like protein
INPSIHRAIGTPTLRAPSQPTMASSPLLVALVMVSACFLAVSGQKFNAIYSFGDSMSDTGNLCVNGPPAGLTLTQPPYGETFFGRATCRCSDGRLVVDFLAEKFGLPLLKPSKQGGADFKQGANMAIIGATAMGSSFFQSLGVGDKIWNNGPLDTQIQWFQNLLPSVCGSSCKTYLSKSLFVLGELGGNDYNAQLFGG

SEQ ID NO: 12573 - protein, 197 aa, Triticum aestivum
  peptide (1)..(197): Ceres Seq. ID no. 13596529
QPIHPPSDRHSHSKSSEPANNGVLSAARGACDGLGVLPGRVRPEVQRHLQLRRLHVGHRQPLRQRAPRRPHPHPAPLRRDLLWPCHLPLLRRPPRRRLPRREVRAAAAEAVEAGRRGLQAGRQHGHHRRHRHGLQLLPVARRRRQDLEQRAPRHPDPVVPEPPPLRLRLIVQDVPVQVPVRAGRAGRERLQRAALRR

SEQ ID NO: 12574 - protein, 177 aa, Triticum aestivum
  peptide (1)..(177): Ceres Seq. ID no. 13596530
  misc_feature (28)..(176): Pfam Name: Pfam Description:  GDSL-like Lipase/Acylhydrolase
  misc_feature (6)..(176): NCBI GI NO: 34903956 NR Description: OSJNBa0038J17.23
  misc_feature (1)..(175): NCBI GI NO: 34903958 NR Description: OSJNBa0038J17.24
  misc_feature (9)..(176): NCBI GI NO: 34903978 NR Description: unnamed protein product
  misc_feature (23)..(150): NCBI GI NO: 34898072 NR Description: Similar to putative lipase (AC006232)
  misc_feature (24)..(174): NCBI GI NO: 15242538 NR Description: GDSL-motif lipase/hydrolase protein
  misc_feature (24)..(174): NCBI GI NO: 21553708 NR Description: GDSL-motif lipase/hydrolase-like protein
  misc_feature (22)..(176): NCBI GI NO: 34912612 NR Description: P0046B10.23
  misc_feature (6)..(170): NCBI GI NO: 34903986 NR Description: unnamed protein product
  misc_feature (6)..(176): NCBI GI NO: 34903962 NR Description: OSJNBa0038J17.26
  misc_feature (6)..(176): NCBI GI NO: 34911800 NR Description: lipase-like protein
MASSPLLVALVMVSACFLAVSGQKFNAIYSFGDSMSDTGNLCVNGPPAGLTLTQPPYGETFFGRATCRCSDGRLVVDFLAEKFGLPLLKPSKQGGADFKQGANMAIIGATAMGSSFFQSLGVGDKIWNNGPLDTQIQWFQNLLPSVCGSSCKTYLSKSLFVLGELGGNDYNAQLFGG

SEQ ID NO: 12575 - DNA, 648 bp, Triticum aestivum
  misc_feature (1)..(648): Ceres Seq. ID no. 13662489
gtccacgtgtacacaaacgggactgtgtgtgatctcacagatataccacggtacacagaggttaggtttgtttgttccgagcccactgtactgatcagttcgataaaggagatatcttcctgcaagtatgttttaactgtccaaagcccaatgctctgcaagaacccgttgtttcagcaggaaaagcgcaccttcttcatccactgcaacgagtcgcttgcggaagcagaagctgaggccgccgaggacgacgactctctcccaaaagaagctcagatgtccatcgttccaaaccccgacgaattgcataactacgcagcttacgctacctgattgcccgccaatcacggtgccctcagctgatgaaagatgccgttattttggaagtacaacagcaagttggcaacatagtataactatcccctggcttgttctgtctgacgccaactagtggttacagggtactctttgagcagatatccattactgaaacagcttgagattaccttagaggaagattaagggcaaagagtgtcctgctgtactgtagtggtatataatttagtaaagggggtatttgagattcagtggcaggctttagacacatcaccaacaattttcctcttgaaatgttcataaaaacagtgc

SEQ ID NO: 12576 - protein, 110 aa, Triticum aestivum
  peptide (1)..(110): Ceres Seq. ID no. 13662490
  misc_feature (2)..(93): NCBI GI NO: 18421420 NR Description: expressed protein [Arabidopsis thaliana]
  misc_feature (2)..(93): NCBI GI NO: 21592392 NR Description: unknown [Arabidopsis thaliana]
  misc_feature (2)..(56): NCBI GI NO: 7487985 NR Description: hypothetical protein F7N22
  misc_feature (4)..(71): NCBI GI NO: 28850402 NR Description: similar to Arabidopsis thaliana (Mouse-ear cress)
VHVYTNGTVCDLTDIPRYTEVRFVCSEPTVLISSIKEISSCKYVLTVQSPMLCKNPLFQQEKRTFFIHCNESLAEAEAEAAEDDDSLPKEAQMSIVPNPDELHNYAAYAT

SEQ ID NO: 12577 - protein, 60 aa, Triticum aestivum
  peptide (1)..(60): Ceres Seq. ID no. 13662491
  misc_feature (1)..(43): NCBI GI NO: 18421420 NR Description: expressed protein [Arabidopsis thaliana]
  misc_feature (1)..(43): NCBI GI NO: 21592392 NR Description: unknown [Arabidopsis thaliana]
  misc_feature (1)..(21): NCBI GI NO: 28850402 NR Description: similar to Arabidopsis thaliana (Mouse-ear cress)
MLCKNPLFQQEKRTFFIHCNESLAEAEAEAAEDDDSLPKEAQMSIVPNPDELHNYAAYAT

SEQ ID NO: 12578 - DNA, 781 bp, Triticum aestivum
  misc_feature (1)..(781): Ceres Seq. ID no. 12584717
aacaactaagagtcgcatcttaatcttagataccttaatctcttagctccagcaatggcttcacatgcatccgcttttaggacaaacatcctactcgccgccgttttagccgtgttcgtcctgccatccttagcttgtcggaaggctcgagctccggccccggctccggctctgtctccggccccggctctgtctccggctctggctccggccccgggtccggcgcccatgatactgtgccaggattgtgactcgcggtgtcagtcggcttcgatgtgcgacgcctacgttgccgcggcgggatgcggaaatgcctgcagcggcgcgacaccggactgcgaaccctgcatgtccgagatccaccagtcctgcccggccgcctgcaacgagggctgcaccaggaactgcgttggccagtgcgactgcgccggctcatgcagccaagcctgcgccgaaggcgcccggcgtacatgtcagtacaagtgtgtctactcctactacgcggtcaaatcatgccacgaatgccaggacagtgcacgcacgcggtgcaccgatgcctgcaacaccgactgcaaggccaactgtgtcagcggctgatccataatcctagtaggcccaacttatgttgtactccaactatgtatatgaataagatatcagagtatgcagcggtatatggtcattgcgcacgtatgcctgctgtttttgtacatctatagatgtattactatctgtatacttccatggatggcatatggtcaatgcaggtgtacctgctgct

SEQ ID NO: 12579 - protein, 180 aa, Triticum aestivum
  peptide (1)..(180): Ceres Seq. ID no. 12584718
  misc_feature (56)..(179): Pfam Name: Pfam Description:  Keratin, high sulfur B2 protein
  misc_feature (1)..(58): NCBI GI NO: 10945166 NR Description: TapA protein [Acidithiobacillus ferrooxidans]
  misc_feature (24)..(85): NCBI GI NO: 39589927 NR Description: Hypothetical protein CBG04647
MASHASAFRTNILLAAVLAVFVLPSLACRKARAPAPAPALSPAPALSPALAPAPGPAPMILCQDCDSRCQSASMCDAYVAAAGCGNACSGATPDCEPCMSEIHQSCPAACNEGCTRNCVGQCDCAGSCSQACAEGARRTCQYKCVYSYYAVKSCHECQDSARTRCTDACNTDCKANCVSG

SEQ ID NO: 12580 - protein, 138 aa, Triticum aestivum
  peptide (1)..(138): Ceres Seq. ID no. 12584719
MRKCLQRRDTGLRTLHVRDPPVLPGRLQRGLHQELRWPVRLRRLMQPSLRRRRPAYMSVQVCLLLLRGQIMPRMPGQCTHAVHRCLQHRLQGQLCQRLIHNPSRPNLCCTPTMYMNKISEYAAVYGHCARMPAVFVHL

SEQ ID NO: 12581 - protein, 122 aa, Triticum aestivum
  peptide (1)..(122): Ceres Seq. ID no. 12584720
  misc_feature (1)..(121): Pfam Name: Pfam Description:  Keratin, high sulfur B2 protein
  misc_feature (1)..(27): NCBI GI NO: 39589927 NR Description: Hypothetical protein CBG04647
MILCQDCDSRCQSASMCDAYVAAAGCGNACSGATPDCEPCMSEIHQSCPAACNEGCTRNCVGQCDCAGSCSQACAEGARRTCQYKCVYSYYAVKSCHECQDSARTRCTDACNTDCKANCVSG

SEQ ID NO: 12582 - DNA, 1237 bp, Triticum aestivum
  misc_feature (1)..(1237): Ceres Seq. ID no. 12615444
acccctattccccatccctacgcccgcctcctcctcctcctccgcatcccattctcccccaaatcggccgagtaaaccctagctaaaccccgacctccgccgccggcgagcgagatgaacttcaagggcgcgcggatgccgagcgcgccggcgggcgcgggcgcgctggtcaagctcgggctgctcggcggcgccgcgctctacctcggcaacaagaccctctacaacgtcgagggaggccaccgggccatcgtcttcaaccgcctcgaggggatcaaggacaaggtctaccccgaggggactcacatcgtcatcccgtggttcgagaggcccatcatctacgacgtccgcgcgcgacccaacctcgtcgagagcacctccgggagccgggatctccagatggtgagaattggtcttcgtgttcttacacgacccatgccagagagactaccaactatgtacaggaccctgggggagaactacaatgagagagtgttgccttcgatcattcatgaaacactcaaagctgtggttgcccaatacaatgccagtcagctaatcacacagagagaggctgtgagcagggagatcaggaagattctgacagagagggcgaagaacttcaacatcgctctggatgatgtgtccattaccagtctaagctttggtaaagagttcactcatgccattgaagccaaacaggttgctgctcaggaagctgagcgtgccaagttcattgttgagaaggctgagcaagacaagaaaagtgcaattatcagggcacagggagaggcaaagagtgcagagctgattggcaatgccatcgccaacaaccctgctttcgtggcgctcaggcagattgaagccgccagggagatcgcccacaccattgcagcctccaacaacaaggtgttccttgactcgggtgacctgctgcttgggctccagtcgctcaagatgttgaacaacaacaacaagaaatgagaccgtctctgtcacgcatgttgtggttgccgccagtcttgtctacattggaagaagagtacttttgagaggaacgaacgcttagtttctagcattcccgacccgaaaacaagaaagacgcccttgctactgtgaattatttgtgcacttttcaagtgaacctgtcagctgctaccgctgtgcgtagcttataacgtctgggcggttatgtggtgattatattggccttttcatgttcatcttggcttgttcc

SEQ ID NO: 12583 - protein, 289 aa, Triticum aestivum
  peptide (1)..(289): Ceres Seq. ID no. 12615445
  misc_feature (1)..(288): NCBI GI NO: 34394832 NR Description: putative prohibitin
  misc_feature (57)..(288): NCBI GI NO: 34901014 NR Description: putative prohibitin
  misc_feature (1)..(58): NCBI GI NO: 34901014 NR Description: putative prohibitin
  misc_feature (2)..(288): NCBI GI NO: 7716462 NR Description: prohibitin [Zea mays]
  misc_feature (1)..(288): NCBI GI NO: 7716456 NR Description: prohibitin [Zea mays]
  misc_feature (1)..(289): NCBI GI NO: 12751303 NR Description: prohibitin 1-like protein [Brassica napus]
  misc_feature (7)..(282): NCBI GI NO: 15235317 NR Description: prohibitin-like protein; protein id: At4g28510
  misc_feature (7)..(282): NCBI GI NO: 21593626 NR Description: prohibitin-like protein [Arabidopsis thaliana]
  misc_feature (1)..(282): NCBI GI NO: 15219569 NR Description: putative prohibitin 2; protein id: At1g03860
  misc_feature (1)..(282): NCBI GI NO: 15225374 NR Description: putative prohibitin; protein id: At2g20530
MNFKGARMPSAPAGAGALVKLGLLGGAALYLGNKTLYNVEGGHRAIVFNRLEGIKDKVYPEGTHIVIPWFERPIIYDVRARPNLVESTSGSRDLQMVRIGLRVLTRPMPERLPTMYRTLGENYNERVLPSIIHETLKAVVAQYNASQLITQREAVSREIRKILTERAKNFNIALDDVSITSLSFGKEFTHAIEAKQVAAQEAERAKFIVEKAEQDKKSAIIRAQGEAKSAELIGNAIANNPAFVALRQIEAAREIAHTIAASNNKVFLDSGDLLLGLQSLKMLNNNNKK

SEQ ID NO: 12584 - protein, 282 aa, Triticum aestivum
  peptide (1)..(282): Ceres Seq. ID no. 12615446
  misc_feature (1)..(281): NCBI GI NO: 34394832 NR Description: putative prohibitin
  misc_feature (50)..(281): NCBI GI NO: 34901014 NR Description: putative prohibitin
  misc_feature (1)..(51): NCBI GI NO: 34901014 NR Description: putative prohibitin
  misc_feature (1)..(281): NCBI GI NO: 7716462 NR Description: prohibitin [Zea mays]
  misc_feature (1)..(281): NCBI GI NO: 7716456 NR Description: prohibitin [Zea mays]
  misc_feature (1)..(282): NCBI GI NO: 12751303 NR Description: prohibitin 1-like protein [Brassica napus]
  misc_feature (1)..(275): NCBI GI NO: 15235317 NR Description: prohibitin-like protein; protein id: At4g28510
  misc_feature (1)..(275): NCBI GI NO: 21593626 NR Description: prohibitin-like protein [Arabidopsis thaliana]
  misc_feature (1)..(275): NCBI GI NO: 15219569 NR Description: putative prohibitin 2; protein id: At1g03860
  misc_feature (1)..(275): NCBI GI NO: 15225374 NR Description: putative prohibitin; protein id: At2g20530
MPSAPAGAGALVKLGLLGGAALYLGNKTLYNVEGGHRAIVFNRLEGIKDKVYPEGTHIVIPWFERPIIYDVRARPNLVESTSGSRDLQMVRIGLRVLTRPMPERLPTMYRTLGENYNERVLPSIIHETLKAVVAQYNASQLITQREAVSREIRKILTERAKNFNIALDDVSITSLSFGKEFTHAIEAKQVAAQEAERAKFIVEKAEQDKKSAIIRAQGEAKSAELIGNAIANNPAFVALRQIEAAREIAHTIAASNNKVFLDSGDLLLGLQSLKMLNNNNKK

SEQ ID NO: 12585 - protein, 194 aa, Triticum aestivum
  peptide (1)..(194): Ceres Seq. ID no. 12615447
  misc_feature (1)..(193): NCBI GI NO: 34394832 NR Description: putative prohibitin
  misc_feature (1)..(193): NCBI GI NO: 34901014 NR Description: putative prohibitin
  misc_feature (1)..(193): NCBI GI NO: 7716462 NR Description: prohibitin [Zea mays]
  misc_feature (1)..(193): NCBI GI NO: 7716456 NR Description: prohibitin [Zea mays]
  misc_feature (1)..(194): NCBI GI NO: 12751303 NR Description: prohibitin 1-like protein [Brassica napus]
  misc_feature (1)..(187): NCBI GI NO: 15235317 NR Description: prohibitin-like protein; protein id: At4g28510
  misc_feature (1)..(187): NCBI GI NO: 21593626 NR Description: prohibitin-like protein [Arabidopsis thaliana]
  misc_feature (1)..(187): NCBI GI NO: 15219569 NR Description: putative prohibitin 2; protein id: At1g03860
  misc_feature (1)..(187): NCBI GI NO: 15225374 NR Description: putative prohibitin; protein id: At2g20530
  misc_feature (1)..(183): NCBI GI NO: 15241424 NR Description: prohibitin; protein id: At5g44140.1
MVRIGLRVLTRPMPERLPTMYRTLGENYNERVLPSIIHETLKAVVAQYNASQLITQREAVSREIRKILTERAKNFNIALDDVSITSLSFGKEFTHAIEAKQVAAQEAERAKFIVEKAEQDKKSAIIRAQGEAKSAELIGNAIANNPAFVALRQIEAAREIAHTIAASNNKVFLDSGDLLLGLQSLKMLNNNNKK

SEQ ID NO: 12586 - DNA, 1296 bp, Triticum aestivum
  misc_feature (1)..(1296): Ceres Seq. ID no. 12624901
accagtcaccacaccacactcccccagatcggcttccgttgcgagacggaccgccccccgctttatttccgccaccaccgacgccgcgccggcgaaggagcccctcgccagatcggatccctccgccgcgacgcaacatggcggctctgctgatgcgcaggctcgccgggacctaccgcggccgcgcgccgctggccgccgccgccgttggcggggccgcgttcttctacgcctcgtcgaaccccaccgtcgcgcacatggaggagaagggggaggacgccgctgccaaagttgctcttaaccctgagaaatggttagaattcaagctccaggagaaggcaacagttagtcatgattcagagctattcagattttcgtttgacccatctactaagctgggcctggatgttgcctcatgtctcgtaacaagggcccccataggtcaggaagtggagggaaaaagaaaatacgttattcgcccgtacacacctatctctgacccagattctaaaggatatttcgacctattaatcaaggtttatcccgaagggaaaatgtctcagcattttgctaatttgaagccaggagatgttctcgaagtcaaagggcccattgaaaagctcagatatagcccaaatatgaaaagacaaattggcatggttgctggtggtactggcataacgccaatgctgcaagttgttagggccatcctgaaaaaccccgatgacaacactcaggtttccttgatctacgccaatgtgtcaccagatgatatcttgctgaaaaaggagttagatagacttgccagcagctatcctaatttcaaggtattttatacagtcgataaaccatcaagtgactggaggggtggtgctggctacatatcaaaggacatggttttgaaaggtttgccaggcccaggggaggattctcttattcttgtttgtggtcctcctggaatgatgaatcacatatctggagataaggcaaaggattattcacagggcgaggtcacgggccttctcaaagatttaggatacacggcagatatggtatacaaattttgagtcgatcacggaaacgtaggggaccctgacatgcccgctgcctgccatggcagtaaaataaaccgcagctgaacctttttttcttgtcgcgccacggcaattagtgccaaactcagaacagtatggtgcatcattttgtaagaatttcggttcggttccgttttgtcatctgtgcgcgctgcatggacacctgaataacctgacgccgcctggttggcggtgttgtttt

SEQ ID NO: 12587 - protein, 354 aa, Triticum aestivum
  peptide (1)..(354): Ceres Seq. ID no. 12624902
  misc_feature (214)..(316): Pfam Name: Pfam Description:  Oxidoreductase NAD-binding domain
  misc_feature (55)..(354): NCBI GI NO: 18420117 NR Description: cytochrome-b5 reductase - like protein
  misc_feature (46)..(316): NCBI GI NO: 34910260 NR Description: putative cytochrome b5 reductase
  misc_feature (337)..(354): NCBI GI NO: 34910260 NR Description: putative cytochrome b5 reductase
  misc_feature (64)..(354): NCBI GI NO: 14582160 NR Description: cytochrome b5 reductase PP36 [Cucurbita maxima]
  misc_feature (179)..(349): NCBI GI NO: 40716487 NR Description: cytochrome b5 reductase [Musa acuminata]
  misc_feature (104)..(354): NCBI GI NO: 40747375 NR Description: hypothetical protein AN0432.2
  misc_feature (47)..(343): NCBI GI NO: 40739560 NR Description: hypothetical protein AN6366.2
  misc_feature (96)..(354): NCBI GI NO: 4336205 NR Description: cytochrome b5 reductase [Zea mays]
  misc_feature (50)..(354): NCBI GI NO: 6322699 NR Description: NADH-cytochrome b5 reductase; Mcr1p
  misc_feature (99)..(354): NCBI GI NO: 17221690 NR Description: cytochrome b5 reductase isoform II [Zea mays]
QSPHHTPPDRLPLRDGPPPALFPPPPTPRRRRSPSPDRIPPPRRNMAALLMRRLAGTYRGRAPLAAAAVGGAAFFYASSNPTVAHMEEKGEDAAAKVALNPEKWLEFKLQEKATVSHDSELFRFSFDPSTKLGLDVASCLVTRAPIGQEVEGKRKYVIRPYTPISDPDSKGYFDLLIKVYPEGKMSQHFANLKPGDVLEVKGPIEKLRYSPNMKRQIGMVAGGTGITPMLQVVRAILKNPDDNTQVSLIYANVSPDDILLKKELDRLASSYPNFKVFYTVDKPSSDWRGGAGYISKDMVLKGLPGPGEDSLILVCGPPGMMNHISGDKAKDYSQGEVTGLLKDLGYTADMVYKF

SEQ ID NO: 12588 - protein, 309 aa, Triticum aestivum
  peptide (1)..(309): Ceres Seq. ID no. 12624903
  misc_feature (169)..(271): Pfam Name: Pfam Description:  Oxidoreductase NAD-binding domain
  misc_feature (10)..(309): NCBI GI NO: 18420117 NR Description: cytochrome-b5 reductase - like protein
  misc_feature (1)..(271): NCBI GI NO: 34910260 NR Description: putative cytochrome b5 reductase
  misc_feature (292)..(309): NCBI GI NO: 34910260 NR Description: putative cytochrome b5 reductase
  misc_feature (19)..(309): NCBI GI NO: 14582160 NR Description: cytochrome b5 reductase PP36 [Cucurbita maxima]
  misc_feature (134)..(304): NCBI GI NO: 40716487 NR Description: cytochrome b5 reductase [Musa acuminata]
  misc_feature (59)..(309): NCBI GI NO: 40747375 NR Description: hypothetical protein AN0432.2
  misc_feature (2)..(298): NCBI GI NO: 40739560 NR Description: hypothetical protein AN6366.2
  misc_feature (51)..(309): NCBI GI NO: 4336205 NR Description: cytochrome b5 reductase [Zea mays]
  misc_feature (5)..(309): NCBI GI NO: 6322699 NR Description: NADH-cytochrome b5 reductase; Mcr1p
  misc_feature (54)..(309): NCBI GI NO: 17221690 NR Description: cytochrome b5 reductase isoform II [Zea mays]
MAALLMRRLAGTYRGRAPLAAAAVGGAAFFYASSNPTVAHMEEKGEDAAAKVALNPEKWLEFKLQEKATVSHDSELFRFSFDPSTKLGLDVASCLVTRAPIGQEVEGKRKYVIRPYTPISDPDSKGYFDLLIKVYPEGKMSQHFANLKPGDVLEVKGPIEKLRYSPNMKRQIGMVAGGTGITPMLQVVRAILKNPDDNTQVSLIYANVSPDDILLKKELDRLASSYPNFKVFYTVDKPSSDWRGGAGYISKDMVLKGLPGPGEDSLILVCGPPGMMNHISGDKAKDYSQGEVTGLLKDLGYTADMVYKF

SEQ ID NO: 12589 - protein, 304 aa, Triticum aestivum
  peptide (1)..(304): Ceres Seq. ID no. 12624904
  misc_feature (164)..(266): Pfam Name: Pfam Description:  Oxidoreductase NAD-binding domain
  misc_feature (5)..(304): NCBI GI NO: 18420117 NR Description: cytochrome-b5 reductase - like protein
  misc_feature (1)..(266): NCBI GI NO: 34910260 NR Description: putative cytochrome b5 reductase
  misc_feature (287)..(304): NCBI GI NO: 34910260 NR Description: putative cytochrome b5 reductase
  misc_feature (14)..(304): NCBI GI NO: 14582160 NR Description: cytochrome b5 reductase PP36 [Cucurbita maxima]
  misc_feature (129)..(299): NCBI GI NO: 40716487 NR Description: cytochrome b5 reductase [Musa acuminata]
  misc_feature (54)..(304): NCBI GI NO: 40747375 NR Description: hypothetical protein AN0432.2
  misc_feature (1)..(293): NCBI GI NO: 40739560 NR Description: hypothetical protein AN6366.2
  misc_feature (46)..(304): NCBI GI NO: 4336205 NR Description: cytochrome b5 reductase [Zea mays]
  misc_feature (1)..(304): NCBI GI NO: 6322699 NR Description: NADH-cytochrome b5 reductase; Mcr1p
  misc_feature (49)..(304): NCBI GI NO: 17221690 NR Description: cytochrome b5 reductase isoform II [Zea mays]
MRRLAGTYRGRAPLAAAAVGGAAFFYASSNPTVAHMEEKGEDAAAKVALNPEKWLEFKLQEKATVSHDSELFRFSFDPSTKLGLDVASCLVTRAPIGQEVEGKRKYVIRPYTPISDPDSKGYFDLLIKVYPEGKMSQHFANLKPGDVLEVKGPIEKLRYSPNMKRQIGMVAGGTGITPMLQVVRAILKNPDDNTQVSLIYANVSPDDILLKKELDRLASSYPNFKVFYTVDKPSSDWRGGAGYISKDMVLKGLPGPGEDSLILVCGPPGMMNHISGDKAKDYSQGEVTGLLKDLGYTADMVYKF

SEQ ID NO: 12590 - DNA, 1632 bp, Triticum aestivum
  misc_feature (1)..(1632): Ceres Seq. ID no. 14308041
atcgatccaagctgccatggccgcggttctcccgatctgcctgcttctcgtgcttctcctcgccatcccgctcatcctcttcaagtccaggcgcccggcgcctcatcgtggccccggtggcagggccgtgcggctcccgccagggccatgggcgctcccggtcatcggtcacctgcaccatctcgccggcgcccttccgcaccgtgctctgcgcgacctcgcgcggcgccacggcccgctcatgatgctccgcctcggcgagctcgacgccgtggtcgcgtcgtcccctgacgccgcgcgcgagatcatgaagacccacgacgcttccttcgcgtccaggcctctgacgtcgatgcagcagatggcgtacggcgacgccgagggcctcatcttcgcgccctacggcgacgcatggcggcagcttcgcaagatatgcactgtcgagatcttcagctcccgccgcgtccagtccttccgccccgcccgcgaggaggagctcggtcacctcctccgctccgtcgcggcggcttctgcctcgtcttcgccggtgaacctgagcgagcgcatatcggcgtacgtcgcggattctacggtgcgcgccatcgtcggcagccggttcaagcagagggacacgtacctggagatgctgcaagagggactcaaaatcgtgcccgggatgacccttcccgacattttcccctcctcgcgtctcgtgcggctccttagcagcgtccccggcaggatacagcgccatagccaagacatgaagctgttcatggacaccatcatccaagagcaccaggtgaacagcggccccgactgcgacggcgacaaagaagaagacttgctcgacgtgctcctgagactccaaaaggaaggggactcgcagtatccactcaccactgacaacatcaagaccgtcatgctggacatgtttggcgccggcagcgagacgtcggcgacgacgctgcagtgggcgatggcggagctgatacggaacccgcgggttatgcggaaggcgcaagacgaggtccggcagcaactcgccgggcacgacaaggtgagggaggccgacctggcagatctgcgataccttgggtttgtcatcaaggagacgctgaggatgcacccgccggcgccattgctgctgccgcgtaggtgcgggagcccgtgtcaggttctgggcctggacgtgccggagggggtcatggtgatcgtgaacgcgtgggcgatcggcatggacccggcgcactgggaggcacccgaggagttcgcaccggagcggttcgagcagaacgggagggacttcaagggggcggacttcgagttcgtgccgttcggcggcgggaggaggatatgccccggcatggctttcgggctggcgcacgtggagctcgcgctcgcggcgctgctgttccacttcgactgggagctgccaggcggggcggcggccgaggatctggacatgaccgaggagtttggcgtcacggcacggctccggtctgaccttgtcgtggtcgccgtggccacggagtaaacgcacttttggtgatgtgcatcctatatttgtttttttgaggtgacctatatttgttgatcctgtgcaagttgattagcccatcaccgtggcgt

SEQ ID NO: 12591 - protein, 511 aa, Triticum aestivum
  peptide (1)..(511): Ceres Seq. ID no. 14308042
  misc_feature (46)..(504): Pfam Name: Pfam Description:  Cytochrome P450
  misc_feature (8)..(506): NCBI GI NO: 34914838 NR Description: putative cytochrome P450
  misc_feature (6)..(507): NCBI GI NO: 34897000 NR Description: putative cytochrome P450
  misc_feature (6)..(507): NCBI GI NO: 34896754 NR Description: putative cytochrome P450
  misc_feature (18)..(346): NCBI GI NO: 37531530 NR Description: putative cytochrome P450
  misc_feature (310)..(507): NCBI GI NO: 37531530 NR Description: putative cytochrome P450
  misc_feature (36)..(511): NCBI GI NO: 12331298 NR Description: cytochrome P450 [Solanum tuberosum]
  misc_feature (15)..(507): NCBI GI NO: 34905744 NR Description: putative cytochrome P450
  misc_feature (44)..(507): NCBI GI NO: 5915836 NR Description: Cytochrome P450 71D7
  misc_feature (12)..(511): NCBI GI NO: 13516744 NR Description: cytochrome P450 [Triticum aestivum]
  misc_feature (5)..(511): NCBI GI NO: 13516750 NR Description: cytochrome P450 [Asparagus officinalis]
SIQAAMAAVLPICLLLVLLLAIPLILFKSRRPAPHRGPGGRAVRLPPGPWALPVIGHLHHLAGALPHRALRDLARRHGPLMMLRLGELDAVVASSPDAAREIMKTHDASFASRPLTSMQQMAYGDAEGLIFAPYGDAWRQLRKICTVEIFSSRRVQSFRPAREEELGHLLRSVAAASASSSPVNLSERISAYVADSTVRAIVGSRFKQRDTYLEMLQEGLKIVPGMTLPDIFPSSRLVRLLSSVPGRIQRHSQDMKLFMDTIIQEHQVNSGPDCDGDKEEDLLDVLLRLQKEGDSQYPLTTDNIKTVMLDMFGAGSETSATTLQWAMAELIRNPRVMRKAQDEVRQQLAGHDKVREADLADLRYLGFVIKETLRMHPPAPLLLPRRCGSPCQVLGLDVPEGVMVIVNAWAIGMDPAHWEAPEEFAPERFEQNGRDFKGADFEFVPFGGGRRICPGMAFGLAHVELALAALLFHFDWELPGGAAAEDLDMTEEFGVTARLRSDLVVVAVATE

SEQ ID NO: 12592 - protein, 506 aa, Triticum aestivum
  peptide (1)..(506): Ceres Seq. ID no. 14308043
  misc_feature (41)..(499): Pfam Name: Pfam Description:  Cytochrome P450
  misc_feature (3)..(501): NCBI GI NO: 34914838 NR Description: putative cytochrome P450
  misc_feature (1)..(502): NCBI GI NO: 34897000 NR Description: putative cytochrome P450
  misc_feature (1)..(502): NCBI GI NO: 34896754 NR Description: putative cytochrome P450
  misc_feature (13)..(341): NCBI GI NO: 37531530 NR Description: putative cytochrome P450
  misc_feature (305)..(502): NCBI GI NO: 37531530 NR Description: putative cytochrome P450
  misc_feature (31)..(506): NCBI GI NO: 12331298 NR Description: cytochrome P450 [Solanum tuberosum]
  misc_feature (10)..(502): NCBI GI NO: 34905744 NR Description: putative cytochrome P450
  misc_feature (39)..(502): NCBI GI NO: 5915836 NR Description: Cytochrome P450 71D7
  misc_feature (7)..(506): NCBI GI NO: 13516744 NR Description: cytochrome P450 [Triticum aestivum]
  misc_feature (1)..(506): NCBI GI NO: 13516750 NR Description: cytochrome P450 [Asparagus officinalis]
MAAVLPICLLLVLLLAIPLILFKSRRPAPHRGPGGRAVRLPPGPWALPVIGHLHHLAGALPHRALRDLARRHGPLMMLRLGELDAVVASSPDAAREIMKTHDASFASRPLTSMQQMAYGDAEGLIFAPYGDAWRQLRKICTVEIFSSRRVQSFRPAREEELGHLLRSVAAASASSSPVNLSERISAYVADSTVRAIVGSRFKQRDTYLEMLQEGLKIVPGMTLPDIFPSSRLVRLLSSVPGRIQRHSQDMKLFMDTIIQEHQVNSGPDCDGDKEEDLLDVLLRLQKEGDSQYPLTTDNIKTVMLDMFGAGSETSATTLQWAMAELIRNPRVMRKAQDEVRQQLAGHDKVREADLADLRYLGFVIKETLRMHPPAPLLLPRRCGSPCQVLGLDVPEGVMVIVNAWAIGMDPAHWEAPEEFAPERFEQNGRDFKGADFEFVPFGGGRRICPGMAFGLAHVELALAALLFHFDWELPGGAAAEDLDMTEEFGVTARLRSDLVVVAVATE

SEQ ID NO: 12593 - protein, 431 aa, Triticum aestivum
  peptide (1)..(431): Ceres Seq. ID no. 14308044
  misc_feature (1)..(424): Pfam Name: Pfam Description:  Cytochrome P450
  misc_feature (1)..(426): NCBI GI NO: 34914838 NR Description: putative cytochrome P450
  misc_feature (1)..(427): NCBI GI NO: 34897000 NR Description: putative cytochrome P450
  misc_feature (1)..(427): NCBI GI NO: 34896754 NR Description: putative cytochrome P450
  misc_feature (1)..(266): NCBI GI NO: 37531530 NR Description: putative cytochrome P450
  misc_feature (230)..(427): NCBI GI NO: 37531530 NR Description: putative cytochrome P450
  misc_feature (1)..(431): NCBI GI NO: 12331298 NR Description: cytochrome P450 [Solanum tuberosum]
  misc_feature (1)..(427): NCBI GI NO: 34905744 NR Description: putative cytochrome P450
  misc_feature (1)..(427): NCBI GI NO: 5915836 NR Description: Cytochrome P450 71D7
  misc_feature (1)..(431): NCBI GI NO: 13516744 NR Description: cytochrome P450 [Triticum aestivum]
  misc_feature (1)..(431): NCBI GI NO: 13516750 NR Description: cytochrome P450 [Asparagus officinalis]
MMLRLGELDAVVASSPDAAREIMKTHDASFASRPLTSMQQMAYGDAEGLIFAPYGDAWRQLRKICTVEIFSSRRVQSFRPAREEELGHLLRSVAAASASSSPVNLSERISAYVADSTVRAIVGSRFKQRDTYLEMLQEGLKIVPGMTLPDIFPSSRLVRLLSSVPGRIQRHSQDMKLFMDTIIQEHQVNSGPDCDGDKEEDLLDVLLRLQKEGDSQYPLTTDNIKTVMLDMFGAGSETSATTLQWAMAELIRNPRVMRKAQDEVRQQLAGHDKVREADLADLRYLGFVIKETLRMHPPAPLLLPRRCGSPCQVLGLDVPEGVMVIVNAWAIGMDPAHWEAPEEFAPERFEQNGRDFKGADFEFVPFGGGRRICPGMAFGLAHVELALAALLFHFDWELPGGAAAEDLDMTEEFGVTARLRSDLVVVAVATE

SEQ ID NO: 12594 - DNA, 1104 bp, Triticum aestivum
  misc_feature (1)..(1104): Ceres Seq. ID no. 12615890
agaccagtgagcgcagcacacagatcagcactcaacaacaagccttgcgttgcaaaccatcgaccgaaggaaccgactgagctaagaggaggttcgccgagaagctagccgtgcgtagcaatggtgaagactgcggcagctgggagcactggcgatggcgccgtggcagcgaagcagcagcagcttggcggcaagatgaggacgtacaagggcgtgcggatgaggagctggggcgcgtgggtgtcggagatccgggcgcccgggcagaagacgcggatatggctcggctcccactccaccgccgaggccgccgcgcgcgcctacgacgccgcgctgctctgcctcaagggcgcctccgccgccgccgacctcaacttccccgtgcgcttccccttcgacctccccgccgccgccatgtcgcccaaagtccatccagcgcgtcgccgcagccgccgccgccggggccagcgctaatgtgttcgacttcgccgctgccgacgacagtgccagcgctaatgcccgtcgacttcgccggtgccgacgacagcgccagcgcggtcacccccgagtactgcagctcctccagcaatgcctcgccggtgagctctccggagacggcaagcagtggcggcgccgacctcgacggcgtagacctcctgggttacggttacagccagtgctcgctcgcggaaatcgaggccttcttccagtcgcccaagtgcatggagtacgccatgatggacccgtgcagcaccttcttcgctccggcgccgatagcaatggaggacgagtgcagctgggaggaaggaggcgacattgcgctctggagctactgaaccggagtccgggaagccggagaaccgaagaaactgacaaatcgttactcaagcgaaggccagaactggccatgcatggtgataactatccttaatttcatatatgtggtaaattaattcgattcattgtacacaacaacaataaggtagttgagcgttgtgggggggagctctcatggagctacatgttttaaggcagcttccatggagttaacctcccttcaattgcttgttacatccgtgtaaaaaagctgcttgcaatgcaagc

SEQ ID NO: 12595 - protein, 185 aa, Triticum aestivum
  peptide (1)..(185): Ceres Seq. ID no. 12615891
MARLPLHRRGRRARLRRRAALPQGRLRRRRPQLPRALPLRPPRRRHVAQSPSSASPQPPPPGPALMCSTSPLPTTVPALMPVDFAGADDSASAVTPEYCSSSSNASPVSSPETASSGGADLDGVDLLGYGYSQCSLAEIEAFFQSPKCMEYAMMDPCSTFFAPAPIAMEDECSWEEGGDIALWSY

SEQ ID NO: 12596 - protein, 120 aa, Triticum aestivum
  peptide (1)..(120): Ceres Seq. ID no. 12615892
MCSTSPLPTTVPALMPVDFAGADDSASAVTPEYCSSSSNASPVSSPETASSGGADLDGVDLLGYGYSQCSLAEIEAFFQSPKCMEYAMMDPCSTFFAPAPIAMEDECSWEEGGDIALWSY

SEQ ID NO: 12597 - protein, 117 aa, Triticum aestivum
  peptide (1)..(117): Ceres Seq. ID no. 12615893
  misc_feature (26)..(87): Pfam Name: Pfam Description:  AP2 domain
  misc_feature (1)..(87): NCBI GI NO: 15219139 NR Description: TINY-like protein; protein id: At1g21910
  misc_feature (6)..(87): NCBI GI NO: 15224024 NR Description: hypothetical protein; protein id: At1g77640.1
  misc_feature (4)..(87): NCBI GI NO: 21554056 NR Description: TINY-like protein [Arabidopsis thaliana]
  misc_feature (25)..(87): NCBI GI NO: 15219452 NR Description: transcription factor, putative
  misc_feature (5)..(87): NCBI GI NO: 34902130 NR Description: hypothetical protein
  misc_feature (1)..(102): NCBI GI NO: 14140163 NR Description: putative AP2 domain containing protein
  misc_feature (8)..(102): NCBI GI NO: 21908034 NR Description: DRE binding factor 2 [Zea mays]
  misc_feature (8)..(102): NCBI GI NO: 25990951 NR Description: DREB-like protein [Zea mays]
  misc_feature (1)..(102): NCBI GI NO: 38605848 NR Description: OSJNBb0034G17.6
  misc_feature (2)..(102): NCBI GI NO: 38605845 NR Description: OSJNBb0034G17.3
MVKTAAAGSTGDGAVAAKQQQLGGKMRTYKGVRMRSWGAWVSEIRAPGQKTRIWLGSHSTAEAAARAYDAALLCLKGASAAADLNFPVRFPFDLPAAAMSPKVHPARRRSRRRRGQR

SEQ ID NO: 12598 - DNA, 1257 bp, Triticum aestivum
  misc_feature (1)..(1257): Ceres Seq. ID no. 12584727
  misc_feature (692)..(692): n is a, c, t, g, unknown, or other
gcgattaaacgttcgttggagacttggacgttcgctcagccccagccatggcagagaaggtatccacgttgatcattgaagccaacctcgaatgcgagaaatgctacaagaagattcagaaagtgctaggcaaactccaagagaaggagaagatcaggaccatcattttcgacacgaagaagaacacggtgactatctctggcccattcgacacggcgaagctgtccaagaagccgcgatgcaaggcctgcaaggcgatcaaggatatcaagatcgttgaagagaagaagcccgatgccaagaagccggaggagaagaagccagaggagaagaagcccgaggagaagaagccggccgccgatggctgcaagtgttgctgcaagaaaccggacgagaagaagccggatgagaagaagaagcccgacgagaagaagcccggaggaaaagaagaaacccgacgagaagaagccagatgataagaagcccggaggagaagcccaaatccaaggaggagaccaaaccggccgcgccggtcgacgactgtgacccttgcagttcacgcagatctgtaacctctgctacccggtggccgtgcagcgacccgaagccactggggggaggcgagcaccagtacccgcagccccagcagccgcagtggccgtgcgagccgccgcagatgcgggggtaccccngccccccaccaccctcagcacccgattcctcagcacccgccctcggcggcgccggcgaccccgaagaggcagccgtgcggaggctcggcgtactgcggaggagggtgcggctcgtgtggcggcggaggcggcggcgcgtacggggcgtggccgccggcgatgccgacgccgctgcagatgatgcagcccccgccgatgggctgcggcgggccggcgtcgtcgtgcagagggtgcaagggctgccggatcgtgcaggaggggaggttcatctacgaggagtacccgcccagtgcgtgcaccgtcatgtgattctcaggccagcgaccgttcgtgcatgcatgcatgcgctgttcgacctctctgcacgttgtttttcgtgttttagatgttccatatttgccctgtatgtttcgtgcacagtactgtatttgtttatgtctatccgcagcaaagaaggtgtagctgccacgtacattctcagtgtgaaaatatatgttctccgaacaattgatgtagctttgtatagataatttcaatttttggggcactaaaagttcgaaaatgc

SEQ ID NO: 12599 - protein, 249 aa, Triticum aestivum
  peptide (1)..(249): Ceres Seq. ID no. 12584728
  misc_feature (1)..(117): NCBI GI NO: 30424862 NR Description: RIKEN cDNA 5033413A03 [Mus musculus]
  misc_feature (74)..(74): Xaa is any aa, unknown or other
MIRSPEEKPKSKEETKPAAPVDDCDPCSSRRSVTSATRWPCSDPKPLGGGEHQYPQPQQPQWPCEPPQMRGYPXPPPPSAPDSSAPALGGAGDPEEAAVRRLGVLRRRVRLVWRRRRRRVRGVAAGDADAAADDAAPADGLRRAGVVVQRVQGLPDRAGGEVHLRGVPAQCVHRHVILRPATVRACMHALFDLSARCFSCFRCSIFALYVSCTVLYLFMSIRSKEGVAATYILSVKIYVLRTIDVALYR

SEQ ID NO: 12600 - protein, 181 aa, Triticum aestivum
  peptide (1)..(181): Ceres Seq. ID no. 12584729
  misc_feature (1)..(49): NCBI GI NO: 30424862 NR Description: RIKEN cDNA 5033413A03 [Mus musculus]
  misc_feature (6)..(6): Xaa is any aa, unknown or other
MRGYPXPPPPSAPDSSAPALGGAGDPEEAAVRRLGVLRRRVRLVWRRRRRRVRGVAAGDADAAADDAAPADGLRRAGVVVQRVQGLPDRAGGEVHLRGVPAQCVHRHVILRPATVRACMHALFDLSARCFSCFRCSIFALYVSCTVLYLFMSIRSKEGVAATYILSVKIYVLRTIDVALYR

SEQ ID NO: 12601 - protein, 142 aa, Triticum aestivum
  peptide (1)..(142): Ceres Seq. ID no. 12584730
  misc_feature (1)..(141): NCBI GI NO: 33146673 NR Description: unknown protein
  misc_feature (85)..(142): NCBI GI NO: 33146673 NR Description: unknown protein
  misc_feature (7)..(135): NCBI GI NO: 21070928 NR Description: unknown protein
  misc_feature (7)..(135): NCBI GI NO: 40538989 NR Description: expressed protein
  misc_feature (1)..(142): NCBI GI NO: 22597168 NR Description: unknown protein [Glycine max]
  misc_feature (8)..(142): NCBI GI NO: 32487934 NR Description: OSJNBb0014D23.16
  misc_feature (1)..(106): NCBI GI NO: 28209488 NR Description: unknown protein
  misc_feature (5)..(106): NCBI GI NO: 28209487 NR Description: unknown protein
  misc_feature (8)..(142): NCBI GI NO: 3242079 NR Description: proline-rich protein [Capsicum annuum]
  misc_feature (1)..(109): NCBI GI NO: 37532324 NR Description: hypothetical protein
MAEKVSTLIIEANLECEKCYKKIQKVLGKLQEKEKIRTIIFDTKKNTVTISGPFDTAKLSKKPRCKACKAIKDIKIVEEKKPDAKKPEEKKPEEKKPEEKKPAADGCKCCCKKPDEKKPDEKKKPDEKKPGGKEETRREEAR

SEQ ID NO: 12602 - DNA, 1060 bp, Triticum aestivum
  misc_feature (1)..(1060): Ceres Seq. ID no. 13654738
gcttttaccttttaggacagaggagtaagcaagtgcagtggcagtggttggccgcagacagcagcagctcgcctccttccttccttcctcctcactcccccctatatacccgccaccctacccgtcggagggtgcgcgcagcggtggagctcggtggattgtcggggcaaatggattccagttccagggccgccctcttctgcttcctggccgtcgcctcctccctcctgcaccccgccagatctgacggggaggacaaccagctcctcaaggggatcaacagctacagagcttcactcaaggtcccggcgctcaccgagaacagcaatgccgactgcctggccgagcagctagcgaagaagttcaagggccaggagtgcaccaacaccaccggagccaacactgtccccggcaccgagccgcagttccccgactacccccagttcctcgaccgctgccacctcaacgcgtcggtaaccgaggacgggcaggtgatgccggcatgcgtgcccggactcgtggccgacgttgtgctgaccaactacaccaagtcccagtacaaccggttcctcaacgacaccaagtactccggcgtcgggatcgccaacgagggggactgggtggtcgtcgtcctcagcaccagcaccgactccggcgactactcccctgctcccccgggctccaactgggctccttcggtccagccgttcagctggatgattgtttcgctggtagggttcgtaattttgctgatgaagtgagaagataaatgttgtgttgctcatctcgcgtgctacaccgctgcaaatgagcgtgttgatcttatgcccgtgtcagtcgtttctgtatctttcagattgtcatttctactcggtccagttgacaccacagtacagtagcatatgcatgccacgaggttcgggatcaaaactttttttcttcagtattctcctttgaccacaattggcaacggctttatggatattgtggtcaggtgatgtgcattattgaaccacatctttcatctttgaacatttagctaaagccagaacttcaactt

SEQ ID NO: 12603 - protein, 252 aa, Triticum aestivum
  peptide (1)..(252): Ceres Seq. ID no. 13654739
  misc_feature (61)..(251): NCBI GI NO: 34904816 NR Description: contains ESTsAU163784
  misc_feature (65)..(251): NCBI GI NO: 18397452 NR Description: expressed protein [Arabidopsis thaliana]
  misc_feature (65)..(251): NCBI GI NO: 21594024 NR Description: unknown [Arabidopsis thaliana]
  misc_feature (61)..(223): NCBI GI NO: 15239687 NR Description: expressed protein [Arabidopsis thaliana]
  misc_feature (81)..(234): NCBI GI NO: 18405086 NR Description: expressed protein [Arabidopsis thaliana]
  misc_feature (61)..(221): NCBI GI NO: 34395876 NR Description: Putative GPI-anchored protein At5g19240 precursor
  misc_feature (61)..(221): NCBI GI NO: 15239686 NR Description: expressed protein [Arabidopsis thaliana]
  misc_feature (61)..(221): NCBI GI NO: 24417436 NR Description: unknown [Arabidopsis thaliana]
  misc_feature (61)..(221): NCBI GI NO: 15239685 NR Description: expressed protein [Arabidopsis thaliana]
  misc_feature (65)..(162): NCBI GI NO: 24417290 NR Description: unknown [Arabidopsis thaliana]
FYLLGQRSKQVQWQWLAADSSSSPPSFLPPHSPLYTRHPTRRRVRAAVELGGLSGQMDSSSRAALFCFLAVASSLLHPARSDGEDNQLLKGINSYRASLKVPALTENSNADCLAEQLAKKFKGQECTNTTGANTVPGTEPQFPDYPQFLDRCHLNASVTEDGQVMPACVPGLVADVVLTNYTKSQYNRFLNDTKYSGVGIANEGDWVVVVLSTSTDSGDYSPAPPGSNWAPSVQPFSWMIVSLVGFVILLMK

SEQ ID NO: 12604 - protein, 196 aa, Triticum aestivum
  peptide (1)..(196): Ceres Seq. ID no. 13654740
  misc_feature (5)..(195): NCBI GI NO: 34904816 NR Description: contains ESTsAU163784
  misc_feature (9)..(195): NCBI GI NO: 18397452 NR Description: expressed protein [Arabidopsis thaliana]
  misc_feature (9)..(195): NCBI GI NO: 21594024 NR Description: unknown [Arabidopsis thaliana]
  misc_feature (5)..(167): NCBI GI NO: 15239687 NR Description: expressed protein [Arabidopsis thaliana]
  misc_feature (25)..(178): NCBI GI NO: 18405086 NR Description: expressed protein [Arabidopsis thaliana]
  misc_feature (5)..(165): NCBI GI NO: 34395876 NR Description: Putative GPI-anchored protein At5g19240 precursor
  misc_feature (5)..(165): NCBI GI NO: 15239686 NR Description: expressed protein [Arabidopsis thaliana]
  misc_feature (5)..(165): NCBI GI NO: 24417436 NR Description: unknown [Arabidopsis thaliana]
  misc_feature (5)..(165): NCBI GI NO: 15239685 NR Description: expressed protein [Arabidopsis thaliana]
  misc_feature (9)..(106): NCBI GI NO: 24417290 NR Description: unknown [Arabidopsis thaliana]
MDSSSRAALFCFLAVASSLLHPARSDGEDNQLLKGINSYRASLKVPALTENSNADCLAEQLAKKFKGQECTNTTGANTVPGTEPQFPDYPQFLDRCHLNASVTEDGQVMPACVPGLVADVVLTNYTKSQYNRFLNDTKYSGVGIANEGDWVVVVLSTSTDSGDYSPAPPGSNWAPSVQPFSWMIVSLVGFVILLMK

SEQ ID NO: 12605 - DNA, 1093 bp, Triticum aestivum
  misc_feature (1)..(1093): Ceres Seq. ID no. 13583408
aaggctcttcccaaaccctccccgaccgccgccccccgttcgcctccgccgccgcctagccaccacgcgccaggagaaccccgcgccgccggccatggcggaggaggagggcacgcagcagctgccgttcgtgcgggagacggtcctcaagaagaggaaggacaacgaggagtgggccaccaagaaccgggagcgcaaggcggccaagaggcagcgccgctgccacgacgccaagggcgccatcaagcgccccgaggacttcgtcaaggagttccgcaacaaggagctcgacttcctgcggatgcgcacgcgcctcaaggtccggaacctgcgccccgccgaggccatcgacgccaagctgctcttcgccgtccgcatcccaggcaccgccgacttgcacccgcaaatcaggaagatcttggccaggctgcggctcacgcaggtcctcaccggcgtgttcctcaaggccaccgaggcaaacctcaagaggcttgcagctgtcggaccgttcgtcacctatgggttccccaatttgaagaatgtgaaggagcttatttacaagaagggtcgcggttatttcgacaaggagcctttcccccttaccagcaatgatctaatcgagaaggcacttggagaacacggtgtcatatgcttggaagacgtggtgcacgaaatctccacggtcgggccacacttcagagaaacggcgagctttctcatgcccttcaagctcaagtgtccggagaggaggctgcggatgaagaagaagcccttcaaggatggtggcgactcgggcaaccgtggggacaagatcaacgagctactcgagaagctgaactgaggcagtctccaacctgcgtccgcaaacaagcgatggatccgttattaccttgtcggttttgtaatagcatagctgaatgtacctttgttttggaaaccctgcctgagtgtttgggatcaaatcacgaaatactgttcttcgcccctcgctctgtccttcatgatcgatctgccgtgctttgcttgcgctgacagacttagtgaggttggatgatattgcaacaaaacatcaggttctcaaaaaaattttttt

SEQ ID NO: 12606 - protein, 279 aa, Triticum aestivum
  peptide (1)..(279): Ceres Seq. ID no. 13583409
  misc_feature (120)..(171): Pfam Name: Pfam Description:  Ribosomal protein L30p/L7e
  misc_feature (32)..(279): NCBI GI NO: 38636688 NR Description: putative 60S ribosomal protein L7 (RPL7A)
  misc_feature (32)..(279): NCBI GI NO: 15220825 NR Description: 60S ribosomal protein L7 (RPL7A)
  misc_feature (44)..(279): NCBI GI NO: 15226212 NR Description: 60S ribosomal protein L7 (RPL7B)
  misc_feature (44)..(279): NCBI GI NO: 445613 NR Description: ribosomal protein L7
  misc_feature (44)..(279): NCBI GI NO: 38637548 NR Description: putative 60S ribosomal protein L7
  misc_feature (32)..(279): NCBI GI NO: 15231288 NR Description: 60S ribosomal protein L7 (RPL7D)
  misc_feature (44)..(279): NCBI GI NO: 27311547 NR Description: Unknown protein [Arabidopsis thaliana]
  misc_feature (44)..(279): NCBI GI NO: 30689623 NR Description: 60S ribosomal protein L7 (RPL7C)
  misc_feature (44)..(279): NCBI GI NO: 30689617 NR Description: 60S ribosomal protein L7 (RPL7C)
  misc_feature (19)..(278): NCBI GI NO: 18253049 NR Description: ribosomal protein L7 [Spodoptera frugiperda]
RLFPNPPRPPPPVRLRRRLATTRQENPAPPAMAEEEGTQQLPFVRETVLKKRKDNEEWATKNRERKAAKRQRRCHDAKGAIKRPEDFVKEFRNKELDFLRMRTRLKVRNLRPAEAIDAKLLFAVRIPGTADLHPQIRKILARLRLTQVLTGVFLKATEANLKRLAAVGPFVTYGFPNLKNVKELIYKKGRGYFDKEPFPLTSNDLIEKALGEHGVICLEDVVHEISTVGPHFRETASFLMPFKLKCPERRLRMKKKPFKDGGDSGNRGDKINELLEKLN

SEQ ID NO: 12607 - protein, 248 aa, Triticum aestivum
  peptide (1)..(248): Ceres Seq. ID no. 13583410
  misc_feature (89)..(140): Pfam Name: Pfam Description:  Ribosomal protein L30p/L7e
  misc_feature (1)..(248): NCBI GI NO: 38636688 NR Description: putative 60S ribosomal protein L7 (RPL7A)
  misc_feature (1)..(248): NCBI GI NO: 15220825 NR Description: 60S ribosomal protein L7 (RPL7A)
  misc_feature (13)..(248): NCBI GI NO: 15226212 NR Description: 60S ribosomal protein L7 (RPL7B)
  misc_feature (13)..(248): NCBI GI NO: 445613 NR Description: ribosomal protein L7
  misc_feature (13)..(248): NCBI GI NO: 38637548 NR Description: putative 60S ribosomal protein L7
  misc_feature (1)..(248): NCBI GI NO: 15231288 NR Description: 60S ribosomal protein L7 (RPL7D)
  misc_feature (13)..(248): NCBI GI NO: 27311547 NR Description: Unknown protein [Arabidopsis thaliana]
  misc_feature (13)..(248): NCBI GI NO: 30689623 NR Description: 60S ribosomal protein L7 (RPL7C)
  misc_feature (13)..(248): NCBI GI NO: 30689617 NR Description: 60S ribosomal protein L7 (RPL7C)
  misc_feature (1)..(247): NCBI GI NO: 18253049 NR Description: ribosomal protein L7 [Spodoptera frugiperda]
MAEEEGTQQLPFVRETVLKKRKDNEEWATKNRERKAAKRQRRCHDAKGAIKRPEDFVKEFRNKELDFLRMRTRLKVRNLRPAEAIDAKLLFAVRIPGTADLHPQIRKILARLRLTQVLTGVFLKATEANLKRLAAVGPFVTYGFPNLKNVKELIYKKGRGYFDKEPFPLTSNDLIEKALGEHGVICLEDVVHEISTVGPHFRETASFLMPFKLKCPERRLRMKKKPFKDGGDSGNRGDKINELLEKLN

SEQ ID NO: 12608 - protein, 203 aa, Triticum aestivum
  peptide (1)..(203): Ceres Seq. ID no. 13583411
  misc_feature (1)..(53): Pfam Name: Pfam Description:  TT viral ORF2
KALPKPSPTAAPRSPPPPPSHHAPGEPRAAGHGGGGGHAAAAVRAGDGPQEEEGQRGVGHQEPGAQGGQEAAPLPRRQGRHQAPRGLRQGVPQQGARLPADAHAPQGPEPAPRRGHRRQAALRRPHPRHRRLAPANQEDLGQAAAHAGPHRRVPQGHRGKPQEACSCRTVRHLWVPQFEECEGAYLQEGSRLFRQGAFPPYQQ

SEQ ID NO: 12609 - DNA, 915 bp, Triticum aestivum
  misc_feature (1)..(915): Ceres Seq. ID no. 15173873
ataaatgagcgaccaaaaccctagtccattcttccccaccgccgccttgccccctctcgccggattgccgctccgcgtccaccgaagaatcaccaatggctccgacgtcgaagatggcgctcggcataaagcgggcgtcgagatcgcacacctaccaccgccgcgggctttgggccatcaaggccaagcacggcggcgccttgcccaaggccgagaagccggccgccatcgccgagcccaagttctatcccgctgatgatgtcaagccacgcaccgtgagcacacgcaagccccatcccaccaagctcagatcgaccatcacaccgggcacggtgctgatcctgctcgcggggaggtacatgggaaagcgcgtggtgttcctcaagcagctccagtccggccttctcctcatcactggacctttcaagatcaatggcgtgccaatccgcagagtgaaccaggcttacgtcattgccacatccacaaaggtcgacatctctaaggttaatgtgcagaagtttgatgacaagtacttcgctagggagaagaagactagggcaaagaagactgagggcgagctatttgagtcggataaggaggcaaccaagaatttgccagacttcaagaaggatgaccagaaggtcattgacgctgagttgatcaaggctatcgatgctgtcccagaccttaaaaattatcttggtgcccggttctccctcagggatggcgacaagccgcatgagatgaccttctaagttacctggtacaagtttcaagatctgtggaagtcttttttgtctagtgtgtgttctggttctgtacttctgatttcttttgcctggttggtgaatatttgatttccactgaagtctgcctgtcaaatattttgagaagataactaggaagtaccatcct

SEQ ID NO: 12610 - protein, 219 aa, Triticum aestivum
  peptide (1)..(219): Ceres Seq. ID no. 15173874
  misc_feature (112)..(219): Pfam Name: Pfam Description:  Ribosomal protein L6e
  misc_feature (1)..(219): NCBI GI NO: 38344818 NR Description: OSJNBb0022F23.11
  misc_feature (1)..(219): NCBI GI NO: 464621 NR Description: 60S RIBOSOMAL PROTEIN L6 (YL16-LIKE)
  misc_feature (10)..(219): NCBI GI NO: 15221798 NR Description: 60S ribosomal protein L6 (RPL6A)
  misc_feature (10)..(219): NCBI GI NO: 21593910 NR Description: 60S ribosomal protein L6, putative
  misc_feature (10)..(219): NCBI GI NO: 15221126 NR Description: 60S ribosomal protein L6 (RPL6C)
  misc_feature (1)..(219): NCBI GI NO: 7208784 NR Description: 60S ribosomal protein L6 [Cicer arietinum]
  misc_feature (10)..(219): NCBI GI NO: 15221127 NR Description: 60S ribosomal protein L6 (RPL6B)
  misc_feature (48)..(219): NCBI GI NO: 6012952 NR Description: 60S ribosomal protein L6 (YL 16 like)
  misc_feature (48)..(219): NCBI GI NO: 6323481 NR Description: Homology to rat and human L6
  misc_feature (48)..(219): NCBI GI NO: 16758864 NR Description: ribosomal protein L6 [Rattus norvegicus]
MAPTSKMALGIKRASRSHTYHRRGLWAIKAKHGGALPKAEKPAAIAEPKFYPADDVKPRTVSTRKPHPTKLRSTITPGTVLILLAGRYMGKRVVFLKQLQSGLLLITGPFKINGVPIRRVNQAYVIATSTKVDISKVNVQKFDDKYFAREKKTRAKKTEGELFESDKEATKNLPDFKKDDQKVIDAELIKAIDAVPDLKNYLGARFSLRDGDKPHEMTF

SEQ ID NO: 12611 - protein, 213 aa, Triticum aestivum
  peptide (1)..(213): Ceres Seq. ID no. 15173875
  misc_feature (106)..(213): Pfam Name: Pfam Description:  Ribosomal protein L6e
  misc_feature (1)..(213): NCBI GI NO: 38344818 NR Description: OSJNBb0022F23.11
  misc_feature (1)..(213): NCBI GI NO: 464621 NR Description: 60S RIBOSOMAL PROTEIN L6 (YL16-LIKE)
  misc_feature (4)..(213): NCBI GI NO: 15221798 NR Description: 60S ribosomal protein L6 (RPL6A)
  misc_feature (4)..(213): NCBI GI NO: 21593910 NR Description: 60S ribosomal protein L6, putative
  misc_feature (4)..(213): NCBI GI NO: 15221126 NR Description: 60S ribosomal protein L6 (RPL6C)
  misc_feature (1)..(213): NCBI GI NO: 7208784 NR Description: 60S ribosomal protein L6 [Cicer arietinum]
  misc_feature (4)..(213): NCBI GI NO: 15221127 NR Description: 60S ribosomal protein L6 (RPL6B)
  misc_feature (42)..(213): NCBI GI NO: 6012952 NR Description: 60S ribosomal protein L6 (YL 16 like)
  misc_feature (42)..(213): NCBI GI NO: 6323481 NR Description: Homology to rat and human L6
  misc_feature (42)..(213): NCBI GI NO: 16758864 NR Description: ribosomal protein L6 [Rattus norvegicus]
MALGIKRASRSHTYHRRGLWAIKAKHGGALPKAEKPAAIAEPKFYPADDVKPRTVSTRKPHPTKLRSTITPGTVLILLAGRYMGKRVVFLKQLQSGLLLITGPFKINGVPIRRVNQAYVIATSTKVDISKVNVQKFDDKYFAREKKTRAKKTEGELFESDKEATKNLPDFKKDDQKVIDAELIKAIDAVPDLKNYLGARFSLRDGDKPHEMTF

SEQ ID NO: 12612 - protein, 131 aa, Triticum aestivum
  peptide (1)..(131): Ceres Seq. ID no. 15173876
  misc_feature (24)..(131): Pfam Name: Pfam Description:  Ribosomal protein L6e
  misc_feature (1)..(131): NCBI GI NO: 38344818 NR Description: OSJNBb0022F23.11
  misc_feature (1)..(131): NCBI GI NO: 464621 NR Description: 60S RIBOSOMAL PROTEIN L6 (YL16-LIKE)
  misc_feature (1)..(131): NCBI GI NO: 15221798 NR Description: 60S ribosomal protein L6 (RPL6A)
  misc_feature (1)..(131): NCBI GI NO: 21593910 NR Description: 60S ribosomal protein L6, putative
  misc_feature (1)..(131): NCBI GI NO: 15221126 NR Description: 60S ribosomal protein L6 (RPL6C)
  misc_feature (1)..(131): NCBI GI NO: 7208784 NR Description: 60S ribosomal protein L6 [Cicer arietinum]
  misc_feature (1)..(131): NCBI GI NO: 15221127 NR Description: 60S ribosomal protein L6 (RPL6B)
  misc_feature (1)..(131): NCBI GI NO: 6012952 NR Description: 60S ribosomal protein L6 (YL 16 like)
  misc_feature (1)..(131): NCBI GI NO: 6323481 NR Description: Homology to rat and human L6
  misc_feature (1)..(131): NCBI GI NO: 16758864 NR Description: ribosomal protein L6 [Rattus norvegicus]
MGKRVVFLKQLQSGLLLITGPFKINGVPIRRVNQAYVIATSTKVDISKVNVQKFDDKYFAREKKTRAKKTEGELFESDKEATKNLPDFKKDDQKVIDAELIKAIDAVPDLKNYLGARFSLRDGDKPHEMTF

SEQ ID NO: 12613 - DNA, 824 bp, Triticum aestivum
  misc_feature (1)..(824): Ceres Seq. ID no. 13583412
gcatctgaagacaccaagctcgatcgcgctccgacccgtcagccatggctcggctcgccgccctcctcctcgccttcgccgtcgccgtctccgccgccgcgctggcgcatggccgcgatctcccgacccagatcaagctgaccaagggcggtggcgcggtgggcggcgacagccaggagtgcgtgtacacggtgtacgtgcgcacggggtcgatctggaaggccgggacggacgccaacatcacgctggagctctacacggcgggcaacgccgacggcgtggcgatcgcggacctgccgtcgtggggcgggctcatgtgggggggccactcctacttcgagcgcggcaacctggacatcttcagcgggcgcgggccgtgcatggccggcgcgccctgccgcatgagggtgtcctccgacggcaccggcgcgcaccacggctggtactgcaactacgtggaggtcaccgtcaccggcccgcaccgcggctgcgcccagcagctcttcaccgtcgagcagtggctcgccaccgacgccgcgccctacaagctcgaggccgtcgtcgaccgctgccccgccgatggcaccgccgccgaggagtaagatcgagtaagctgtacgccggcctcttcgtcatcgtgtgtggttggtagcaataagctgcggggccgttcgtgccggccccgtgatccgcgtgcgccgcgccggacgcggagatgtactactagatgagttcgtgctgctggtggtggcgaaataatcgggacctgatttgtactgtgtgccattagtgagagttgtgattagttgcggtggctgttttgt

SEQ ID NO: 12614 - protein, 216 aa, Triticum aestivum
  peptide (1)..(216): Ceres Seq. ID no. 13583413
HLKTPSSIALRPVSHGSARRPPPRLRRRRLRRRAGAWPRSPDPDQADQGRWRGGRRQPGVRVHGVRAHGVDLEGRDGRQHHAGALHGGQRRRRGDRGPAVVGRAHVGGPLLLRARQPGHLQRARAVHGRRALPHEGVLRRHRRAPRLVLQLRGGHRHRPAPRLRPAALHRRAVARHRRRALQARGRRRPLPRRWHRRRGVRSSKLYAGLFVIVCGW

SEQ ID NO: 12615 - protein, 185 aa, Triticum aestivum
  peptide (1)..(185): Ceres Seq. ID no. 13583414
  misc_feature (46)..(171): Pfam Name: Pfam Description:  PLAT/LH2 domain
  misc_feature (1)..(185): NCBI GI NO: 32492140 NR Description: OSJNBa0036B21.4
  misc_feature (1)..(185): NCBI GI NO: 32492139 NR Description: OSJNBa0036B21.2
  misc_feature (26)..(177): NCBI GI NO: 15236014 NR Description: expressed protein [Arabidopsis thaliana]
  misc_feature (24)..(177): NCBI GI NO: 12667247 NR Description: dehydration stress-induced protein
  misc_feature (42)..(176): NCBI GI NO: 28628595 NR Description: TMV induced protein 1-2 [Capsicum annuum]
  misc_feature (38)..(177): NCBI GI NO: 21553555 NR Description: dehydration stress-induced protein
  misc_feature (28)..(176): NCBI GI NO: 7542598 NR Description: TMV-induced protein I [Capsicum annuum]
  misc_feature (38)..(177): NCBI GI NO: 18399899 NR Description: expressed protein [Arabidopsis thaliana]
  misc_feature (38)..(176): NCBI GI NO: 10241929 NR Description: elicitor inducible protein [Nicotiana tabacum]
  misc_feature (26)..(144): NCBI GI NO: 15982879 NR Description: AT4g39730/T19P19_120 [Arabidopsis thaliana]
MARLAALLLAFAVAVSAAALAHGRDLPTQIKLTKGGGAVGGDSQECVYTVYVRTGSIWKAGTDANITLELYTAGNADGVAIADLPSWGGLMWGGHSYFERGNLDIFSGRGPCMAGAPCRMRVSSDGTGAHHGWYCNYVEVTVTGPHRGCAQQLFTVEQWLATDAAPYKLEAVVDRCPADGTAAEE

SEQ ID NO: 12616 - DNA, 797 bp, Triticum aestivum
  misc_feature (1)..(797): Ceres Seq. ID no. 15224286
gaaaaggcgagaaggaaggaagcaacgaagcgaggggattccgcggagttggtggaggcgagggtttgtgcggccatggagaacctggcgatgctgtgggggatcatcgggccgggcgtcgccggcgcgctcttcggcgccggctggtggttctgggtcgacgccgtcgtctgcagcgccgtccaggtctccttcatccactacctgcccgggatcttcgcgtcgctggccgcgctcatgttcaattgcgtcgacaaggatgccatcgggaacgactactactcgtcctacggggatgattccgagtggagggtgaagctttggctttttgtcgcctacgtcgtttcattcgtctgccttgcgggatcagtgggtttgttggtgcaagacgccctgacagacaagggcccttctgtgtggactggtgttgccggggttctgcaatgcgtttttgtgttgataagcgggttgacatactggacgtgccacaccgaggattaagggtcaaatatcaaatctcgcgaagacgtttagtctatacccgtgtgtggtcctgtgtaaaaaaaatatgttcattccagggcgggattacttggtgtccgtgtgtgcatagctgaccgcttcctgaaatggatccgtagcatcagtactacgtacgtacgtgtttattatcctaatttgttgtgagattgtggtgcttggtggcttgagaggttagcattgagattggatcacgagctgcctgcagcaagtcgttattactgtcaaacctccataagaaaattcagttgactccg

SEQ ID NO: 12617 - protein, 166 aa, Triticum aestivum
  peptide (1)..(166): Ceres Seq. ID no. 15224287
  misc_feature (28)..(164): Pfam Name: UPF0220 Pfam Description: Uncharacterised protein family
  misc_feature (28)..(165): NCBI GI NO: 18400231 NR Description: expressed protein [Arabidopsis thaliana]
  misc_feature (28)..(110): NCBI GI NO: 25373092 NR Description: protein T32E20.29
  misc_feature (40)..(159): NCBI GI NO: 24657484 NR Description: CG15012-PB [Drosophila melanogaster]
  misc_feature (41)..(166): NCBI GI NO: 7657595 NR Description: small membrane protein 1 [Homo sapiens]
  misc_feature (33)..(166): NCBI GI NO: 33417077 NR Description: MGC68857 protein [Xenopus laevis]
  misc_feature (31)..(166): NCBI GI NO: 34610239 NR Description: small membrane protein 1 [Mus musculus]
  misc_feature (41)..(166): NCBI GI NO: 27732805 NR Description: similar to Small membrane protein 1
  misc_feature (37)..(160): NCBI GI NO: 40738694 NR Description: hypothetical protein AN6544.2
  misc_feature (37)..(160): NCBI GI NO: 38103526 NR Description: hypothetical protein MG03971.4
  misc_feature (41)..(159): NCBI GI NO: 33150604 NR Description: IFNRC [Homo sapiens]
EKARRKEATKRGDSAELVEARVCAAMENLAMLWGIIGPGVAGALFGAGWWFWVDAVVCSAVQVSFIHYLPGIFASLAALMFNCVDKDAIGNDYYSSYGDDSEWRVKLWLFVAYVVSFVCLAGSVGLLVQDALTDKGPSVWTGVAGVLQCVFVLISGLTYWTCHTED

SEQ ID NO: 12618 - protein, 141 aa, Triticum aestivum
  peptide (1)..(141): Ceres Seq. ID no. 15224288
  misc_feature (3)..(139): Pfam Name: UPF0220 Pfam Description: Uncharacterised protein family
  misc_feature (3)..(140): NCBI GI NO: 18400231 NR Description: expressed protein [Arabidopsis thaliana]
  misc_feature (3)..(85): NCBI GI NO: 25373092 NR Description: protein T32E20.29
  misc_feature (15)..(134): NCBI GI NO: 24657484 NR Description: CG15012-PB [Drosophila melanogaster]
  misc_feature (16)..(141): NCBI GI NO: 7657595 NR Description: small membrane protein 1 [Homo sapiens]
  misc_feature (8)..(141): NCBI GI NO: 33417077 NR Description: MGC68857 protein [Xenopus laevis]
  misc_feature (6)..(141): NCBI GI NO: 34610239 NR Description: small membrane protein 1 [Mus musculus]
  misc_feature (16)..(141): NCBI GI NO: 27732805 NR Description: similar to Small membrane protein 1
  misc_feature (12)..(135): NCBI GI NO: 40738694 NR Description: hypothetical protein AN6544.2
  misc_feature (12)..(135): NCBI GI NO: 38103526 NR Description: hypothetical protein MG03971.4
  misc_feature (16)..(134): NCBI GI NO: 33150604 NR Description: IFNRC [Homo sapiens]
MENLAMLWGIIGPGVAGALFGAGWWFWVDAVVCSAVQVSFIHYLPGIFASLAALMFNCVDKDAIGNDYYSSYGDDSEWRVKLWLFVAYVVSFVCLAGSVGLLVQDALTDKGPSVWTGVAGVLQCVFVLISGLTYWTCHTED

SEQ ID NO: 12619 - protein, 136 aa, Triticum aestivum
  peptide (1)..(136): Ceres Seq. ID no. 15224289
  misc_feature (1)..(134): Pfam Name: UPF0220 Pfam Description: Uncharacterised protein family
  misc_feature (1)..(135): NCBI GI NO: 18400231 NR Description: expressed protein [Arabidopsis thaliana]
  misc_feature (1)..(80): NCBI GI NO: 25373092 NR Description: protein T32E20.29
  misc_feature (10)..(129): NCBI GI NO: 24657484 NR Description: CG15012-PB [Drosophila melanogaster]
  misc_feature (11)..(136): NCBI GI NO: 7657595 NR Description: small membrane protein 1 [Homo sapiens]
  misc_feature (3)..(136): NCBI GI NO: 33417077 NR Description: MGC68857 protein [Xenopus laevis]
  misc_feature (1)..(136): NCBI GI NO: 34610239 NR Description: small membrane protein 1 [Mus musculus]
  misc_feature (11)..(136): NCBI GI NO: 27732805 NR Description: similar to Small membrane protein 1
  misc_feature (7)..(130): NCBI GI NO: 40738694 NR Description: hypothetical protein AN6544.2
  misc_feature (7)..(130): NCBI GI NO: 38103526 NR Description: hypothetical protein MG03971.4
  misc_feature (11)..(129): NCBI GI NO: 33150604 NR Description: IFNRC [Homo sapiens]
MLWGIIGPGVAGALFGAGWWFWVDAVVCSAVQVSFIHYLPGIFASLAALMFNCVDKDAIGNDYYSSYGDDSEWRVKLWLFVAYVVSFVCLAGSVGLLVQDALTDKGPSVWTGVAGVLQCVFVLISGLTYWTCHTED

SEQ ID NO: 12620 - DNA, 751 bp, Triticum aestivum
  misc_feature (1)..(751): Ceres Seq. ID no. 13598378
acaaaacggcccggactcgcctcctcctcctccccctcacaactcgccaacgccaaatccgcctccgccaccggccagccagagagcgagcgagcgattcgccgccgccgtcaagcctgcagggagcgagcccctctcgcctccaaacagcctcaccctcgcggcccccgtcccctcaaagtccccgcgtctcccgcgagaatcgcgcccgcccgcctagggtttccgccgccgccggagaggaggggagtgggaggaggggacgagatggccggacggctcctcgggcagctcctcgtcatgggcggcgccgtcgtcggcagggccgtggtccaggcctaccgccaggccatcgtcaatgcacagagaaccggagctgcccaggaagctgtgaatggtattcgaagggctagcaaggctatgaccgaacaagaagcccggcaaatattaggtatcagtgaaaagacgagttgggaagagattgtcaagaagtatgatacgatgtttgagaagaatgccaagagcggaagcttctatctccagtcgaaagtacaccgggccaaagaatgtctggagtccatataccatgataagcccgacataatgaactgaactgagatgggcagcgtttcgtctaatcgatcgattttgtcagtcgatgttctgtctgagctatgctgggctgctgcatcaggtcaaatttggttgtaacaggatgtttgttctgcttgactcgaataatatattcaac

SEQ ID NO: 12621 - protein, 203 aa, Triticum aestivum
  peptide (1)..(203): Ceres Seq. ID no. 13598379
  misc_feature (91)..(201): Pfam Name: UPF0108 Pfam Description: Uncharacterised protein family
  misc_feature (91)..(201): NCBI GI NO: 34905796 NR Description: P0401G10.24
  misc_feature (90)..(198): NCBI GI NO: 18411133 NR Description: expressed protein [Arabidopsis thaliana]
  misc_feature (91)..(198): NCBI GI NO: 11357639 NR Description: hypothetical protein F25L23
  misc_feature (101)..(200): NCBI GI NO: 37535410 NR Description: putative pol polyprotein
  misc_feature (90)..(195): NCBI GI NO: 18424521 NR Description: auxin-regulated protein [Arabidopsis thaliana]
  misc_feature (101)..(195): NCBI GI NO: 10176880 NR Description: gene_id:MAC9.20~unknown protein
  misc_feature (93)..(193): NCBI GI NO: 19112141 NR Description: conserved hypothetical protein; similar to S
  misc_feature (89)..(192): NCBI GI NO: 21064209 NR Description: AT29287p [Drosophila melanogaster]
  misc_feature (89)..(192): NCBI GI NO: 24640407 NR Description: CG1409-PA [Drosophila melanogaster]
TKRPGLASSSSPSQLANAKSASATGQPESERAIRRRRQACRERAPLASKQPHPRGPRPLKVPASPARIAPARLGFPPPPERRGVGGGDEMAGRLLGQLLVMGGAVVGRAVVQAYRQAIVNAQRTGAAQEAVNGIRRASKAMTEQEARQILGISEKTSWEEIVKKYDTMFEKNAKSGSFYLQSKVHRAKECLESIYHDKPDIMN

SEQ ID NO: 12622 - protein, 136 aa, Triticum aestivum
  peptide (1)..(136): Ceres Seq. ID no. 13598380
KTARTRLLLLPLTTRQRQIRLRHRPARERASDSPPPSSLQGASPSRLQTASPSRPPSPQSPRVSRENRARPPRVSAAAGEEGSGRRGRDGRTAPRAAPRHGRRRRRQGRGPGLPPGHRQCTENRSCPGSCEWYSKG

SEQ ID NO: 12623 - protein, 114 aa, Triticum aestivum; identical to SEQ ID NO: 6983
  peptide (1)..(114): Ceres Seq. ID no. 13598381
  misc_feature (2)..(112): Pfam Name: UPF0108 Pfam Description: Uncharacterised protein family
  misc_feature (2)..(112): NCBI GI NO: 34905796 NR Description: P0401G10.24
  misc_feature (1)..(109): NCBI GI NO: 18411133 NR Description: expressed protein [Arabidopsis thaliana]
  misc_feature (2)..(109): NCBI GI NO: 11357639 NR Description: hypothetical protein F25L23
  misc_feature (12)..(111): NCBI GI NO: 37535410 NR Description: putative pol polyprotein
  misc_feature (1)..(106): NCBI GI NO: 18424521 NR Description: auxin-regulated protein [Arabidopsis thaliana]
  misc_feature (12)..(106): NCBI GI NO: 10176880 NR Description: gene_id:MAC9.20~unknown protein
  misc_feature (4)..(104): NCBI GI NO: 19112141 NR Description: conserved hypothetical protein; similar to S
  misc_feature (1)..(103): NCBI GI NO: 21064209 NR Description: AT29287p [Drosophila melanogaster]
  misc_feature (1)..(103): NCBI GI NO: 24640407 NR Description: CG1409-PA [Drosophila melanogaster]

SEQ ID NO: 12624 - DNA, 779 bp, Triticum aestivum
  misc_feature (1)..(779): Ceres Seq. ID no. 12587336
gaagcccctccctcccctgtgctccgtcttctatctcacctcccgtgatctctgccgtcccacctcccccgattcatcttcagatcgaggcttccggaggctgcatcgagagtagcaccgccacgcccaactccgctcccttccggcgctaatccatgctcagcagatctagtcgcgaaaaggacggcgccccgccgcccctgctggatccgccgagccagcggccggatctatcgagatgcgccgggatcccgagcctttctcctccccaccttctcctccgtcgacagtaggcagcagagcaaggcgcgggcgactgctccggccagaggagggcgtgaggtacaacgcgacctcactggggcgcgactccgtcagccagcaccggcgcccaactaggatccaccgaacccaggcgcggcctacggcaggcgtgcggttttgagttcaacaggagagctcgcgcgagattgagcgctcctcccatcttccagcgaacccaaaagagagcagaggaggagatgaccaagggcgttggtccgtcgatcggcatcgacctcgggatgacctactcctgcgttggcgtgtggcagcatgtcgacatcatgggcaacgaccaggccaccatggcaactgcaccacgccctcctacgtctccaccaccagcgacgccgccaggaaccaggtcgcaacgaactccaccaacaccgtcttctgtacgtgcatcaatatagaatttcttctagtacgcatcgtccaactctttttcatatgcacac

SEQ ID NO: 12625 - protein, 70 aa, Triticum aestivum
  peptide (1)..(70): Ceres Seq. ID no. 12587337
  misc_feature (7)..(65): NCBI GI NO: 8105 NR Description: reading frame ? [Drosophila melanogaster]
  misc_feature (3)..(38): NCBI GI NO: 21479 NR Description: 70-Kd heat shock protein [Solanum tuberosum]
  misc_feature (3)..(38): NCBI GI NO: 99707 NR Description: dnaK-type molecular chaperone hsc70-2
  misc_feature (3)..(38): NCBI GI NO: 166765 NR Description: heat shock protein HSP70-1
  misc_feature (3)..(38): NCBI GI NO: 450881 NR Description: heat shock cognate 70-2 [Arabidopsis thaliana]
  misc_feature (3)..(38): NCBI GI NO: 3986691 NR Description: heat shock protein [Cichorium intybus]
  misc_feature (3)..(38): NCBI GI NO: 100440 NR Description: dnaK-type molecular chaperone hsp70
  misc_feature (1)..(38): NCBI GI NO: 22341 NR Description: put
  misc_feature (1)..(38): NCBI GI NO: 283043 NR Description: dnaK-type molecular chaperone
MTKGVGPSIGIDLGMTYSCVGVWQHVDIMGNDQATMATAPRPPTSPPPATPPGTRSQRTPPTPSSVRASI

SEQ ID NO: 12626 - protein, 68 aa, Triticum aestivum
  peptide (1)..(68): Ceres Seq. ID no. 12587338
MRRDPEPFSSPPSPPSTVGSRARRGRLLRPEEGVRYNATSLGRDSVSQHRRPTRIHRTQARPTAGVRF

SEQ ID NO: 12627 - protein, 61 aa, Triticum aestivum
  peptide (1)..(61): Ceres Seq. ID no. 12587339
MSTSWATTRPPWQLHHALLRLHHQRRRQEPGRNELHQHRLLYVHQYRISSSTHRPTLFHMH

SEQ ID NO: 12628 - DNA, 861 bp, Triticum aestivum
  misc_feature (1)..(861): Ceres Seq. ID no. 13655072
ccgattcccatccagcgtacagactaggcgacccccgcttcccgtcccctctctcctccacacgcctctctccctctcccctcgtccgccgccgccgccgccgccaccatgggcaggggcaagttcaagggcaagccaaccggccgccgcaacttctccaccccggaggagatcgcttctggaacttctgggcgtccacgctcgtttaagaagaatgtagctgaagcagaagaggaagaggaagaagtagaagaatctgaggaggaagaatccgaagacgacggtgaagagaagaaacataaaggaactgaaggtgttattcaaatcgaaaatccaaacctggtgaaagcaaagaatataaaagccaaagaagctgatcttggaaagacaactgaactctcgaggcgtgagagagaggagattgagaaacaaaaatctcatgagcgctatatgaagcttcaggagcaagggaaaacagaacaggcgaagaaagatttggaacgtcttgctttaataaggcagcaaagagcagatgctgcaaagaaacgcgaagaggagaaagctgctaaagaacagaggaagaccgaagcgcgcaaataactgccaaggtggtggaggcatgagctaagctgagctgtgttggctggatatttatttctatgcatcttagtatatttaaaccctggtctctattccatcatctacatttccataaaaaccgtgcattgacaagtgtaaagtagtcctgtcggcgtggcttgctgtaaacttgagcttggcagggtacacatttagtgagatcagcttatgtgagatttgctttcactcaaaaattggtatggaaaataactgttgaaattt

SEQ ID NO: 12629 - protein, 163 aa, Triticum aestivum
  peptide (1)..(163): Ceres Seq. ID no. 13655073
  misc_feature (35)..(163): Pfam Name: Pfam Description:  Caldesmon
  misc_feature (1)..(152): NCBI GI NO: 34909600 NR Description: P0435B05.20
  misc_feature (1)..(163): NCBI GI NO: 18422620 NR Description: expressed protein [Arabidopsis thaliana]
  misc_feature (1)..(163): NCBI GI NO: 31418215 NR Description: Unknown (protein for MGC:56344) [Danio rerio]
  misc_feature (1)..(161): NCBI GI NO: 28278503 NR Description: Similar to PDGFA associated protein 1
  misc_feature (1)..(163): NCBI GI NO: 12018258 NR Description: kinase substrate HASPP28 [Rattus norvegicus]
  misc_feature (1)..(163): NCBI GI NO: 7657441 NR Description: PDGFA associated protein 1
  misc_feature (1)..(163): NCBI GI NO: 30584165 NR Description: Homo sapiens PDGFA associated protein 1
  misc_feature (1)..(163): NCBI GI NO: 1136586 NR Description: PDGF associated protein
  misc_feature (3)..(155): NCBI GI NO: 1518855 NR Description: HASPP28
  misc_feature (54)..(162): NCBI GI NO: 37779032 NR Description: kinase substrate HASPP28 [Pagrus major]
MGRGKFKGKPTGRRNFSTPEEIASGTSGRPRSFKKNVAEAEEEEEEVEESEEEESEDDGEEKKHKGTEGVIQIENPNLVKAKNIKAKEADLGKTTELSRREREEIEKQKSHERYMKLQEQGKTEQAKKDLERLALIRQQRADAAKKREEEKAAKEQRKTEARK

SEQ ID NO: 12630 - DNA, 913 bp, Triticum aestivum
  misc_feature (1)..(913): Ceres Seq. ID no. 13580026
  misc_feature (375)..(375): n is a, c, t, g, unknown, or other
ccgagagccaggtttgccctagccccttgccgcgcaccggatcgccacctcttccgacttccgcggccgcataaactgtcgaaaccacaactccacaaatttgcctcccctctttccccaggttaaacaacccatccggagccggagaacgycagaagaatccagaggcaccyccgagtttgttggcgatgttgcgcgcgggaggaagccggctcgtcgcccccggactccggcgkctcctcggcccggrsgccggsgagagggctgcgccggggctggcggcggcgggggcgggggcgagggcgtaccacgagcgggtggtggaccactacaacaacccgcggaacgtcgggtcyttcgacaaggacgaccccnacgtcggcaccgggctsgtcggcgcgccggcctgcggcgacgtcatgaagctkcagatccgtgtcgacgaaggcaccgggaagatmgtcgacgcctgcttcaagaccttcggctgcggctcygcaatcgcgtcgtcctccgtccgctactgaatgggtgaagggaaagcaaatggaggaagtagtgagtatcaagaacactgagattgcaawgcacttgtcacttccaccagtaaagctccattgcagtatgcttgctgaagatgcaattaaagctgccgtgaaagattatgaatcaaagaaggcgaagctgggagacagccctgcagagaaggctgccgaagcatgaacatgatatatgcttctgttctatgagggtgagaaatggtgtgcaatgttgacaaactccagtgttgtagcatgtatcataaggatgaacacgaacaacttgaaataaatgtgatgtcatgttaggagaagttgtgcatgtatagcagctgctaagaaaatttgtgcatgtatagcaactgctggaagtc

SEQ ID NO: 12631 - protein, 112 aa, Triticum aestivum
  peptide (1)..(112): Ceres Seq. ID no. 15222711
  misc_feature (39)..(112): Pfam Name: Pfam Description:  NifU-like N terminal domain
  misc_feature (1)..(112): NCBI GI NO: 34912076 NR Description: putative nifU-like protein
  misc_feature (38)..(112): NCBI GI NO: 15235569 NR Description: iron-sulfur cluster assembly complex protein
  misc_feature (38)..(112): NCBI GI NO: 21595581 NR Description: nifU-like protein [Arabidopsis thaliana]
  misc_feature (17)..(112): NCBI GI NO: 16798388 NR Description: iron-sulfur cluster assembly protein IscU
  misc_feature (25)..(110): NCBI GI NO: 15232028 NR Description: hypothetical protein [Arabidopsis thaliana]
  misc_feature (37)..(112): NCBI GI NO: 15233385 NR Description: NifU-related metallocluster assembly factor
  misc_feature (27)..(112): NCBI GI NO: 27666566 NR Description: similar to RIKEN cDNA 2310020H20 gene
  misc_feature (27)..(112): NCBI GI NO: 20381021 NR Description: Nifu-pending protein [Mus musculus]
  misc_feature (27)..(112): NCBI GI NO: 21313484 NR Description: nitrogen fixation cluster-like [Mus musculus]
  misc_feature (27)..(112): NCBI GI NO: 11545707 NR Description: ISCU2 [Homo sapiens]
  misc_feature (16)..(16): Xaa is any aa, unknown or other
  misc_feature (21)..(21): Xaa is any aa, unknown or other
  misc_feature (23)..(23): Xaa is any aa, unknown or other
  misc_feature (56)..(56): Xaa is any aa, unknown or other
  misc_feature (63)..(63): Xaa is any aa, unknown or other
  misc_feature (68)..(68): Xaa is any aa, unknown or other
  misc_feature (80)..(80): Xaa is any aa, unknown or other
  misc_feature (91)..(91): Xaa is any aa, unknown or other
  misc_feature (103)..(103): Xaa is any aa, unknown or other
MLRAGGSRLVAPGLRXLLGPXAXERAAPGLAAAGAGARAYHERVVDHYNNPRNVGXFDKDDPXVGTGXVGAPACGDVMKXQIRVDEGTGKXVDACFKTFGCGXAIASSSVRY

SEQ ID NO: 12632 - protein, 58 aa, Triticum aestivum
  peptide (1)..(58): Ceres Seq. ID no. 15222712
  misc_feature (1)..(58): NCBI GI NO: 34912076 NR Description: putative nifU-like protein
  misc_feature (1)..(58): NCBI GI NO: 15235569 NR Description: iron-sulfur cluster assembly complex protein
  misc_feature (1)..(58): NCBI GI NO: 21595581 NR Description: nifU-like protein [Arabidopsis thaliana]
  misc_feature (1)..(52): NCBI GI NO: 16798388 NR Description: iron-sulfur cluster assembly protein IscU
  misc_feature (1)..(58): NCBI GI NO: 15232028 NR Description: hypothetical protein [Arabidopsis thaliana]
  misc_feature (1)..(53): NCBI GI NO: 15233385 NR Description: NifU-related metallocluster assembly factor
  misc_feature (1)..(54): NCBI GI NO: 27666566 NR Description: similar to RIKEN cDNA 2310020H20 gene
  misc_feature (1)..(54): NCBI GI NO: 20381021 NR Description: Nifu-pending protein [Mus musculus]
  misc_feature (1)..(54): NCBI GI NO: 21313484 NR Description: nitrogen fixation cluster-like [Mus musculus]
  misc_feature (1)..(54): NCBI GI NO: 11545707 NR Description: ISCU2 [Homo sapiens]
  misc_feature (14)..(14): Xaa is any aa, unknown or other
MEEVVSIKNTEIAXHLSLPPVKLHCSMLAEDAIKAAVKDYESKKAKLGDSPAEKAAEA

SEQ ID NO: 12633 - DNA, 1092 bp, Triticum aestivum
  misc_feature (1)..(1092): Ceres Seq. ID no. 13598386
aaaaatagcatctcaccccacccatggacaccgacctcgacctggacgccctcctcgcctccttcgccggcgagtccgccgcagtctccgagctcctcgccccgcctccgctcgatgcggcggaggcggggtcgccggagtcggtgacctcccggtccagccacgccggcgaggaggtgctgtcggagatcgagaggtttctgatgcaggaggacgaggcggcgggggcggagccggtggacgggatcagcgtggatgagttcttcgacgcgctgttcgatggtggggaggaggggggcgagaaggggaacgggagtgaggctgaggctgggggcagcaccgatggggactctaggagggaggaagaaggggtggaggtggtgacgccggagacagaggcggaggtggtgacgcccgaaacggaggtcgatggcgatgatcccatcagcaagaagaagaggaggcaaatgaggaatagggattctgccatgaaatcaagggrgaggaagaagtcatatgtgaaggrcttggagacgaagagcaagtatcttgaggcggagtgtcgccgcctcagctacgcacttcagtgctgcgcagctgagaacatggcactgcgccagaacatgttgaaggataggcctattggtgctcacacagccatgcaggagtctgccgtactttcggaaaccctgccgctggtttccctgctttggctagtgagcatcgtgtgcctattcctaacgcccggtctacccaaccgaagcctggcggctccaaggagagccgaaagaggtctcgcaatggtagccggaaagccaagcagtgatcaaccagagaccttggagcttctaccccatggaaggcgctggaggggcacaagggagaggatcaagctagatgctccgccattgcgtgcagctgccgcttgctagactagtgccagcttattcgcaagtttccagtatgtagtgtagttagcaatgaatgtctaaatatgtgttctcttgctgccaccgtggctttatccatgactatcttctgctctctctgttcgcgtkgttttgatgatcttctaatcagatgctagttttg

SEQ ID NO: 12634 - protein, 302 aa, Triticum aestivum
  peptide (1)..(302): Ceres Seq. ID no. 15222334
  misc_feature (139)..(203): Pfam Name: Pfam Description:  bZIP transcription factor
  misc_feature (53)..(298): NCBI GI NO: 15217559 NR Description: bZIP family transcription factor
  misc_feature (64)..(201): NCBI GI NO: 34904784 NR Description: transcription factor-like protein
  misc_feature (160)..(160): Xaa is any aa, unknown or other
  misc_feature (168)..(168): Xaa is any aa, unknown or other
MDTDLDLDALLASFAGESAAVSELLAPPPLDAAEAGSPESVTSRSSHAGEEVLSEIERFLMQEDEAAGAEPVDGISVDEFFDALFDGGEEGGEKGNGSEAEAGGSTDGDSRREEEGVEVVTPETEAEVVTPETEVDGDDPISKKKRRQMRNRDSAMKSRXRKKSYVKXLETKSKYLEAECRRLSYALQCCAAENMALRQNMLKDRPIGAHTAMQESAVLSETLPLVSLLWLVSIVCLFLTPGLPNRSLAAPRRAERGLAMVAGKPSSDQPETLELLPHGRRWRGTRERIKLDAPPLRAAAAC

SEQ ID NO: 12635 - protein, 242 aa, Triticum aestivum
  peptide (1)..(242): Ceres Seq. ID no. 15222335
  misc_feature (79)..(143): Pfam Name: Pfam Description:  bZIP transcription factor
  misc_feature (1)..(238): NCBI GI NO: 15217559 NR Description: bZIP family transcription factor
  misc_feature (4)..(141): NCBI GI NO: 34904784 NR Description: transcription factor-like protein
  misc_feature (100)..(100): Xaa is any aa, unknown or other
  misc_feature (108)..(108): Xaa is any aa, unknown or other
MQEDEAAGAEPVDGISVDEFFDALFDGGEEGGEKGNGSEAEAGGSTDGDSRREEEGVEVVTPETEAEVVTPETEVDGDDPISKKKRRQMRNRDSAMKSRXRKKSYVKXLETKSKYLEAECRRLSYALQCCAAENMALRQNMLKDRPIGAHTAMQESAVLSETLPLVSLLWLVSIVCLFLTPGLPNRSLAAPRRAERGLAMVAGKPSSDQPETLELLPHGRRWRGTRERIKLDAPPLRAAAAC

SEQ ID NO: 12636 - protein, 154 aa, Triticum aestivum
  peptide (1)..(154): Ceres Seq. ID no. 15222336
  misc_feature (1)..(55): Pfam Name: Pfam Description:  bZIP transcription factor
  misc_feature (1)..(150): NCBI GI NO: 15217559 NR Description: bZIP family transcription factor
  misc_feature (1)..(53): NCBI GI NO: 34904784 NR Description: transcription factor-like protein
  misc_feature (12)..(12): Xaa is any aa, unknown or other
  misc_feature (20)..(20): Xaa is any aa, unknown or other
MRNRDSAMKSRXRKKSYVKXLETKSKYLEAECRRLSYALQCCAAENMALRQNMLKDRPIGAHTAMQESAVLSETLPLVSLLWLVSIVCLFLTPGLPNRSLAAPRRAERGLAMVAGKPSSDQPETLELLPHGRRWRGTRERIKLDAPPLRAAAAC

SEQ ID NO: 12637 - DNA, 777 bp, Triticum aestivum
  misc_feature (1)..(777): Ceres Seq. ID no. 12584790
acatcctaatcgaaaaagttccgtcccattattggttcttgcgaggaggggggcggagaaacggaagcaggaggcagagaggagatcgagccagagggcggcgagcaagggcgcgatggcgtccaagaggatacagaaggagcttaaggatctgcagaaggacccccctacctcatgcagcgcaggtcctgtgggtgaagatatgttccattggcaggcaacaataatgggcccatctgacagcccatattctggtggagttttcctagttactatccacttccctcctgattatcctttcaaaccaccaaaggtggcattccgcaccaaggtgttccatccaaacatcaacagcaacgggagcatttgtctggacatcctcaaggaccaatggagccccgctctgaccatttccaaggtgctgctgtccatctgctccctgctgtatgacccgaaccctgatgaccctctggtccctgagatcgcccacatgtacaagacggaccggcacaagtacgagagcaccgccaggacctggacgcaaaggtatgccatgtaatgcaagacggcggatgggtcgccggagtcagtcttgtttgtaacattctcgatcagttcgtgtgtgcccgcccagtgtgtcacctgtctgtcaaactggcactcgttgctcaactgtgtcacctggcgcagtgacttggaacatggaaccggtgttgcatattttggattcagataaatgtagccacctgcctgccacttaaaaaaaaaaaaaaaaaa

SEQ ID NO: 12638 - protein, 185 aa, Triticum aestivum
  peptide (1)..(185): Ceres Seq. ID no. 12584791
  misc_feature (39)..(185): NCBI GI NO: 20152203 NR Description: ubiquitin-conjugating enzyme OsUBC5a
  misc_feature (39)..(185): NCBI GI NO: 11762186 NR Description: AT4g27960 [Arabidopsis thaliana]
  misc_feature (39)..(185): NCBI GI NO: 18417097 NR Description: E2, ubiquitin-conjugating enzyme 9
  misc_feature (39)..(185): NCBI GI NO: 30687803 NR Description: ubiquitin-conjugating enzyme 9 (UBC9)
  misc_feature (19)..(181): NCBI GI NO: 34911986 NR Description: P0694A04.26
  misc_feature (39)..(185): NCBI GI NO: 18408001 NR Description: E2, ubiquitin-conjugating enzyme, putative
  misc_feature (39)..(185): NCBI GI NO: 5762457 NR Description: ubiquitin-conjugating enzyme UBC2
  misc_feature (39)..(185): NCBI GI NO: 19347859 NR Description: putative E2, ubiquitin-conjugating enzyme UBC9
  misc_feature (39)..(185): NCBI GI NO: 18423494 NR Description: E2, ubiquitin-conjugating enzyme 10
  misc_feature (39)..(185): NCBI GI NO: 441457 NR Description: ubiquitin conjugating enzyme E2
HPNRKSSVPLLVLARRGAEKRKQEAERRSSQRAASKGAMASKRIQKELKDLQKDPPTSCSAGPVGEDMFHWQATIMGPSDSPYSGGVFLVTIHFPPDYPFKPPKVAFRTKVFHPNINSNGSICLDILKDQWSPALTISKVLLSICSLLYDPNPDDPLVPEIAHMYKTDRHKYESTARTWTQRYAM

SEQ ID NO: 12639 - protein, 147 aa, Triticum aestivum
  peptide (1)..(147): Ceres Seq. ID no. 12584792
  misc_feature (1)..(147): NCBI GI NO: 20152203 NR Description: ubiquitin-conjugating enzyme OsUBC5a
  misc_feature (1)..(147): NCBI GI NO: 11762186 NR Description: AT4g27960 [Arabidopsis thaliana]
  misc_feature (1)..(147): NCBI GI NO: 18417097 NR Description: E2, ubiquitin-conjugating enzyme 9
  misc_feature (1)..(147): NCBI GI NO: 30687803 NR Description: ubiquitin-conjugating enzyme 9 (UBC9)
  misc_feature (1)..(143): NCBI GI NO: 34911986 NR Description: P0694A04.26
  misc_feature (1)..(147): NCBI GI NO: 18408001 NR Description: E2, ubiquitin-conjugating enzyme, putative
  misc_feature (1)..(147): NCBI GI NO: 5762457 NR Description: ubiquitin-conjugating enzyme UBC2
  misc_feature (1)..(147): NCBI GI NO: 19347859 NR Description: putative E2, ubiquitin-conjugating enzyme UBC9
  misc_feature (1)..(147): NCBI GI NO: 18423494 NR Description: E2, ubiquitin-conjugating enzyme 10
  misc_feature (1)..(147): NCBI GI NO: 441457 NR Description: ubiquitin conjugating enzyme E2
MASKRIQKELKDLQKDPPTSCSAGPVGEDMFHWQATIMGPSDSPYSGGVFLVTIHFPPDYPFKPPKVAFRTKVFHPNINSNGSICLDILKDQWSPALTISKVLLSICSLLYDPNPDDPLVPEIAHMYKTDRHKYESTARTWTQRYAM

SEQ ID NO: 12640 - protein, 118 aa, Triticum aestivum
  peptide (1)..(118): Ceres Seq. ID no. 12584793
  misc_feature (1)..(118): NCBI GI NO: 20152203 NR Description: ubiquitin-conjugating enzyme OsUBC5a
  misc_feature (1)..(118): NCBI GI NO: 11762186 NR Description: AT4g27960 [Arabidopsis thaliana]
  misc_feature (1)..(118): NCBI GI NO: 18417097 NR Description: E2, ubiquitin-conjugating enzyme 9
  misc_feature (1)..(118): NCBI GI NO: 30687803 NR Description: ubiquitin-conjugating enzyme 9 (UBC9)
  misc_feature (1)..(114): NCBI GI NO: 34911986 NR Description: P0694A04.26
  misc_feature (1)..(118): NCBI GI NO: 18408001 NR Description: E2, ubiquitin-conjugating enzyme, putative
  misc_feature (1)..(118): NCBI GI NO: 5762457 NR Description: ubiquitin-conjugating enzyme UBC2
  misc_feature (1)..(118): NCBI GI NO: 19347859 NR Description: putative E2, ubiquitin-conjugating enzyme UBC9
  misc_feature (1)..(118): NCBI GI NO: 18423494 NR Description: E2, ubiquitin-conjugating enzyme 10
  misc_feature (1)..(118): NCBI GI NO: 441457 NR Description: ubiquitin conjugating enzyme E2
MFHWQATIMGPSDSPYSGGVFLVTIHFPPDYPFKPPKVAFRTKVFHPNINSNGSICLDILKDQWSPALTISKVLLSICSLLYDPNPDDPLVPEIAHMYKTDRHKYESTARTWTQRYAM

SEQ ID NO: 12641 - DNA, 1937 bp, Triticum aestivum
  misc_feature (1)..(1937): Ceres Seq. ID no. 14314088
ctattccaccgccccccttcctcccgccaccagcccaacctcgccgccggcctcactctccctctatcctccgccccaccgcccggcctcccaccaccggagcgcgccgccctccccgtcgaagaaaccagaacccctcgccctccgcgtgccctcgtcagctcggccgcgatgatctccgccatgtcctgggtccccaggggcgccgccaagagcgtccccatcgaggcggagccgcccaccaaggaggagatcgaggaggccatgaagaaaatcgccctcggcagagaggccgggagcgacgccgacgacgcggacggggacgaggacgacgacgccgtgatggaggtcgacggcgccgaggacgaggaggtcgacgaggtcgcccaggccaaggccgccgccaaggcgctcgggaccaagagcagctcgggctcggccgccgtcggcgacgtttccgacgggctcgccgagctcaacatggacgcctacgacgacgaggaggatgggctcgagcttttcagcaccgggctgggggacttgtactacaagagcaacgaggaggacccctatatcatcaagaacgaagaagatgatgatggcgaggatgacgatgaggagattgaggacatgactatcaaacctactgatatagtcattgtttgtgctcataacgaggatgaattcaattctctccaggttagtatagtggaagaactggaagatggggatcctaatatgtttgtgcaccatgaggtccctctctcagattttccgctctgcacagcttggatggattttaaccgtcaggatggcgaacagaaaggaaatttcatagctgttggcaccatggatcctacaattgaaatatggaacttggatgtcgtcgacgaggtcgaaccacattatgtgctaggaggagtttcaaaaaagaagaagaaagttaaggggaaaaagggaaaaacatataagaagggtagccatagaagttctgtgcttggtcttgcgtggaacacggtggtgaggaatgctctagctagtgcaagtgcagacaaaactgtgaaagtttgggacttaagtgctggtaaatgtttagtcacactgcaacatcatgatgacaaggttcaatcagttgcctggaggtcacctgaagttcttctcagtggatcttttgatagaacaattgccatgacagatatgaaagacagtggacaatgttgtcataaatggcctgtcgaagcagatgtagagagcttagtttgtgatccacacaatgaacactcctttgtggttagtcttgaaaatgggatggttcaagtatttgatattcggacagcttcatcaaattcaaatcctggacagccgatttttactctgcatgcacacgaaaaggccgtttcttccatatctttcgcaccttctacccctaattttcttgcgactggttcaactgacaaaatggtgaagctctgggatctatcgaataaccagccttcgtgtgtctcgtcgctgaatcctaagcttggagctatattctcggtgtcgttttcgatcgacaaccccttcctgttagcgtgcggaggatcgaaaggcaaactgaaggtctggaacacactgtctgaacccgccgtcgccaacaaatttggtaaggggcggcaaattgcaccagctctgcgaagcgaatcccccacagaatgatgggctcgagctgtttctggctatgtggtagaatagattttttcgcgtttcagttttgttactgggtgcaatgtaatgggagcatggatttatttatatatgtacaaccaaacgacagctgaaatggatctgtagcgggagttcgcagtttatcatggattccgttttatttggacctagaaaaaggaagtcaaagatagctgttttatactccctctgtttcaaatgtttcaaaatgc

SEQ ID NO: 12642 - protein, 565 aa, Triticum aestivum
  peptide (1)..(565): Ceres Seq. ID no. 14314089
  misc_feature (454)..(537): Pfam Name: Pfam Description:  WD domain, G-beta repeat
  misc_feature (58)..(552): NCBI GI NO: 18415195 NR Description: transducin / WD-40 repeat protein family
  misc_feature (102)..(550): NCBI GI NO: 20161737 NR Description: B1033B05.3
  misc_feature (116)..(556): NCBI GI NO: 18415193 NR Description: transducin / WD-40 repeat protein family
  misc_feature (57)..(550): NCBI GI NO: 32422969 NR Description: hypothetical protein [Neurospora crassa]
  misc_feature (56)..(548): NCBI GI NO: 40746560 NR Description: hypothetical protein AN0310.2
  misc_feature (121)..(548): NCBI GI NO: 19112681 NR Description: WD repeat protein
  misc_feature (75)..(565): NCBI GI NO: 29436469 NR Description: Unknown (protein for MGC:56486) [Danio rerio]
  misc_feature (167)..(552): NCBI GI NO: 28829827 NR Description: similar to Expressed protein; protein id:At4g18905
  misc_feature (75)..(555): NCBI GI NO: 34862412 NR Description: similar to periodic tryptophan protein 1 homolog
  misc_feature (75)..(554): NCBI GI NO: 13096812 NR Description: periodic tryptophan protein 1 homolog
LFHRPPSSRHQPNLAAGLTLPLSSAPPPGLPPPERAALPVEETRTPRPPRALVSSAAMISAMSWVPRGAAKSVPIEAEPPTKEEIEEAMKKIALGREAGSDADDADGDEDDDAVMEVDGAEDEEVDEVAQAKAAAKALGTKSSSGSAAVGDVSDGLAELNMDAYDDEEDGLELFSTGLGDLYYKSNEEDPYIIKNEEDDDGEDDDEEIEDMTIKPTDIVIVCAHNEDEFNSLQVSIVEELEDGDPNMFVHHEVPLSDFPLCTAWMDFNRQDGEQKGNFIAVGTMDPTIEIWNLDVVDEVEPHYVLGGVSKKKKKVKGKKGKTYKKGSHRSSVLGLAWNTVVRNALASASADKTVKVWDLSAGKCLVTLQHHDDKVQSVAWRSPEVLLSGSFDRTIAMTDMKDSGQCCHKWPVEADVESLVCDPHNEHSFVVSLENGMVQVFDIRTASSNSNPGQPIFTLHAHEKAVSSISFAPSTPNFLATGSTDKMVKLWDLSNNQPSCVSSLNPKLGAIFSVSFSIDNPFLLACGGSKGKLKVWNTLSEPAVANKFGKGRQIAPALRSESPTE

SEQ ID NO: 12643 - protein, 508 aa, Triticum aestivum
  peptide (1)..(508): Ceres Seq. ID no. 14314090
  misc_feature (397)..(480): Pfam Name: Pfam Description:  WD domain, G-beta repeat
  misc_feature (1)..(495): NCBI GI NO: 18415195 NR Description: transducin / WD-40 repeat protein family
  misc_feature (45)..(493): NCBI GI NO: 20161737 NR Description: B1033B05.3
  misc_feature (59)..(499): NCBI GI NO: 18415193 NR Description: transducin / WD-40 repeat protein family
  misc_feature (1)..(493): NCBI GI NO: 32422969 NR Description: hypothetical protein [Neurospora crassa]
  misc_feature (1)..(491): NCBI GI NO: 40746560 NR Description: hypothetical protein AN0310.2
  misc_feature (64)..(491): NCBI GI NO: 19112681 NR Description: WD repeat protein
  misc_feature (18)..(508): NCBI GI NO: 29436469 NR Description: Unknown (protein for MGC:56486) [Danio rerio]
  misc_feature (110)..(495): NCBI GI NO: 28829827 NR Description: similar to Expressed protein; protein id:At4g18905
  misc_feature (18)..(498): NCBI GI NO: 34862412 NR Description: similar to periodic tryptophan protein 1 homolog
  misc_feature (18)..(497): NCBI GI NO: 13096812 NR Description: periodic tryptophan protein 1 homolog
MISAMSWVPRGAAKSVPIEAEPPTKEEIEEAMKKIALGREAGSDADDADGDEDDDAVMEVDGAEDEEVDEVAQAKAAAKALGTKSSSGSAAVGDVSDGLAELNMDAYDDEEDGLELFSTGLGDLYYKSNEEDPYIIKNEEDDDGEDDDEEIEDMTIKPTDIVIVCAHNEDEFNSLQVSIVEELEDGDPNMFVHHEVPLSDFPLCTAWMDFNRQDGEQKGNFIAVGTMDPTIEIWNLDVVDEVEPHYVLGGVSKKKKKVKGKKGKTYKKGSHRSSVLGLAWNTVVRNALASASADKTVKVWDLSAGKCLVTLQHHDDKVQSVAWRSPEVLLSGSFDRTIAMTDMKDSGQCCHKWPVEADVESLVCDPHNEHSFVVSLENGMVQVFDIRTASSNSNPGQPIFTLHAHEKAVSSISFAPSTPNFLATGSTDKMVKLWDLSNNQPSCVSSLNPKLGAIFSVSFSIDNPFLLACGGSKGKLKVWNTLSEPAVANKFGKGRQIAPALRSESPTE

SEQ ID NO: 12644 - protein, 504 aa, Triticum aestivum
  peptide (1)..(504): Ceres Seq. ID no. 14314091
  misc_feature (393)..(476): Pfam Name: Pfam Description:  WD domain, G-beta repeat
  misc_feature (1)..(491): NCBI GI NO: 18415195 NR Description: transducin / WD-40 repeat protein family
  misc_feature (41)..(489): NCBI GI NO: 20161737 NR Description: B1033B05.3
  misc_feature (55)..(495): NCBI GI NO: 18415193 NR Description: transducin / WD-40 repeat protein family
  misc_feature (1)..(489): NCBI GI NO: 32422969 NR Description: hypothetical protein [Neurospora crassa]
  misc_feature (1)..(487): NCBI GI NO: 40746560 NR Description: hypothetical protein AN0310.2
  misc_feature (60)..(487): NCBI GI NO: 19112681 NR Description: WD repeat protein
  misc_feature (14)..(504): NCBI GI NO: 29436469 NR Description: Unknown (protein for MGC:56486) [Danio rerio]
  misc_feature (106)..(491): NCBI GI NO: 28829827 NR Description: similar to Expressed protein; protein id:At4g18905
  misc_feature (14)..(494): NCBI GI NO: 34862412 NR Description: similar to periodic tryptophan protein 1 homolog
  misc_feature (14)..(493): NCBI GI NO: 13096812 NR Description: periodic tryptophan protein 1 homolog
MSWVPRGAAKSVPIEAEPPTKEEIEEAMKKIALGREAGSDADDADGDEDDDAVMEVDGAEDEEVDEVAQAKAAAKALGTKSSSGSAAVGDVSDGLAELNMDAYDDEEDGLELFSTGLGDLYYKSNEEDPYIIKNEEDDDGEDDDEEIEDMTIKPTDIVIVCAHNEDEFNSLQVSIVEELEDGDPNMFVHHEVPLSDFPLCTAWMDFNRQDGEQKGNFIAVGTMDPTIEIWNLDVVDEVEPHYVLGGVSKKKKKVKGKKGKTYKKGSHRSSVLGLAWNTVVRNALASASADKTVKVWDLSAGKCLVTLQHHDDKVQSVAWRSPEVLLSGSFDRTIAMTDMKDSGQCCHKWPVEADVESLVCDPHNEHSFVVSLENGMVQVFDIRTASSNSNPGQPIFTLHAHEKAVSSISFAPSTPNFLATGSTDKMVKLWDLSNNQPSCVSSLNPKLGAIFSVSFSIDNPFLLACGGSKGKLKVWNTLSEPAVANKFGKGRQIAPALRSESPTE

SEQ ID NO: 12645 - DNA, 1257 bp, Triticum aestivum
  misc_feature (1)..(1257): Ceres Seq. ID no. 13598714
agaacatcctaatcgaaaatcatcgagctcgcaycacargagttayctctrgctagtcrcgtcrcatcaaagccgaagaagcaatggccgccttcgccaccaggtcsgcggccttcctyggcctcgccgycgtgctctgtktcctcgycggcgmggcgagcgcgcagcagctctckcccarcttctactcgaggtcttgccccaacctggcgtccatcgtgcggtcggggatgacckccgcrttgcagacggagaggcggatgggcgcgtccatcctccgcctcttcttccacgactgcttcgtcaatgggtgtgacggctcsattctgcttgacgacacstcgacgttcaccggcgagaagaacgccgggccgaacgccaactcggcscgygggttcgaggtgatcgacgccmtcaagacccrggtcgargccgcgtgcagggccaccgtctcctgcgccgacatcctcgcgctcgccgcccgtgacggagtcaacctgctcggaggtcccacctggagcgtgccgctggggcgcaaggactcgcgcacggcgagtcagagcgcggccaacgcgaacctgccggggcccggctccagcctcgccacgctcatcaccatgttcggcaacaagaacctgtcgccgcgggacatgacggcgctctccggcgcgcacaccatcgggcggtcgcagtgccagttctttcgcaaccgcatctacaacgagcgcaacatcaacgccagcttcgcggcgctgcggcagcggacgtgcccgcggtccggcggcaacggcaacctcgcgcccttcgacgtgcagaccgccgacgggttcgacaacgcatactaccagaacctggtggggcagcgcggcctcctgcactcggaccaggagctcttcaacggcgggtcgcaggatgcgctggtgaggcagtacagcaacagccccagccagttctccgccgacttcgtcacggccatgcttaagatgggcggcctgctgtgtatgtattaatgtgtatgtatgaagaagaacaccaaataatgattgatgccttggaaaaccaggcattggtcaggttcacgtatgtatgtgttaatgtgtatgtatgaagaagaacaccaaatgtacaaacgctcgtttgctcaatccggggcgaacgtgcaaactacaaagtatcaaaatgtacgttggtcgtaaaagtgtatcatcatcaacatcatcaatacagaataatgggatggtgcaatcatcataactg

SEQ ID NO: 12646 - protein, 308 aa, Triticum aestivum
  peptide (1)..(308): Ceres Seq. ID no. 15222409
  misc_feature (46)..(286): Pfam Name: Pfam Description:  Peroxidase
  misc_feature (17)..(304): NCBI GI NO: 5453379 NR Description: bacterial-induced peroxidase precursor
  misc_feature (21)..(304): NCBI GI NO: 7433049 NR Description: peroxidase (EC 1.11.1.7) - flax (fragment)
  misc_feature (29)..(304): NCBI GI NO: 464365 NR Description: Peroxidase P7 (TP7)
  misc_feature (29)..(304): NCBI GI NO: 15239075 NR Description: peroxidase, putative [Arabidopsis thaliana]
  misc_feature (17)..(304): NCBI GI NO: 7433047 NR Description: probable peroxidase (EC 1
  misc_feature (25)..(304): NCBI GI NO: 34903770 NR Description: unnamed protein product
  misc_feature (14)..(304): NCBI GI NO: 5381253 NR Description: peroxidase [Nicotiana tabacum]
  misc_feature (29)..(304): NCBI GI NO: 520568 NR Description: peroxidase
  misc_feature (9)..(304): NCBI GI NO: 7433058 NR Description: peroxidase (EC 1.11.1.7) - radish
  misc_feature (8)..(304): NCBI GI NO: 2117618 NR Description: peroxidase (EC 1.11.1.7) 1 precursor - wheat
  misc_feature (8)..(8): Xaa is any aa, unknown or other
  misc_feature (12)..(12): Xaa is any aa, unknown or other
  misc_feature (16)..(16): Xaa is any aa, unknown or other
  misc_feature (20)..(20): Xaa is any aa, unknown or other
  misc_feature (22)..(22): Xaa is any aa, unknown or other
  misc_feature (24)..(24): Xaa is any aa, unknown or other
  misc_feature (31)..(31): Xaa is any aa, unknown or other
  misc_feature (33)..(33): Xaa is any aa, unknown or other
  misc_feature (52)..(52): Xaa is any aa, unknown or other
  misc_feature (53)..(53): Xaa is any aa, unknown or other
  misc_feature (80)..(80): Xaa is any aa, unknown or other
  misc_feature (86)..(86): Xaa is any aa, unknown or other
  misc_feature (102)..(102): Xaa is any aa, unknown or other
  misc_feature (103)..(103): Xaa is any aa, unknown or other
  misc_feature (111)..(111): Xaa is any aa, unknown or other
  misc_feature (114)..(114): Xaa is any aa, unknown or other
  misc_feature (116)..(116): Xaa is any aa, unknown or other
MAAFATRXAAFXGLAXVLCXLXGXASAQQLXPXFYSRSCPNLASIVRSGMTXXLQTERRMGASILRLFFHDCFVNGCDGXILLDDXSTFTGEKNAGPNANSXXGFEVIDAXKTXVXAACRATVSCADILALAARDGVNLLGGPTWSVPLGRKDSRTASQSAANANLPGPGSSLATLITMFGNKNLSPRDMTALSGAHTIGRSQCQFFRNRIYNERNINASFAALRQRTCPRSGGNGNLAPFDVQTADGFDNAYYQNLVGQRGLLHSDQELFNGGSQDALVRQYSNSPSQFSADFVTAMLKMGGLLCMY

SEQ ID NO: 12647 - protein, 259 aa, Triticum aestivum
  peptide (1)..(259): Ceres Seq. ID no. 15222410
  misc_feature (1)..(237): Pfam Name: Pfam Description:  Peroxidase
  misc_feature (1)..(255): NCBI GI NO: 5453379 NR Description: bacterial-induced peroxidase precursor
  misc_feature (1)..(255): NCBI GI NO: 7433049 NR Description: peroxidase (EC 1.11.1.7) - flax (fragment)
  misc_feature (1)..(255): NCBI GI NO: 464365 NR Description: Peroxidase P7 (TP7)
  misc_feature (1)..(255): NCBI GI NO: 15239075 NR Description: peroxidase, putative [Arabidopsis thaliana]
  misc_feature (1)..(255): NCBI GI NO: 7433047 NR Description: probable peroxidase (EC 1
  misc_feature (1)..(255): NCBI GI NO: 34903770 NR Description: unnamed protein product
  misc_feature (1)..(255): NCBI GI NO: 5381253 NR Description: peroxidase [Nicotiana tabacum]
  misc_feature (1)..(255): NCBI GI NO: 520568 NR Description: peroxidase
  misc_feature (1)..(255): NCBI GI NO: 7433058 NR Description: peroxidase (EC 1.11.1.7) - radish
  misc_feature (1)..(255): NCBI GI NO: 2117618 NR Description: peroxidase (EC 1.11.1.7) 1 precursor - wheat
  misc_feature (3)..(3): Xaa is any aa, unknown or other
  misc_feature (4)..(4): Xaa is any aa, unknown or other
  misc_feature (31)..(31): Xaa is any aa, unknown or other
  misc_feature (37)..(37): Xaa is any aa, unknown or other
  misc_feature (53)..(53): Xaa is any aa, unknown or other
  misc_feature (54)..(54): Xaa is any aa, unknown or other
  misc_feature (62)..(62): Xaa is any aa, unknown or other
  misc_feature (65)..(65): Xaa is any aa, unknown or other
  misc_feature (67)..(67): Xaa is any aa, unknown or other
MTXXLQTERRMGASILRLFFHDCFVNGCDGXILLDDXSTFTGEKNAGPNANSXXGFEVIDAXKTXVXAACRATVSCADILALAARDGVNLLGGPTWSVPLGRKDSRTASQSAANANLPGPGSSLATLITMFGNKNLSPRDMTALSGAHTIGRSQCQFFRNRIYNERNINASFAALRQRTCPRSGGNGNLAPFDVQTADGFDNAYYQNLVGQRGLLHSDQELFNGGSQDALVRQYSNSPSQFSADFVTAMLKMGGLLCMY

SEQ ID NO: 12648 - protein, 249 aa, Triticum aestivum
  peptide (1)..(249): Ceres Seq. ID no. 15222411
  misc_feature (1)..(227): Pfam Name: Pfam Description:  Peroxidase
  misc_feature (1)..(245): NCBI GI NO: 5453379 NR Description: bacterial-induced peroxidase precursor
  misc_feature (1)..(245): NCBI GI NO: 7433049 NR Description: peroxidase (EC 1.11.1.7) - flax (fragment)
  misc_feature (1)..(245): NCBI GI NO: 464365 NR Description: Peroxidase P7 (TP7)
  misc_feature (1)..(245): NCBI GI NO: 15239075 NR Description: peroxidase, putative [Arabidopsis thaliana]
  misc_feature (1)..(245): NCBI GI NO: 7433047 NR Description: probable peroxidase (EC 1
  misc_feature (1)..(245): NCBI GI NO: 34903770 NR Description: unnamed protein product
  misc_feature (1)..(245): NCBI GI NO: 5381253 NR Description: peroxidase [Nicotiana tabacum]
  misc_feature (1)..(245): NCBI GI NO: 520568 NR Description: peroxidase
  misc_feature (1)..(245): NCBI GI NO: 7433058 NR Description: peroxidase (EC 1.11.1.7) - radish
  misc_feature (1)..(245): NCBI GI NO: 2117618 NR Description: peroxidase (EC 1.11.1.7) 1 precursor - wheat
  misc_feature (21)..(21): Xaa is any aa, unknown or other
  misc_feature (27)..(27): Xaa is any aa, unknown or other
  misc_feature (43)..(43): Xaa is any aa, unknown or other
  misc_feature (44)..(44): Xaa is any aa, unknown or other
  misc_feature (52)..(52): Xaa is any aa, unknown or other
  misc_feature (55)..(55): Xaa is any aa, unknown or other
  misc_feature (57)..(57): Xaa is any aa, unknown or other
MGASILRLFFHDCFVNGCDGXILLDDXSTFTGEKNAGPNANSXXGFEVIDAXKTXVXAACRATVSCADILALAARDGVNLLGGPTWSVPLGRKDSRTASQSAANANLPGPGSSLATLITMFGNKNLSPRDMTALSGAHTIGRSQCQFFRNRIYNERNINASFAALRQRTCPRSGGNGNLAPFDVQTADGFDNAYYQNLVGQRGLLHSDQELFNGGSQDALVRQYSNSPSQFSADFVTAMLKMGGLLCMY

SEQ ID NO: 12649 - DNA, 686 bp, Triticum aestivum
  misc_feature (1)..(686): Ceres Seq. ID no. 13590885
atcacttcaccaccaccacaaaccctatccccattaacccgctccaaaaccctgagctgcgcacccaccggcgatgtcggcgacggccatccgctccggcgagctcctcgcttttcccgccgcgctgaggcgtggcctgcccgtggcttctgcctcggtggtcgcgttccggttgagggcgccagtggccgggcgcgtggcggtcagggttgtcgcggcggcggcggagggggcaggggcggaggcggaggcggaagggaagccgaagccgaagaagaagagggcagcgagcgggatcatgaagcctaagccgatttctccggagctaagggagtttgtcggaggcgcggcggagctgccccggacagaggcgctcaagatcatctgggcgcacatcaagggaaacaacctccaggatcccgagaacaagaagataatagtctgcgatgagaaactgaagaagatatttggagggcgtgaccgtgttgggtttcttgagatctctgggctcctcaatccccatttccagaaatgatagggtttatgtagatgttgcactttttctgtattagctaagacagttgtatcagcatatttagctgaacctggtatggagggtccgtaattctggtttgagaatggtacgtctagtatttgcagtaaatggctttgctggtttttggccc

SEQ ID NO: 12650 - protein, 153 aa, Triticum aestivum; identical to SEQ ID NO: 7009
  peptide (1)..(153): Ceres Seq. ID no. 13590886
  misc_feature (2)..(153): NCBI GI NO: 14488372 NR Description: hypothetical protein
  misc_feature (5)..(151): NCBI GI NO: 18397658 NR Description: expressed protein [Arabidopsis thaliana]
  misc_feature (37)..(151): NCBI GI NO: 21593713 NR Description: unknown [Arabidopsis thaliana]
  misc_feature (5)..(151): NCBI GI NO: 19698859 NR Description: unknown protein [Arabidopsis thaliana]
  misc_feature (23)..(151): NCBI GI NO: 14423526 NR Description: putative protein [Arabidopsis thaliana]
  misc_feature (23)..(151): NCBI GI NO: 15235320 NR Description: expressed protein [Arabidopsis thaliana]
  misc_feature (44)..(151): NCBI GI NO: 21553903 NR Description: unknown [Arabidopsis thaliana]
  misc_feature (38)..(153): NCBI GI NO: 33667910 NR Description: SWIb domain-containing protein [Solanum chacoense]
  misc_feature (24)..(153): NCBI GI NO: 18396594 NR Description: expressed protein [Arabidopsis thaliana]
  misc_feature (24)..(153): NCBI GI NO: 21593643 NR Description: unknown [Arabidopsis thaliana]

SEQ ID NO: 12651 - protein, 102 aa, Triticum aestivum
  peptide (1)..(102): Ceres Seq. ID no. 13590887
  misc_feature (42)..(102): Pfam Name: Pfam Description:  Protein of unknown function, DUF584
ITSPPPQTLSPLTRSKTLSCAPTGDVGDGHPLRRAPRFSRRAEAWPARGFCLGGRVPVEGASGRARGGQGCRGGGGGGRGGGGGGREAEAEEEEGSERDHEA

SEQ ID NO: 12652 - protein, 78 aa, Triticum aestivum; identical to SEQ ID NO: 7011
  peptide (1)..(78): Ceres Seq. ID no. 13590888
  misc_feature (1)..(78): NCBI GI NO: 14488372 NR Description: hypothetical protein
  misc_feature (1)..(76): NCBI GI NO: 18397658 NR Description: expressed protein [Arabidopsis thaliana]
  misc_feature (1)..(76): NCBI GI NO: 21593713 NR Description: unknown [Arabidopsis thaliana]
  misc_feature (1)..(76): NCBI GI NO: 19698859 NR Description: unknown protein [Arabidopsis thaliana]
  misc_feature (1)..(76): NCBI GI NO: 14423526 NR Description: putative protein [Arabidopsis thaliana]
  misc_feature (1)..(76): NCBI GI NO: 15235320 NR Description: expressed protein [Arabidopsis thaliana]
  misc_feature (1)..(76): NCBI GI NO: 21553903 NR Description: unknown [Arabidopsis thaliana]
  misc_feature (1)..(78): NCBI GI NO: 33667910 NR Description: SWIb domain-containing protein [Solanum chacoense]
  misc_feature (1)..(78): NCBI GI NO: 18396594 NR Description: expressed protein [Arabidopsis thaliana]
  misc_feature (1)..(78): NCBI GI NO: 21593643 NR Description: unknown [Arabidopsis thaliana]

SEQ ID NO: 12653 - DNA, 1066 bp, Triticum aestivum
  misc_feature (1)..(1066): Ceres Seq. ID no. 13654802
atccgcccttcgtctcgcccccttcctctcaccgtcggcgccgccgccgccatccaccggagagagccgtccgacgctacccggtccaggtatactcgcctgtgcatgactgcgttggttcggctcgccgggagagcagcttcttggagcaggggcgccagcatcgcgcctccgcgtggcatcggcttattcccgcagcgcaggaccgcgttccagggtgcgaggatggagaatggcggcggcaagggcggccgcggcgcgctcatagtcctggaagggctggacaggagcggcaaatcgtcgcagtgcgcccggctgctgtcctttctgcaagggaaaggctgcgcaaccgaagggtggcgcttcccggacagagacaccagcgtcgggaagatgatctccgcctacctcgccaacgagtcgcagctcgatgatcggaccatccatttgctcttcagcgcgaatcgctgggagaaaagaagtttgatggagagcaagctacttggtggaactacactcgtcgttgaccgctactcttattctggagtggcgttttcagctgctaaaggacttgacattgggtggtgcaaggcccctgaggttggactgctagctccagatcttgtaatatatcttgatgtacaaccagagaaagcggccgaaagaggaggctatgggggtgaaagatacgaaagagttgagttccaaaagagagttgctgagcattaccattcactccgtgattcgacatggaaggtcgtcgatggttcccttcccatggagaccgtggaagaacagctaagagaactagccatgaattgcatttcagaatgccaagacaagcaacttaccaatcttccctggtagagttcccgcgatgaaatgccaaaccacataggcacatcggcaagatctctctttagtatgtgattgactgttgctctgttagatctctgaagtgtgtgattgactgttgcgattgactgctgctccgttagatctcttttaagtgtgtgattgacgactgttactctggatgagatacaggcatatcatttctttcctc

SEQ ID NO: 12654 - protein, 288 aa, Triticum aestivum
  peptide (1)..(288): Ceres Seq. ID no. 13654803
  misc_feature (91)..(267): Pfam Name: Pfam Description:  Thymidylate kinase
  misc_feature (76)..(288): NCBI GI NO: 27261100 NR Description: putative thymidylate kinase
  misc_feature (33)..(288): NCBI GI NO: 21553651 NR Description: thymidylate kinase-like protein
  misc_feature (33)..(288): NCBI GI NO: 30697225 NR Description: thymidylate kinase - like protein
  misc_feature (85)..(288): NCBI GI NO: 30697228 NR Description: thymidylate kinase - like protein
  misc_feature (85)..(288): NCBI GI NO: 15912289 NR Description: AT5g59440/f2o15_100 [Arabidopsis thaliana]
  misc_feature (92)..(249): NCBI GI NO: 25288285 NR Description: dTMP kinase (EC 2.7.4.9)
  misc_feature (85)..(288): NCBI GI NO: 291900 NR Description: thymidylate kinase
  misc_feature (85)..(288): NCBI GI NO: 23831251 NR Description: Thymidylate kinase (dTMP kinase)
  misc_feature (85)..(288): NCBI GI NO: 14488796 NR Description: Chain A
  misc_feature (85)..(288): NCBI GI NO: 29726715 NR Description: Chain A
IRPSSRPLPLTVGAAAAIHRREPSDATRSRYTRLCMTALVRLAGRAASWSRGASIAPPRGIGLFPQRRTAFQGARMENGGGKGGRGALIVLEGLDRSGKSSQCARLLSFLQGKGCATEGWRFPDRDTSVGKMISAYLANESQLDDRTIHLLFSANRWEKRSLMESKLLGGTTLVVDRYSYSGVAFSAAKGLDIGWCKAPEVGLLAPDLVIYLDVQPEKAAERGGYGGERYERVEFQKRVAEHYHSLRDSTWKVVDGSLPMETVEEQLRELAMNCISECQDKQLTNLPW

SEQ ID NO: 12655 - protein, 253 aa, Triticum aestivum
  peptide (1)..(253): Ceres Seq. ID no. 13654804
  misc_feature (56)..(232): Pfam Name: Pfam Description:  Thymidylate kinase
  misc_feature (41)..(253): NCBI GI NO: 27261100 NR Description: putative thymidylate kinase
  misc_feature (1)..(253): NCBI GI NO: 21553651 NR Description: thymidylate kinase-like protein
  misc_feature (1)..(253): NCBI GI NO: 30697225 NR Description: thymidylate kinase - like protein
  misc_feature (50)..(253): NCBI GI NO: 30697228 NR Description: thymidylate kinase - like protein
  misc_feature (50)..(253): NCBI GI NO: 15912289 NR Description: AT5g59440/f2o15_100 [Arabidopsis thaliana]
  misc_feature (57)..(214): NCBI GI NO: 25288285 NR Description: dTMP kinase (EC 2.7.4.9)
  misc_feature (50)..(253): NCBI GI NO: 291900 NR Description: thymidylate kinase
  misc_feature (50)..(253): NCBI GI NO: 23831251 NR Description: Thymidylate kinase (dTMP kinase)
  misc_feature (50)..(253): NCBI GI NO: 14488796 NR Description: Chain A
  misc_feature (50)..(253): NCBI GI NO: 29726715 NR Description: Chain A
MTALVRLAGRAASWSRGASIAPPRGIGLFPQRRTAFQGARMENGGGKGGRGALIVLEGLDRSGKSSQCARLLSFLQGKGCATEGWRFPDRDTSVGKMISAYLANESQLDDRTIHLLFSANRWEKRSLMESKLLGGTTLVVDRYSYSGVAFSAAKGLDIGWCKAPEVGLLAPDLVIYLDVQPEKAAERGGYGGERYERVEFQKRVAEHYHSLRDSTWKVVDGSLPMETVEEQLRELAMNCISECQDKQLTNLPW

SEQ ID NO: 12656 - protein, 213 aa, Triticum aestivum
  peptide (1)..(213): Ceres Seq. ID no. 13654805
  misc_feature (16)..(192): Pfam Name: Pfam Description:  Thymidylate kinase
  misc_feature (1)..(213): NCBI GI NO: 27261100 NR Description: putative thymidylate kinase
  misc_feature (1)..(213): NCBI GI NO: 21553651 NR Description: thymidylate kinase-like protein
  misc_feature (1)..(213): NCBI GI NO: 30697225 NR Description: thymidylate kinase - like protein
  misc_feature (10)..(213): NCBI GI NO: 30697228 NR Description: thymidylate kinase - like protein
  misc_feature (10)..(213): NCBI GI NO: 15912289 NR Description: AT5g59440/f2o15_100 [Arabidopsis thaliana]
  misc_feature (17)..(174): NCBI GI NO: 25288285 NR Description: dTMP kinase (EC 2.7.4.9)
  misc_feature (10)..(213): NCBI GI NO: 291900 NR Description: thymidylate kinase
  misc_feature (10)..(213): NCBI GI NO: 23831251 NR Description: Thymidylate kinase (dTMP kinase)
  misc_feature (10)..(213): NCBI GI NO: 14488796 NR Description: Chain A
  misc_feature (10)..(213): NCBI GI NO: 29726715 NR Description: Chain A
MENGGGKGGRGALIVLEGLDRSGKSSQCARLLSFLQGKGCATEGWRFPDRDTSVGKMISAYLANESQLDDRTIHLLFSANRWEKRSLMESKLLGGTTLVVDRYSYSGVAFSAAKGLDIGWCKAPEVGLLAPDLVIYLDVQPEKAAERGGYGGERYERVEFQKRVAEHYHSLRDSTWKVVDGSLPMETVEEQLRELAMNCISECQDKQLTNLPW

SEQ ID NO: 12657 - DNA, 743 bp, Triticum aestivum
  misc_feature (1)..(743): Ceres Seq. ID no. 15173877
aggagcagaaggcgatggcggacgtgcagatgggcagcggcacggagacggagaccttcgcgttccaggcggagatcaaccagctgctcttgctcatcatcaacaccttctactccaacaaggagatcttcctccgcgatctcatctccaactcatcagatgcgcttgacaagatctggttcgagagcctcacggacaagagtcagaccatgcgaacaacctgggcaccatcgtgggctcgggctccaaggagttcatggaggctctgcagggccggggccgtggctgcgccagcaggagtgaagcaagcgctgatatctttgtcggatacaacagacttggctaatctcggaaacaaccttcagagcttggggttctctatcatctccactggtggtacagcgtcaagcttggaagcagctggagtgaatgtgagaaaagttgaatagcttacacattttcctgaaatgattttggccttcattcatcaaaagttggtgtacaaggaactccaggagaagaatcttgaagtaaataatttatatagataaggatcttatgttgtcgtggtggctgctgctgtgaccgaagatcaaaagaagcctggagatgtgcatcatagttttagttgatgttgccaccatgttttggtgcatgtgtatttgattgtatgtacacttgatggatcgtgcagtcgtgtatgtgttgttgtgagtttcatttagtgatttctggatttgatc

SEQ ID NO: 12658 - protein, 148 aa, Triticum aestivum
  peptide (1)..(148): Ceres Seq. ID no. 15173878
  misc_feature (4)..(68): NCBI GI NO: 477226 NR Description: heat shock protein HSP82 - maize
  misc_feature (4)..(67): NCBI GI NO: 729771 NR Description: Heat shock protein 82
  misc_feature (6)..(68): NCBI GI NO: 21239744 NR Description: HSP90-like protein [Oryza sativa]
  misc_feature (5)..(68): NCBI GI NO: 227782 NR Description: heat shock protein 83
  misc_feature (5)..(68): NCBI GI NO: 1515105 NR Description: heat shock protein 90A [Arabidopsis thaliana]
  misc_feature (5)..(68): NCBI GI NO: 1708314 NR Description: Heat shock protein 83
  misc_feature (5)..(68): NCBI GI NO: 15237214 NR Description: heat shock protein 81-1
  misc_feature (5)..(68): NCBI GI NO: 418904 NR Description: heat shock protein 83 - Arabidopsis thaliana
  misc_feature (5)..(68): NCBI GI NO: 445126 NR Description: heat shock protein HSP81-1
  misc_feature (4)..(68): NCBI GI NO: 38345312 NR Description: OSJNBb0085F13.17
EQKAMADVQMGSGTETETFAFQAEINQLLLLIINTFYSNKEIFLRDLISNSSDALDKIWFESLTDKSQTMRTTWAPSWARAPRSSWRLCRAGAVAAPAGVKQALISLSDTTDLANLGNNLQSLGFSIISTGGTASSLEAAGVNVRKVE

SEQ ID NO: 12659 - protein, 144 aa, Triticum aestivum
  peptide (1)..(144): Ceres Seq. ID no. 15173879
  misc_feature (1)..(64): NCBI GI NO: 477226 NR Description: heat shock protein HSP82 - maize
  misc_feature (1)..(63): NCBI GI NO: 729771 NR Description: Heat shock protein 82
  misc_feature (2)..(64): NCBI GI NO: 21239744 NR Description: HSP90-like protein [Oryza sativa]
  misc_feature (1)..(64): NCBI GI NO: 227782 NR Description: heat shock protein 83
  misc_feature (1)..(64): NCBI GI NO: 418904 NR Description: heat shock protein 83 - Arabidopsis thaliana
  misc_feature (1)..(64): NCBI GI NO: 15237214 NR Description: heat shock protein 81-1
  misc_feature (1)..(64): NCBI GI NO: 445126 NR Description: heat shock protein HSP81-1
  misc_feature (1)..(64): NCBI GI NO: 1708314 NR Description: Heat shock protein 83
  misc_feature (1)..(64): NCBI GI NO: 1515105 NR Description: heat shock protein 90A [Arabidopsis thaliana]
  misc_feature (1)..(64): NCBI GI NO: 38345312 NR Description: OSJNBb0085F13.17
MADVQMGSGTETETFAFQAEINQLLLLIINTFYSNKEIFLRDLISNSSDALDKIWFESLTDKSQTMRTTWAPSWARAPRSSWRLCRAGAVAAPAGVKQALISLSDTTDLANLGNNLQSLGFSIISTGGTASSLEAAGVNVRKVE

SEQ ID NO: 12660 - protein, 139 aa, Triticum aestivum
  peptide (1)..(139): Ceres Seq. ID no. 15173880
  misc_feature (1)..(59): NCBI GI NO: 477226 NR Description: heat shock protein HSP82 - maize
  misc_feature (1)..(58): NCBI GI NO: 729771 NR Description: Heat shock protein 82
  misc_feature (1)..(59): NCBI GI NO: 21239744 NR Description: HSP90-like protein [Oryza sativa]
  misc_feature (1)..(59): NCBI GI NO: 227782 NR Description: heat shock protein 83
  misc_feature (1)..(59): NCBI GI NO: 445126 NR Description: heat shock protein HSP81-1
  misc_feature (1)..(59): NCBI GI NO: 418904 NR Description: heat shock protein 83 - Arabidopsis thaliana
  misc_feature (1)..(59): NCBI GI NO: 1515105 NR Description: heat shock protein 90A [Arabidopsis thaliana]
  misc_feature (1)..(59): NCBI GI NO: 15237214 NR Description: heat shock protein 81-1
  misc_feature (1)..(59): NCBI GI NO: 1708314 NR Description: Heat shock protein 83
  misc_feature (1)..(59): NCBI GI NO: 38345312 NR Description: OSJNBb0085F13.17
MGSGTETETFAFQAEINQLLLLIINTFYSNKEIFLRDLISNSSDALDKIWFESLTDKSQTMRTTWAPSWARAPRSSWRLCRAGAVAAPAGVKQALISLSDTTDLANLGNNLQSLGFSIISTGGTASSLEAAGVNVRKVE

SEQ ID NO: 12661 - DNA, 735 bp, Triticum aestivum
  misc_feature (1)..(735): Ceres Seq. ID no. 12584812
atcgatcgagagagaaagagagagcaaaacctagaactctgaaggaagcggggccgtcggactcgagaaggcggcgagggagggagatgtcgatcctgtgggagaagagcccggcgtggcggtggctggtggggcggacgcgggactccaagcccttcttcttcaccttcgccgcgctctgcggcgtcgtccccggcgtcgtcggctacggcgtcatgcagctcaccagctcccgcaacgacaagctcgaggcccacctccgctccaacgccagaccggagaccacgatgatggggcaagtcaacagggagagactggcagagtttctcggtgagatacagaggaaggaggacacaaatgacagatatgttgctgctcttaaaggggagacgctgacaaggaagcgctatgaacgtattcagcccgtcccccagcaagctgcaccggagaaagccaaggaccagcaagctaccaaggagagcgccaaggcaaagtgaatggcgcatgtttgatgatcggggtgggtgaaatgtgcttctactaagtgaacataaacgggctgtagctccaaaagcttcaagactggcgaatcatttttgtaagcatcattatctacttgcctttcgtttagtcgtggcactgccccgtacgaaaaaactgagaaactctggtgatagtgttgaatcttgtaaatgttttacctgcgtattacgtggtaatattttaggaacctgc

SEQ ID NO: 12662 - protein, 164 aa, Triticum aestivum
  peptide (1)..(164): Ceres Seq. ID no. 12584813
  misc_feature (29)..(144): NCBI GI NO: 18412355 NR Description: expressed protein; protein id: At1g79390
RSREKERAKPRTLKEAGPSDSRRRRGREMSILWEKSPAWRWLVGRTRDSKPFFFTFAALCGVVPGVVGYGVMQLTSSRNDKLEAHLRSNARPETTMMGQVNRERLAEFLGEIQRKEDTNDRYVAALKGETLTRKRYERIQPVPQQAAPEKAKDQQATKESAKAK

SEQ ID NO: 12663 - protein, 136 aa, Triticum aestivum
  peptide (1)..(136): Ceres Seq. ID no. 12584814
  misc_feature (1)..(116): NCBI GI NO: 18412355 NR Description: expressed protein; protein id: At1g79390
MSILWEKSPAWRWLVGRTRDSKPFFFTFAALCGVVPGVVGYGVMQLTSSRNDKLEAHLRSNARPETTMMGQVNRERLAEFLGEIQRKEDTNDRYVAALKGETLTRKRYERIQPVPQQAAPEKAKDQQATKESAKAK

SEQ ID NO: 12664 - protein, 93 aa, Triticum aestivum
  peptide (1)..(93): Ceres Seq. ID no. 12584815
  misc_feature (1)..(73): NCBI GI NO: 18412355 NR Description: expressed protein; protein id: At1g79390
MQLTSSRNDKLEAHLRSNARPETTMMGQVNRERLAEFLGEIQRKEDTNDRYVAALKGETLTRKRYERIQPVPQQAAPEKAKDQQATKESAKAK

SEQ ID NO: 12665 - DNA, 832 bp, Triticum aestivum
  misc_feature (1)..(832): Ceres Seq. ID no. 12615074
  misc_feature (230)..(230): n is a, c, t, g, unknown, or other
gaaaaatcccagccagccgtcaaagcacgacacatccaggtccaagcaaagcatccccagcccagccgagaccgcgtgcgctccacgcagcatccgccgcagcagccgcccagagaagtcgccgccggagaagggggagatgtcgtggcagacgtacgtcgacgaccacctgtgctgcgagatcgacggccagcacctcacctccgccgccatcctcggccacgacggcngcgtctgggccgagtcccccaacttccccaagttcaagcctgaggagattgctggcatcgttaaagactttgaagaacctggacaccttgcaccaactggtcttttccttggaggcacaaagtacatggtcatccaaggtgaacctggggttgtcatccgaggaaagaagggcaccggtggcattactatcaagaagaccggcatggccctgattcttggtatctacgatgagcccatgactcctggccagtgcaatttggtcgtggagaggctcggcgactacctggtcgagcagggtttctaagcccgccctgatatgctgttattttggtcgtctgggactaagtttgctctactgtgggctttgcatccatctgcttggcgtaccgcatgatatatgcagtgaataattttagcttggggtttgtcggttggtgatgtgtcgaaggggaaaaatggatttactatgttttctttttaatgtttggcatcgcgtcgtatcaaactcagccgctctttcgctgagtaatgtacatttgcctggtcatggtaacttgtgggttctgctgctgctttattgaaagatgattgcaattttagc

SEQ ID NO: 12666 - protein, 177 aa, Triticum aestivum
  peptide (1)..(177): Ceres Seq. ID no. 12615075
  misc_feature (48)..(172): Pfam Name: Pfam Description:  Profilin
  misc_feature (47)..(177): NCBI GI NO: 1346803 NR Description: Profilin 1
  misc_feature (47)..(177): NCBI GI NO: 1346804 NR Description: Profilin 2
  misc_feature (47)..(177): NCBI GI NO: 1709779 NR Description: Profilin 1
  misc_feature (47)..(177): NCBI GI NO: 1346806 NR Description: Profilin 3
  misc_feature (47)..(177): NCBI GI NO: 14423853 NR Description: Profilin 5 (ZmPRO5)
  misc_feature (47)..(177): NCBI GI NO: 14161637 NR Description: profilin [Ananas comosus]
  misc_feature (47)..(177): NCBI GI NO: 3914423 NR Description: Profilin 4 (ZmPRO4)
  misc_feature (47)..(176): NCBI GI NO: 3914432 NR Description: PROFILIN 2/4 (POLLEN ALLERGEN PHL P 11) (PHL P XI)
  misc_feature (47)..(176): NCBI GI NO: 464466 NR Description: Profilin 1 (ZmPRO1)
  misc_feature (47)..(176): NCBI GI NO: 464471 NR Description: PROFILIN 1 (POLLEN ALLERGEN PHL P 11) (PHL P XI)
  misc_feature (77)..(77): Xaa is any aa, unknown or other
KNPSQPSKHDTSRSKQSIPSPAETACAPRSIRRSSRPEKSPPEKGEMSWQTYVDDHLCCEIDGQHLTSAAILGHDGXVWAESPNFPKFKPEEIAGIVKDFEEPGHLAPTGLFLGGTKYMVIQGEPGVVIRGKKGTGGITIKKTGMALILGIYDEPMTPGQCNLVVERLGDYLVEQGF

SEQ ID NO: 12667 - protein, 146 aa, Triticum aestivum
  peptide (1)..(146): Ceres Seq. ID no. 12615076
  misc_feature (76)..(76): Xaa is any aa, unknown or other
KIPASRQSTTHPGPSKASPAQPRPRALHAASAAAAAQRSRRRRRGRCRGRRTSTTTCAARSTASTSPPPPSSATTXASGPSPPTSPSSSLRRLLASLKTLKNLDTLHQLVFSLEAQSTWSSKVNLGLSSEERRAPVALLSRRPAWP

SEQ ID NO: 12668 - protein, 131 aa, Triticum aestivum
  peptide (1)..(131): Ceres Seq. ID no. 12615077
  misc_feature (2)..(126): Pfam Name: Pfam Description:  Profilin
  misc_feature (1)..(131): NCBI GI NO: 1346803 NR Description: Profilin 1
  misc_feature (1)..(131): NCBI GI NO: 1346804 NR Description: Profilin 2
  misc_feature (1)..(131): NCBI GI NO: 1709779 NR Description: Profilin 1
  misc_feature (1)..(131): NCBI GI NO: 1346806 NR Description: Profilin 3
  misc_feature (1)..(131): NCBI GI NO: 14423853 NR Description: Profilin 5 (ZmPRO5)
  misc_feature (1)..(131): NCBI GI NO: 14161637 NR Description: profilin [Ananas comosus]
  misc_feature (1)..(131): NCBI GI NO: 3914423 NR Description: Profilin 4 (ZmPRO4)
  misc_feature (1)..(130): NCBI GI NO: 3914432 NR Description: PROFILIN 2/4 (POLLEN ALLERGEN PHL P 11) (PHL P XI)
  misc_feature (1)..(130): NCBI GI NO: 464466 NR Description: Profilin 1 (ZmPRO1)
  misc_feature (1)..(130): NCBI GI NO: 464471 NR Description: PROFILIN 1 (POLLEN ALLERGEN PHL P 11) (PHL P XI)
  misc_feature (31)..(31): Xaa is any aa, unknown or other
MSWQTYVDDHLCCEIDGQHLTSAAILGHDGXVWAESPNFPKFKPEEIAGIVKDFEEPGHLAPTGLFLGGTKYMVIQGEPGVVIRGKKGTGGITIKKTGMALILGIYDEPMTPGQCNLVVERLGDYLVEQGF

SEQ ID NO: 12669 - DNA, 721 bp, Triticum aestivum
  misc_feature (1)..(721): Ceres Seq. ID no. 13583459
aaaaaaagagagcccccgctagtactactctctaaccttacccagaccgccgcaggtcttcatcgtcttcctcggaacgccgccgccgaagtgcgcctcgagtaatttcagaggaaggaggagccaagtgttgatcggagatgaatgcccctgaccgctatgagcgcttcgtcgtgcctgagggcacgaagaaggtatcatttgagaaggatacaaagatcatgaatgctgcatctttcactattgaacgtgaggaccacaccatcgggaacatcctccgcatgcagctgcacagggacccaaatgttcactttgctggctataagctccctcacccccttcagtacaagatcattgttaggatccatactgcaagccaatcctccccaactcaggcatatacccaggcaatcaatgatctagacaaggagcttgagaacctgaagcaagcttttgaggatgagaagacccgattcgaggaaaggatgaagcagggctactaggccaagggtgttctggatgctgacgtgaaaccttccttgctagtaattatatctgatgtctgaactgcggtagaaaaaaaattactcaaggattgtcgatgatcctctgaactcgtagaacctcttcatgtgcggattgcgtatgattgcacggttgttaaacatgtgttggcacttgataagcctgctagttgaattgctcgcctttgacaggttcc

SEQ ID NO: 12670 - protein, 120 aa, Triticum aestivum
  peptide (1)..(120): Ceres Seq. ID no. 13583460
  misc_feature (1)..(120): NCBI GI NO: 34394446 NR Description: putative DNA-directed RNA polymerase II 13
  misc_feature (1)..(115): NCBI GI NO: 15231127 NR Description: DNA-directed RNA polymerase II 13.6K chain
  misc_feature (1)..(105): NCBI GI NO: 5453932 NR Description: DNA directed RNA polymerase II polypeptide J
  misc_feature (1)..(105): NCBI GI NO: 6755362 NR Description: polymerase
  misc_feature (1)..(105): NCBI GI NO: 11595485 NR Description: RPB11a protein [Homo sapiens]
  misc_feature (1)..(107): NCBI GI NO: 19921456 NR Description: CG6840-PA [Drosophila melanogaster]
  misc_feature (1)..(105): NCBI GI NO: 21704272 NR Description: DNA directed RNA polymerase II polypeptide J-related gene isoform 3
  misc_feature (1)..(105): NCBI GI NO: 21704274 NR Description: DNA directed RNA polymerase II polypeptide J-related gene isoform 1
  misc_feature (1)..(105): NCBI GI NO: 19401711 NR Description: DNA-directed RNA polymerase II subunit 11
  misc_feature (40)..(107): NCBI GI NO: 25012186 NR Description: GM15177p [Drosophila melanogaster]
MNAPDRYERFVVPEGTKKVSFEKDTKIMNAASFTIEREDHTIGNILRMQLHRDPNVHFAGYKLPHPLQYKIIVRIHTASQSSPTQAYTQAINDLDKELENLKQAFEDEKTRFEERMKQGY

SEQ ID NO: 12671 - protein, 93 aa, Triticum aestivum
  peptide (1)..(93): Ceres Seq. ID no. 13583461
  misc_feature (1)..(93): NCBI GI NO: 34394446 NR Description: putative DNA-directed RNA polymerase II 13
  misc_feature (1)..(88): NCBI GI NO: 15231127 NR Description: DNA-directed RNA polymerase II 13.6K chain
  misc_feature (1)..(78): NCBI GI NO: 5453932 NR Description: DNA directed RNA polymerase II polypeptide J
  misc_feature (1)..(78): NCBI GI NO: 6755362 NR Description: polymerase
  misc_feature (1)..(78): NCBI GI NO: 11595485 NR Description: RPB11a protein [Homo sapiens]
  misc_feature (1)..(80): NCBI GI NO: 19921456 NR Description: CG6840-PA [Drosophila melanogaster]
  misc_feature (1)..(78): NCBI GI NO: 21704272 NR Description: DNA directed RNA polymerase II polypeptide J-related gene isoform 3
  misc_feature (1)..(78): NCBI GI NO: 21704274 NR Description: DNA directed RNA polymerase II polypeptide J-related gene isoform 1
  misc_feature (1)..(78): NCBI GI NO: 19401711 NR Description: DNA-directed RNA polymerase II subunit 11
  misc_feature (13)..(80): NCBI GI NO: 25012186 NR Description: GM15177p [Drosophila melanogaster]
MNAASFTIEREDHTIGNILRMQLHRDPNVHFAGYKLPHPLQYKIIVRIHTASQSSPTQAYTQAINDLDKELENLKQAFEDEKTRFEERMKQGY

SEQ ID NO: 12672 - protein, 73 aa, Triticum aestivum
  peptide (1)..(73): Ceres Seq. ID no. 13583462
  misc_feature (1)..(73): NCBI GI NO: 34394446 NR Description: putative DNA-directed RNA polymerase II 13
  misc_feature (1)..(68): NCBI GI NO: 15231127 NR Description: DNA-directed RNA polymerase II 13.6K chain
  misc_feature (1)..(58): NCBI GI NO: 5453932 NR Description: DNA directed RNA polymerase II polypeptide J
  misc_feature (1)..(58): NCBI GI NO: 6755362 NR Description: polymerase
  misc_feature (1)..(58): NCBI GI NO: 11595485 NR Description: RPB11a protein [Homo sapiens]
  misc_feature (1)..(60): NCBI GI NO: 19921456 NR Description: CG6840-PA [Drosophila melanogaster]
  misc_feature (1)..(58): NCBI GI NO: 21704272 NR Description: DNA directed RNA polymerase II polypeptide J-related gene isoform 3
  misc_feature (1)..(58): NCBI GI NO: 21704274 NR Description: DNA directed RNA polymerase II polypeptide J-related gene isoform 1
  misc_feature (1)..(58): NCBI GI NO: 19401711 NR Description: DNA-directed RNA polymerase II subunit 11
  misc_feature (1)..(60): NCBI GI NO: 25012186 NR Description: GM15177p [Drosophila melanogaster]
MQLHRDPNVHFAGYKLPHPLQYKIIVRIHTASQSSPTQAYTQAINDLDKELENLKQAFEDEKTRFEERMKQGY

SEQ ID NO: 12673 - DNA, 826 bp, Triticum aestivum
  misc_feature (1)..(826): Ceres Seq. ID no. 13583463
acaacacacatccatccatggagggagtggtcaagcaggccatccacgcgggcggggagcagggagtccgcatgggcagcgagcaaggcggatgcgcgggcggcgagccgagcccgcatgtgcagcgagcaaggcggacacgctggcggcgagccgagcccgcatgggcagcgagcaaggcggacgcacggacggcgagccgaggccgcgtgggcagcgagcaaggcagacgcgcgggcgacgagccgagcccgcatgcgcagcgagcaaggcggactcgcggacggcgagccgaggccgcgtgggcagtgaacaaggcagatgcgcgggcggcgagcatggtgcgcggcggcggcccactccaccgtcggcttcttccctcgggcgtgtggcggcctattcccttgggcgcacggtggcctattccctcaagcatggcgcgtgacggccactacagaggagctccttcctccggcgtcggccgcccgacgctgcactagcgcgcggcggtgcccctctctctctctccaggaaccagcgagcacggccgggcggcggtgcagataccagggtcgggcgggcgtgcctgtctggtggcgtggcgagtagggcggggcgagcggcgcggtgagcagggggaggcggcagtattgtccccagcgagaagaaggtggctggcggtgaagtagttgttgctgcgatggaggacttgattgcttttcctttttagtttctaggggtccttgtgtaaattttcaggacagcttgtaacttctctgtaacttcaccgacgatgaatgcaagacagcacggctgtgtcaaattc

SEQ ID NO: 12674 - protein, 165 aa, Triticum aestivum
  peptide (1)..(165): Ceres Seq. ID no. 13583464
NTHPSMEGVVKQAIHAGGEQGVRMGSEQGGCAGGEPSPHVQRARRTRWRRAEPAWAASKADARTASRGRVGSEQGRRAGDEPSPHAQRARRTRGRRAEAAWAVNKADARAASMVRGGGPLHRRLLPSGVWRPIPLGARWPIPSSMARDGHYRGAPSSGVGRPTLH

SEQ ID NO: 12675 - protein, 160 aa, Triticum aestivum
  peptide (1)..(160): Ceres Seq. ID no. 13583465
MEGVVKQAIHAGGEQGVRMGSEQGGCAGGEPSPHVQRARRTRWRRAEPAWAASKADARTASRGRVGSEQGRRAGDEPSPHAQRARRTRGRRAEAAWAVNKADARAASMVRGGGPLHRRLLPSGVWRPIPLGARWPIPSSMARDGHYRGAPSSGVGRPTLH

SEQ ID NO: 12676 - protein, 147 aa, Triticum aestivum
  peptide (1)..(147): Ceres Seq. ID no. 13583466
  misc_feature (7)..(132): NCBI GI NO: 34895050 NR Description: B1045F02.20
QHTSIHGGSGQAGHPRGRGAGSPHGQRARRMRGRRAEPACAASKADTLAASRARMGSEQGGRTDGEPRPRGQRARQTRGRRAEPACAASKADSRTASRGRVGSEQGRCAGGEHGARRRPTPPSASSLGRVAAYSLGRTVAYSLKHGA

SEQ ID NO: 12677 - DNA, 890 bp, Triticum aestivum
  misc_feature (1)..(890): Ceres Seq. ID no. 13655197
cagatttacagagttctagaatagaagatgatctggtggttacctctctattatttactcgaatgactgtacttatatcttacgttcaaactttacccgatcttggtttagtttccatctccaatcagattaatggtttgcggaccaaagccaatgttttatggagttcttattcctaatttagttatacatttcatttgtagtttcttggtagataataagcagtggcagatgaaccaataagttatctgtgcccatgctttattgtaagcgttaaatttgctctctggtattactttcaatgtgttatccatacccatgctttttgcggttaattatcatgtcttatcaacttatgcagagtccatgatatcatacagtttgaagtcaaaaaattcatgatatgggtgatatggaaaagtcattgccttctttgctggaacattccctgattgcctggacttcttgggtcaatcgctggacgccacccccgtctcctggacgtcatgacgccgccgatttccttgacgccgcgtgccaccgatcttctataactcaatttctccaatttctctcggctgtgagctcatatatatttttgagttgtgaacatattatgtaaactcaacactttgttttgtgacaagtgaactcatttcatattcatctatcaatcatggttgaagtgtctaaaaaaaaaaaaaaaaaaaaaaaaaaaaaaaaaaaaaaaaaaaaaaaaaaaaaaaaaaaaaaaaccaaaaaaaaaaaaaaaaaggtttatcaaaaccgccaacctcaaggggggccccgaaaccaaattccccaaaaaggaagccaaataacccgcgctaattgcccgccttttaaaaacgccgaaatggaaaaaaccc

SEQ ID NO: 12678 - protein, 72 aa, Triticum aestivum
  peptide (1)..(72): Ceres Seq. ID no. 15219719
  misc_feature (61)..(72): NCBI GI NO: 33086466 NR Description: Ab1-160 [Rattus norvegicus]
MGDMEKSLPSLLEHSLIAWTSWVNRWTPPPSPGRHDAADFLDAACHRSSITQFLQFLSAVSSYIFLSCEHIM

SEQ ID NO: 12679 - protein, 71 aa, Triticum aestivum
  peptide (1)..(71): Ceres Seq. ID no. 15219720
  misc_feature (1)..(40): NCBI GI NO: 33086466 NR Description: Ab1-160 [Rattus norvegicus]
  misc_feature (1)..(33): NCBI GI NO: 37536950 NR Description: hypothetical protein
  misc_feature (7)..(41): NCBI GI NO: 33086466 NR Description: Ab1-160 [Rattus norvegicus]
  misc_feature (6)..(38): NCBI GI NO: 16416102 NR Description: hypothetical protein [Neurospora crassa]
  misc_feature (6)..(40): NCBI GI NO: 39597582 NR Description: Hypothetical protein CBG03276
  misc_feature (6)..(34): NCBI GI NO: 31218028 NR Description: ENSANGP00000024948 [Anopheles gambiae]
  misc_feature (2)..(33): NCBI GI NO: 39595494 NR Description: Hypothetical protein CBG04159
  misc_feature (3)..(33): NCBI GI NO: 32416700 NR Description: predicted protein [Neurospora crassa]
  misc_feature (6)..(51): NCBI GI NO: 39594135 NR Description: Hypothetical protein CBG16734
  misc_feature (6)..(46): NCBI GI NO: 39595494 NR Description: Hypothetical protein CBG04159
MVEVSKKKKKKKKKKKKKKKKKKKKKTKKKKKKVYQNRQPQGGPRNQIPQKGSQITRANCPPFKNAEMEKT

SEQ ID NO: 12680 - protein, 69 aa, Triticum aestivum
  peptide (1)..(69): Ceres Seq. ID no. 15219721
  misc_feature (58)..(69): NCBI GI NO: 33086466 NR Description: Ab1-160 [Rattus norvegicus]
MEKSLPSLLEHSLIAWTSWVNRWTPPPSPGRHDAADFLDAACHRSSITQFLQFLSAVSSYIFLSCEHIM

SEQ ID NO: 12681 - DNA, 622 bp, Triticum aestivum
  misc_feature (1)..(622): Ceres Seq. ID no. 13654829
atttgcggtcacgtcagtcattacttcgcaagatccgcatccaaacctgagctgtataaggtcgacgacggacaaggaaaagagatgccgttgaacaccatctgcgtacgtaagggtatggctgcttccttcttcctgagtctcgtcgtccccttggttctgcttcttctgccgctctcgcgctcggcgtcggtggtgacccatctccccggcttccatggccgccttccgttccacctggagaccgggtacgtcaacgtggacgaggagacgggaacggagctcttctactacttcgtggagtcggagaggagccccgacacggaccccgtcgtcctgtggctgacgggcgggcccggctgctctagcttgattttctacgaagttggtgaggccctcatcctccgttcctcgtctcctgtgggcgtattagctggctagaaggaagccgccatgctgtcaattactacatcagattaagataaagagtgaagttaacttctattagcctctaattcaaagctagatgagcaaatcgtccgagtttgcaaatgtgtatcaggttgtgttacaaagtttggcaccttttatccaaagttttaaatagccccatagctgggtt

SEQ ID NO: 12682 - protein, 146 aa, Triticum aestivum
  peptide (1)..(146): Ceres Seq. ID no. 13654830
  misc_feature (71)..(130): Pfam Name: Pfam Description:  Serine carboxypeptidase
  misc_feature (42)..(130): NCBI GI NO: 28273379 NR Description: putative serine carboxypeptidase I
  misc_feature (48)..(130): NCBI GI NO: 28273383 NR Description: putative serine carboxypeptidase
  misc_feature (60)..(130): NCBI GI NO: 28273381 NR Description: putative glucose acyltransferase
  misc_feature (60)..(135): NCBI GI NO: 37530320 NR Description: putative serine carboxypeptidase
  misc_feature (48)..(130): NCBI GI NO: 21592952 NR Description: serine carboxypeptidase, putative
  misc_feature (42)..(130): NCBI GI NO: 15228300 NR Description: serine carboxypeptidase -related
  misc_feature (40)..(130): NCBI GI NO: 15219433 NR Description: serine carboxypeptidase -related
  misc_feature (48)..(130): NCBI GI NO: 30682106 NR Description: serine carboxypeptidase -related
  misc_feature (42)..(130): NCBI GI NO: 22327401 NR Description: serine carboxypeptidase -related
  misc_feature (40)..(130): NCBI GI NO: 15217581 NR Description: serine carboxypeptidase -related
ICGHVSHYFARSASKPELYKVDDGQGKEMPLNTICVRKGMAASFFLSLVVPLVLLLLPLSRSASVVTHLPGFHGRLPFHLETGYVNVDEETGTELFYYFVESERSPDTDPVVLWLTGGPGCSSLIFYEVGEALILRSSSPVGVLAG

SEQ ID NO: 12683 - protein, 118 aa, Triticum aestivum
  peptide (1)..(118): Ceres Seq. ID no. 13654831
  misc_feature (43)..(102): Pfam Name: Pfam Description:  Serine carboxypeptidase
  misc_feature (14)..(102): NCBI GI NO: 28273379 NR Description: putative serine carboxypeptidase I
  misc_feature (20)..(102): NCBI GI NO: 28273383 NR Description: putative serine carboxypeptidase
  misc_feature (32)..(102): NCBI GI NO: 28273381 NR Description: putative glucose acyltransferase
  misc_feature (32)..(107): NCBI GI NO: 37530320 NR Description: putative serine carboxypeptidase
  misc_feature (20)..(102): NCBI GI NO: 21592952 NR Description: serine carboxypeptidase, putative
  misc_feature (14)..(102): NCBI GI NO: 15228300 NR Description: serine carboxypeptidase -related
  misc_feature (12)..(102): NCBI GI NO: 15219433 NR Description: serine carboxypeptidase -related
  misc_feature (20)..(102): NCBI GI NO: 30682106 NR Description: serine carboxypeptidase -related
  misc_feature (14)..(102): NCBI GI NO: 22327401 NR Description: serine carboxypeptidase -related
  misc_feature (12)..(102): NCBI GI NO: 15217581 NR Description: serine carboxypeptidase -related
MPLNTICVRKGMAASFFLSLVVPLVLLLLPLSRSASVVTHLPGFHGRLPFHLETGYVNVDEETGTELFYYFVESERSPDTDPVVLWLTGGPGCSSLIFYEVGEALILRSSSPVGVLAG

SEQ ID NO: 12684 - protein, 107 aa, Triticum aestivum
  peptide (1)..(107): Ceres Seq. ID no. 13654832
  misc_feature (32)..(91): Pfam Name: Pfam Description:  Serine carboxypeptidase
  misc_feature (3)..(91): NCBI GI NO: 28273379 NR Description: putative serine carboxypeptidase I
  misc_feature (9)..(91): NCBI GI NO: 28273383 NR Description: putative serine carboxypeptidase
  misc_feature (21)..(91): NCBI GI NO: 28273381 NR Description: putative glucose acyltransferase
  misc_feature (21)..(96): NCBI GI NO: 37530320 NR Description: putative serine carboxypeptidase
  misc_feature (9)..(91): NCBI GI NO: 21592952 NR Description: serine carboxypeptidase, putative
  misc_feature (3)..(91): NCBI GI NO: 15228300 NR Description: serine carboxypeptidase -related
  misc_feature (1)..(91): NCBI GI NO: 15219433 NR Description: serine carboxypeptidase -related
  misc_feature (9)..(91): NCBI GI NO: 30682106 NR Description: serine carboxypeptidase -related
  misc_feature (3)..(91): NCBI GI NO: 22327401 NR Description: serine carboxypeptidase -related
  misc_feature (1)..(91): NCBI GI NO: 15217581 NR Description: serine carboxypeptidase -related
MAASFFLSLVVPLVLLLLPLSRSASVVTHLPGFHGRLPFHLETGYVNVDEETGTELFYYFVESERSPDTDPVVLWLTGGPGCSSLIFYEVGEALILRSSSPVGVLAG

SEQ ID NO: 12685 - DNA, 1127 bp, Triticum aestivum
  misc_feature (1)..(1127): Ceres Seq. ID no. 13596876
agaacatcctaatcgaaaagaccccaccgccgcccccatcatgccgccgctcctcctcgccgcgctcgcgctcgccctggccctctcccacgccgccgccggaggaggcaccgggttctacgacccggcgcgggttacccagatctcctggcgccccagggcgttcctgtacagcggcttcctctcgcacgccgagtgcgaccacctcatcaagctggccaaggggaggctggagaagtcgatggtggccgacaacgagtccgggaagagtgtcatgagccaggtgcgcacaagctctggcaccttcttgtccaagcgcgaggatgaaattatctctggaattgaaaagcgtgtagctgcttggacgtttctccctgaagaaaatgccgaatcaatgcaggttctgcattatgaagttggtcagaagtatgatgcccacttcgattattttagtgacaaaaagaacgtgaagcgtggtggtcatcgggttgctactgttcttatgtacctgacagatgtgaagaagggtggagagaccgtgttcccaattgctgagggaagagatttacaacataaggatgaaacgtggtcggagcgcgcgagacatggcctggcagtgaagccaagaaaaggcgatgcgctactcttcttcagtctccacgttaacgcgacaacagatccgagcagtcttcacgcgagctgcccagtagtcgagggcgagaagtggtctgccacaaaatggatccacgtccggtcattcgacaaccctccagatgttatgacggacgcacggtgttctgatgacaatgagcaatgccctagatgggctgctcttggtgagtgttacaagaacgcaaaatacatggtgggcacgaaggacaccctcgggtcttgccgcaaaagttgcggggtctgcgatgcttgaaccccggcaccaatcttaactgaatttgcatggttactgagatgtagattacaaaaccaaataggttcttagtagcatggcattagatgtttactctccttgtcatgtagtttgacctcagagcatcttgatataaagcaaaaagggaattgactttgtttcagaagaatttggatataacctgatggtatcaaatatttcc

SEQ ID NO: 12686 - protein, 307 aa, Triticum aestivum
  peptide (1)..(307): Ceres Seq. ID no. 15221988
  misc_feature (128)..(250): Pfam Name: II Pfam Description: 2OG-Fe
  misc_feature (18)..(307): NCBI GI NO: 29150365 NR Description: putative oxidoreductase
  misc_feature (108)..(305): NCBI GI NO: 37534316 NR Description: unknown protein
  misc_feature (17)..(107): NCBI GI NO: 37534316 NR Description: unknown protein
  misc_feature (40)..(307): NCBI GI NO: 9294583 NR Description: prolyl 4-hydroxylase alpha subunit-like protein
  misc_feature (40)..(307): NCBI GI NO: 18405808 NR Description: oxidoreductase, 2OG-Fe(II) oxygenase family
  misc_feature (40)..(307): NCBI GI NO: 18086437 NR Description: AT3g28480/MFJ20_16 [Arabidopsis thaliana]
  misc_feature (21)..(305): NCBI GI NO: 30689216 NR Description: oxidoreductase, 2OG-Fe(II) oxygenase family
  misc_feature (5)..(307): NCBI GI NO: 34393269 NR Description: prolyl 4-hydroxylase alpha-1 subunit precursor-likeprotein
  misc_feature (49)..(305): NCBI GI NO: 28393447 NR Description: putative prolyl 4-hydroxylase
  misc_feature (40)..(305): NCBI GI NO: 29150368 NR Description: putative oxidoreductase
EHPNRKDPTAAPIMPPLLLAALALALALSHAAAGGGTGFYDPARVTQISWRPRAFLYSGFLSHAECDHLIKLAKGRLEKSMVADNESGKSVMSQVRTSSGTFLSKREDEIISGIEKRVAAWTFLPEENAESMQVLHYEVGQKYDAHFDYFSDKKNVKRGGHRVATVLMYLTDVKKGGETVFPIAEGRDLQHKDETWSERARHGLAVKPRKGDALLFFSLHVNATTDPSSLHASCPVVEGEKWSATKWIHVRSFDNPPDVMTDARCSDDNEQCPRWAALGECYKNAKYMVGTKDTLGSCRKSCGVCDA

SEQ ID NO: 12687 - protein, 294 aa, Triticum aestivum
  peptide (1)..(294): Ceres Seq. ID no. 15221989
  misc_feature (115)..(237): Pfam Name: II Pfam Description: 2OG-Fe
  misc_feature (5)..(294): NCBI GI NO: 29150365 NR Description: putative oxidoreductase
  misc_feature (95)..(292): NCBI GI NO: 37534316 NR Description: unknown protein
  misc_feature (4)..(94): NCBI GI NO: 37534316 NR Description: unknown protein
  misc_feature (27)..(294): NCBI GI NO: 9294583 NR Description: prolyl 4-hydroxylase alpha subunit-like protein
  misc_feature (27)..(294): NCBI GI NO: 18405808 NR Description: oxidoreductase, 2OG-Fe(II) oxygenase family
  misc_feature (27)..(294): NCBI GI NO: 18086437 NR Description: AT3g28480/MFJ20_16 [Arabidopsis thaliana]
  misc_feature (8)..(292): NCBI GI NO: 30689216 NR Description: oxidoreductase, 2OG-Fe(II) oxygenase family
  misc_feature (1)..(294): NCBI GI NO: 34393269 NR Description: prolyl 4-hydroxylase alpha-1 subunit precursor-likeprotein
  misc_feature (36)..(292): NCBI GI NO: 28393447 NR Description: putative prolyl 4-hydroxylase
  misc_feature (27)..(292): NCBI GI NO: 29150368 NR Description: putative oxidoreductase
MPPLLLAALALALALSHAAAGGGTGFYDPARVTQISWRPRAFLYSGFLSHAECDHLIKLAKGRLEKSMVADNESGKSVMSQVRTSSGTFLSKREDEIISGIEKRVAAWTFLPEENAESMQVLHYEVGQKYDAHFDYFSDKKNVKRGGHRVATVLMYLTDVKKGGETVFPIAEGRDLQHKDETWSERARHGLAVKPRKGDALLFFSLHVNATTDPSSLHASCPVVEGEKWSATKWIHVRSFDNPPDVMTDARCSDDNEQCPRWAALGECYKNAKYMVGTKDTLGSCRKSCGVCDA

SEQ ID NO: 12688 - protein, 227 aa, Triticum aestivum
  peptide (1)..(227): Ceres Seq. ID no. 15221990
  misc_feature (48)..(170): Pfam Name: II Pfam Description: 2OG-Fe
  misc_feature (1)..(227): NCBI GI NO: 29150365 NR Description: putative oxidoreductase
  misc_feature (28)..(225): NCBI GI NO: 37534316 NR Description: unknown protein
  misc_feature (1)..(27): NCBI GI NO: 37534316 NR Description: unknown protein
  misc_feature (1)..(227): NCBI GI NO: 9294583 NR Description: prolyl 4-hydroxylase alpha subunit-like protein
  misc_feature (1)..(227): NCBI GI NO: 18405808 NR Description: oxidoreductase, 2OG-Fe(II) oxygenase family
  misc_feature (1)..(227): NCBI GI NO: 18086437 NR Description: AT3g28480/MFJ20_16 [Arabidopsis thaliana]
  misc_feature (1)..(225): NCBI GI NO: 30689216 NR Description: oxidoreductase, 2OG-Fe(II) oxygenase family
  misc_feature (1)..(227): NCBI GI NO: 34393269 NR Description: prolyl 4-hydroxylase alpha-1 subunit precursor-likeprotein
  misc_feature (1)..(225): NCBI GI NO: 28393447 NR Description: putative prolyl 4-hydroxylase
  misc_feature (1)..(225): NCBI GI NO: 29150368 NR Description: putative oxidoreductase
MVADNESGKSVMSQVRTSSGTFLSKREDEIISGIEKRVAAWTFLPEENAESMQVLHYEVGQKYDAHFDYFSDKKNVKRGGHRVATVLMYLTDVKKGGETVFPIAEGRDLQHKDETWSERARHGLAVKPRKGDALLFFSLHVNATTDPSSLHASCPVVEGEKWSATKWIHVRSFDNPPDVMTDARCSDDNEQCPRWAALGECYKNAKYMVGTKDTLGSCRKSCGVCDA

SEQ ID NO: 12689 - DNA, 1320 bp, Triticum aestivum
  misc_feature (1)..(1320): Ceres Seq. ID no. 15226612
ctttttgcagtgtctggccgtcgcgctctcgccgtctcgctgccggctgccggctgcccctccccctcgccgcgcccgatttctccgccaactcccatacccaagttctagggaaagatacactgctccgatggcggtcagagttccgtccatggagctgaaccgctccccgccgctcctctccggcggcagaggcaaaacatgccttcagaagcctttcattgtccaagcaaagagatcaggtggattggagaaagcaaatactagcaggtcacgaggaccgcaagcttctgaaaaactcaagaaaagagaacccctgactcgtgggactgttagtgcgcctcttccggtaccaggacacatacctcgacctccttacgttggatcaaacaaaatgcccgagatatcgagtgagagacaaatgcaggacaaagacaccatcgtgcacatgaaagctgcatgtgagcttgctgctcgtgttcttcaaaatgcagggaaattagtcaaaccctctgtaacaacagacgaaattgataaagcagtgcacaagatgatcattgatgctggagcctatccatccccgcttggatacggtgggtttccaaaaagtgtatgcacatcagtgaacgaatgcatgtgccatggtattcctgattcacgagaactaaaggatggagacataattaacatcgatgtcactgtctacttgaacggttttcatggggatacctctaaaacgtttttctgtggagaagttgacgaagctgctaaaagacttgtgaaggttactgaagagtgcatgcttaggggcatatcatcctgcaaacacggtgtgagctttaagaaaatcggcagaagaataagcgagcatgctgagaggaatggatttggtgtcgtggagcaatttgttgggcatggagttggcagagtttttcattcacaaccaattatatatcaccagcgcaacaacatgccagggcagatggttgaaggccagacgttcacaatagagccgatcctgaccatgggaagcaacagcaacagcatcgagtgcgacatgtgggaggacggctggacggcggtgacgacggacggcagcctggcggcgcagttcgagcacaccatcctcatcaccaggaccggcgcagagatcctaaccaaatgctagcaaagccagcgctgaaggcgtacggatcctgaccgcgtagatcacgtgatttcttcttatgttgtatgccaaagcatcactggaacagctgcttacgtataaccgatgatttttggcagcggcaaagagctccaggcttcctctggcacact

SEQ ID NO: 12690 - protein, 388 aa, Triticum aestivum
  peptide (1)..(388): Ceres Seq. ID no. 15226613
  misc_feature (51)..(388): NCBI GI NO: 38345794 NR Description: OSJNBa0085I10.11
  misc_feature (56)..(388): NCBI GI NO: 15222218 NR Description: methionine aminopeptidase I (MAP1) -related
  misc_feature (56)..(388): NCBI GI NO: 11320956 NR Description: methionine aminopeptidase-like protein
  misc_feature (84)..(387): NCBI GI NO: 34394646 NR Description: putative methionine aminopeptidase I (MAP1)
  misc_feature (102)..(388): NCBI GI NO: 18419957 NR Description: methionyl aminopeptidase-related protein
  misc_feature (102)..(388): NCBI GI NO: 25289731 NR Description: methionyl aminopeptidase-like protein
  misc_feature (82)..(386): NCBI GI NO: 7939560 NR Description: methionine aminopeptidase-like protein
  misc_feature (82)..(386): NCBI GI NO: 15230872 NR Description: methionine aminopeptidase -related
  misc_feature (82)..(386): NCBI GI NO: 11320958 NR Description: methionine aminopeptidase-like protein
  misc_feature (105)..(386): NCBI GI NO: 23018702 NR Description: COG0024: Methionine aminopeptidase
FLQCLAVALSPSRCRLPAAPPPRRARFLRQLPYPSSRERYTAPMAVRVPSMELNRSPPLLSGGRGKTCLQKPFIVQAKRSGGLEKANTSRSRGPQASEKLKKREPLTRGTVSAPLPVPGHIPRPPYVGSNKMPEISSERQMQDKDTIVHMKAACELAARVLQNAGKLVKPSVTTDEIDKAVHKMIIDAGAYPSPLGYGGFPKSVCTSVNECMCHGIPDSRELKDGDIINIDVTVYLNGFHGDTSKTFFCGEVDEAAKRLVKVTEECMLRGISSCKHGVSFKKIGRRISEHAERNGFGVVEQFVGHGVGRVFHSQPIIYHQRNNMPGQMVEGQTFTIEPILTMGSNSNSIECDMWEDGWTAVTTDGSLAAQFEHTILITRTGAEILTKC

SEQ ID NO: 12691 - protein, 345 aa, Triticum aestivum
  peptide (1)..(345): Ceres Seq. ID no. 15226614
  misc_feature (8)..(345): NCBI GI NO: 38345794 NR Description: OSJNBa0085I10.11
  misc_feature (13)..(345): NCBI GI NO: 15222218 NR Description: methionine aminopeptidase I (MAP1) -related
  misc_feature (13)..(345): NCBI GI NO: 11320956 NR Description: methionine aminopeptidase-like protein
  misc_feature (41)..(344): NCBI GI NO: 34394646 NR Description: putative methionine aminopeptidase I (MAP1)
  misc_feature (59)..(345): NCBI GI NO: 18419957 NR Description: methionyl aminopeptidase-related protein
  misc_feature (59)..(345): NCBI GI NO: 25289731 NR Description: methionyl aminopeptidase-like protein
  misc_feature (39)..(343): NCBI GI NO: 7939560 NR Description: methionine aminopeptidase-like protein
  misc_feature (39)..(343): NCBI GI NO: 15230872 NR Description: methionine aminopeptidase -related
  misc_feature (39)..(343): NCBI GI NO: 11320958 NR Description: methionine aminopeptidase-like protein
  misc_feature (62)..(343): NCBI GI NO: 23018702 NR Description: COG0024: Methionine aminopeptidase
MAVRVPSMELNRSPPLLSGGRGKTCLQKPFIVQAKRSGGLEKANTSRSRGPQASEKLKKREPLTRGTVSAPLPVPGHIPRPPYVGSNKMPEISSERQMQDKDTIVHMKAACELAARVLQNAGKLVKPSVTTDEIDKAVHKMIIDAGAYPSPLGYGGFPKSVCTSVNECMCHGIPDSRELKDGDIINIDVTVYLNGFHGDTSKTFFCGEVDEAAKRLVKVTEECMLRGISSCKHGVSFKKIGRRISEHAERNGFGVVEQFVGHGVGRVFHSQPIIYHQRNNMPGQMVEGQTFTIEPILTMGSNSNSIECDMWEDGWTAVTTDGSLAAQFEHTILITRTGAEILTKC

SEQ ID NO: 12692 - protein, 338 aa, Triticum aestivum
  peptide (1)..(338): Ceres Seq. ID no. 15226615
  misc_feature (1)..(338): NCBI GI NO: 38345794 NR Description: OSJNBa0085I10.11
  misc_feature (6)..(338): NCBI GI NO: 15222218 NR Description: methionine aminopeptidase I (MAP1) -related
  misc_feature (6)..(338): NCBI GI NO: 11320956 NR Description: methionine aminopeptidase-like protein
  misc_feature (34)..(337): NCBI GI NO: 34394646 NR Description: putative methionine aminopeptidase I (MAP1)
  misc_feature (52)..(338): NCBI GI NO: 18419957 NR Description: methionyl aminopeptidase-related protein
  misc_feature (52)..(338): NCBI GI NO: 25289731 NR Description: methionyl aminopeptidase-like protein
  misc_feature (32)..(336): NCBI GI NO: 7939560 NR Description: methionine aminopeptidase-like protein
  misc_feature (32)..(336): NCBI GI NO: 15230872 NR Description: methionine aminopeptidase -related
  misc_feature (32)..(336): NCBI GI NO: 11320958 NR Description: methionine aminopeptidase-like protein
  misc_feature (55)..(336): NCBI GI NO: 23018702 NR Description: COG0024: Methionine aminopeptidase
MELNRSPPLLSGGRGKTCLQKPFIVQAKRSGGLEKANTSRSRGPQASEKLKKREPLTRGTVSAPLPVPGHIPRPPYVGSNKMPEISSERQMQDKDTIVHMKAACELAARVLQNAGKLVKPSVTTDEIDKAVHKMIIDAGAYPSPLGYGGFPKSVCTSVNECMCHGIPDSRELKDGDIINIDVTVYLNGFHGDTSKTFFCGEVDEAAKRLVKVTEECMLRGISSCKHGVSFKKIGRRISEHAERNGFGVVEQFVGHGVGRVFHSQPIIYHQRNNMPGQMVEGQTFTIEPILTMGSNSNSIECDMWEDGWTAVTTDGSLAAQFEHTILITRTGAEILTKC

SEQ ID NO: 12693 - DNA, 1227 bp, Triticum aestivum
  misc_feature (1)..(1227): Ceres Seq. ID no. 13654868
gtggttggatcggcttccgagtgccgcggcgtgtcggcggcgaccggccgacatgagggtggtggtgacgggcgcgacggggtacctgggcgggcgcctgtgcgcggcgctggcgggggcggggcacgacgtgcgggcgttcgtgcgccgcaccggcgacgcgtccggcctgcccgacgccgtcgagctcgcctacggcgacgtcggcgacgcggactccctcgccgcggccttcgacgggcgcgacgccgtcttccacgccgccgcctccgtcgagccatggctccccgacccctccgtcttcacggccgtcaatgtgagagggcttgagaatgtgttaacagcggccaagagaacgccgacagtaaagaagatcatatacacgtcgtcgttcttcgcacttggcccaacagatggttatgtcgcagatgagacacagatgcacaaagggaaaacattttgcacggagtatgagaaatcaaaggttcttgcagatagaatcgcattgcaggcagcagcagagggggtgccaataaccattgtctatccaggagtcatctatggtcctggaaaacttacaactggaaaccttgtttcccgcattttaattgaaaggtttaatggccgtctacctggctacattggagatgggtatgatagagaatcattttgccatgtcgacgatgttgttagtgggcacatagcagctatggagaagggcagagtgggagaaagatatctgctcaccggcgaaaacttgtcattcatgcatattttcagtatggctgctaatatcacaaacacaaaggccccgtacttccacgtaccgctctggttgattgaaatatatggatggatttcagttttcatttcccgcatcactggaaagctccctcttatcagttaccctacagtgcgtgttattagacatcaatgggcgtattcatgtgagaaagcaaaaagggaactaggctacaatccaagaaacttgactgaaggtcttgctgagatgcttttatggctcaagaacgagaaactgatcaaattttagtgttctactctgttattacttccgttacatttctcacttcatgtagaccgtcatgttttatgtactggatcattgacatgtatatactgcagtatgccactgttctgttgtatcaagttgagatgtaataatgtaatactgagtccatatattcatataaaggaagagactgtatt

SEQ ID NO: 12694 - protein, 349 aa, Triticum aestivum
  peptide (1)..(349): Ceres Seq. ID no. 13654869
  misc_feature (19)..(345): Pfam Name: Pfam Description:  3-beta hydroxysteroid dehydrogenase/ isomerase family
  misc_feature (18)..(349): NCBI GI NO: 15217277 NR Description: Putative dihydroflavonal-4-reductase
  misc_feature (17)..(349): NCBI GI NO: 15234163 NR Description: terpene cyclase/mutase-related
  misc_feature (17)..(349): NCBI GI NO: 21450875 NR Description: unknown protein [Arabidopsis thaliana]
  misc_feature (20)..(348): NCBI GI NO: 22981628 NR Description: hypothetical protein [Ralstonia metallidurans]
  misc_feature (18)..(345): NCBI GI NO: 23103397 NR Description: hypothetical protein [Azotobacter vinelandii]
  misc_feature (4)..(342): NCBI GI NO: 22965470 NR Description: hypothetical protein [Rhodospirillum rubrum]
  misc_feature (20)..(348): NCBI GI NO: 22985846 NR Description: hypothetical protein [Burkholderia fungorum]
  misc_feature (20)..(347): NCBI GI NO: 2598072 NR Description: HpnA protein [Zymomonas mobilis]
  misc_feature (18)..(348): NCBI GI NO: 40063226 NR Description: conserved hypothetical protein
  misc_feature (18)..(342): NCBI GI NO: 23056056 NR Description: hypothetical protein [Geobacter metallireducens]
WLDRLPSAAACRRRPADMRVVVTGATGYLGGRLCAALAGAGHDVRAFVRRTGDASGLPDAVELAYGDVGDADSLAAAFDGRDAVFHAAASVEPWLPDPSVFTAVNVRGLENVLTAAKRTPTVKKIIYTSSFFALGPTDGYVADETQMHKGKTFCTEYEKSKVLADRIALQAAAEGVPITIVYPGVIYGPGKLTTGNLVSRILIERFNGRLPGYIGDGYDRESFCHVDDVVSGHIAAMEKGRVGERYLLTGENLSFMHIFSMAANITNTKAPYFHVPLWLIEIYGWISVFISRITGKLPLISYPTVRVIRHQWAYSCEKAKRELGYNPRNLTEGLAEMLLWLKNEKLIKF

SEQ ID NO: 12695 - protein, 332 aa, Triticum aestivum
  peptide (1)..(332): Ceres Seq. ID no. 13654870
  misc_feature (2)..(328): Pfam Name: Pfam Description:  3-beta hydroxysteroid dehydrogenase/ isomerase family
  misc_feature (1)..(332): NCBI GI NO: 15217277 NR Description: Putative dihydroflavonal-4-reductase
  misc_feature (1)..(332): NCBI GI NO: 15234163 NR Description: terpene cyclase/mutase-related
  misc_feature (1)..(332): NCBI GI NO: 21450875 NR Description: unknown protein [Arabidopsis thaliana]
  misc_feature (3)..(331): NCBI GI NO: 22981628 NR Description: hypothetical protein [Ralstonia metallidurans]
  misc_feature (1)..(328): NCBI GI NO: 23103397 NR Description: hypothetical protein [Azotobacter vinelandii]
  misc_feature (1)..(325): NCBI GI NO: 22965470 NR Description: hypothetical protein [Rhodospirillum rubrum]
  misc_feature (3)..(331): NCBI GI NO: 22985846 NR Description: hypothetical protein [Burkholderia fungorum]
  misc_feature (3)..(330): NCBI GI NO: 2598072 NR Description: HpnA protein [Zymomonas mobilis]
  misc_feature (1)..(331): NCBI GI NO: 40063226 NR Description: conserved hypothetical protein
  misc_feature (1)..(325): NCBI GI NO: 23056056 NR Description: hypothetical protein [Geobacter metallireducens]
MRVVVTGATGYLGGRLCAALAGAGHDVRAFVRRTGDASGLPDAVELAYGDVGDADSLAAAFDGRDAVFHAAASVEPWLPDPSVFTAVNVRGLENVLTAAKRTPTVKKIIYTSSFFALGPTDGYVADETQMHKGKTFCTEYEKSKVLADRIALQAAAEGVPITIVYPGVIYGPGKLTTGNLVSRILIERFNGRLPGYIGDGYDRESFCHVDDVVSGHIAAMEKGRVGERYLLTGENLSFMHIFSMAANITNTKAPYFHVPLWLIEIYGWISVFISRITGKLPLISYPTVRVIRHQWAYSCEKAKRELGYNPRNLTEGLAEMLLWLKNEKLIKF

SEQ ID NO: 12696 - protein, 203 aa, Triticum aestivum
  peptide (1)..(203): Ceres Seq. ID no. 13654871
  misc_feature (1)..(199): Pfam Name: Pfam Description:  3-beta hydroxysteroid dehydrogenase/ isomerase family
  misc_feature (1)..(203): NCBI GI NO: 15217277 NR Description: Putative dihydroflavonal-4-reductase
  misc_feature (1)..(203): NCBI GI NO: 15234163 NR Description: terpene cyclase/mutase-related
  misc_feature (1)..(203): NCBI GI NO: 21450875 NR Description: unknown protein [Arabidopsis thaliana]
  misc_feature (1)..(202): NCBI GI NO: 22981628 NR Description: hypothetical protein [Ralstonia metallidurans]
  misc_feature (1)..(199): NCBI GI NO: 23103397 NR Description: hypothetical protein [Azotobacter vinelandii]
  misc_feature (1)..(196): NCBI GI NO: 22965470 NR Description: hypothetical protein [Rhodospirillum rubrum]
  misc_feature (1)..(202): NCBI GI NO: 22985846 NR Description: hypothetical protein [Burkholderia fungorum]
  misc_feature (1)..(201): NCBI GI NO: 2598072 NR Description: HpnA protein [Zymomonas mobilis]
  misc_feature (1)..(202): NCBI GI NO: 40063226 NR Description: conserved hypothetical protein
  misc_feature (1)..(196): NCBI GI NO: 23056056 NR Description: hypothetical protein [Geobacter metallireducens]
MHKGKTFCTEYEKSKVLADRIALQAAAEGVPITIVYPGVIYGPGKLTTGNLVSRILIERFNGRLPGYIGDGYDRESFCHVDDVVSGHIAAMEKGRVGERYLLTGENLSFMHIFSMAANITNTKAPYFHVPLWLIEIYGWISVFISRITGKLPLISYPTVRVIRHQWAYSCEKAKRELGYNPRNLTEGLAEMLLWLKNEKLIKF

SEQ ID NO: 12697 - DNA, 1332 bp, Triticum aestivum
  misc_feature (1)..(1332): Ceres Seq. ID no. 13662245
ctcaccgccacgcttcaaggctagctagctcgatcgcacagcgaaaatggcgggtagattagttctgtcggtggtggtgactctgctagctgcggccggggcagccgcggcggagtcgtcgtgcccggcgacgccgccggacgcggggccgatgctgcaggtgtcgcacgcgttcgggccgtgctcgccgctgggaaacgcggccgcagcgccgtcgtgggcggggttcctcgcggaccagtcctcccgggacgcgtcgcggctgctgtacctcgactccctcgccgtggccgggcgcgcgtacgcgccgatcgcgtccgggcggcagctgctgcagacgccgacgtacgtggtgcgcgcgcgcctcggcaccccgccgcagcagctcctgctcgccgtcgacaccagcaacgacgccgcgtggatcccctgctccggctgcgcgggctgccccaccaccacgcccttcaagccagccgcgtccacctcgtaccgcgccgtgccgtgcggctcgccggcgtgctcgcgggcgccgaacccgtcctgctcgctcaacaccaagtcctgcgggttcagcctcacctacgccgactcctcgctggaggccgcgctgtcccaggactccctcgccgtcgccaacgacgtcgtgaagagctacaccttcggatgtctccagaaggccaccggcacggcggcgccgccgcagggcctcctcgggctcggccgcgggccgctgtcgttcctgtcgcagaccaaggacatgtacgagggcaccttctcctactgcctcccgagcttcaagtccctcaacttctccggcacgctcaggctcggccgcaagggccaaccgctgcgcatcaagacgacgccgctgctcgtcaacccgcaccgctcctcgctctactacgtgggcatgaccggcatccgcgtgggcaagaaggtggtgcccatcccgccctccgcgctggcgttcgacccggcgacgggcgccggcacggtgctcgactccgggacgatgttcaccaggctggtggcgccggcgtacgtggcggtgcgcgacgaggtccgccaccgcatccgcggcgccaacggccgcgtcggcttcgcccgcgagcagtgcaccgcggcttgacaccgattgattatccctctgccggtagctgggaaccgaggctgcggcctgcgccactgttgcctgtccgttggtgtcggacctgcatgcatccatgctggtgatttaattattttgtagcctagtgagtgtgtcgtctccatcggtgtgcaagatcttgtgtctttctttcttgtttgtgtaatatcatgtgtgtctct

SEQ ID NO: 12698 - protein, 361 aa, Triticum aestivum
  peptide (1)..(361): Ceres Seq. ID no. 13662246
  misc_feature (62)..(347): Pfam Name: Pfam Description:  Eukaryotic aspartyl protease
  misc_feature (1)..(347): NCBI GI NO: 34899068 NR Description: similar to nucleoid DNA-binding-like protein
  misc_feature (37)..(348): NCBI GI NO: 21617933 NR Description: nucleoid DNA-binding-like protein
  misc_feature (37)..(348): NCBI GI NO: 15232503 NR Description: nucleoid DNA-binding - like protein
  misc_feature (25)..(345): NCBI GI NO: 15240680 NR Description: nucleoid DNA-binding-related protein
  misc_feature (27)..(345): NCBI GI NO: 20161865 NR Description: putative nucleoid DNA-binding-like protein
  misc_feature (13)..(361): NCBI GI NO: 18391062 NR Description: expressed protein [Arabidopsis thaliana]
  misc_feature (73)..(361): NCBI GI NO: 21450872 NR Description: unknown protein [Arabidopsis thaliana]
  misc_feature (62)..(350): NCBI GI NO: 34910676 NR Description: P0690B02.2
  misc_feature (52)..(338): NCBI GI NO: 34895664 NR Description: nucleoid DNA-binding protein cnd41-like protein
  misc_feature (87)..(346): NCBI GI NO: 15290061 NR Description: nucleoid DNA-binding protein cnd41-like protein
MAGRLVLSVVVTLLAAAGAAAAESSCPATPPDAGPMLQVSHAFGPCSPLGNAAAAPSWAGFLADQSSRDASRLLYLDSLAVAGRAYAPIASGRQLLQTPTYVVRARLGTPPQQLLLAVDTSNDAAWIPCSGCAGCPTTTPFKPAASTSYRAVPCGSPACSRAPNPSCSLNTKSCGFSLTYADSSLEAALSQDSLAVANDVVKSYTFGCLQKATGTAAPPQGLLGLGRGPLSFLSQTKDMYEGTFSYCLPSFKSLNFSGTLRLGRKGQPLRIKTTPLLVNPHRSSLYYVGMTGIRVGKKVVPIPPSALAFDPATGAGTVLDSGTMFTRLVAPAYVAVRDEVRHRIRGANGRVGFAREQCTAA

SEQ ID NO: 12699 - protein, 326 aa, Triticum aestivum
  peptide (1)..(326): Ceres Seq. ID no. 13662247
  misc_feature (27)..(312): Pfam Name: Pfam Description:  Eukaryotic aspartyl protease
  misc_feature (1)..(312): NCBI GI NO: 34899068 NR Description: similar to nucleoid DNA-binding-like protein
  misc_feature (2)..(313): NCBI GI NO: 21617933 NR Description: nucleoid DNA-binding-like protein
  misc_feature (2)..(313): NCBI GI NO: 15232503 NR Description: nucleoid DNA-binding - like protein
  misc_feature (1)..(310): NCBI GI NO: 15240680 NR Description: nucleoid DNA-binding-related protein
  misc_feature (1)..(310): NCBI GI NO: 20161865 NR Description: putative nucleoid DNA-binding-like protein
  misc_feature (1)..(326): NCBI GI NO: 18391062 NR Description: expressed protein [Arabidopsis thaliana]
  misc_feature (38)..(326): NCBI GI NO: 21450872 NR Description: unknown protein [Arabidopsis thaliana]
  misc_feature (27)..(315): NCBI GI NO: 34910676 NR Description: P0690B02.2
  misc_feature (17)..(303): NCBI GI NO: 34895664 NR Description: nucleoid DNA-binding protein cnd41-like protein
  misc_feature (52)..(311): NCBI GI NO: 15290061 NR Description: nucleoid DNA-binding protein cnd41-like protein
MLQVSHAFGPCSPLGNAAAAPSWAGFLADQSSRDASRLLYLDSLAVAGRAYAPIASGRQLLQTPTYVVRARLGTPPQQLLLAVDTSNDAAWIPCSGCAGCPTTTPFKPAASTSYRAVPCGSPACSRAPNPSCSLNTKSCGFSLTYADSSLEAALSQDSLAVANDVVKSYTFGCLQKATGTAAPPQGLLGLGRGPLSFLSQTKDMYEGTFSYCLPSFKSLNFSGTLRLGRKGQPLRIKTTPLLVNPHRSSLYYVGMTGIRVGKKVVPIPPSALAFDPATGAGTVLDSGTMFTRLVAPAYVAVRDEVRHRIRGANGRVGFAREQCTAA

SEQ ID NO: 12700 - protein, 189 aa, Triticum aestivum
  peptide (1)..(189): Ceres Seq. ID no. 13662248
MSPEGHRHGGAAAGPPRARPRAAVVPVADQGHVRGHLLLLPPELQVPQLLRHAQARPQGPTAAHQDDAAARQPAPLLALLRGHDRHPRGQEGGAHPALRAGVRPGDGRRHGARLRDDVHQAGGAGVRGGARRGPPPHPRRQRPRRLRPRAVHRGLTPIDYPSAGSWEPRLRPAPLLPVRWCRTCMHPCW

SEQ ID NO: 12701 - DNA, 934 bp, Triticum aestivum
  misc_feature (1)..(934): Ceres Seq. ID no. 12584903
acaatcgtcccagatctcaagctctcaactcacctcacctcgcatctcaaacagtcttctcttttcggttggcataattgctagaagcagggttctatccatggcaatggtggtgaaggccctcctcgttgccgtcgtggccgtggcagcgcttgcgcagctcaccgtggcagtggatcaccaggtgggcggcagcggcgcgacctgggccaccagcggcggctacgactcgtggtcggggaagcagaagttctctccgggagacagcctcgtattttcgtactcgccggcgcacgacgtcgtggaggtgagcaaggccgactacgacgcctgcacggccagcaaagtcgtcgccagatacaccggcggcaagaccaccgtcaagctcaccactgccggaaagcgctacttcatctgcagcatcaccggccactgcgacgccggcatgaagctccaggtgaacgtcgccgacgtgaccgccggccccaccaagcccaggggccagaggagcgtcgcccctgtcgccgccccggcgccggcaccggaggggtcggccaccgacgagcagctgccgacagtgtcgtcgcctacgggaacaccgacgcccagttcaccgtccggctcgggcgccgctagcatcggtgcgagcgctgcggtggcgctcgccatgggcatggccgtggcgttggccatttgagagggatctggccgatccatgtgtaccaaggcttagttttggagtgctcaagtcttaatcacgtcgatacatttgcggatttgttcttgttattcttggctggcagtggcatgcacattgccttccctgcatgttccttccttcctactagtacagtgctatcagggttcagtgtactactgtgcgatttatttgttgtatttgtctgtcggagaataaatacaattcacattcttt

SEQ ID NO: 12702 - protein, 231 aa, Triticum aestivum
  peptide (1)..(231): Ceres Seq. ID no. 12584904
  misc_feature (69)..(149): Pfam Name: Pfam Description:  Plastocyanin-like domain
  misc_feature (39)..(228): NCBI GI NO: 34915492 NR Description: contains ESTsD24614
  misc_feature (34)..(231): NCBI GI NO: 38636764 NR Description: putative blue copper binding protein
  misc_feature (40)..(228): NCBI GI NO: 38636763 NR Description: putative blue copper binding protein
  misc_feature (41)..(231): NCBI GI NO: 15225223 NR Description: putative uclacyanin I; protein id: At2g32300
  misc_feature (36)..(227): NCBI GI NO: 38636760 NR Description: putative blue copper binding protein
  misc_feature (36)..(228): NCBI GI NO: 38636761 NR Description: putative blue copper binding protein
  misc_feature (43)..(231): NCBI GI NO: 14140127 NR Description: uclacyanin 3-like protein [Oryza sativa]
  misc_feature (40)..(230): NCBI GI NO: 34395239 NR Description: putative phytocyanin
  misc_feature (36)..(203): NCBI GI NO: 34908748 NR Description: uclacyanin-like protein
  misc_feature (38)..(185): NCBI GI NO: 4104058 NR Description: blue copper-binding protein homolog
QSSQISSSQLTSPRISNSLLFSVGIIARSRVLSMAMVVKALLVAVVAVAALAQLTVAVDHQVGGSGATWATSGGYDSWSGKQKFSPGDSLVFSYSPAHDVVEVSKADYDACTASKVVARYTGGKTTVKLTTAGKRYFICSITGHCDAGMKLQVNVADVTAGPTKPRGQRSVAPVAAPAPAPEGSATDEQLPTVSSPTGTPTPSSPSGSGAASIGASAAVALAMGMAVALAI

SEQ ID NO: 12703 - protein, 198 aa, Triticum aestivum
  peptide (1)..(198): Ceres Seq. ID no. 12584905
  misc_feature (36)..(116): Pfam Name: Pfam Description:  Plastocyanin-like domain
  misc_feature (6)..(195): NCBI GI NO: 34915492 NR Description: contains ESTsD24614
  misc_feature (1)..(198): NCBI GI NO: 38636764 NR Description: putative blue copper binding protein
  misc_feature (7)..(195): NCBI GI NO: 38636763 NR Description: putative blue copper binding protein
  misc_feature (8)..(198): NCBI GI NO: 15225223 NR Description: putative uclacyanin I; protein id: At2g32300
  misc_feature (3)..(194): NCBI GI NO: 38636760 NR Description: putative blue copper binding protein
  misc_feature (3)..(195): NCBI GI NO: 38636761 NR Description: putative blue copper binding protein
  misc_feature (10)..(198): NCBI GI NO: 14140127 NR Description: uclacyanin 3-like protein [Oryza sativa]
  misc_feature (7)..(197): NCBI GI NO: 34395239 NR Description: putative phytocyanin
  misc_feature (3)..(170): NCBI GI NO: 34908748 NR Description: uclacyanin-like protein
  misc_feature (5)..(152): NCBI GI NO: 4104058 NR Description: blue copper-binding protein homolog
MAMVVKALLVAVVAVAALAQLTVAVDHQVGGSGATWATSGGYDSWSGKQKFSPGDSLVFSYSPAHDVVEVSKADYDACTASKVVARYTGGKTTVKLTTAGKRYFICSITGHCDAGMKLQVNVADVTAGPTKPRGQRSVAPVAAPAPAPEGSATDEQLPTVSSPTGTPTPSSPSGSGAASIGASAAVALAMGMAVALAI

SEQ ID NO: 12704 - protein, 196 aa, Triticum aestivum
  peptide (1)..(196): Ceres Seq. ID no. 12584906
  misc_feature (34)..(114): Pfam Name: Pfam Description:  Plastocyanin-like domain
  misc_feature (4)..(193): NCBI GI NO: 34915492 NR Description: contains ESTsD24614
  misc_feature (1)..(196): NCBI GI NO: 38636764 NR Description: putative blue copper binding protein
  misc_feature (5)..(193): NCBI GI NO: 38636763 NR Description: putative blue copper binding protein
  misc_feature (6)..(196): NCBI GI NO: 15225223 NR Description: putative uclacyanin I; protein id: At2g32300
  misc_feature (1)..(192): NCBI GI NO: 38636760 NR Description: putative blue copper binding protein
  misc_feature (1)..(193): NCBI GI NO: 38636761 NR Description: putative blue copper binding protein
  misc_feature (8)..(196): NCBI GI NO: 14140127 NR Description: uclacyanin 3-like protein [Oryza sativa]
  misc_feature (5)..(195): NCBI GI NO: 34395239 NR Description: putative phytocyanin
  misc_feature (1)..(168): NCBI GI NO: 34908748 NR Description: uclacyanin-like protein
  misc_feature (3)..(150): NCBI GI NO: 4104058 NR Description: blue copper-binding protein homolog
MVVKALLVAVVAVAALAQLTVAVDHQVGGSGATWATSGGYDSWSGKQKFSPGDSLVFSYSPAHDVVEVSKADYDACTASKVVARYTGGKTTVKLTTAGKRYFICSITGHCDAGMKLQVNVADVTAGPTKPRGQRSVAPVAAPAPAPEGSATDEQLPTVSSPTGTPTPSSPSGSGAASIGASAAVALAMGMAVALAI

SEQ ID NO: 12705 - DNA, 1653 bp, Triticum aestivum
  misc_feature (1)..(1653): Ceres Seq. ID no. 13655244
aaaaaaactctccaagcgaatcccatttccgccggtcctcccttcgccaagccatcggcgactgctgcagcacagcctcctccccctcctcatggccgacccctccttctcctcccccacggcggcctccgcaggcgacgccctccccgcgccggcggcttccgacgcgccggaggtgaccctccccgccgccgcccccgacctggacaaggagttcgggttccagcgggcggagctcggtaaggagaagctcgccgggacggtgggcttccacgagcgccacgtgttcctctgctacaagggccctgaggagtggccatcccacgtcgaggcctccgagtccgaccacctcccccgcctcctcgccgccgccatcaaggcccgcaagcccaatctgaagaagagcaccaaactgacaatttgtgaaggagaagatggcactgagtcatctcttggagacgtgttgatctttcctgatatgatccgatacagagagctgacccaccttgatgtcgacaactttgtggatgaagtactcgtgaaagatactgaatggcttcctggatctcctgaggctataaaaggttcctatgtttttgtctgctgccatggaagcagggataaaaggtgtggtgtttgcggtcctgctctgattacaaggttcaaggaagggattgaaggacaaggtcttcatggtcaggtggctgttagtgcatgctcacacgttggaggtcacaagtatgcaggaaatgtcatcatattcagtccagatgccaagggagaagtgactggtcattggtatggttatgttgctcctgatgatgtgcctgtgttactgcgtcaacatatcggacaaggagagatcgtgggccatctatggaggggccagttgggtttgtctgaagagcagcagaagaaagctctggagcttaggcgcgcgacgaatggcctgactgaggaagaatcaagcgccaaagaatcccctgaagcaaatggagccaacggtgctgcttgcaaccctgcacctgcaggtggatgctgccagggcaatggaggaggtttaacctgctgccaaagtgatctgccagcaggaaaacaggataagagcgtcccagctgagcagaaccacaagagctctacgacagagagtgacaaagaaaacggtgctgccagcaagaaggggcgcatgaagatttgccggatgcccacctggttcgagacctgggacaagtccgacacctacaccactcttgctgttgttgcttctgctgcaaccgtgttcgccgccttcaggtgctacaaggccatgaactgaaccctcaaaacaaggccaggttctttgcaccaaggacagtctaccgcagtaaaacaatccgatttgaaaataatatactgcctgtgcatatcaagataatatgcgttaggactttagaaagtacagtagctgatctggagatggcgatgaaaatctgttatgcgtaatgccctcatgtactaaaagtctaaaactcgtaagtttgaagttccccacgccttggctgcatggctgtggctgtggtgttcagcgtgatgatgatgttatgctcgtttggctggaactgggatgcttgcgttagaaaaactgtgcattgctggcatttgcttctttgaagc

SEQ ID NO: 12706 - protein, 437 aa, Triticum aestivum
  peptide (1)..(437): Ceres Seq. ID no. 13655245
  misc_feature (69)..(436): NCBI GI NO: 16604384 NR Description: AT4g26620/T15N24_70 [Arabidopsis thaliana]
  misc_feature (69)..(436): NCBI GI NO: 18416788 NR Description: sucrase-related protein [Arabidopsis thaliana]
  misc_feature (74)..(436): NCBI GI NO: 15241075 NR Description: sucrose cleavage protein-related
  misc_feature (69)..(230): NCBI GI NO: 7488353 NR Description: sucrose cleavage protein homolog T15N24
  misc_feature (294)..(436): NCBI GI NO: 7488353 NR Description: sucrose cleavage protein homolog T15N24
  misc_feature (81)..(367): NCBI GI NO: 1086252 NR Description: sucrose cleavage protein - potato
  misc_feature (69)..(362): NCBI GI NO: 15237439 NR Description: sucrose cleavage protein -related
  misc_feature (69)..(362): NCBI GI NO: 21553503 NR Description: sucrose cleavage protein-like
  misc_feature (69)..(358): NCBI GI NO: 16604338 NR Description: AT3g27570/MMJ24_12 [Arabidopsis thaliana]
  misc_feature (69)..(358): NCBI GI NO: 30688845 NR Description: sucrose cleavage protein -related
KKLSKRIPFPPVLPSPSHRRLLQHSLLPLLMADPSFSSPTAASAGDALPAPAASDAPEVTLPAAAPDLDKEFGFQRAELGKEKLAGTVGFHERHVFLCYKGPEEWPSHVEASESDHLPRLLAAAIKARKPNLKKSTKLTICEGEDGTESSLGDVLIFPDMIRYRELTHLDVDNFVDEVLVKDTEWLPGSPEAIKGSYVFVCCHGSRDKRCGVCGPALITRFKEGIEGQGLHGQVAVSACSHVGGHKYAGNVIIFSPDAKGEVTGHWYGYVAPDDVPVLLRQHIGQGEIVGHLWRGQLGLSEEQQKKALELRRATNGLTEEESSAKESPEANGANGAACNPAPAGGCCQGNGGGLTCCQSDLPAGKQDKSVPAEQNHKSSTTESDKENGAASKKGRMKICRMPTWFETWDKSDTYTTLAVVASAATVFAAFRCYKAMN

SEQ ID NO: 12707 - protein, 407 aa, Triticum aestivum
  peptide (1)..(407): Ceres Seq. ID no. 13655246
  misc_feature (39)..(406): NCBI GI NO: 16604384 NR Description: AT4g26620/T15N24_70 [Arabidopsis thaliana]
  misc_feature (39)..(406): NCBI GI NO: 18416788 NR Description: sucrase-related protein [Arabidopsis thaliana]
  misc_feature (44)..(406): NCBI GI NO: 15241075 NR Description: sucrose cleavage protein-related
  misc_feature (39)..(200): NCBI GI NO: 7488353 NR Description: sucrose cleavage protein homolog T15N24
  misc_feature (264)..(406): NCBI GI NO: 7488353 NR Description: sucrose cleavage protein homolog T15N24
  misc_feature (51)..(337): NCBI GI NO: 1086252 NR Description: sucrose cleavage protein - potato
  misc_feature (39)..(332): NCBI GI NO: 15237439 NR Description: sucrose cleavage protein -related
  misc_feature (39)..(332): NCBI GI NO: 21553503 NR Description: sucrose cleavage protein-like
  misc_feature (39)..(328): NCBI GI NO: 16604338 NR Description: AT3g27570/MMJ24_12 [Arabidopsis thaliana]
  misc_feature (39)..(328): NCBI GI NO: 30688845 NR Description: sucrose cleavage protein -related
MADPSFSSPTAASAGDALPAPAASDAPEVTLPAAAPDLDKEFGFQRAELGKEKLAGTVGFHERHVFLCYKGPEEWPSHVEASESDHLPRLLAAAIKARKPNLKKSTKLTICEGEDGTESSLGDVLIFPDMIRYRELTHLDVDNFVDEVLVKDTEWLPGSPEAIKGSYVFVCCHGSRDKRCGVCGPALITRFKEGIEGQGLHGQVAVSACSHVGGHKYAGNVIIFSPDAKGEVTGHWYGYVAPDDVPVLLRQHIGQGEIVGHLWRGQLGLSEEQQKKALELRRATNGLTEEESSAKESPEANGANGAACNPAPAGGCCQGNGGGLTCCQSDLPAGKQDKSVPAEQNHKSSTTESDKENGAASKKGRMKICRMPTWFETWDKSDTYTTLAVVASAATVFAAFRCYKAMN

SEQ ID NO: 12708 - protein, 278 aa, Triticum aestivum
  peptide (1)..(278): Ceres Seq. ID no. 13655247
  misc_feature (1)..(277): NCBI GI NO: 16604384 NR Description: AT4g26620/T15N24_70 [Arabidopsis thaliana]
  misc_feature (1)..(277): NCBI GI NO: 18416788 NR Description: sucrase-related protein [Arabidopsis thaliana]
  misc_feature (1)..(277): NCBI GI NO: 15241075 NR Description: sucrose cleavage protein-related
  misc_feature (1)..(71): NCBI GI NO: 7488353 NR Description: sucrose cleavage protein homolog T15N24
  misc_feature (135)..(277): NCBI GI NO: 7488353 NR Description: sucrose cleavage protein homolog T15N24
  misc_feature (1)..(208): NCBI GI NO: 1086252 NR Description: sucrose cleavage protein - potato
  misc_feature (1)..(203): NCBI GI NO: 15237439 NR Description: sucrose cleavage protein -related
  misc_feature (1)..(203): NCBI GI NO: 21553503 NR Description: sucrose cleavage protein-like
  misc_feature (1)..(199): NCBI GI NO: 16604338 NR Description: AT3g27570/MMJ24_12 [Arabidopsis thaliana]
  misc_feature (1)..(199): NCBI GI NO: 30688845 NR Description: sucrose cleavage protein -related
MIRYRELTHLDVDNFVDEVLVKDTEWLPGSPEAIKGSYVFVCCHGSRDKRCGVCGPALITRFKEGIEGQGLHGQVAVSACSHVGGHKYAGNVIIFSPDAKGEVTGHWYGYVAPDDVPVLLRQHIGQGEIVGHLWRGQLGLSEEQQKKALELRRATNGLTEEESSAKESPEANGANGAACNPAPAGGCCQGNGGGLTCCQSDLPAGKQDKSVPAEQNHKSSTTESDKENGAASKKGRMKICRMPTWFETWDKSDTYTTLAVVASAATVFAAFRCYKAMN

SEQ ID NO: 12709 - DNA, 1623 bp, Triticum aestivum
  misc_feature (1)..(1623): Ceres Seq. ID no. 13591365
gacgacaacgccagcgccaccactctcaagagtcttaaaccctcactcctctccttccaccacctctccacacacaccatctctgtcagacatggcgccttccgcgacctgccctctccactccatggcatccgtctcccgcgctctccgcccgcgcccgcgtctcgccgctcctcgtctcggatgcggactgagagttggatgctctgtgccagcatatggaagtgctgccacggagaaggccgagtggggattggccattgcgccctcaccagcgaccactcttgttccggttgtcaggagccgtcaaattttctgcaaggcagaagctaacatttctagtaacctgccagcgagcaagcctactggagcaagccagtacgagaaaatagttgagctactcactactcttttccctgtctgggtcatattaggtacagttattggcatctacaagccatcaatggtcacctggttggagactgatctttttaccgtgggcctaggattcctaatgttgtcaatgggactaacattaacatttgaagatttcaggagatgtttaaggaatccatggacagttggtgtgggatttcttgcgcagtatttgatcaaacctatgctaggatatgctatcgcattgtcattgaagttatctgctcctcttgcaactggtcttattttggtctcatgttgtcctggtggtcaagcatcaaacgttgcaacttacatatccaaaggaaatgtggcactttcagttcttatgaccacttgctcgactattggtgctatagcgatgacaccactccttactaaactccttgctggtcaattagtccctgttgatgctgcaggcttggccatcagtacttttcaggttgttttagtaccgactatcgttggagtgttggcacatgagtattttcccaagtttaccgagcggattatctccataacaccactgataggggtcatcctcaccaccttgctttgtgctagccctattgggcaagtcgcagaagtgttgaaaactcaaggtgctcaacttattctccctgttgctctgctgcatgctgttgcattcgctcttggctattggatctcgaaatggtcttctttcggggaatcaacttctagaaccatctcaattgagtgtgggatgcagagttctgcgcttggatttttacttgcccaaaagcacttcacaaaccctcttgttgctgttccttctgctgtcagtgttgtgtgcatggcgctcggaggcagtgctcttgcagtattctggagaaacagaggccttccagcagatgacaaggacgatttcaaggaatgaatgaagcaaaaacaatcctaggctccagcttctagtcgttccatgttttagttgagcgtggttacgtcagagaattttttatattcccatattttaggtatgtaaaacacaaaacaggataaggacgtttgtttattctagataattgattattggtaggaaggacccttgttaatgatttaggcaaggctttgcaattaagtttggtgtgtaatgtatttttcatcttctaaataaataagctgcttctcagacaaagcagtaattcgtttatatatatggtgttatgc

SEQ ID NO: 12710 - protein, 443 aa, Triticum aestivum
  peptide (1)..(443): Ceres Seq. ID no. 13591366
  misc_feature (165)..(342): Pfam Name: Pfam Description:  Sodium Bile acid symporter family
  misc_feature (42)..(443): NCBI GI NO: 34911708 NR Description: P0707D10.18
  misc_feature (90)..(443): NCBI GI NO: 30683305 NR Description: bile acid:sodium symporter family
  misc_feature (90)..(443): NCBI GI NO: 20269901 NR Description: putative sodium-dependent bile acid symporter
  misc_feature (99)..(419): NCBI GI NO: 7485401 NR Description: hypothetical protein At2g26900
  misc_feature (172)..(443): NCBI GI NO: 28393076 NR Description: putative Na+ dependent ileal bile acid transporter
  misc_feature (66)..(439): NCBI GI NO: 18412023 NR Description: bile acid:sodium symporter family
  misc_feature (129)..(438): NCBI GI NO: 38346633 NR Description: OSJNBa0072D21.3
  misc_feature (125)..(429): NCBI GI NO: 24217327 NR Description: conserved hypothetical protein
  misc_feature (131)..(429): NCBI GI NO: 33865169 NR Description: Sodium/bile acid cotransporter family
  misc_feature (171)..(438): NCBI GI NO: 22298669 NR Description: ORF_ID:tll1126~probable sodium-dependenttransporter
TTTPAPPLSRVLNPHSSPSTTSPHTPSLSDMAPSATCPLHSMASVSRALRPRPRLAAPRLGCGLRVGCSVPAYGSAATEKAEWGLAIAPSPATTLVPVVRSRQIFCKAEANISSNLPASKPTGASQYEKIVELLTTLFPVWVILGTVIGIYKPSMVTWLETDLFTVGLGFLMLSMGLTLTFEDFRRCLRNPWTVGVGFLAQYLIKPMLGYAIALSLKLSAPLATGLILVSCCPGGQASNVATYISKGNVALSVLMTTCSTIGAIAMTPLLTKLLAGQLVPVDAAGLAISTFQVVLVPTIVGVLAHEYFPKFTERIISITPLIGVILTTLLCASPIGQVAEVLKTQGAQLILPVALLHAVAFALGYWISKWSSFGESTSRTISIECGMQSSALGFLLAQKHFTNPLVAVPSAVSVVCMALGGSALAVFWRNRGLPADDKDDFKE

SEQ ID NO: 12711 - protein, 413 aa, Triticum aestivum
  peptide (1)..(413): Ceres Seq. ID no. 13591367
  misc_feature (135)..(312): Pfam Name: Pfam Description:  Sodium Bile acid symporter family
  misc_feature (12)..(413): NCBI GI NO: 34911708 NR Description: P0707D10.18
  misc_feature (60)..(413): NCBI GI NO: 30683305 NR Description: bile acid:sodium symporter family
  misc_feature (60)..(413): NCBI GI NO: 20269901 NR Description: putative sodium-dependent bile acid symporter
  misc_feature (69)..(389): NCBI GI NO: 7485401 NR Description: hypothetical protein At2g26900
  misc_feature (142)..(413): NCBI GI NO: 28393076 NR Description: putative Na+ dependent ileal bile acid transporter
  misc_feature (36)..(409): NCBI GI NO: 18412023 NR Description: bile acid:sodium symporter family
  misc_feature (99)..(408): NCBI GI NO: 38346633 NR Description: OSJNBa0072D21.3
  misc_feature (95)..(399): NCBI GI NO: 24217327 NR Description: conserved hypothetical protein
  misc_feature (101)..(399): NCBI GI NO: 33865169 NR Description: Sodium/bile acid cotransporter family
  misc_feature (141)..(408): NCBI GI NO: 22298669 NR Description: ORF_ID:tll1126~probable sodium-dependenttransporter
MAPSATCPLHSMASVSRALRPRPRLAAPRLGCGLRVGCSVPAYGSAATEKAEWGLAIAPSPATTLVPVVRSRQIFCKAEANISSNLPASKPTGASQYEKIVELLTTLFPVWVILGTVIGIYKPSMVTWLETDLFTVGLGFLMLSMGLTLTFEDFRRCLRNPWTVGVGFLAQYLIKPMLGYAIALSLKLSAPLATGLILVSCCPGGQASNVATYISKGNVALSVLMTTCSTIGAIAMTPLLTKLLAGQLVPVDAAGLAISTFQVVLVPTIVGVLAHEYFPKFTERIISITPLIGVILTTLLCASPIGQVAEVLKTQGAQLILPVALLHAVAFALGYWISKWSSFGESTSRTISIECGMQSSALGFLLAQKHFTNPLVAVPSAVSVVCMALGGSALAVFWRNRGLPADDKDDFKE

SEQ ID NO: 12712 - protein, 402 aa, Triticum aestivum
  peptide (1)..(402): Ceres Seq. ID no. 13591368
  misc_feature (124)..(301): Pfam Name: Pfam Description:  Sodium Bile acid symporter family
  misc_feature (1)..(402): NCBI GI NO: 34911708 NR Description: P0707D10.18
  misc_feature (49)..(402): NCBI GI NO: 30683305 NR Description: bile acid:sodium symporter family
  misc_feature (49)..(402): NCBI GI NO: 20269901 NR Description: putative sodium-dependent bile acid symporter
  misc_feature (58)..(378): NCBI GI NO: 7485401 NR Description: hypothetical protein At2g26900
  misc_feature (131)..(402): NCBI GI NO: 28393076 NR Description: putative Na+ dependent ileal bile acid transporter
  misc_feature (25)..(398): NCBI GI NO: 18412023 NR Description: bile acid:sodium symporter family
  misc_feature (88)..(397): NCBI GI NO: 38346633 NR Description: OSJNBa0072D21.3
  misc_feature (84)..(388): NCBI GI NO: 24217327 NR Description: conserved hypothetical protein
  misc_feature (90)..(388): NCBI GI NO: 33865169 NR Description: Sodium/bile acid cotransporter family
  misc_feature (130)..(397): NCBI GI NO: 22298669 NR Description: ORF_ID:tll1126~probable sodium-dependenttransporter
MASVSRALRPRPRLAAPRLGCGLRVGCSVPAYGSAATEKAEWGLAIAPSPATTLVPVVRSRQIFCKAEANISSNLPASKPTGASQYEKIVELLTTLFPVWVILGTVIGIYKPSMVTWLETDLFTVGLGFLMLSMGLTLTFEDFRRCLRNPWTVGVGFLAQYLIKPMLGYAIALSLKLSAPLATGLILVSCCPGGQASNVATYISKGNVALSVLMTTCSTIGAIAMTPLLTKLLAGQLVPVDAAGLAISTFQVVLVPTIVGVLAHEYFPKFTERIISITPLIGVILTTLLCASPIGQVAEVLKTQGAQLILPVALLHAVAFALGYWISKWSSFGESTSRTISIECGMQSSALGFLLAQKHFTNPLVAVPSAVSVVCMALGGSALAVFWRNRGLPADDKDDFKE

SEQ ID NO: 12713 - DNA, 1115 bp, Triticum aestivum
  misc_feature (1)..(1115): Ceres Seq. ID no. 12615296
aaagcggttgttccccattcttaaaccttccacgaccctctcctcccttccggcctgcttccactcttctccgtcaggatttcgttccagaaatcgaaagatgaagatcattccggtggcttgcttggaggataactatgcctacctgatcgttgacgagagcaccaaggcggcggcggccgtcgacccggtggagccggagaaggtgctggcggcggccagcgaggtcggcgcctacatcgactgcgtcctcaccacccaccaccactgggatcatgctggtggcaatgagaagatgaggctgctggtgccagggattaaggtctatgggggatccatggacaatgttaaaggctgcactgatcaggtggaaaacggaactaagttatccattgggaaggaaattgacatactgtgcctacatacgccatgtcatacaaaaggtcatattagctactacgttactagcaaagaggaggaagacccagcagtatttactggagacaccttgttcattgctggctgtgggaggtttttcgagggtacggcagagcaaatgtaccagtccctttgtgttacactgggctcgctgcctaagtcaactcgtgtttactgtggccatgagtacactgtaaagagcctacaattcatgctgacagtcgagccagagaacgaaaaaatgaagcagaaactggaatgggctcaaaagcagcgtgaagcaaatcaaccgacggttccctcaactataggagatgagcttgagataaacaccttcatgcgtgttgatctgcctgaaatacaggcaaaatttggtgccaagtcggcagttgaagcgctgaggacggtcaggaacatcaaggatacctggaaaggttgataaacgcagctgccactcatacttgtaggtggcgtttacagccgtgcgatgctttgagagctacgtacgtgttaagaagataatatgccagtgtttcctttaagaaaaacataagagaaaggagtccagtctgctaatatgctttggtatcaatcagaatacaactgttgtggcatgttaattactactggtatgttatttcttggcaaaacaaacaaaaactatgttggcctgtggc

SEQ ID NO: 12714 - protein, 291 aa, Triticum aestivum
  peptide (1)..(291): Ceres Seq. ID no. 12615297
  misc_feature (44)..(207): Pfam Name: Pfam Description:  Metallo-beta-lactamase superfamily
  misc_feature (34)..(291): NCBI GI NO: 15228389 NR Description: glyoxalase II
  misc_feature (34)..(291): NCBI GI NO: 2570342 NR Description: glyoxalase II cytoplasmic isozyme
  misc_feature (34)..(290): NCBI GI NO: 21729786 NR Description: hydroxyacyl glutathione hydrolase
  misc_feature (34)..(290): NCBI GI NO: 4885389 NR Description: hydroxyacyl glutathione hydrolase
  misc_feature (34)..(290): NCBI GI NO: 15375320 NR Description: hydroxyacyl glutathione hydrolase
  misc_feature (34)..(290): NCBI GI NO: 2494848 NR Description: Hydroxyacylglutathione hydrolase
  misc_feature (21)..(290): NCBI GI NO: 21356335 NR Description: CG4365-PA [Drosophila melanogaster]
  misc_feature (21)..(290): NCBI GI NO: 24667703 NR Description: CG4365-PC [Drosophila melanogaster]
  misc_feature (21)..(290): NCBI GI NO: 24667711 NR Description: CG4365-PB [Drosophila melanogaster]
  misc_feature (34)..(287): NCBI GI NO: 29841459 NR Description: similar to probable hydroxyacylglutathionehydrolase
KRLFPILKPSTTLSSLPACFHSSPSGFRSRNRKMKIIPVACLEDNYAYLIVDESTKAAAAVDPVEPEKVLAAASEVGAYIDCVLTTHHHWDHAGGNEKMRLLVPGIKVYGGSMDNVKGCTDQVENGTKLSIGKEIDILCLHTPCHTKGHISYYVTSKEEEDPAVFTGDTLFIAGCGRFFEGTAEQMYQSLCVTLGSLPKSTRVYCGHEYTVKSLQFMLTVEPENEKMKQKLEWAQKQREANQPTVPSTIGDELEINTFMRVDLPEIQAKFGAKSAVEALRTVRNIKDTWKG

SEQ ID NO: 12715 - protein, 258 aa, Triticum aestivum
  peptide (1)..(258): Ceres Seq. ID no. 12615298
  misc_feature (11)..(174): Pfam Name: Pfam Description:  Metallo-beta-lactamase superfamily
  misc_feature (1)..(258): NCBI GI NO: 15228389 NR Description: glyoxalase II
  misc_feature (1)..(258): NCBI GI NO: 2570342 NR Description: glyoxalase II cytoplasmic isozyme
  misc_feature (1)..(257): NCBI GI NO: 21729786 NR Description: hydroxyacyl glutathione hydrolase
  misc_feature (1)..(257): NCBI GI NO: 4885389 NR Description: hydroxyacyl glutathione hydrolase
  misc_feature (1)..(257): NCBI GI NO: 15375320 NR Description: hydroxyacyl glutathione hydrolase
  misc_feature (1)..(257): NCBI GI NO: 2494848 NR Description: Hydroxyacylglutathione hydrolase
  misc_feature (1)..(257): NCBI GI NO: 21356335 NR Description: CG4365-PA [Drosophila melanogaster]
  misc_feature (1)..(257): NCBI GI NO: 24667703 NR Description: CG4365-PC [Drosophila melanogaster]
  misc_feature (1)..(257): NCBI GI NO: 24667711 NR Description: CG4365-PB [Drosophila melanogaster]
  misc_feature (1)..(254): NCBI GI NO: 29841459 NR Description: similar to probable hydroxyacylglutathionehydrolase
MKIIPVACLEDNYAYLIVDESTKAAAAVDPVEPEKVLAAASEVGAYIDCVLTTHHHWDHAGGNEKMRLLVPGIKVYGGSMDNVKGCTDQVENGTKLSIGKEIDILCLHTPCHTKGHISYYVTSKEEEDPAVFTGDTLFIAGCGRFFEGTAEQMYQSLCVTLGSLPKSTRVYCGHEYTVKSLQFMLTVEPENEKMKQKLEWAQKQREANQPTVPSTIGDELEINTFMRVDLPEIQAKFGAKSAVEALRTVRNIKDTWKG

SEQ ID NO: 12716 - protein, 193 aa, Triticum aestivum
  peptide (1)..(193): Ceres Seq. ID no. 12615299
  misc_feature (1)..(109): Pfam Name: Pfam Description:  Metallo-beta-lactamase superfamily
  misc_feature (1)..(193): NCBI GI NO: 15228389 NR Description: glyoxalase II
  misc_feature (1)..(193): NCBI GI NO: 2570342 NR Description: glyoxalase II cytoplasmic isozyme
  misc_feature (1)..(192): NCBI GI NO: 21729786 NR Description: hydroxyacyl glutathione hydrolase
  misc_feature (1)..(192): NCBI GI NO: 4885389 NR Description: hydroxyacyl glutathione hydrolase
  misc_feature (1)..(192): NCBI GI NO: 15375320 NR Description: hydroxyacyl glutathione hydrolase
  misc_feature (1)..(192): NCBI GI NO: 2494848 NR Description: Hydroxyacylglutathione hydrolase
  misc_feature (1)..(192): NCBI GI NO: 21356335 NR Description: CG4365-PA [Drosophila melanogaster]
  misc_feature (1)..(192): NCBI GI NO: 24667703 NR Description: CG4365-PC [Drosophila melanogaster]
  misc_feature (1)..(192): NCBI GI NO: 24667711 NR Description: CG4365-PB [Drosophila melanogaster]
  misc_feature (1)..(189): NCBI GI NO: 29841459 NR Description: similar to probable hydroxyacylglutathionehydrolase
MRLLVPGIKVYGGSMDNVKGCTDQVENGTKLSIGKEIDILCLHTPCHTKGHISYYVTSKEEEDPAVFTGDTLFIAGCGRFFEGTAEQMYQSLCVTLGSLPKSTRVYCGHEYTVKSLQFMLTVEPENEKMKQKLEWAQKQREANQPTVPSTIGDELEINTFMRVDLPEIQAKFGAKSAVEALRTVRNIKDTWKG

SEQ ID NO: 12717 - DNA, 1313 bp, Triticum aestivum
  misc_feature (1)..(1313): Ceres Seq. ID no. 13596689
acaaaagagggccgaggagacagggacacgcaagcttcaggcacaagccctacgccgcctcgcctcgcctggttgcttgcttgtcttcgaagatccatagttagttgcactacaccagaagaatcaaccaaagcttcggcccgacttaatcgccatcccttgttgttgttgcgcctcgatcgatcttggcgcggtggtgactaatggcgcactgcggcggcggtcaggcggcgtccgtggagagccatttccagggcctgctcgacgacgacgacaagtaccgcgcattgtgcggcgcgttcgggtacctgcagcagcaggagtggccggacctcagcggcgcttgctacgcggccttcggcgcgccaccaccaccgggcagcagcaacggcgccggcaactccttctcctgcagcggtagcgccagcagcggcgacgggtccacgaagagaaaacctgacgcgtatgtggacgcaaaggacgactgcaagaggccgagagggaagcagcagctgtgcgaccctggcgaggctgaaggagcggcgaaaggcaggccggagaaacccaaggcgtgcgccaggaagaagccggaggcggcggccaccggccagaagaccgactacatccacgtccgagcccggcgcgggcaggccacggacagccacagcctcgccgaacgggtgaggcgggagcggatcagcgagcggatgaggtacctgcaggagctggtgcccgggtgcgacaaggtcactggcaaggccggcatgctcgacgagatcattaactacgtccagtccctgcagaagcaggtcgagttcctgtccatgaagatcgccgcctccaacccggtggtgaacttcaacatcgtcgacgacctcttcggcggcaggcggatgaaccaggcgtgcggccccgcggcggccctgcccgccatgacgttgccgatgcaccatgcgcagctggacccgtcctgccttcagatgagcagcactaccatgcagcagatgcagcagccggctgctgggttcgggctggacatgctcctcaacaacccgtacccggcggcgcagagcgcgtcccggtcggcggctgccacgccggtctcggtgtcggccgccgcgtcggtcgagtcatccctcgatgtgaatggagctgctgcttgggacattgcgtctcagcatttgttcagtgggtttgacgcacagtttcagtcagttcaaagtgagtagctgcttctytgaagcaaagcttgcagggttaccttgtactgatattcttgtgtgaaagaacatagatacagagttagccaaggg

SEQ ID NO: 12718 - protein, 341 aa, Triticum aestivum
  peptide (1)..(341): Ceres Seq. ID no. 15221951
  misc_feature (150)..(200): Pfam Name: Pfam Description:  Helix-loop-helix DNA-binding domain
  misc_feature (58)..(276): NCBI GI NO: 34898690 NR Description: hypothetical protein
  misc_feature (5)..(237): NCBI GI NO: 34906952 NR Description: DNA-binding protein-like protein
  misc_feature (136)..(270): NCBI GI NO: 7487656 NR Description: hypothetical protein T4L20
  misc_feature (136)..(270): NCBI GI NO: 20127066 NR Description: putative bHLH transcription factor
  misc_feature (136)..(270): NCBI GI NO: 21539493 NR Description: unknown protein [Arabidopsis thaliana]
  misc_feature (136)..(270): NCBI GI NO: 22329164 NR Description: bHLH protein [Arabidopsis thaliana]
  misc_feature (55)..(275): NCBI GI NO: 15221563 NR Description: DNA-binding protein -related
  misc_feature (55)..(275): NCBI GI NO: 20127044 NR Description: putative bHLH transcription factor
  misc_feature (55)..(275): NCBI GI NO: 30697769 NR Description: DNA-binding protein -related
  misc_feature (60)..(267): NCBI GI NO: 15222679 NR Description: bHLH protein [Arabidopsis thaliana]
MAHCGGGQAASVESHFQGLLDDDDKYRALCGAFGYLQQQEWPDLSGACYAAFGAPPPPGSSNGAGNSFSCSGSASSGDGSTKRKPDAYVDAKDDCKRPRGKQQLCDPGEAEGAAKGRPEKPKACARKKPEAAATGQKTDYIHVRARRGQATDSHSLAERVRRERISERMRYLQELVPGCDKVTGKAGMLDEIINYVQSLQKQVEFLSMKIAASNPVVNFNIVDDLFGGRRMNQACGPAAALPAMTLPMHHAQLDPSCLQMSSTTMQQMQQPAAGFGLDMLLNNPYPAAQSASRSAAATPVSVSAAASVESSLDVNGAAAWDIASQHLFSGFDAQFQSVQSE

SEQ ID NO: 12719 - protein, 173 aa, Triticum aestivum
  peptide (1)..(173): Ceres Seq. ID no. 15221952
  misc_feature (1)..(108): NCBI GI NO: 34898690 NR Description: hypothetical protein
  misc_feature (1)..(69): NCBI GI NO: 34906952 NR Description: DNA-binding protein-like protein
  misc_feature (1)..(102): NCBI GI NO: 7487656 NR Description: hypothetical protein T4L20
  misc_feature (1)..(102): NCBI GI NO: 22329164 NR Description: bHLH protein [Arabidopsis thaliana]
  misc_feature (1)..(102): NCBI GI NO: 21539493 NR Description: unknown protein [Arabidopsis thaliana]
  misc_feature (1)..(102): NCBI GI NO: 20127066 NR Description: putative bHLH transcription factor
  misc_feature (1)..(107): NCBI GI NO: 15221563 NR Description: DNA-binding protein -related
  misc_feature (1)..(107): NCBI GI NO: 20127044 NR Description: putative bHLH transcription factor
  misc_feature (1)..(107): NCBI GI NO: 30697769 NR Description: DNA-binding protein -related
  misc_feature (1)..(99): NCBI GI NO: 15222679 NR Description: bHLH protein [Arabidopsis thaliana]
MRYLQELVPGCDKVTGKAGMLDEIINYVQSLQKQVEFLSMKIAASNPVVNFNIVDDLFGGRRMNQACGPAAALPAMTLPMHHAQLDPSCLQMSSTTMQQMQQPAAGFGLDMLLNNPYPAAQSASRSAAATPVSVSAAASVESSLDVNGAAAWDIASQHLFSGFDAQFQSVQSE

SEQ ID NO: 12720 - DNA, 1612 bp, Triticum aestivum
  misc_feature (1)..(1612): Ceres Seq. ID no. 13596743
actgatttccccctccacctatctacccgccgccgccacgcccgccgccgacgacgatggcaactaccgcctcaccctccaccacgaccaccccccggtccttcctctcgtcgccttccttctccctcagggcatcgaagtcgagccacctccggacgacgagaaggctgcccgttaatgtacgctgcgccagtagctctccggccgccgatacatcttacacgacgaaggtctcgcggaatgccaacatagccaagctccaagcaggctatttgtttccggagattgccagaagaagggcagctcatctgctaaagcatcctgacgccaaaattataagtctgggaataggtgacactactgagcccattccggaggtcataacaaatgccatggcagagagagcacatgctttatccacagtggatggctacagtggttatggagctgaacaaggtgaaaagaaactaagggcagcaattgctgcaacctactatgcggatcttggtattgacgaaactgatatatttgtctctgatggtgccaaatgtgacatttctcgcctacaggttctttttggatctaaagtgaagattgcagttcaagatccatcatatcccgcatatgttgattcaagtgttatcatggggcaaactgacttatatcagcaggatgttcagaagtatggaaatattgaatacatgagatgcagtcctgaaaatggatttttccctgatctttccaaggtcccacggacagatatcatattcttctgttcacccaacaatcctactggtgctgctgcatctagggaccagctaacacagttggtcaaattcgcaaaggacaatgggtccataatagtctatgattctgcttatgccatgtacatatcagatgacagcccaaaatccatctttgaaattcctggggcgaaggaggttgccctcgagacagcatctttctctaaatatgctgggttcactggtgtccgactgggttggactgtggtccctaaggagctccttttctccgatgggcatccagtcgctaaagatttcaaccgcatagtctgcacttccttcaatggcgcatcgaccatctctcaggccggtggtttaggctgcctctctccagagggtctaaaggctatgcaagacgttgtcggattctacaaggagaacaccaaaatcattgtcgacacgtttgagtcgctcggattcaacgtctacggtgcgaagaatgccccctatgtgtgggtgcacttccctgaccgcaattcctgggatgtctttgccgagatccttgagaaggcaaacgtggtcactactcccggcagtggatttgggcccggcggtgagggctttgtgagggtcagtgcatttggccacagagagaacattattgaagctgcgagaagactgaagcagctatacaaatgagcgttggtttagcaggtggccccctctgtcgctggggagccaggcaataagaacccagcagcatttggagcacgaggtttgcttctcggctgctgggaagtgttagaatagagacagggtgttgtttttgctccattcgtaaccatttaatactggaaatttgcttgttc

SEQ ID NO: 12721 - protein, 461 aa, Triticum aestivum
  peptide (1)..(461): Ceres Seq. ID no. 15221966
  misc_feature (150)..(460): Pfam Name: Pfam Description:  Aminotransferase class I and II
  misc_feature (2)..(461): NCBI GI NO: 37703720 NR Description: putative aminotransferase AGD2
  misc_feature (6)..(461): NCBI GI NO: 18418270 NR Description: aminotransferase family [Arabidopsis thaliana]
  misc_feature (40)..(461): NCBI GI NO: 7447845 NR Description: probable transaminase (EC 2.6.1.-) T16L1.170
  misc_feature (57)..(457): NCBI GI NO: 37703722 NR Description: putative aminotransferase ALD1
  misc_feature (57)..(457): NCBI GI NO: 24414269 NR Description: Putative transaminase
  misc_feature (51)..(460): NCBI GI NO: 25315768 NR Description: probable aspartate aminotransferase
  misc_feature (56)..(460): NCBI GI NO: 18397344 NR Description: aminotransferase family [Arabidopsis thaliana]
  misc_feature (62)..(459): NCBI GI NO: 24213476 NR Description: aminotransferase
  misc_feature (62)..(461): NCBI GI NO: 23124300 NR Description: hypothetical protein [Nostoc punctiforme]
  misc_feature (62)..(459): NCBI GI NO: 23022290 NR Description: hypothetical protein
MATTASPSTTTTPRSFLSSPSFSLRASKSSHLRTTRRLPVNVRCASSSPAADTSYTTKVSRNANIAKLQAGYLFPEIARRRAAHLLKHPDAKIISLGIGDTTEPIPEVITNAMAERAHALSTVDGYSGYGAEQGEKKLRAAIAATYYADLGIDETDIFVSDGAKCDISRLQVLFGSKVKIAVQDPSYPAYVDSSVIMGQTDLYQQDVQKYGNIEYMRCSPENGFFPDLSKVPRTDIIFFCSPNNPTGAAASRDQLTQLVKFAKDNGSIIVYDSAYAMYISDDSPKSIFEIPGAKEVALETASFSKYAGFTGVRLGWTVVPKELLFSDGHPVAKDFNRIVCTSFNGASTISQAGGLGCLSPEGLKAMQDVVGFYKENTKIIVDTFESLGFNVYGAKNAPYVWVHFPDRNSWDVFAEILEKANVVTTPGSGFGPGGEGFVRVSAFGHRENIIEAARRLKQLYK

SEQ ID NO: 12722 - protein, 349 aa, Triticum aestivum
  peptide (1)..(349): Ceres Seq. ID no. 15221967
  misc_feature (38)..(348): Pfam Name: Pfam Description:  Aminotransferase class I and II
  misc_feature (1)..(349): NCBI GI NO: 37703720 NR Description: putative aminotransferase AGD2
  misc_feature (1)..(349): NCBI GI NO: 18418270 NR Description: aminotransferase family [Arabidopsis thaliana]
  misc_feature (1)..(349): NCBI GI NO: 7447845 NR Description: probable transaminase (EC 2.6.1.-) T16L1.170
  misc_feature (1)..(345): NCBI GI NO: 37703722 NR Description: putative aminotransferase ALD1
  misc_feature (1)..(345): NCBI GI NO: 24414269 NR Description: Putative transaminase
  misc_feature (1)..(348): NCBI GI NO: 25315768 NR Description: probable aspartate aminotransferase
  misc_feature (1)..(348): NCBI GI NO: 18397344 NR Description: aminotransferase family [Arabidopsis thaliana]
  misc_feature (1)..(347): NCBI GI NO: 24213476 NR Description: aminotransferase
  misc_feature (1)..(349): NCBI GI NO: 23124300 NR Description: hypothetical protein [Nostoc punctiforme]
  misc_feature (1)..(347): NCBI GI NO: 23022290 NR Description: hypothetical protein
MAERAHALSTVDGYSGYGAEQGEKKLRAAIAATYYADLGIDETDIFVSDGAKCDISRLQVLFGSKVKIAVQDPSYPAYVDSSVIMGQTDLYQQDVQKYGNIEYMRCSPENGFFPDLSKVPRTDIIFFCSPNNPTGAAASRDQLTQLVKFAKDNGSIIVYDSAYAMYISDDSPKSIFEIPGAKEVALETASFSKYAGFTGVRLGWTVVPKELLFSDGHPVAKDFNRIVCTSFNGASTISQAGGLGCLSPEGLKAMQDVVGFYKENTKIIVDTFESLGFNVYGAKNAPYVWVHFPDRNSWDVFAEILEKANVVTTPGSGFGPGGEGFVRVSAFGHRENIIEAARRLKQLYK

SEQ ID NO: 12723 - protein, 265 aa, Triticum aestivum
  peptide (1)..(265): Ceres Seq. ID no. 15221968
  misc_feature (1)..(264): Pfam Name: Pfam Description:  Aminotransferase class I and II
  misc_feature (1)..(265): NCBI GI NO: 37703720 NR Description: putative aminotransferase AGD2
  misc_feature (1)..(265): NCBI GI NO: 18418270 NR Description: aminotransferase family [Arabidopsis thaliana]
  misc_feature (1)..(265): NCBI GI NO: 7447845 NR Description: probable transaminase (EC 2.6.1.-) T16L1.170
  misc_feature (1)..(261): NCBI GI NO: 37703722 NR Description: putative aminotransferase ALD1
  misc_feature (1)..(261): NCBI GI NO: 24414269 NR Description: Putative transaminase
  misc_feature (1)..(264): NCBI GI NO: 25315768 NR Description: probable aspartate aminotransferase
  misc_feature (1)..(264): NCBI GI NO: 18397344 NR Description: aminotransferase family [Arabidopsis thaliana]
  misc_feature (1)..(263): NCBI GI NO: 24213476 NR Description: aminotransferase
  misc_feature (1)..(265): NCBI GI NO: 23124300 NR Description: hypothetical protein [Nostoc punctiforme]
  misc_feature (1)..(263): NCBI GI NO: 23022290 NR Description: hypothetical protein
MGQTDLYQQDVQKYGNIEYMRCSPENGFFPDLSKVPRTDIIFFCSPNNPTGAAASRDQLTQLVKFAKDNGSIIVYDSAYAMYISDDSPKSIFEIPGAKEVALETASFSKYAGFTGVRLGWTVVPKELLFSDGHPVAKDFNRIVCTSFNGASTISQAGGLGCLSPEGLKAMQDVVGFYKENTKIIVDTFESLGFNVYGAKNAPYVWVHFPDRNSWDVFAEILEKANVVTTPGSGFGPGGEGFVRVSAFGHRENIIEAARRLKQLYK

SEQ ID NO: 12724 - DNA, 1263 bp, Triticum aestivum
  misc_feature (1)..(1263): Ceres Seq. ID no. 14313449
ggcagaactcccgcgactatcaggatcggcggctatacaccgtgaactgcgccactagactaggaagaaaatggggtggaagggcgtcctggggttcgactacggcgtcgtgcaggcaccgctcggccccgacatctccggcccggagctcgccgccgccgtcgccaacgctggcgccataggcctcctccgccttcctgactggccggcgccggaccacgtgagggggttgatacagaggaccaggagcctgaccgagaagccgttcggggcggccatcgtgctggccttcccgcacgaggagaatctgagggtcgtgctggaggagaagctcgccgtgctgcaggtgtactggggcgagttccccaaggagcaggtcgacgaggcccatcgtgccggcgtcaaggtcttgcatcaggttggtaaccttgaggaggcagcaaaagctaaggaagctggtgtagatggaattatcgttcaaggccgcgaagcaggggggcatgtgattggtcaagagggtctgctaccgttgctgccgagagtagtggatctagtttcagatagtactgtttcggttatcgccgctggtggaatcgtagatggccgtggctatgctgctgcattggcacttggtgctcatggtgtttgcttaggaactaggtttgtagccaccgaggaaagctttgcgcatccgctgtataagaaaaagctaattgagatgaattgcacggactatacagctgtgttcgggcgtactagatggcctggtgctccacaacgtgtcctgaagacacctttctatgttgagtggaacaatcttccagatcatgaaacagaggaaaatcagcctattataggtcattctatcatccatggtgtgcacaaggatatatgccggtttgctggtactgttcctaatgcgacaacaacaggcgatatcgatagcatggccatgtatgctggccagagtgttgggctaatcaccgagattgtaccagcaagggaagttgtcaagaggctagtcgctgaagcacagcgtgtcattggagaaaagctttctggtttccccaaatcatcagagtagtgctggtgaagtccttggtaattaaactgttaaggtatctaatggtgtacgctgcgtgttatttgtaggcaatagccaatgaaaataaatgggttttccaaggtattccctttttaccacagttttgtacttgtatgtgttgtttgtaagtatatattcaataaaggtaaatgatttcg

SEQ ID NO: 12725 - protein, 337 aa, Triticum aestivum
  peptide (1)..(337): Ceres Seq. ID no. 14313450
  misc_feature (4)..(320): Pfam Name: Pfam Description:  2-nitropropane dioxygenase
  misc_feature (4)..(330): NCBI GI NO: 30697982 NR Description: 2-nitropropane dioxygenase-related protein
  misc_feature (48)..(330): NCBI GI NO: 30697978 NR Description: 2-nitropropane dioxygenase-related protein
  misc_feature (22)..(334): NCBI GI NO: 38505809 NR Description: 2-nitropropane dioxygenase
  misc_feature (6)..(332): NCBI GI NO: 16127609 NR Description: conserved hypothetical protein
  misc_feature (25)..(243): NCBI GI NO: 15643563 NR Description: conserved hypothetical protein
  misc_feature (233)..(332): NCBI GI NO: 15643563 NR Description: conserved hypothetical protein
  misc_feature (1)..(325): NCBI GI NO: 16799884 NR Description: similar to oxidoreductases [Listeria innocua]
  misc_feature (6)..(325): NCBI GI NO: 20807921 NR Description: Dioxygenases related to 2-nitropropane dioxygenase
  misc_feature (1)..(325): NCBI GI NO: 16802856 NR Description: similar to oxidoreductases
  misc_feature (22)..(326): NCBI GI NO: 23038509 NR Description: hypothetical protein [Oenococcus oeni MCW]
MGWKGVLGFDYGVVQAPLGPDISGPELAAAVANAGAIGLLRLPDWPAPDHVRGLIQRTRSLTEKPFGAAIVLAFPHEENLRVVLEEKLAVLQVYWGEFPKEQVDEAHRAGVKVLHQVGNLEEAAKAKEAGVDGIIVQGREAGGHVIGQEGLLPLLPRVVDLVSDSTVSVIAAGGIVDGRGYAAALALGAHGVCLGTRFVATEESFAHPLYKKKLIEMNCTDYTAVFGRTRWPGAPQRVLKTPFYVEWNNLPDHETEENQPIIGHSIIHGVHKDICRFAGTVPNATTTGDIDSMAMYAGQSVGLITEIVPAREVVKRLVAEAQRVIGEKLSGFPKSSE

SEQ ID NO: 12726 - DNA, 951 bp, Triticum aestivum
  misc_feature (1)..(951): Ceres Seq. ID no. 13654873
cctcctcctccttgtcaaagctagccagcaagaaccaagaagaagcagagcagctcagaaccgagcgcagagcgaagcggagccaaacgaaagaagggacctaacctaacctagccaagccagccggcgatcgaccgagagatggcgcggtggtgtcagctggcggcggtgctgctcgccgtgtcgatggcggcgtcgacgtcggtggcgcaggacgcgctgcagaccaagtgccagggggacctgcagaagctgtcggactgcatggactacgcgacggggcacgaggaaacgccgtcggccaagtgctgcgaggacacggcggacacgcagaaggcgcggcccgagtgcctctgctccatcatccagcaggtgcacagcggcagccacggcgtgcagcagctcggcctccgcttcgaccgcctcctggcccagcccgcagcctgcaagctcacctacgccaacgtctccctctgcatcaacctgctgcacctgaccccgagctcgccagactacgctctcttcgcaaatgcttccaagattactccgtccactgccgcaccggcgagagacaccgccgacggcttcaaggtttcgccgggactcggttacggcgtcgtggcagcggccgtcgtctctgctgtcttctcatccatcttctgattttcggacaagcacacgcccttttatcctctccctttcttctatctgtcatgtttgtttacataaccctgcaagttcccacacaacgacgatgctttagatggtctattatctactcacgtggtaagaggattcgttcggatgacatactgttgttttaccccagataagaagatggaaagttgagacttgtgtttcttcatgtggaagtgatggtttgcagtaatatcctcaaaaaaaaaaaaaaaaaagcttatcgataccgtcgactgtttaaacacaataaag

SEQ ID NO: 12727 - protein, 173 aa, Triticum aestivum
  peptide (1)..(173): Ceres Seq. ID no. 13654874
  misc_feature (31)..(112): Pfam Name: Pfam Description:  Protease inhibitor/seed storage/LTP family
  misc_feature (7)..(172): NCBI GI NO: 21553541 NR Description: lipid transfer protein, putative
  misc_feature (7)..(172): NCBI GI NO: 15217777 NR Description: lipid transfer protein - related
  misc_feature (4)..(168): NCBI GI NO: 25553602 NR Description: OJ1656_E11.34
  misc_feature (1)..(173): NCBI GI NO: 25553595 NR Description: OJ1656_E11.26
  misc_feature (7)..(156): NCBI GI NO: 15224863 NR Description: lipid transfer protein - related
  misc_feature (8)..(158): NCBI GI NO: 15224862 NR Description: lipid transfer protein family
  misc_feature (9)..(157): NCBI GI NO: 28269454 NR Description: putative protease inhibitor
  misc_feature (19)..(148): NCBI GI NO: 18405294 NR Description: protease inhibitor/seed storage/lipid transfer
  misc_feature (19)..(148): NCBI GI NO: 21537387 NR Description: unknown [Arabidopsis thaliana]
  misc_feature (6)..(173): NCBI GI NO: 18403453 NR Description: protease inhibitor/seed storage/lipid transfer
MARWCQLAAVLLAVSMAASTSVAQDALQTKCQGDLQKLSDCMDYATGHEETPSAKCCEDTADTQKARPECLCSIIQQVHSGSHGVQQLGLRFDRLLAQPAACKLTYANVSLCINLLHLTPSSPDYALFANASKITPSTAAPARDTADGFKVSPGLGYGVVAAAVVSAVFSSIF

SEQ ID NO: 12728 - protein, 158 aa, Triticum aestivum
  peptide (1)..(158): Ceres Seq. ID no. 13654875
  misc_feature (16)..(97): Pfam Name: Pfam Description:  Protease inhibitor/seed storage/LTP family
  misc_feature (1)..(157): NCBI GI NO: 21553541 NR Description: lipid transfer protein, putative
  misc_feature (1)..(157): NCBI GI NO: 15217777 NR Description: lipid transfer protein - related
  misc_feature (1)..(153): NCBI GI NO: 25553602 NR Description: OJ1656_E11.34
  misc_feature (1)..(158): NCBI GI NO: 25553595 NR Description: OJ1656_E11.26
  misc_feature (1)..(141): NCBI GI NO: 15224863 NR Description: lipid transfer protein - related
  misc_feature (1)..(143): NCBI GI NO: 15224862 NR Description: lipid transfer protein family
  misc_feature (1)..(142): NCBI GI NO: 28269454 NR Description: putative protease inhibitor
  misc_feature (4)..(133): NCBI GI NO: 18405294 NR Description: protease inhibitor/seed storage/lipid transfer
  misc_feature (4)..(133): NCBI GI NO: 21537387 NR Description: unknown [Arabidopsis thaliana]
  misc_feature (1)..(158): NCBI GI NO: 18403453 NR Description: protease inhibitor/seed storage/lipid transfer
MAASTSVAQDALQTKCQGDLQKLSDCMDYATGHEETPSAKCCEDTADTQKARPECLCSIIQQVHSGSHGVQQLGLRFDRLLAQPAACKLTYANVSLCINLLHLTPSSPDYALFANASKITPSTAAPARDTADGFKVSPGLGYGVVAAAVVSAVFSSIF

SEQ ID NO: 12729 - protein, 132 aa, Triticum aestivum
  peptide (1)..(132): Ceres Seq. ID no. 13654876
  misc_feature (1)..(71): Pfam Name: Pfam Description:  Protease inhibitor/seed storage/LTP family
  misc_feature (1)..(131): NCBI GI NO: 21553541 NR Description: lipid transfer protein, putative
  misc_feature (1)..(131): NCBI GI NO: 15217777 NR Description: lipid transfer protein - related
  misc_feature (1)..(127): NCBI GI NO: 25553602 NR Description: OJ1656_E11.34
  misc_feature (1)..(132): NCBI GI NO: 25553595 NR Description: OJ1656_E11.26
  misc_feature (1)..(115): NCBI GI NO: 15224863 NR Description: lipid transfer protein - related
  misc_feature (1)..(117): NCBI GI NO: 15224862 NR Description: lipid transfer protein family
  misc_feature (1)..(116): NCBI GI NO: 28269454 NR Description: putative protease inhibitor
  misc_feature (1)..(107): NCBI GI NO: 18405294 NR Description: protease inhibitor/seed storage/lipid transfer
  misc_feature (1)..(107): NCBI GI NO: 21537387 NR Description: unknown [Arabidopsis thaliana]
  misc_feature (1)..(132): NCBI GI NO: 18403453 NR Description: protease inhibitor/seed storage/lipid transfer
MDYATGHEETPSAKCCEDTADTQKARPECLCSIIQQVHSGSHGVQQLGLRFDRLLAQPAACKLTYANVSLCINLLHLTPSSPDYALFANASKITPSTAAPARDTADGFKVSPGLGYGVVAAAVVSAVFSSIF

SEQ ID NO: 12730 - DNA, 1330 bp, Triticum aestivum
  misc_feature (1)..(1330): Ceres Seq. ID no. 15226378
attaaaactcggacaggtctccggcggtacgtgacgccaacctcgcgggaagcgccggcgtctgcgcgcgtgcgatcatgatgatgaggcgccagttatcggtctgcgtcctcctcctgctcgtgctcgcggggcagcagcaggcggcggccaagaagtacgccgccatcttcaacttcggggactccctcgtggacgccggcaacctcgtcgtggacggcatccccgagtacctcgccacggcgaagctgccgtatggcatgacctacttcgggtaccccaccggccgctgctccgacggccgcctcgtcgtcgacttcatcgcgcaggagctggggctgccgctgctgccgccgtcgaaggcgcgcaacgccacgttccaccacggcgccaacttcgccatcaccggggccacggcgctggacaccagctacttcgtggcgaaggggctgggcaagacggtgtggaactccggctccctgcacacccagatcaagtggctgcaggagatgaagcccaaaatctgcagctcccccgaagagtgcaggggcctgttccggcggtcgctgttcatcgtgggcgagttcggcggcaacgactacaactcgccgctcttcgcgttccgcccgctggaggaggtgcacgagttcgtgggggacgtcgtcaactccatcggcgagggaatcgagaagctgattgcggagggggccgtggacctggtggtgcccggggtgctcccgatcggctgcttcccggtgtacctgtccatcttccggaagcagccggagatgtacggcggcaagagcgggtgcatcaaggacctcaacacgctgtcgtgggtgcacaacgtggcgctgcagcgcaagatcgtggagctccggaagaagcactccgacgtgcgcatcatgtacgccgactactacacgcccaccatccagttcgtcctccacgccgagaaatgggggatgctgaggcagaagccgagggcgtgctgcggggcgccgggcgtcggggtgtacaacttcaacctgacgtccaagtgcggcgagcccggcgcgtacgcgtgcgacgacccgtccaaccactggagctgggacggcatccacctcacggaggcctcctacggccacatcgccaggggctggctctacggccccttcgccgacccgcccatcgtcggcaaccggaacctcgagtagcactgtagcagcagtagtacagggcttgtttttgcgtacatgcacatgggttactgtatgtagagaaaggaaaagaaatcaaagaacagacatgtcttgtgcagattaattaattattaattaattggttc

SEQ ID NO: 12731 - protein, 373 aa, Triticum aestivum
  peptide (1)..(373): Ceres Seq. ID no. 15226379
  misc_feature (31)..(356): Pfam Name: Pfam Description:  GDSL-like Lipase/Acylhydrolase
  misc_feature (3)..(371): NCBI GI NO: 34903958 NR Description: OSJNBa0038J17.24
  misc_feature (9)..(367): NCBI GI NO: 34903956 NR Description: OSJNBa0038J17.23
  misc_feature (6)..(367): NCBI GI NO: 34903994 NR Description: unnamed protein product
  misc_feature (3)..(367): NCBI GI NO: 34903996 NR Description: unnamed protein product
  misc_feature (1)..(367): NCBI GI NO: 34903978 NR Description: unnamed protein product
  misc_feature (11)..(367): NCBI GI NO: 34903986 NR Description: unnamed protein product
  misc_feature (28)..(357): NCBI GI NO: 34903962 NR Description: OSJNBa0038J17.26
  misc_feature (27)..(364): NCBI GI NO: 15242538 NR Description: GDSL-motif lipase/hydrolase protein
  misc_feature (27)..(364): NCBI GI NO: 21553708 NR Description: GDSL-motif lipase/hydrolase-like protein
  misc_feature (11)..(369): NCBI GI NO: 34903970 NR Description: OSJNBa0038J17.30
MMMRRQLSVCVLLLLVLAGQQQAAAKKYAAIFNFGDSLVDAGNLVVDGIPEYLATAKLPYGMTYFGYPTGRCSDGRLVVDFIAQELGLPLLPPSKARNATFHHGANFAITGATALDTSYFVAKGLGKTVWNSGSLHTQIKWLQEMKPKICSSPEECRGLFRRSLFIVGEFGGNDYNSPLFAFRPLEEVHEFVGDVVNSIGEGIEKLIAEGAVDLVVPGVLPIGCFPVYLSIFRKQPEMYGGKSGCIKDLNTLSWVHNVALQRKIVELRKKHSDVRIMYADYYTPTIQFVLHAEKWGMLRQKPRACCGAPGVGVYNFNLTSKCGEPGAYACDDPSNHWSWDGIHLTEASYGHIARGWLYGPFADPPIVGNRNLE

SEQ ID NO: 12732 - protein, 372 aa, Triticum aestivum
  peptide (1)..(372): Ceres Seq. ID no. 15226380
  misc_feature (30)..(355): Pfam Name: Pfam Description:  GDSL-like Lipase/Acylhydrolase
  misc_feature (2)..(370): NCBI GI NO: 34903958 NR Description: OSJNBa0038J17.24
  misc_feature (8)..(366): NCBI GI NO: 34903956 NR Description: OSJNBa0038J17.23
  misc_feature (5)..(366): NCBI GI NO: 34903994 NR Description: unnamed protein product
  misc_feature (2)..(366): NCBI GI NO: 34903996 NR Description: unnamed protein product
  misc_feature (1)..(366): NCBI GI NO: 34903978 NR Description: unnamed protein product
  misc_feature (10)..(366): NCBI GI NO: 34903986 NR Description: unnamed protein product
  misc_feature (27)..(356): NCBI GI NO: 34903962 NR Description: OSJNBa0038J17.26
  misc_feature (26)..(363): NCBI GI NO: 15242538 NR Description: GDSL-motif lipase/hydrolase protein
  misc_feature (26)..(363): NCBI GI NO: 21553708 NR Description: GDSL-motif lipase/hydrolase-like protein
  misc_feature (10)..(368): NCBI GI NO: 34903970 NR Description: OSJNBa0038J17.30
MMRRQLSVCVLLLLVLAGQQQAAAKKYAAIFNFGDSLVDAGNLVVDGIPEYLATAKLPYGMTYFGYPTGRCSDGRLVVDFIAQELGLPLLPPSKARNATFHHGANFAITGATALDTSYFVAKGLGKTVWNSGSLHTQIKWLQEMKPKICSSPEECRGLFRRSLFIVGEFGGNDYNSPLFAFRPLEEVHEFVGDVVNSIGEGIEKLIAEGAVDLVVPGVLPIGCFPVYLSIFRKQPEMYGGKSGCIKDLNTLSWVHNVALQRKIVELRKKHSDVRIMYADYYTPTIQFVLHAEKWGMLRQKPRACCGAPGVGVYNFNLTSKCGEPGAYACDDPSNHWSWDGIHLTEASYGHIARGWLYGPFADPPIVGNRNLE

SEQ ID NO: 12733 - protein, 371 aa, Triticum aestivum
  peptide (1)..(371): Ceres Seq. ID no. 15226381
  misc_feature (29)..(354): Pfam Name: Pfam Description:  GDSL-like Lipase/Acylhydrolase
  misc_feature (1)..(369): NCBI GI NO: 34903958 NR Description: OSJNBa0038J17.24
  misc_feature (7)..(365): NCBI GI NO: 34903956 NR Description: OSJNBa0038J17.23
  misc_feature (4)..(365): NCBI GI NO: 34903994 NR Description: unnamed protein product
  misc_feature (1)..(365): NCBI GI NO: 34903996 NR Description: unnamed protein product
  misc_feature (1)..(365): NCBI GI NO: 34903978 NR Description: unnamed protein product
  misc_feature (9)..(365): NCBI GI NO: 34903986 NR Description: unnamed protein product
  misc_feature (26)..(355): NCBI GI NO: 34903962 NR Description: OSJNBa0038J17.26
  misc_feature (25)..(362): NCBI GI NO: 15242538 NR Description: GDSL-motif lipase/hydrolase protein
  misc_feature (25)..(362): NCBI GI NO: 21553708 NR Description: GDSL-motif lipase/hydrolase-like protein
  misc_feature (9)..(367): NCBI GI NO: 34903970 NR Description: OSJNBa0038J17.30
MRRQLSVCVLLLLVLAGQQQAAAKKYAAIFNFGDSLVDAGNLVVDGIPEYLATAKLPYGMTYFGYPTGRCSDGRLVVDFIAQELGLPLLPPSKARNATFHHGANFAITGATALDTSYFVAKGLGKTVWNSGSLHTQIKWLQEMKPKICSSPEECRGLFRRSLFIVGEFGGNDYNSPLFAFRPLEEVHEFVGDVVNSIGEGIEKLIAEGAVDLVVPGVLPIGCFPVYLSIFRKQPEMYGGKSGCIKDLNTLSWVHNVALQRKIVELRKKHSDVRIMYADYYTPTIQFVLHAEKWGMLRQKPRACCGAPGVGVYNFNLTSKCGEPGAYACDDPSNHWSWDGIHLTEASYGHIARGWLYGPFADPPIVGNRNLE

SEQ ID NO: 12734 - DNA, 1276 bp, Triticum aestivum
  misc_feature (1)..(1276): Ceres Seq. ID no. 13655193
ttttttctactgctctcgccgctggaacctgacggaaaaaccctacctcgccgtcgccccatcgtcgaacttcccgatggcgtcgaggtgcgcggcgaggcttccgcacccgccgtgcgcggcgccgcagcacggttgggcgagctcgcgggtctcggcacgcccggcgcaatccggcgcgtcaagagggcgtgccgtcgcgtgcgccgtcagcttcaggccatgtatcgacattcacaaggggaaagttaaacagattgttggctctactctccgggatgcatcggatgatggcactgcactggtgacgaactttgaatcagacaagtctccagcagaatttgcaaatatttataaagaagatggacttgttggtggacatgtaataatgcttggcggagaccctgcaagccgttctgctgccctggaagcactgcatgcatatcctggtggtttgcaagttggaggtggaataaatttggagaatgcaatgtcataccttaatgaaggagcaagtcacgtgattgtaacttcttatgtgtttagtgatggcaaaatgaacattgaaaggctaacgcaacttgtcgagcttgttgggaaacaaaggcttattttggacctgagttgtcggaaaaaggatggcagatatgccattgtgactgacagatggcagaagttcagtgatgtctttgtggatgggccaacattagaacgtcttgctgcatatgcagatgagtttttggttcatggagttgatgtggagggcaaaaggttaggaattgacgaggaacttgtggaactattgggaagccattcacctatcccgacaacatatgctgggggtgtgtcaacgatggacgacctggagaggatcaagaaagcagggaaaggtcgagtcgatgtcactgtcgggagtgccctagacatattcgggggagatttgccctacgatactgttgtccgttggcacaaggagcaaaacctggttagccaacggtgaagaaatcagatgatctttttatagagcaaatgatcgaagttcagctcatgtgtgatccccacctgaccatggtcaggtcaggttatagagctttattgtttgctggacattgtagtgtgaaccgcgtagtgtgaatgtgtcttgtgtgacatgtcaaagctgaagcggaggtgtcaactcagtgtcgtagaggaccacccggtattcagatactgttcttcacattctgtttgtattgtagtactggtaatggtgaataaacaggggttgaactgc

SEQ ID NO: 12735 - protein, 332 aa, Triticum aestivum
  peptide (1)..(332): Ceres Seq. ID no. 13655194
  misc_feature (74)..(323): Pfam Name: Pfam Description:  Histidine biosynthesis protein
  misc_feature (58)..(327): NCBI GI NO: 15227607 NR Description: phosphoribosylformimino-5- aminoimidazolecarboxamide ribotide isomerase
  misc_feature (72)..(324): NCBI GI NO: 19114853 NR Description: probable phosphoribosylformimino-5- aminoimidazolecarboxamide ribotideisomerase
  misc_feature (72)..(326): NCBI GI NO: 32403246 NR Description: hypothetical protein [Neurospora crassa]
  misc_feature (72)..(326): NCBI GI NO: 38105940 NR Description: hypothetical protein MG04998.4
  misc_feature (72)..(324): NCBI GI NO: 10444341 NR Description: 5-proFAR isomerase [Candida albicans]
  misc_feature (72)..(326): NCBI GI NO: 6322169 NR Description: phosphoribosyl-5-amino-1-phosphoribosyl-4- imidazolecarboxiamide isomerase
  misc_feature (72)..(237): NCBI GI NO: 40745248 NR Description: hypothetical protein AN2293.2
  misc_feature (74)..(314): NCBI GI NO: 20093802 NR Description: Phosphoribosylformimino-5- aminoimidazolecarboxamide ribonucleotide
  misc_feature (110)..(307): NCBI GI NO: 15669727 NR Description: phosphoribosylformimino-5- aminoimidazolecarboxamide ribotide isomerase
  misc_feature (74)..(307): NCBI GI NO: 2498448 NR Description: 1-(5-phosphoribosyl)-5-
FFYCSRRWNLTEKPYLAVAPSSNFPMASRCAARLPHPPCAAPQHGWASSRVSARPAQSGASRGRAVACAVSFRPCIDIHKGKVKQIVGSTLRDASDDGTALVTNFESDKSPAEFANIYKEDGLVGGHVIMLGGDPASRSAALEALHAYPGGLQVGGGINLENAMSYLNEGASHVIVTSYVFSDGKMNIERLTQLVELVGKQRLILDLSCRKKDGRYAIVTDRWQKFSDVFVDGPTLERLAAYADEFLVHGVDVEGKRLGIDEELVELLGSHSPIPTTYAGGVSTMDDLERIKKAGKGRVDVTVGSALDIFGGDLPYDTVVRWHKEQNLVSQR

SEQ ID NO: 12736 - protein, 307 aa, Triticum aestivum
  peptide (1)..(307): Ceres Seq. ID no. 13655195
  misc_feature (49)..(298): Pfam Name: Pfam Description:  Histidine biosynthesis protein
  misc_feature (33)..(302): NCBI GI NO: 15227607 NR Description: phosphoribosylformimino-5- aminoimidazolecarboxamide ribotide isomerase
  misc_feature (47)..(299): NCBI GI NO: 19114853 NR Description: probable phosphoribosylformimino-5- aminoimidazolecarboxamide ribotideisomerase
  misc_feature (47)..(301): NCBI GI NO: 32403246 NR Description: hypothetical protein [Neurospora crassa]
  misc_feature (47)..(301): NCBI GI NO: 38105940 NR Description: hypothetical protein MG04998.4
  misc_feature (47)..(299): NCBI GI NO: 10444341 NR Description: 5-proFAR isomerase [Candida albicans]
  misc_feature (47)..(301): NCBI GI NO: 6322169 NR Description: phosphoribosyl-5-amino-1-phosphoribosyl-4- imidazolecarboxiamide isomerase
  misc_feature (47)..(212): NCBI GI NO: 40745248 NR Description: hypothetical protein AN2293.2
  misc_feature (49)..(289): NCBI GI NO: 20093802 NR Description: Phosphoribosylformimino-5- aminoimidazolecarboxamide ribonucleotide
  misc_feature (85)..(282): NCBI GI NO: 15669727 NR Description: phosphoribosylformimino-5- aminoimidazolecarboxamide ribotide isomerase
  misc_feature (49)..(282): NCBI GI NO: 2498448 NR Description: 1-(5-phosphoribosyl)-5-
MASRCAARLPHPPCAAPQHGWASSRVSARPAQSGASRGRAVACAVSFRPCIDIHKGKVKQIVGSTLRDASDDGTALVTNFESDKSPAEFANIYKEDGLVGGHVIMLGGDPASRSAALEALHAYPGGLQVGGGINLENAMSYLNEGASHVIVTSYVFSDGKMNIERLTQLVELVGKQRLILDLSCRKKDGRYAIVTDRWQKFSDVFVDGPTLERLAAYADEFLVHGVDVEGKRLGIDEELVELLGSHSPIPTTYAGGVSTMDDLERIKKAGKGRVDVTVGSALDIFGGDLPYDTVVRWHKEQNLVSQR

SEQ ID NO: 12737 - protein, 203 aa, Triticum aestivum
  peptide (1)..(203): Ceres Seq. ID no. 13655196
  misc_feature (1)..(194): Pfam Name: Pfam Description:  Histidine biosynthesis protein
  misc_feature (1)..(198): NCBI GI NO: 15227607 NR Description: phosphoribosylformimino-5- aminoimidazolecarboxamide ribotide isomerase
  misc_feature (1)..(195): NCBI GI NO: 19114853 NR Description: probable phosphoribosylformimino-5- aminoimidazolecarboxamide ribotideisomerase
  misc_feature (1)..(197): NCBI GI NO: 32403246 NR Description: hypothetical protein [Neurospora crassa]
  misc_feature (1)..(197): NCBI GI NO: 38105940 NR Description: hypothetical protein MG04998.4
  misc_feature (1)..(195): NCBI GI NO: 10444341 NR Description: 5-proFAR isomerase [Candida albicans]
  misc_feature (1)..(197): NCBI GI NO: 6322169 NR Description: phosphoribosyl-5-amino-1-phosphoribosyl-4- imidazolecarboxiamide isomerase
  misc_feature (1)..(108): NCBI GI NO: 40745248 NR Description: hypothetical protein AN2293.2
  misc_feature (1)..(185): NCBI GI NO: 20093802 NR Description: Phosphoribosylformimino-5- aminoimidazolecarboxamide ribonucleotide
  misc_feature (1)..(178): NCBI GI NO: 15669727 NR Description: phosphoribosylformimino-5- aminoimidazolecarboxamide ribotide isomerase
  misc_feature (1)..(178): NCBI GI NO: 2498448 NR Description: 1-(5-phosphoribosyl)-5-
MLGGDPASRSAALEALHAYPGGLQVGGGINLENAMSYLNEGASHVIVTSYVFSDGKMNIERLTQLVELVGKQRLILDLSCRKKDGRYAIVTDRWQKFSDVFVDGPTLERLAAYADEFLVHGVDVEGKRLGIDEELVELLGSHSPIPTTYAGGVSTMDDLERIKKAGKGRVDVTVGSALDIFGGDLPYDTVVRWHKEQNLVSQR

SEQ ID NO: 12738 - DNA, 1647 bp, Triticum aestivum
  misc_feature (1)..(1647): Ceres Seq. ID no. 13598741
agaacatcctaatcgaaaaacaagcagagtctcttggctgcacccgtcaccggtgcccccttcttcgtcagcctgcaatctccactcacctcactcccactccccctcccaccccccactcttctacacatcgaggacgaaagggtggtgagggagccgggggcctgagggggctagctgctaggcggaggaggggatggagcgagggctcgcattgctgggtctggggctggcgcttcttctgctggcgccctctcgtcgtctcgcctcggccgctccggtggaggacggcctgctcatgaatggtgatttcgagacagcaccacctggcggtttcgtcaaatcggcttcagtttccgagggcgcggcgatcccaagctggacgatcaatggaacagttgagctcatttccgcaggccagcaccagggtggcatgatccttattgttccacaaggggatcatgctgtgcggctagggaatgatgcaggcattgggcaggtggtggaggttgagaagggctcagagtacgcgatcacattcagtgccgcccggacctgcgcgcagctggagtcactgaacatctccgccgggagcgtatcacagacagtcgacttgcagacactttacagcatagaaggctgggatgcatatgccctggctttccaagcagtggatgagcaggcgagcattgagtttaggaaccctggcatggaggacgacccgacctgcgggcctatccttgacaacgtggccatcaagaagctcttctcccccgacaaagcaaaggagaacatggtgatcaatggagactttgaggaggggccatggatgtttccaaacacaagcttcggtgtcctgctcccgacgaaccttgacgagcagacatcggccttgccagggtggatgatcgagtcgaaccgcgcagtccgcttcgtcgactccgaccagtacaccgtgccccaggggaagcgcgccatcgagcttctctccggcaaggagggcatcatctcgcagatggtggagacgacccctcagaaggcgtacaccctgacgttcacgctgggctcggcaggcgactcgtgccagccgccaatggctgtcatggcattcgccggcgaccaggcccagaacttccactactcccccatgggcaacgccacgagccaggccgtgaacgtgaacttcacggcgcgcgccgagaggacacgcgttgcgctctacagcgtctactacaacacgagaagcgacgaccacagctcgctctgcgggccggtgatagacgacgtccgtgtctggggcttgaatggggctgctgggttgaaggcaagtattgcgctgcttattgccatggctagtgtcatcgttctcgtgctgttctgatctcctgaatatacgtatgtaacctcccctgcaagggcgaggaggccactagttttgttagtaagcttgaggtttctatgagattgatgagtaatgtgagcttaggctaaagctaccagtagctataaatggttgttttgttgctttcttgtgtgattcagaaagtagcaaaccatgatgggattgagtggtcactgagccaagggcttgcaatgtgagatgtaagaattgttacaagttcatctcttcaatgcattagaaagtcc

SEQ ID NO: 12739 - protein, 394 aa, Triticum aestivum
  peptide (1)..(394): Ceres Seq. ID no. 13598742
  misc_feature (48)..(370): Pfam Name: Pfam Description:  Protein of unknown function, DUF642
  misc_feature (3)..(394): NCBI GI NO: 34909656 NR Description: OJ1414_E05.5
  misc_feature (147)..(394): NCBI GI NO: 34913458 NR Description: P0702H08.18
  misc_feature (3)..(86): NCBI GI NO: 34913458 NR Description: P0702H08.18
  misc_feature (5)..(390): NCBI GI NO: 15226760 NR Description: expressed protein [Arabidopsis thaliana]
  misc_feature (5)..(392): NCBI GI NO: 18397308 NR Description: expressed protein [Arabidopsis thaliana]
  misc_feature (9)..(366): NCBI GI NO: 7488898 NR Description: hypothetical protein - castor bean
  misc_feature (10)..(366): NCBI GI NO: 18418018 NR Description: expressed protein [Arabidopsis thaliana]
  misc_feature (12)..(366): NCBI GI NO: 15220093 NR Description: expressed protein [Arabidopsis thaliana]
  misc_feature (9)..(366): NCBI GI NO: 23397043 NR Description: unknown protein [Arabidopsis thaliana]
  misc_feature (9)..(366): NCBI GI NO: 15239049 NR Description: expressed protein [Arabidopsis thaliana]
MERGLALLGLGLALLLLAPSRRLASAAPVEDGLLMNGDFETAPPGGFVKSASVSEGAAIPSWTINGTVELISAGQHQGGMILIVPQGDHAVRLGNDAGIGQVVEVEKGSEYAITFSAARTCAQLESLNISAGSVSQTVDLQTLYSIEGWDAYALAFQAVDEQASIEFRNPGMEDDPTCGPILDNVAIKKLFSPDKAKENMVINGDFEEGPWMFPNTSFGVLLPTNLDEQTSALPGWMIESNRAVRFVDSDQYTVPQGKRAIELLSGKEGIISQMVETTPQKAYTLTFTLGSAGDSCQPPMAVMAFAGDQAQNFHYSPMGNATSQAVNVNFTARAERTRVALYSVYYNTRSDDHSSLCGPVIDDVRVWGLNGAAGLKASIALLIAMASVIVLVLF

SEQ ID NO: 12740 - protein, 360 aa, Triticum aestivum
  peptide (1)..(360): Ceres Seq. ID no. 13598743
  misc_feature (14)..(336): Pfam Name: Pfam Description:  Protein of unknown function, DUF642
  misc_feature (1)..(360): NCBI GI NO: 34909656 NR Description: OJ1414_E05.5
  misc_feature (113)..(360): NCBI GI NO: 34913458 NR Description: P0702H08.18
  misc_feature (1)..(52): NCBI GI NO: 34913458 NR Description: P0702H08.18
  misc_feature (1)..(356): NCBI GI NO: 15226760 NR Description: expressed protein [Arabidopsis thaliana]
  misc_feature (1)..(358): NCBI GI NO: 18397308 NR Description: expressed protein [Arabidopsis thaliana]
  misc_feature (1)..(332): NCBI GI NO: 7488898 NR Description: hypothetical protein - castor bean
  misc_feature (1)..(332): NCBI GI NO: 18418018 NR Description: expressed protein [Arabidopsis thaliana]
  misc_feature (1)..(332): NCBI GI NO: 15220093 NR Description: expressed protein [Arabidopsis thaliana]
  misc_feature (1)..(332): NCBI GI NO: 23397043 NR Description: unknown protein [Arabidopsis thaliana]
  misc_feature (1)..(332): NCBI GI NO: 15239049 NR Description: expressed protein [Arabidopsis thaliana]
MNGDFETAPPGGFVKSASVSEGAAIPSWTINGTVELISAGQHQGGMILIVPQGDHAVRLGNDAGIGQVVEVEKGSEYAITFSAARTCAQLESLNISAGSVSQTVDLQTLYSIEGWDAYALAFQAVDEQASIEFRNPGMEDDPTCGPILDNVAIKKLFSPDKAKENMVINGDFEEGPWMFPNTSFGVLLPTNLDEQTSALPGWMIESNRAVRFVDSDQYTVPQGKRAIELLSGKEGIISQMVETTPQKAYTLTFTLGSAGDSCQPPMAVMAFAGDQAQNFHYSPMGNATSQAVNVNFTARAERTRVALYSVYYNTRSDDHSSLCGPVIDDVRVWGLNGAAGLKASIALLIAMASVIVLVLF

SEQ ID NO: 12741 - protein, 315 aa, Triticum aestivum
  peptide (1)..(315): Ceres Seq. ID no. 13598744
  misc_feature (1)..(291): Pfam Name: Pfam Description:  Protein of unknown function, DUF642
  misc_feature (1)..(315): NCBI GI NO: 34909656 NR Description: OJ1414_E05.5
  misc_feature (68)..(315): NCBI GI NO: 34913458 NR Description: P0702H08.18
  misc_feature (1)..(311): NCBI GI NO: 15226760 NR Description: expressed protein [Arabidopsis thaliana]
  misc_feature (1)..(313): NCBI GI NO: 18397308 NR Description: expressed protein [Arabidopsis thaliana]
  misc_feature (1)..(287): NCBI GI NO: 7488898 NR Description: hypothetical protein - castor bean
  misc_feature (1)..(287): NCBI GI NO: 18418018 NR Description: expressed protein [Arabidopsis thaliana]
  misc_feature (1)..(287): NCBI GI NO: 15220093 NR Description: expressed protein [Arabidopsis thaliana]
  misc_feature (1)..(287): NCBI GI NO: 23397043 NR Description: unknown protein [Arabidopsis thaliana]
  misc_feature (1)..(287): NCBI GI NO: 15239049 NR Description: expressed protein [Arabidopsis thaliana]
  misc_feature (1)..(287): NCBI GI NO: 21554402 NR Description: unknown [Arabidopsis thaliana]
MILIVPQGDHAVRLGNDAGIGQVVEVEKGSEYAITFSAARTCAQLESLNISAGSVSQTVDLQTLYSIEGWDAYALAFQAVDEQASIEFRNPGMEDDPTCGPILDNVAIKKLFSPDKAKENMVINGDFEEGPWMFPNTSFGVLLPTNLDEQTSALPGWMIESNRAVRFVDSDQYTVPQGKRAIELLSGKEGIISQMVETTPQKAYTLTFTLGSAGDSCQPPMAVMAFAGDQAQNFHYSPMGNATSQAVNVNFTARAERTRVALYSVYYNTRSDDHSSLCGPVIDDVRVWGLNGAAGLKASIALLIAMASVIVLVLF

SEQ ID NO: 12742 - DNA, 1055 bp, Triticum aestivum
  misc_feature (1)..(1055): Ceres Seq. ID no. 12627566
cccgactccgccgagctcatttccctcaccccctctctatcttcgtcgccgccgccggcgccgccgggacgccgtaccccgcctccctggacccgatagctcctcgcgtccacttcgttcgacgaggaaattctttgggtgactgcaggagatggcggcgttcctgaggtcaaagtgctcgtcagttgggcgtacgttgatgggaagcgttggaaacaatctgtatgggggtatcaattcgtctgctgaaacagtgacaagaccatctcactgtgacgctatcagccagcaaatcaggacattcatccagatgagaaccaacctcaaggtggtagacaactctggagccaagagggtcatgtgcatacagtccttgagggggaagaaaggagctaggcttggggacatgataattggttctgtgaaggaagcgcaacctcgtggcaaggtcaagaaaggtgatgtggtctacggtgtggttgtccgtgccgctatgaagaaaggacgcagtgacggcagcgaggtccagtttgatgacaacgctatcgtcatcgtgaacaacaaaggcgagctgattggcactcgcgtcttcggtcctgttcctcatgagctcaggaagaagaagcatctcaagatcttggcgttggctgaacacatagtttgagaccttaccctgcttagtcatatctcttttatttccacatggagcggaattaacattgctccagagatattttggttgcccctgctgccattccacctttcctttggtaatttgtgtttggaagaatgatgtaccctaaaaggagaatgtgtaccaaactatagggagccctcggcagatcaagttttgtagcacatttaatctgaatgttttgctgcaacggcgaaaatatgttccttatttgctctgttttacctggatcatcacgcgctgcctgtaattttctgcttattgatttagtacatttacagagtgtcctatcattacattcctggaacatgaggaggacagacttccattttcacaacatataacatttgctccctgcttc

SEQ ID NO: 12743 - protein, 170 aa, Triticum aestivum
  peptide (1)..(170): Ceres Seq. ID no. 12627567
  misc_feature (52)..(170): Pfam Name: Pfam Description:  Ribosomal protein L14p/L23e
  misc_feature (1)..(170): NCBI GI NO: 18140856 NR Description: HUELLENLOS-like protein [Oryza sativa]
  misc_feature (1)..(169): NCBI GI NO: 30694896 NR Description: ribosomal protein L14p family
  misc_feature (1)..(169): NCBI GI NO: 20260394 NR Description: unknown protein [Arabidopsis thaliana]
  misc_feature (1)..(169): NCBI GI NO: 30694900 NR Description: ribosomal protein L14p family
  misc_feature (54)..(169): NCBI GI NO: 9757736 NR Description: 50S ribosomal protein L14 [Arabidopsis thaliana]
  misc_feature (1)..(138): NCBI GI NO: 8778471 NR Description: F1L3.27 [Arabidopsis thaliana]
  misc_feature (1)..(138): NCBI GI NO: 15220161 NR Description: ribosomal protein, putative; protein id:At1g17560
  misc_feature (1)..(138): NCBI GI NO: 18140858 NR Description: HUELLENLOS [Arabidopsis thaliana]
  misc_feature (52)..(170): NCBI GI NO: 15889233 NR Description: AGR_C_3539p [Agrobacterium tumefaciens]
  misc_feature (52)..(170): NCBI GI NO: 15965119 NR Description: PROBABLE 50S RIBOSOMAL PROTEIN L14
MAAFLRSKCSSVGRTLMGSVGNNLYGGINSSAETVTRPSHCDAISQQIRTFIQMRTNLKVVDNSGAKRVMCIQSLRGKKGARLGDMIIGSVKEAQPRGKVKKGDVVYGVVVRAAMKKGRSDGSEVQFDDNAIVIVNNKGELIGTRVFGPVPHELRKKKHLKILALAEHIV

SEQ ID NO: 12744 - protein, 154 aa, Triticum aestivum
  peptide (1)..(154): Ceres Seq. ID no. 12627568
  misc_feature (36)..(154): Pfam Name: Pfam Description:  Ribosomal protein L14p/L23e
  misc_feature (1)..(154): NCBI GI NO: 18140856 NR Description: HUELLENLOS-like protein [Oryza sativa]
  misc_feature (1)..(153): NCBI GI NO: 30694896 NR Description: ribosomal protein L14p family
  misc_feature (1)..(153): NCBI GI NO: 20260394 NR Description: unknown protein [Arabidopsis thaliana]
  misc_feature (1)..(153): NCBI GI NO: 30694900 NR Description: ribosomal protein L14p family
  misc_feature (38)..(153): NCBI GI NO: 9757736 NR Description: 50S ribosomal protein L14 [Arabidopsis thaliana]
  misc_feature (1)..(122): NCBI GI NO: 8778471 NR Description: F1L3.27 [Arabidopsis thaliana]
  misc_feature (1)..(122): NCBI GI NO: 15220161 NR Description: ribosomal protein, putative; protein id:At1g17560
  misc_feature (1)..(122): NCBI GI NO: 18140858 NR Description: HUELLENLOS [Arabidopsis thaliana]
  misc_feature (36)..(154): NCBI GI NO: 15889233 NR Description: AGR_C_3539p [Agrobacterium tumefaciens]
  misc_feature (36)..(154): NCBI GI NO: 15965119 NR Description: PROBABLE 50S RIBOSOMAL PROTEIN L14
MGSVGNNLYGGINSSAETVTRPSHCDAISQQIRTFIQMRTNLKVVDNSGAKRVMCIQSLRGKKGARLGDMIIGSVKEAQPRGKVKKGDVVYGVVVRAAMKKGRSDGSEVQFDDNAIVIVNNKGELIGTRVFGPVPHELRKKKHLKILALAEHIV

SEQ ID NO: 12745 - protein, 117 aa, Triticum aestivum
  peptide (1)..(117): Ceres Seq. ID no. 12627569
  misc_feature (1)..(117): Pfam Name: Pfam Description:  Ribosomal protein L14p/L23e
  misc_feature (1)..(117): NCBI GI NO: 18140856 NR Description: HUELLENLOS-like protein [Oryza sativa]
  misc_feature (1)..(116): NCBI GI NO: 30694896 NR Description: ribosomal protein L14p family
  misc_feature (1)..(116): NCBI GI NO: 20260394 NR Description: unknown protein [Arabidopsis thaliana]
  misc_feature (1)..(116): NCBI GI NO: 30694900 NR Description: ribosomal protein L14p family
  misc_feature (1)..(116): NCBI GI NO: 9757736 NR Description: 50S ribosomal protein L14 [Arabidopsis thaliana]
  misc_feature (1)..(85): NCBI GI NO: 8778471 NR Description: F1L3.27 [Arabidopsis thaliana]
  misc_feature (1)..(85): NCBI GI NO: 15220161 NR Description: ribosomal protein, putative; protein id:At1g17560
  misc_feature (1)..(85): NCBI GI NO: 18140858 NR Description: HUELLENLOS [Arabidopsis thaliana]
  misc_feature (1)..(117): NCBI GI NO: 15889233 NR Description: AGR_C_3539p [Agrobacterium tumefaciens]
  misc_feature (1)..(117): NCBI GI NO: 15965119 NR Description: PROBABLE 50S RIBOSOMAL PROTEIN L14
MRTNLKVVDNSGAKRVMCIQSLRGKKGARLGDMIIGSVKEAQPRGKVKKGDVVYGVVVRAAMKKGRSDGSEVQFDDNAIVIVNNKGELIGTRVFGPVPHELRKKKHLKILALAEHIV

SEQ ID NO: 12746 - DNA, 1154 bp, Triticum aestivum
  misc_feature (1)..(1154): Ceres Seq. ID no. 13598387
agcctctccgagaggccaagcagaaatggcggcttcctgcacgctcaccgtccccgcccccttcgccgccgcctcctcctcctcctccacttcagcccgtcgctacaggcgattcggggtggttgccatggcgagcgcggggcagaaggtgtacgctcccggcgtggccgtctccgagggcaacggcggcctgcccaagatcagcctcaaatccccgcacgggagtgaggctgagatttatctgtttggagcatgcgtcacgtcttggaaggttcccaatggaaaggatctgctctttgtcagaccagatgctgtgttcaacggccagaaacccatcagcggtggaattccacattgttttccccagtttggccctggccccatgcagcagcatggattcgcaaggaatgtgaattggtctattactgattcagaagtcacagaaggagatccaactgtaactttggaactaaaagacgactcatacagccgttcaatgtgggattttagtttccaagctttatacaaggttgtgctgcactctacaagcctgtcaacgaccctcaaaataataaatacagacgataaacctttctcattcacctcagccctccacacttatttcagtgcttccattgctggtgtttcagtgaaaggtctcaaaggtagcaagactctcaataaggatcctgaccctaaaaatcctctggagggcaaagaagaaagggacgaggtgacctttccaggatttgtggactgtgtttaccttggcgcaccgagtgagcttaccctcgacaatggattgggtgacaaaattgtaatctcaaacacaaactggtcagatgcagtgttgtggaatcctcatttgcagatggaggcatgctacaaagattttgtttgtgttgaaaatgcaaagattgaaacagtacaactgggtccaaaagaatcttgggtggcagagcagaaaattgaacttatctgaagctaatgggttgagaacagtacagtgcggcgagtatgttgtcaaaggacctttttatgtgtctgccaatgtaaacatgtgccattccccaatgtacttcaacttatgccctcacatgagatgtacatcttataactattttatgttttatgagtaaataagtatttcagtc

SEQ ID NO: 12747 - protein, 326 aa, Triticum aestivum
  peptide (1)..(326): Ceres Seq. ID no. 13598388
  misc_feature (65)..(321): Pfam Name: Pfam Description:  Aldose 1-epimerase
  misc_feature (28)..(325): NCBI GI NO: 15240009 NR Description: aldose 1-epimerase family [Arabidopsis thaliana]
  misc_feature (20)..(326): NCBI GI NO: 6970044 NR Description: apospory-associated protein C; APOC
  misc_feature (52)..(307): NCBI GI NO: 38344152 NR Description: OSJNBa0041A02.19
  misc_feature (53)..(307): NCBI GI NO: 40253263 NR Description: putative Aldose 1-epimerase
  misc_feature (27)..(307): NCBI GI NO: 19387263 NR Description: putative apospory-associated protein C
  misc_feature (39)..(307): NCBI GI NO: 2501555 NR Description: POSSIBLE APOSPORY-ASSOCIATED PROTEIN C
  misc_feature (57)..(307): NCBI GI NO: 15242099 NR Description: aldose 1-epimerase family [Arabidopsis thaliana]
  misc_feature (58)..(317): NCBI GI NO: 21593295 NR Description: possible apospory-associated like protein
  misc_feature (58)..(317): NCBI GI NO: 18416643 NR Description: aldose 1-epimerase family [Arabidopsis thaliana]
  misc_feature (58)..(326): NCBI GI NO: 16612258 NR Description: AT3g01590/F4P13_13 [Arabidopsis thaliana]
ASPRGQAEMAASCTLTVPAPFAAASSSSSTSARRYRRFGVVAMASAGQKVYAPGVAVSEGNGGLPKISLKSPHGSEAEIYLFGACVTSWKVPNGKDLLFVRPDAVFNGQKPISGGIPHCFPQFGPGPMQQHGFARNVNWSITDSEVTEGDPTVTLELKDDSYSRSMWDFSFQALYKVVLHSTSLSTTLKIINTDDKPFSFTSALHTYFSASIAGVSVKGLKGSKTLNKDPDPKNPLEGKEERDEVTFPGFVDCVYLGAPSELTLDNGLGDKIVISNTNWSDAVLWNPHLQMEACYKDFVCVENAKIETVQLGPKESWVAEQKIELI

SEQ ID NO: 12748 - protein, 318 aa, Triticum aestivum
  peptide (1)..(318): Ceres Seq. ID no. 13598389
  misc_feature (57)..(313): Pfam Name: Pfam Description:  Aldose 1-epimerase
  misc_feature (20)..(317): NCBI GI NO: 15240009 NR Description: aldose 1-epimerase family [Arabidopsis thaliana]
  misc_feature (12)..(318): NCBI GI NO: 6970044 NR Description: apospory-associated protein C; APOC
  misc_feature (44)..(299): NCBI GI NO: 38344152 NR Description: OSJNBa0041A02.19
  misc_feature (45)..(299): NCBI GI NO: 40253263 NR Description: putative Aldose 1-epimerase
  misc_feature (19)..(299): NCBI GI NO: 19387263 NR Description: putative apospory-associated protein C
  misc_feature (31)..(299): NCBI GI NO: 2501555 NR Description: POSSIBLE APOSPORY-ASSOCIATED PROTEIN C
  misc_feature (49)..(299): NCBI GI NO: 15242099 NR Description: aldose 1-epimerase family [Arabidopsis thaliana]
  misc_feature (50)..(309): NCBI GI NO: 21593295 NR Description: possible apospory-associated like protein
  misc_feature (50)..(309): NCBI GI NO: 18416643 NR Description: aldose 1-epimerase family [Arabidopsis thaliana]
  misc_feature (50)..(318): NCBI GI NO: 16612258 NR Description: AT3g01590/F4P13_13 [Arabidopsis thaliana]
MAASCTLTVPAPFAAASSSSSTSARRYRRFGVVAMASAGQKVYAPGVAVSEGNGGLPKISLKSPHGSEAEIYLFGACVTSWKVPNGKDLLFVRPDAVFNGQKPISGGIPHCFPQFGPGPMQQHGFARNVNWSITDSEVTEGDPTVTLELKDDSYSRSMWDFSFQALYKVVLHSTSLSTTLKIINTDDKPFSFTSALHTYFSASIAGVSVKGLKGSKTLNKDPDPKNPLEGKEERDEVTFPGFVDCVYLGAPSELTLDNGLGDKIVISNTNWSDAVLWNPHLQMEACYKDFVCVENAKIETVQLGPKESWVAEQKIELI

SEQ ID NO: 12749 - protein, 284 aa, Triticum aestivum
  peptide (1)..(284): Ceres Seq. ID no. 13598390
  misc_feature (23)..(279): Pfam Name: Pfam Description:  Aldose 1-epimerase
  misc_feature (1)..(283): NCBI GI NO: 15240009 NR Description: aldose 1-epimerase family [Arabidopsis thaliana]
  misc_feature (1)..(284): NCBI GI NO: 6970044 NR Description: apospory-associated protein C; APOC
  misc_feature (10)..(265): NCBI GI NO: 38344152 NR Description: OSJNBa0041A02.19
  misc_feature (11)..(265): NCBI GI NO: 40253263 NR Description: putative Aldose 1-epimerase
  misc_feature (1)..(265): NCBI GI NO: 19387263 NR Description: putative apospory-associated protein C
  misc_feature (1)..(265): NCBI GI NO: 2501555 NR Description: POSSIBLE APOSPORY-ASSOCIATED PROTEIN C
  misc_feature (15)..(265): NCBI GI NO: 15242099 NR Description: aldose 1-epimerase family [Arabidopsis thaliana]
  misc_feature (16)..(275): NCBI GI NO: 21593295 NR Description: possible apospory-associated like protein
  misc_feature (16)..(275): NCBI GI NO: 18416643 NR Description: aldose 1-epimerase family [Arabidopsis thaliana]
  misc_feature (16)..(284): NCBI GI NO: 16612258 NR Description: AT3g01590/F4P13_13 [Arabidopsis thaliana]
MASAGQKVYAPGVAVSEGNGGLPKISLKSPHGSEAEIYLFGACVTSWKVPNGKDLLFVRPDAVFNGQKPISGGIPHCFPQFGPGPMQQHGFARNVNWSITDSEVTEGDPTVTLELKDDSYSRSMWDFSFQALYKVVLHSTSLSTTLKIINTDDKPFSFTSALHTYFSASIAGVSVKGLKGSKTLNKDPDPKNPLEGKEERDEVTFPGFVDCVYLGAPSELTLDNGLGDKIVISNTNWSDAVLWNPHLQMEACYKDFVCVENAKIETVQLGPKESWVAEQKIELI

SEQ ID NO: 12750 - DNA, 1331 bp, Triticum aestivum
  misc_feature (1)..(1331): Ceres Seq. ID no. 12615466
  misc_feature (635)..(635): n is a, c, t, g, unknown, or other
aaaaccaacagcaagcaaccatggcttcttatgacaaacaattcaaggttctcgaggtacctccgatcgtgcaagagctggtgggcgccggcgtgcaggagccaccgagccagtacgtgcttcctgagcaagaccgtcccgccgcggcggtctccgagatgcccgagcccatccccatcatcgacctcagccggctgtctgccggcagcgccgaagagttcgacaagctgcggtccgccttggagaactgggacctcttcctggctgttggacatggaatggagcctagctttcttgccgaggcgatgaagtccacgatagagttcttcaacctcccactggaagagaaacagaagtactcaaacattgtcgacggcgagaagctgggcatggatggatacggtaacgacatggtcgtgaaagagaatcaggtccttgactggaacgaccggctcaatctcctagtggaacccgaggccctaagaacctacagactgtggccaacacaacccccttctttcagagacatcctgtctgagtacacggtcaggtgcaaagcggcggctaaccttgtctttcgaaacatggccaagatactcaatttacaagaggaacacctggtaaacatgatcggngagaactccatcacccaagctatattcaactattaccctcagtgtccaaggccggaccacgtcttgggcctcaaggcccataccgatggctccataatcacagtcaacttcgccgatgctgaggggctccagcttcagagaaacggcgtctggtacaacgtgcccatcgttccaaatgcattgattatgaacgtaggggatataatggagattgtgagcaatgggttcttcaagagcctggtgcatagggttgtgaccaacgcggagaaagagcgcttgtcgttggtgctggtctatacatcggagctagagacagagcttgagccggtgtcagacctggtggatgacaagagacctgcacgatacatgaagatcaagctccacgactacatggaaaaatatcatgacacttatgccacagggacaatatccatagtcggcgtgaagatctgaatatgattctgatgtgtgcaagtccgctatatgaacaactatgcatggtgaagtatcttccgtcgaccagtttgtaacgagtttatatttttcatgtacccttttccccaatttttgtgtgtgtactccttcatgtaaaatgttcggcagcttgtgtggctgcatgaaacattaaaataaaatgtatctgctgtgtgcaacatgcagatgcaaaggatggaataaaacttatcggtcgtgtgc

SEQ ID NO: 12751 - protein, 361 aa, Triticum aestivum
  peptide (1)..(361): Ceres Seq. ID no. 12615467
  misc_feature (216)..(310): Pfam Name: II Pfam Description: 2OG-Fe
  misc_feature (14)..(361): NCBI GI NO: 34898472 NR Description: Similar to Prunus armeniaca ethylene-forming-enzyme-like dioxygenase
  misc_feature (21)..(352): NCBI GI NO: 33115140 NR Description: iron/ascorbate-dependent oxidoreductase
  misc_feature (20)..(347): NCBI GI NO: 34898470 NR Description: ESTs D47168
  misc_feature (20)..(341): NCBI GI NO: 24413982 NR Description: ethylene-forming-enzyme-like dioxygenase-like
  misc_feature (175)..(361): NCBI GI NO: 24413983 NR Description: ethylene-forming-enzyme-like dioxygenase-like
  misc_feature (14)..(132): NCBI GI NO: 24413983 NR Description: ethylene-forming-enzyme-like dioxygenase-like
  misc_feature (22)..(361): NCBI GI NO: 34898468 NR Description: Similar to Prunus armeniaca ethylene-forming-enzyme-like dioxygenase
  misc_feature (19)..(361): NCBI GI NO: 24413984 NR Description: ethylene-forming-enzyme-like dioxygenase-like
  misc_feature (22)..(261): NCBI GI NO: 24413981 NR Description: contains EST C72504
  misc_feature (282)..(361): NCBI GI NO: 24413981 NR Description: contains EST C72504
  misc_feature (211)..(211): Xaa is any aa, unknown or other
NQQQATMASYDKQFKVLEVPPIVQELVGAGVQEPPSQYVLPEQDRPAAAVSEMPEPIPIIDLSRLSAGSAEEFDKLRSALENWDLFLAVGHGMEPSFLAEAMKSTIEFFNLPLEEKQKYSNIVDGEKLGMDGYGNDMVVKENQVLDWNDRLNLLVEPEALRTYRLWPTQPPSFRDILSEYTVRCKAAANLVFRNMAKILNLQEEHLVNMIXENSITQAIFNYYPQCPRPDHVLGLKAHTDGSIITVNFADAEGLQLQRNGVWYNVPIVPNALIMNVGDIMEIVSNGFFKSLVHRVVTNAEKERLSLVLVYTSELETELEPVSDLVDDKRPARYMKIKLHDYMEKYHDTYATGTISIVGVKI

SEQ ID NO: 12752 - protein, 355 aa, Triticum aestivum
  peptide (1)..(355): Ceres Seq. ID no. 12615468
  misc_feature (210)..(304): Pfam Name: II Pfam Description: 2OG-Fe
  misc_feature (8)..(355): NCBI GI NO: 34898472 NR Description: Similar to Prunus armeniaca ethylene-forming-enzyme-like dioxygenase
  misc_feature (15)..(346): NCBI GI NO: 33115140 NR Description: iron/ascorbate-dependent oxidoreductase
  misc_feature (14)..(341): NCBI GI NO: 34898470 NR Description: ESTs D47168
  misc_feature (14)..(335): NCBI GI NO: 24413982 NR Description: ethylene-forming-enzyme-like dioxygenase-like
  misc_feature (169)..(355): NCBI GI NO: 24413983 NR Description: ethylene-forming-enzyme-like dioxygenase-like
  misc_feature (8)..(126): NCBI GI NO: 24413983 NR Description: ethylene-forming-enzyme-like dioxygenase-like
  misc_feature (16)..(355): NCBI GI NO: 34898468 NR Description: Similar to Prunus armeniaca ethylene-forming-enzyme-like dioxygenase
  misc_feature (13)..(355): NCBI GI NO: 24413984 NR Description: ethylene-forming-enzyme-like dioxygenase-like
  misc_feature (16)..(255): NCBI GI NO: 24413981 NR Description: contains EST C72504
  misc_feature (276)..(355): NCBI GI NO: 24413981 NR Description: contains EST C72504
  misc_feature (205)..(205): Xaa is any aa, unknown or other
MASYDKQFKVLEVPPIVQELVGAGVQEPPSQYVLPEQDRPAAAVSEMPEPIPIIDLSRLSAGSAEEFDKLRSALENWDLFLAVGHGMEPSFLAEAMKSTIEFFNLPLEEKQKYSNIVDGEKLGMDGYGNDMVVKENQVLDWNDRLNLLVEPEALRTYRLWPTQPPSFRDILSEYTVRCKAAANLVFRNMAKILNLQEEHLVNMIXENSITQAIFNYYPQCPRPDHVLGLKAHTDGSIITVNFADAEGLQLQRNGVWYNVPIVPNALIMNVGDIMEIVSNGFFKSLVHRVVTNAEKERLSLVLVYTSELETELEPVSDLVDDKRPARYMKIKLHDYMEKYHDTYATGTISIVGVKI

SEQ ID NO: 12753 - protein, 309 aa, Triticum aestivum
  peptide (1)..(309): Ceres Seq. ID no. 12615469
  misc_feature (164)..(258): Pfam Name: II Pfam Description: 2OG-Fe
  misc_feature (1)..(309): NCBI GI NO: 34898472 NR Description: Similar to Prunus armeniaca ethylene-forming-enzyme-like dioxygenase
  misc_feature (1)..(300): NCBI GI NO: 33115140 NR Description: iron/ascorbate-dependent oxidoreductase
  misc_feature (1)..(295): NCBI GI NO: 34898470 NR Description: ESTs D47168
  misc_feature (1)..(289): NCBI GI NO: 24413982 NR Description: ethylene-forming-enzyme-like dioxygenase-like
  misc_feature (123)..(309): NCBI GI NO: 24413983 NR Description: ethylene-forming-enzyme-like dioxygenase-like
  misc_feature (1)..(80): NCBI GI NO: 24413983 NR Description: ethylene-forming-enzyme-like dioxygenase-like
  misc_feature (1)..(309): NCBI GI NO: 34898468 NR Description: Similar to Prunus armeniaca ethylene-forming-enzyme-like dioxygenase
  misc_feature (1)..(309): NCBI GI NO: 24413984 NR Description: ethylene-forming-enzyme-like dioxygenase-like
  misc_feature (1)..(209): NCBI GI NO: 24413981 NR Description: contains EST C72504
  misc_feature (230)..(309): NCBI GI NO: 24413981 NR Description: contains EST C72504
  misc_feature (159)..(159): Xaa is any aa, unknown or other
MPEPIPIIDLSRLSAGSAEEFDKLRSALENWDLFLAVGHGMEPSFLAEAMKSTIEFFNLPLEEKQKYSNIVDGEKLGMDGYGNDMVVKENQVLDWNDRLNLLVEPEALRTYRLWPTQPPSFRDILSEYTVRCKAAANLVFRNMAKILNLQEEHLVNMIXENSITQAIFNYYPQCPRPDHVLGLKAHTDGSIITVNFADAEGLQLQRNGVWYNVPIVPNALIMNVGDIMEIVSNGFFKSLVHRVVTNAEKERLSLVLVYTSELETELEPVSDLVDDKRPARYMKIKLHDYMEKYHDTYATGTISIVGVKI

SEQ ID NO: 12754 - DNA, 1490 bp, Triticum aestivum
  misc_feature (1)..(1490): Ceres Seq. ID no. 13596744
gaacatcctaatcgaaaactccattttcctctccaccccgcaacccacgcagacgcagctcgaccgaccacaactgtgcgcagcagcggcggccggcggagaccgtatcgtaccatggcgatggagggctacgaccgcgagttctggcagttcggcgaccagctccgcctccagacggccaccttctccggcctctccctcggcgactccatctggtcccccgccgacgccgccccccgcgcccgcaacgccgaccccggcctcttctccccctcccaggcggcccacaacaacgccggaaccggattcgccgccgccaagatgaacggcagcctcaacgggcccggcctcatcggctccggcaagctcgccttcggcgccaccaccaccagcaaggccgaccgctacaacaacgtcagcctccccgccgccgccgacgccaagccctacgccaacgccaacggcctgtacggtgccaagcccaacaacaccaataacaacggcttcgggctcaacaagatggctgccggcggcgggggctacagcaacttcaacggcggcaacgagggggtgaagagctacttcaacaagtccatcgggaggccggccagcaacaacaacagcagcagcaacaacttcagcggctacggcggcaagaagggcgccgcggacggcaagaagaagcacgccaagaacgagcgaggggacaacaaccacggcgccgcgtcggagaagcggttcaagacgctgccggcgtccgaggcgctgccccggaacgagcccatcggcggctacatcttcgtctgcaacaacgacaccatggaggagaacctcaagaggcagctcttcgggttgccatccagatacagagattcagtgagggcgatcaggccagggctgcccctcttcctctacaactactccacccaccagctccacggcatcttcgaggctgcgagctttggcggagcgaacatcgacccggcggcctgggaggacaagaagtgcaacggcgagtctcgcttccctgcacaggtgagggtggccacaaggaagatctgcgacccactggaggaggacgccttccgccctatcctgcaccactacgacgggcccaagttccggctggagctcagcatcaccgaggctctctcccttcttgatatatttgaagacaaggacgatgcctgatcgagggctgatcagggattcttgaggaaggaatagcacaataagatcggatcggagaatatatacatacatatgattaatatcattatcaattaatggtgatatatacgtgagttttatgtattgggttttccatctcgcgggctatgaaattatgcgtcccccgttgtggtatcatgcgtggtgatggctgcacaagatgagccctcgtgaacataactaatctattgtcacggctatgtatgtataatattgagactttaaaaaaaaaaaaaaaaaagcttatcgataccgtcgac

SEQ ID NO: 12755 - protein, 396 aa, Triticum aestivum
  peptide (1)..(396): Ceres Seq. ID no. 15221969
  misc_feature (41)..(382): NCBI GI NO: 34913876 NR Description: B1156H12.22
  misc_feature (46)..(394): NCBI GI NO: 18422167 NR Description: expressed protein [Arabidopsis thaliana]
  misc_feature (192)..(392): NCBI GI NO: 584825 NR Description: B2 PROTEIN
  misc_feature (129)..(396): NCBI GI NO: 2369766 NR Description: hypothetical protein [Citrus x paradisi]
  misc_feature (191)..(394): NCBI GI NO: 9757950 NR Description: gene_id:MJC20
  misc_feature (129)..(396): NCBI GI NO: 15232081 NR Description: gda-1 -related [Arabidopsis thaliana]
  misc_feature (129)..(396): NCBI GI NO: 21592623 NR Description: gda-1, putative [Arabidopsis thaliana]
  misc_feature (183)..(396): NCBI GI NO: 21665866 NR Description: GDA2 protein [Pisum sativum]
  misc_feature (274)..(358): NCBI GI NO: 7488804 NR Description: gda-1 protein - garden pea
EHPNRKLHFPLHPATHADAARPTTTVRSSGGRRRPYRTMAMEGYDREFWQFGDQLRLQTATFSGLSLGDSIWSPADAAPRARNADPGLFSPSQAAHNNAGTGFAAAKMNGSLNGPGLIGSGKLAFGATTTSKADRYNNVSLPAAADAKPYANANGLYGAKPNNTNNNGFGLNKMAAGGGGYSNFNGGNEGVKSYFNKSIGRPASNNNSSSNNFSGYGGKKGAADGKKKHAKNERGDNNHGAASEKRFKTLPASEALPRNEPIGGYIFVCNNDTMEENLKRQLFGLPSRYRDSVRAIRPGLPLFLYNYSTHQLHGIFEAASFGGANIDPAAWEDKKCNGESRFPAQVRVATRKICDPLEEDAFRPILHHYDGPKFRLELSITEALSLLDIFEDKDDA

SEQ ID NO: 12756 - protein, 358 aa, Triticum aestivum
  peptide (1)..(358): Ceres Seq. ID no. 15221970
  misc_feature (3)..(344): NCBI GI NO: 34913876 NR Description: B1156H12.22
  misc_feature (8)..(356): NCBI GI NO: 18422167 NR Description: expressed protein [Arabidopsis thaliana]
  misc_feature (154)..(354): NCBI GI NO: 584825 NR Description: B2 PROTEIN
  misc_feature (91)..(358): NCBI GI NO: 2369766 NR Description: hypothetical protein [Citrus x paradisi]
  misc_feature (153)..(356): NCBI GI NO: 9757950 NR Description: gene_id:MJC20
  misc_feature (91)..(358): NCBI GI NO: 15232081 NR Description: gda-1 -related [Arabidopsis thaliana]
  misc_feature (91)..(358): NCBI GI NO: 21592623 NR Description: gda-1, putative [Arabidopsis thaliana]
  misc_feature (145)..(358): NCBI GI NO: 21665866 NR Description: GDA2 protein [Pisum sativum]
  misc_feature (236)..(320): NCBI GI NO: 7488804 NR Description: gda-1 protein - garden pea
MAMEGYDREFWQFGDQLRLQTATFSGLSLGDSIWSPADAAPRARNADPGLFSPSQAAHNNAGTGFAAAKMNGSLNGPGLIGSGKLAFGATTTSKADRYNNVSLPAAADAKPYANANGLYGAKPNNTNNNGFGLNKMAAGGGGYSNFNGGNEGVKSYFNKSIGRPASNNNSSSNNFSGYGGKKGAADGKKKHAKNERGDNNHGAASEKRFKTLPASEALPRNEPIGGYIFVCNNDTMEENLKRQLFGLPSRYRDSVRAIRPGLPLFLYNYSTHQLHGIFEAASFGGANIDPAAWEDKKCNGESRFPAQVRVATRKICDPLEEDAFRPILHHYDGPKFRLELSITEALSLLDIFEDKDDA

SEQ ID NO: 12757 - protein, 356 aa, Triticum aestivum
  peptide (1)..(356): Ceres Seq. ID no. 15221971
  misc_feature (1)..(342): NCBI GI NO: 34913876 NR Description: B1156H12.22
  misc_feature (6)..(354): NCBI GI NO: 18422167 NR Description: expressed protein [Arabidopsis thaliana]
  misc_feature (152)..(352): NCBI GI NO: 584825 NR Description: B2 PROTEIN
  misc_feature (89)..(356): NCBI GI NO: 2369766 NR Description: hypothetical protein [Citrus x paradisi]
  misc_feature (151)..(354): NCBI GI NO: 9757950 NR Description: gene_id:MJC20
  misc_feature (89)..(356): NCBI GI NO: 15232081 NR Description: gda-1 -related [Arabidopsis thaliana]
  misc_feature (89)..(356): NCBI GI NO: 21592623 NR Description: gda-1, putative [Arabidopsis thaliana]
  misc_feature (143)..(356): NCBI GI NO: 21665866 NR Description: GDA2 protein [Pisum sativum]
  misc_feature (234)..(318): NCBI GI NO: 7488804 NR Description: gda-1 protein - garden pea
MEGYDREFWQFGDQLRLQTATFSGLSLGDSIWSPADAAPRARNADPGLFSPSQAAHNNAGTGFAAAKMNGSLNGPGLIGSGKLAFGATTTSKADRYNNVSLPAAADAKPYANANGLYGAKPNNTNNNGFGLNKMAAGGGGYSNFNGGNEGVKSYFNKSIGRPASNNNSSSNNFSGYGGKKGAADGKKKHAKNERGDNNHGAASEKRFKTLPASEALPRNEPIGGYIFVCNNDTMEENLKRQLFGLPSRYRDSVRAIRPGLPLFLYNYSTHQLHGIFEAASFGGANIDPAAWEDKKCNGESRFPAQVRVATRKICDPLEEDAFRPILHHYDGPKFRLELSITEALSLLDIFEDKDDA

SEQ ID NO: 12758 - DNA, 1416 bp, Triticum aestivum
  misc_feature (1)..(1416): Ceres Seq. ID no. 13598391
cgaagtcccaaatcaatccatttcatttcggtttcgaatcccctggggacgagctcgcgtcgccttccctctccgcccgccccgtcgccatccgccccttcgaatctgcagggcggcgccgcctggcctcgttgtcgccacgggaggcgcgcgggatggggcggttgtttgcggtggacgccgcggcggcctcgtcggccgcggccgcggcggcgctgaacggcgcggtggactggtggaaagacgtgaacgactcgccgatgtggcaggaccgcatcttccacgccctcgccgtgctctacggcatcgtctccgtcgtcgcgcttgtccaattgatcagaatcgagtgtagggtgcccgagtacgggtggacgacgcagaaggtgttccatttccttaacttcatcgtgaatggcgtgcgggctatcgtatttgtgctgcggcgaaacgtgcagctgatacaaccagagatacttcaacatgtggttcttgacatgcctgggcttgcgttcttcactacatacgcgcttttggtgctattctgggccgatatttactatcaggcacgtgcgatgtcgactgatgggctgaggccaactttctattggatcaatggggtggtgtatgcaattcagataattctgtggttggttttgtggtggaaaccagttcgaattatggtcatattgtccaagatgttctttgcaggcgtatcactgtttgcagcttttgggttccttctgtatggtgggaggctattcctcatgttgcaacgttttcccgtagaatcaaaaggaagacggaagaaattgcaggaggttggctatgtcactaccatctgctttacttgtttcttgatcagatgtgtcatgatgtgtctcaatgcatttgataaagcagctgatcttgatgttctgagccatccgattctgaatttcttttattacctgctggtcgagatcgtaccttcagctatggttctgtttatactaaggaaactgcccccaaaacgtgggatcacgcagtaccatcctatccattagagcagagcagccctggtaccaggctggtacagacgaatgctccttacagagttcgtaaatacatgagaggcaatgtgaagatcaccgcacttgcactgaagcttgcccaggttttaaatgaggaagcctttaggatttcaggttactattgcttgtaaaagagatttgcaatgtagttcaaaaaaagaagagatttgcaatatcatgctgtttacaggtctagaaaaatgcaagttttatataatgtatgtatacctttgttcttctcagtactttcaccctgtagtctgcaccgcgcgacagcaatcacggctggaatcgcatatttgatttttgactgtttaaacacaataaagttggaactggagggggg

SEQ ID NO: 12759 - protein, 346 aa, Triticum aestivum
  peptide (1)..(346): Ceres Seq. ID no. 13598392
  misc_feature (52)..(346): NCBI GI NO: 37536460 NR Description: putative transmembrane protein
  misc_feature (62)..(346): NCBI GI NO: 34902220 NR Description: Putative transmembrane protein
  misc_feature (56)..(345): NCBI GI NO: 18395323 NR Description: TOM3 protein [Arabidopsis thaliana]
  misc_feature (60)..(345): NCBI GI NO: 21537264 NR Description: unknown [Arabidopsis thaliana]
  misc_feature (63)..(345): NCBI GI NO: 7262697 NR Description: Contains similarity to an unknown protein fromArabidopsis thaliana gb|AC005936
  misc_feature (63)..(345): NCBI GI NO: 18394129 NR Description: THH1 protein [Arabidopsis thaliana]
  misc_feature (63)..(345): NCBI GI NO: 21537116 NR Description: unknown [Arabidopsis thaliana]
  misc_feature (63)..(345): NCBI GI NO: 27754346 NR Description: unknown protein [Arabidopsis thaliana]
  misc_feature (63)..(214): NCBI GI NO: 25402773 NR Description: protein T5E21.3 [imported] - Arabidopsis thaliana
  misc_feature (212)..(345): NCBI GI NO: 25402773 NR Description: protein T5E21.3 [imported] - Arabidopsis thaliana
KSQINPFHFGFESPGDELASPSLSARPVAIRPFESAGRRRLASLSPREARGMGRLFAVDAAAASSAAAAAALNGAVDWWKDVNDSPMWQDRIFHALAVLYGIVSVVALVQLIRIECRVPEYGWTTQKVFHFLNFIVNGVRAIVFVLRRNVQLIQPEILQHVVLDMPGLAFFTTYALLVLFWADIYYQARAMSTDGLRPTFYWINGVVYAIQIILWLVLWWKPVRIMVILSKMFFAGVSLFAAFGFLLYGGRLFLMLQRFPVESKGRRKKLQEVGYVTTICFTCFLIRCVMMCLNAFDKAADLDVLSHPILNFFYYLLVEIVPSAMVLFILRKLPPKRGITQYHPIH

SEQ ID NO: 12760 - protein, 295 aa, Triticum aestivum
  peptide (1)..(295): Ceres Seq. ID no. 13598393
  misc_feature (1)..(295): NCBI GI NO: 37536460 NR Description: putative transmembrane protein
  misc_feature (11)..(295): NCBI GI NO: 34902220 NR Description: Putative transmembrane protein
  misc_feature (5)..(294): NCBI GI NO: 18395323 NR Description: TOM3 protein [Arabidopsis thaliana]
  misc_feature (9)..(294): NCBI GI NO: 21537264 NR Description: unknown [Arabidopsis thaliana]
  misc_feature (12)..(294): NCBI GI NO: 7262697 NR Description: Contains similarity to an unknown protein fromArabidopsis thaliana gb|AC005936
  misc_feature (12)..(294): NCBI GI NO: 21537116 NR Description: unknown [Arabidopsis thaliana]
  misc_feature (12)..(294): NCBI GI NO: 18394129 NR Description: THH1 protein [Arabidopsis thaliana]
  misc_feature (12)..(294): NCBI GI NO: 27754346 NR Description: unknown protein [Arabidopsis thaliana]
  misc_feature (12)..(163): NCBI GI NO: 25402773 NR Description: protein T5E21.3 [imported] - Arabidopsis thaliana
  misc_feature (161)..(294): NCBI GI NO: 25402773 NR Description: protein T5E21.3 [imported] - Arabidopsis thaliana
MGRLFAVDAAAASSAAAAAALNGAVDWWKDVNDSPMWQDRIFHALAVLYGIVSVVALVQLIRIECRVPEYGWTTQKVFHFLNFIVNGVRAIVFVLRRNVQLIQPEILQHVVLDMPGLAFFTTYALLVLFWADIYYQARAMSTDGLRPTFYWINGVVYAIQIILWLVLWWKPVRIMVILSKMFFAGVSLFAAFGFLLYGGRLFLMLQRFPVESKGRRKKLQEVGYVTTICFTCFLIRCVMMCLNAFDKAADLDVLSHPILNFFYYLLVEIVPSAMVLFILRKLPPKRGITQYHPIH

SEQ ID NO: 12761 - protein, 260 aa, Triticum aestivum
  peptide (1)..(260): Ceres Seq. ID no. 13598394
  misc_feature (1)..(260): NCBI GI NO: 37536460 NR Description: putative transmembrane protein
  misc_feature (1)..(260): NCBI GI NO: 34902220 NR Description: Putative transmembrane protein
  misc_feature (1)..(259): NCBI GI NO: 18395323 NR Description: TOM3 protein [Arabidopsis thaliana]
  misc_feature (1)..(259): NCBI GI NO: 21537264 NR Description: unknown [Arabidopsis thaliana]
  misc_feature (1)..(259): NCBI GI NO: 7262697 NR Description: Contains similarity to an unknown protein fromArabidopsis thaliana gb|AC005936
  misc_feature (1)..(259): NCBI GI NO: 21537116 NR Description: unknown [Arabidopsis thaliana]
  misc_feature (1)..(259): NCBI GI NO: 18394129 NR Description: THH1 protein [Arabidopsis thaliana]
  misc_feature (1)..(259): NCBI GI NO: 27754346 NR Description: unknown protein [Arabidopsis thaliana]
  misc_feature (1)..(128): NCBI GI NO: 25402773 NR Description: protein T5E21.3 [imported] - Arabidopsis thaliana
  misc_feature (126)..(259): NCBI GI NO: 25402773 NR Description: protein T5E21.3 [imported] - Arabidopsis thaliana
MWQDRIFHALAVLYGIVSVVALVQLIRIECRVPEYGWTTQKVFHFLNFIVNGVRAIVFVLRRNVQLIQPEILQHVVLDMPGLAFFTTYALLVLFWADIYYQARAMSTDGLRPTFYWINGVVYAIQIILWLVLWWKPVRIMVILSKMFFAGVSLFAAFGFLLYGGRLFLMLQRFPVESKGRRKKLQEVGYVTTICFTCFLIRCVMMCLNAFDKAADLDVLSHPILNFFYYLLVEIVPSAMVLFILRKLPPKRGITQYHPIH

SEQ ID NO: 12762 - DNA, 1430 bp, Triticum aestivum
  misc_feature (1)..(1430): Ceres Seq. ID no. 12624849
  misc_feature (793)..(793): n is a, c, t, g, unknown, or other
ctgtcacagaatcccgcagattcccctgaacccggcgagggcgagcagagcaaccccgccatggccgcggcgatcctccgccgcctcagcccggtggcctcccagcgcgtgccccctcgcctcctgccgccgacgctcgcccgcggggtctccgactccacggagccgctcaccgtggagacctcgatccccttcacgtcccacgtcgtggacccgccgtcgcgcgaggtgaccaccacgccgcgggagctcgccgcggccttccgcgacatggcgctcatgcggcgcgcggagatcgccgccgactcgctctacaaggccaagctcatccggggcttctgccacctctacgacggccaggaggcggtcgccgtgggcatggaggccgccatcacccgccgcgacgccatcatcaccgcctaccgcgaccactgcctctacctcgcgcgcggcgggggcctcgtcgccgccttcgccgagctcatgggccgcgtcgacggctgctccaggggcaagggcggctccatgcacttctacaagaaggacgccaacttctacggcgggcacggcatcgtcggcgcgcaggtgcccctcggctgcggcctcgccttcgcgcagaggtaccggaaggagggcaccgtcaccttcgacctctacggcgacggcgccgccaaccagggccagctcttcgaggcgctcaacatggccgcgctctggaagctgcccgtcatactcgtctgcgagaacaaccactatgggatggggacggccgagtggaaggcctccaagagcnccgcgtactacaagcgcggggactatgtgcccggattgaaggttgatggtatggattttcttgcagtgaagcaggcttgtaaatttgccaaagaacatgttctggaaattggaccgattattcttgagatggacacatatagataccatggacactctatgtcagatccaggcagcacttaccgcactagagatgagattgcaggaataagacaggagcgtgatccgattgagcgggtcagaaagctattattgacccatgacttggcaacagcccaggagctcaaggacatggagaaggaaatcaggaaggaagttgacactgcaattgccaaagcaaaggaaagcccaatgccggatacatccgaactgttcaagaatgtatatgtcaatgactgcggtctggagtcttttggggtggacaggaaggtggtgagaaccgtccttccataggctgccaaacgagaagcttggctctgtcagactgttcgcctggtgtatggtacgtgctggggagacataatagagtccaaggaattcgtagttagctgtattgtggacgtttctgtccctaaataagtctgtatatagagacgcgtgaccattcggactctgtaccgcattgcgctagtcattcc

SEQ ID NO: 12763 - protein, 414 aa, Triticum aestivum
  peptide (1)..(414): Ceres Seq. ID no. 12624850
  misc_feature (89)..(386): Pfam Name: Pfam Description:  Dehydrogenase E1 component
  misc_feature (22)..(414): NCBI GI NO: 3851005 NR Description: pyruvate dehydrogenase E1 alpha subunit [Zea mays]
  misc_feature (51)..(414): NCBI GI NO: 28465343 NR Description: pyruvate dehydrogenase E1alpha subunit
  misc_feature (51)..(414): NCBI GI NO: 28465345 NR Description: pyruvate dehydrogenase E1 alpha subunit
  misc_feature (26)..(414): NCBI GI NO: 15221692 NR Description: pyruvate dehydrogenase E1 alpha subunit
  misc_feature (26)..(414): NCBI GI NO: 23306664 NR Description: pyruvate dehydrogenase E1a-like subunit IAR4
  misc_feature (26)..(414): NCBI GI NO: 1709449 NR Description: Pyruvate dehydrogenase E1 component alpha subunit
  misc_feature (26)..(414): NCBI GI NO: 15218940 NR Description: pyruvate dehydrogenase e1 alpha subunit, putative
  misc_feature (26)..(414): NCBI GI NO: 13430788 NR Description: putative pyruvate dehydrogenase e1 alpha subunit
  misc_feature (51)..(414): NCBI GI NO: 1709453 NR Description: Pyruvate dehydrogenase E1 component alpha subunit
  misc_feature (26)..(414): NCBI GI NO: 2117533 NR Description: pyruvate dehydrogenase (lipoamide) (EC 1
  misc_feature (265)..(265): Xaa is any aa, unknown or other
LSQNPADSPEPGEGEQSNPAMAAAILRRLSPVASQRVPPRLLPPTLARGVSDSTEPLTVETSIPFTSHVVDPPSREVTTTPRELAAAFRDMALMRRAEIAADSLYKAKLIRGFCHLYDGQEAVAVGMEAAITRRDAIITAYRDHCLYLARGGGLVAAFAELMGRVDGCSRGKGGSMHFYKKDANFYGGHGIVGAQVPLGCGLAFAQRYRKEGTVTFDLYGDGAANQGQLFEALNMAALWKLPVILVCENNHYGMGTAEWKASKSXAYYKRGDYVPGLKVDGMDFLAVKQACKFAKEHVLEIGPIILEMDTYRYHGHSMSDPGSTYRTRDEIAGIRQERDPIERVRKLLLTHDLATAQELKDMEKEIRKEVDTAIAKAKESPMPDTSELFKNVYVNDCGLESFGVDRKVVRTVLP

SEQ ID NO: 12764 - protein, 394 aa, Triticum aestivum
  peptide (1)..(394): Ceres Seq. ID no. 12624851
  misc_feature (69)..(366): Pfam Name: Pfam Description:  Dehydrogenase E1 component
  misc_feature (2)..(394): NCBI GI NO: 3851005 NR Description: pyruvate dehydrogenase E1 alpha subunit [Zea mays]
  misc_feature (31)..(394): NCBI GI NO: 28465343 NR Description: pyruvate dehydrogenase E1alpha subunit
  misc_feature (31)..(394): NCBI GI NO: 28465345 NR Description: pyruvate dehydrogenase E1 alpha subunit
  misc_feature (6)..(394): NCBI GI NO: 15221692 NR Description: pyruvate dehydrogenase E1 alpha subunit
  misc_feature (6)..(394): NCBI GI NO: 23306664 NR Description: pyruvate dehydrogenase E1a-like subunit IAR4
  misc_feature (6)..(394): NCBI GI NO: 1709449 NR Description: Pyruvate dehydrogenase E1 component alpha subunit
  misc_feature (6)..(394): NCBI GI NO: 15218940 NR Description: pyruvate dehydrogenase e1 alpha subunit, putative
  misc_feature (6)..(394): NCBI GI NO: 13430788 NR Description: putative pyruvate dehydrogenase e1 alpha subunit
  misc_feature (31)..(394): NCBI GI NO: 1709453 NR Description: Pyruvate dehydrogenase E1 component alpha subunit
  misc_feature (6)..(394): NCBI GI NO: 2117533 NR Description: pyruvate dehydrogenase (lipoamide) (EC 1
  misc_feature (245)..(245): Xaa is any aa, unknown or other
MAAAILRRLSPVASQRVPPRLLPPTLARGVSDSTEPLTVETSIPFTSHVVDPPSREVTTTPRELAAAFRDMALMRRAEIAADSLYKAKLIRGFCHLYDGQEAVAVGMEAAITRRDAIITAYRDHCLYLARGGGLVAAFAELMGRVDGCSRGKGGSMHFYKKDANFYGGHGIVGAQVPLGCGLAFAQRYRKEGTVTFDLYGDGAANQGQLFEALNMAALWKLPVILVCENNHYGMGTAEWKASKSXAYYKRGDYVPGLKVDGMDFLAVKQACKFAKEHVLEIGPIILEMDTYRYHGHSMSDPGSTYRTRDEIAGIRQERDPIERVRKLLLTHDLATAQELKDMEKEIRKEVDTAIAKAKESPMPDTSELFKNVYVNDCGLESFGVDRKVVRTVLP

SEQ ID NO: 12765 - protein, 324 aa, Triticum aestivum
  peptide (1)..(324): Ceres Seq. ID no. 12624852
  misc_feature (1)..(296): Pfam Name: Pfam Description:  Dehydrogenase E1 component
  misc_feature (1)..(324): NCBI GI NO: 3851005 NR Description: pyruvate dehydrogenase E1 alpha subunit [Zea mays]
  misc_feature (1)..(324): NCBI GI NO: 28465343 NR Description: pyruvate dehydrogenase E1alpha subunit
  misc_feature (1)..(324): NCBI GI NO: 28465345 NR Description: pyruvate dehydrogenase E1 alpha subunit
  misc_feature (1)..(324): NCBI GI NO: 15221692 NR Description: pyruvate dehydrogenase E1 alpha subunit
  misc_feature (1)..(324): NCBI GI NO: 23306664 NR Description: pyruvate dehydrogenase E1a-like subunit IAR4
  misc_feature (1)..(324): NCBI GI NO: 1709449 NR Description: Pyruvate dehydrogenase E1 component alpha subunit
  misc_feature (1)..(324): NCBI GI NO: 15218940 NR Description: pyruvate dehydrogenase e1 alpha subunit, putative
  misc_feature (1)..(324): NCBI GI NO: 13430788 NR Description: putative pyruvate dehydrogenase e1 alpha subunit
  misc_feature (1)..(324): NCBI GI NO: 1709453 NR Description: Pyruvate dehydrogenase E1 component alpha subunit
  misc_feature (1)..(324): NCBI GI NO: 2117533 NR Description: pyruvate dehydrogenase (lipoamide) (EC 1
  misc_feature (175)..(175): Xaa is any aa, unknown or other
MALMRRAEIAADSLYKAKLIRGFCHLYDGQEAVAVGMEAAITRRDAIITAYRDHCLYLARGGGLVAAFAELMGRVDGCSRGKGGSMHFYKKDANFYGGHGIVGAQVPLGCGLAFAQRYRKEGTVTFDLYGDGAANQGQLFEALNMAALWKLPVILVCENNHYGMGTAEWKASKSXAYYKRGDYVPGLKVDGMDFLAVKQACKFAKEHVLEIGPIILEMDTYRYHGHSMSDPGSTYRTRDEIAGIRQERDPIERVRKLLLTHDLATAQELKDMEKEIRKEVDTAIAKAKESPMPDTSELFKNVYVNDCGLESFGVDRKVVRTVLP

SEQ ID NO: 12766 - DNA, 1251 bp, Triticum aestivum
  misc_feature (1)..(1251): Ceres Seq. ID no. 13596550
aaaaaacaaaataaaagaaatcgtcccctcctcgtcgtcgctgccgtcgctgagtgcgaactccgtcgtgtcctcccctctccctctctctatcccctctctctctctctctctctctctctgctaatctgagttcctcgttgagaagaggaaccgaggggcgcggcagcgactccgcccgtgatggtcgcccgccgcgctctgtggcggacgcggacatgcacagctcctccccctcctccgccgccgtcgcgtattcttcctcgtctccatcacacctctccccagtagacggcttcctctgcgtgaaggagggggtcgacgagatgatcaagcacgtcgccaatgagccctccctcgggctctacttcgtccagcagcacgctcaggcatccatgcccatcctccttgacgtcaagggcaaggttacagaaaagactcgtgagataacattacacactgaagatatagaggattctatttgtgctgtgaggtccatggctgagtttggacttccaattgctgatgatatgataaaggacataaataaatctctaaagataatgtcgaagacccaaccaaagaaagggttaacccagaaccccatttgggggttccaatcagacaaaagctcggaagcatggaacgatttggacgcaactaatggtggaagtagcaagaactatttgtcttccatgttgaacaccgcaaagcaaaaggcatcgagtctcagatggccacagactgatttcgctatgaacgatggcgttagtgagaagtcagtgtcatctacagctcaggagtcgtcacaagccggaggacatggtgcgtcaacaccctcggatgcagaaagggatgaagtctccatttcaagccgattgttggaaaataaaaatgcaggtactatgaaccagggcctgtctgcttctgatatctcccacacggcggagagctacaacaagttcaaagaagaacaggaactgaaactgcaagagtggctcagggagtcgaaagaagctgacgataatagaggttgagactgttgtaccagctccggtgttttccaccgctgtcggagcacgtcagaaatgaaaaacatgtccaaaccttggaatatgtttatgaccacagatctttttgtattgatgatcagtgtacatgtgcggcgtctctgtaaacattcgtgttcactttgcagctgttacattgatattcacaaggcagagagatctctctcgagtgtattgttgc

SEQ ID NO: 12767 - protein, 272 aa, Triticum aestivum
  peptide (1)..(272): Ceres Seq. ID no. 15221923
  misc_feature (22)..(203): NCBI GI NO: 15225042 NR Description: expressed protein [Arabidopsis thaliana]
MHSSSPSSAAVAYSSSSPSHLSPVDGFLCVKEGVDEMIKHVANEPSLGLYFVQQHAQASMPILLDVKGKVTEKTREITLHTEDIEDSICAVRSMAEFGLPIADDMIKDINKSLKIMSKTQPKKGLTQNPIWGFQSDKSSEAWNDLDATNGGSSKNYLSSMLNTAKQKASSLRWPQTDFAMNDGVSEKSVSSTAQESSQAGGHGASTPSDAERDEVSISSRLLENKNAGTMNQGLSASDISHTAESYNKFKEEQELKLQEWLRESKEADDNRG

SEQ ID NO: 12768 - protein, 236 aa, Triticum aestivum
  peptide (1)..(236): Ceres Seq. ID no. 15221924
  misc_feature (1)..(167): NCBI GI NO: 15225042 NR Description: expressed protein [Arabidopsis thaliana]
MIKHVANEPSLGLYFVQQHAQASMPILLDVKGKVTEKTREITLHTEDIEDSICAVRSMAEFGLPIADDMIKDINKSLKIMSKTQPKKGLTQNPIWGFQSDKSSEAWNDLDATNGGSSKNYLSSMLNTAKQKASSLRWPQTDFAMNDGVSEKSVSSTAQESSQAGGHGASTPSDAERDEVSISSRLLENKNAGTMNQGLSASDISHTAESYNKFKEEQELKLQEWLRESKEADDNRG

SEQ ID NO: 12769 - protein, 213 aa, Triticum aestivum
  peptide (1)..(213): Ceres Seq. ID no. 15221925
  misc_feature (1)..(144): NCBI GI NO: 15225042 NR Description: expressed protein [Arabidopsis thaliana]
MPILLDVKGKVTEKTREITLHTEDIEDSICAVRSMAEFGLPIADDMIKDINKSLKIMSKTQPKKGLTQNPIWGFQSDKSSEAWNDLDATNGGSSKNYLSSMLNTAKQKASSLRWPQTDFAMNDGVSEKSVSSTAQESSQAGGHGASTPSDAERDEVSISSRLLENKNAGTMNQGLSASDISHTAESYNKFKEEQELKLQEWLRESKEADDNRG

SEQ ID NO: 12770 - DNA, 1088 bp, Triticum aestivum
  misc_feature (1)..(1088): Ceres Seq. ID no. 14302415
agagcagagccgagcataccccatctattaccgtcttctcggaccgtgcttccctgccgccctcgctgctgctgcgagctccggtcggcaatcttttcccggttcaagatgaccatcatcatcgagcagcctcagttcgatgcggcggcggagaggaaggtcgccggcgacccggcggagctcgtgctcgacggcggcttcaccgtaccggactccaacgccttcggccacaccttcagggactacgacgcggagtcggagcggaagaagactgtggaggagttctaccgcgtgaaccacatcaaccagacgtacgagtttgtgcagcggatgcgggacgcatacgggcggctggacaagacggagatgagcatctgggagtgcatcgagcttctcaacgagttcatcgacgacagcgaccctgacctggacatgccgcagatcgagcacctcctccagaccgccgaggccatccgcaaggactaccccgatgaggactggctccacctcactggcctcatccatgatctgggcaaggtgctgctgcatcccagcttcggggagcttcctcagtgggcagtcgtaggtgacaccttccccgtcggctgcgcgttcgacgaatgcaacgtccacttcaagtacttcaaggagaaccctgactaccacaacccggagttcaacaccaagttcggggtctactccgaggggtgcgggctggacaacgtgctcatgtcatggggccatgacgactacatgtgcctggttgccaaggagaacaagaccacccttccttccgcagggctgttcatcatcagataccactccttctaccccctgcacaagcatggagcctacatgcacctgatgaacgaggaggacaaggagaacctcaaatggctgcacgtcttcaacaagtatgacctgtacagcaagagcagcgtcaggatcgacgtcgaggaagtgaagccctactacatgtcgctcatcgacaagtacttcccggggaagctgcgatggtgaggaggccgcacccagacagggaacggagcccagacaacatattatatagtttatttaccttcgaaagc

SEQ ID NO: 12771 - protein, 339 aa, Triticum aestivum
  peptide (1)..(339): Ceres Seq. ID no. 14302416
  misc_feature (83)..(339): Pfam Name: DUF706 Pfam Description: Family of unknown function
  misc_feature (37)..(339): NCBI GI NO: 30683840 NR Description: expressed protein [Arabidopsis thaliana]
  misc_feature (37)..(339): NCBI GI NO: 26451656 NR Description: unknown protein [Arabidopsis thaliana]
  misc_feature (37)..(331): NCBI GI NO: 7262695 NR Description: Strong similarity to an unknown protein fromArabidopsis thaliana gb|AL049171
  misc_feature (37)..(339): NCBI GI NO: 30687167 NR Description: expressed protein [Arabidopsis thaliana]
  misc_feature (37)..(339): NCBI GI NO: 7487428 NR Description: hypothetical protein T25K17
  misc_feature (37)..(339): NCBI GI NO: 18399158 NR Description: expressed protein [Arabidopsis thaliana]
  misc_feature (37)..(339): NCBI GI NO: 21554393 NR Description: unknown [Arabidopsis thaliana]
  misc_feature (37)..(339): NCBI GI NO: 21536858 NR Description: unknown [Arabidopsis thaliana]
  misc_feature (37)..(339): NCBI GI NO: 15241891 NR Description: expressed protein [Arabidopsis thaliana]
  misc_feature (98)..(339): NCBI GI NO: 13877657 NR Description: Unknown protein [Arabidopsis thaliana]
RAEPSIPHLLPSSRTVLPCRPRCCCELRSAIFSRFKMTIIIEQPQFDAAAERKVAGDPAELVLDGGFTVPDSNAFGHTFRDYDAESERKKTVEEFYRVNHINQTYEFVQRMRDAYGRLDKTEMSIWECIELLNEFIDDSDPDLDMPQIEHLLQTAEAIRKDYPDEDWLHLTGLIHDLGKVLLHPSFGELPQWAVVGDTFPVGCAFDECNVHFKYFKENPDYHNPEFNTKFGVYSEGCGLDNVLMSWGHDDYMCLVAKENKTTLPSAGLFIIRYHSFYPLHKHGAYMHLMNEEDKENLKWLHVFNKYDLYSKSSVRIDVEEVKPYYMSLIDKYFPGKLRW

SEQ ID NO: 12772 - protein, 303 aa, Triticum aestivum
  peptide (1)..(303): Ceres Seq. ID no. 14302417
  misc_feature (47)..(303): Pfam Name: DUF706 Pfam Description: Family of unknown function
  misc_feature (1)..(303): NCBI GI NO: 30683840 NR Description: expressed protein [Arabidopsis thaliana]
  misc_feature (1)..(303): NCBI GI NO: 26451656 NR Description: unknown protein [Arabidopsis thaliana]
  misc_feature (1)..(295): NCBI GI NO: 7262695 NR Description: Strong similarity to an unknown protein fromArabidopsis thaliana gb|AL049171
  misc_feature (1)..(303): NCBI GI NO: 30687167 NR Description: expressed protein [Arabidopsis thaliana]
  misc_feature (1)..(303): NCBI GI NO: 7487428 NR Description: hypothetical protein T25K17
  misc_feature (1)..(303): NCBI GI NO: 18399158 NR Description: expressed protein [Arabidopsis thaliana]
  misc_feature (1)..(303): NCBI GI NO: 21554393 NR Description: unknown [Arabidopsis thaliana]
  misc_feature (1)..(303): NCBI GI NO: 21536858 NR Description: unknown [Arabidopsis thaliana]
  misc_feature (1)..(303): NCBI GI NO: 15241891 NR Description: expressed protein [Arabidopsis thaliana]
  misc_feature (62)..(303): NCBI GI NO: 13877657 NR Description: Unknown protein [Arabidopsis thaliana]
MTIIIEQPQFDAAAERKVAGDPAELVLDGGFTVPDSNAFGHTFRDYDAESERKKTVEEFYRVNHINQTYEFVQRMRDAYGRLDKTEMSIWECIELLNEFIDDSDPDLDMPQIEHLLQTAEAIRKDYPDEDWLHLTGLIHDLGKVLLHPSFGELPQWAVVGDTFPVGCAFDECNVHFKYFKENPDYHNPEFNTKFGVYSEGCGLDNVLMSWGHDDYMCLVAKENKTTLPSAGLFIIRYHSFYPLHKHGAYMHLMNEEDKENLKWLHVFNKYDLYSKSSVRIDVEEVKPYYMSLIDKYFPGKLRW

SEQ ID NO: 12773 - protein, 229 aa, Triticum aestivum
  peptide (1)..(229): Ceres Seq. ID no. 14302418
  misc_feature (1)..(229): Pfam Name: DUF706 Pfam Description: Family of unknown function
  misc_feature (1)..(229): NCBI GI NO: 30683840 NR Description: expressed protein [Arabidopsis thaliana]
  misc_feature (1)..(229): NCBI GI NO: 26451656 NR Description: unknown protein [Arabidopsis thaliana]
  misc_feature (1)..(221): NCBI GI NO: 7262695 NR Description: Strong similarity to an unknown protein fromArabidopsis thaliana gb|AL049171
  misc_feature (1)..(229): NCBI GI NO: 30687167 NR Description: expressed protein [Arabidopsis thaliana]
  misc_feature (1)..(229): NCBI GI NO: 7487428 NR Description: hypothetical protein T25K17
  misc_feature (1)..(229): NCBI GI NO: 18399158 NR Description: expressed protein [Arabidopsis thaliana]
  misc_feature (1)..(229): NCBI GI NO: 21554393 NR Description: unknown [Arabidopsis thaliana]
  misc_feature (1)..(229): NCBI GI NO: 21536858 NR Description: unknown [Arabidopsis thaliana]
  misc_feature (1)..(229): NCBI GI NO: 15241891 NR Description: expressed protein [Arabidopsis thaliana]
  misc_feature (1)..(229): NCBI GI NO: 13877657 NR Description: Unknown protein [Arabidopsis thaliana]
MRDAYGRLDKTEMSIWECIELLNEFIDDSDPDLDMPQIEHLLQTAEAIRKDYPDEDWLHLTGLIHDLGKVLLHPSFGELPQWAVVGDTFPVGCAFDECNVHFKYFKENPDYHNPEFNTKFGVYSEGCGLDNVLMSWGHDDYMCLVAKENKTTLPSAGLFIIRYHSFYPLHKHGAYMHLMNEEDKENLKWLHVFNKYDLYSKSSVRIDVEEVKPYYMSLIDKYFPGKLRW

SEQ ID NO: 12774 - DNA, 1570 bp, Triticum aestivum
  misc_feature (1)..(1570): Ceres Seq. ID no. 13596872
aaaaccctagagaaaccccgagccaagcacgacaccagatggcctccgccggcggcaagcccaacgccaacaccggcggcgacaccaaggggaggaagcgcaagttcctgccccacggcaagccggtgcggaagggcgcgtacccgctgcgccccggcgtgcagggcttcttcatcacctgcgacggcggccgcgagcaccaggccacccgtgaggcgatctccctcctggacaccttttacgaggacctggttgacgggaaagtatttgatgagaagcccaagagcatccctgacaagccgctgaacaaaaaaataaagtttgaggactctgattcctctgatgatgaggatgaaggtcattcagtggaggaggctgacaatggaaatgatgtagaaaaaggtgaagcaaagtcatctgagcagcaacaagaggtacctggtgccttggaagttgtcagcaaggaggatgaagaacaagttgaaactgccgacggatcagcgccaaagaaacaacgtatagaagatcctttggtttctgaacagacagaaccaaaagtgcccactgatgaaccaacagagactactgatgataagccaaaggagtccactgataaaccagcagagactactgatgataagccaaaagagtccactgataagccagcagagactactgatgataagccaaaagagtccactgataaaccaacagagactagtgataaaccaaaagcgtccaacgataaaccaaaagagttcactggtaaaccaaaagcgtccaatgacatacctattgatgatttaattgatgaggacctgaaacaactgggggacaggaaaaagaggctgtttgcaagcgtcgattccggttgcaatggttgcatcttcattcaaatgcacaaaagaggtggagaccctggtccagttgagattgtacaaaacatgatgtcttcggctgcttcaactcgtaaacatatgtccaggtttattctgagggtgttgcctgctgaggtggtatgttatgcttcagaagaggaaataacaagagccgttactccacttgttgaaaagtacttccccaaagaatctccttcgggacataagtttgctgtgttatacgaagcaaggtcaaacacaggaatcgatagaatgaaaattataaatgcagtagcaaaatctatacctcaacctcacaaagttgacctcagcaaccccgacaagactattattgtccagattgccaagactatatgcatgattggagtggtggagagatacaaagagctttcgaagttcaacctaaggcagctgacctcgccaccggagaagtagtttctgcgtgacaaattcttcctcctggttgagttttaagcagatgcagcatcagttggttactacgagtagctaccgtgaaagtcattgccaaatgattcaggtgtattatgccgttaaaacagatggccattgtcgtgtggatgcatcctgaatcgcttgcttaatgccgtatggtgcaattttggaacctgttgaatttcctacagcgatcgttggaataaagggttaattag

SEQ ID NO: 12775 - protein, 443 aa, Triticum aestivum
  peptide (1)..(443): Ceres Seq. ID no. 13596873
  misc_feature (332)..(424): Pfam Name: Pfam Description:  THUMP domain
  misc_feature (155)..(439): NCBI GI NO: 18416857 NR Description: expressed protein [Arabidopsis thaliana]
  misc_feature (24)..(244): NCBI GI NO: 18416857 NR Description: expressed protein [Arabidopsis thaliana]
  misc_feature (227)..(443): NCBI GI NO: 24657540 NR Description: CG15014-PA [Drosophila melanogaster]
  misc_feature (250)..(442): NCBI GI NO: 8923247 NR Description: hypothetical protein FLJ20274 [Homo sapiens]
  misc_feature (250)..(442): NCBI GI NO: 12653357 NR Description: hypothetical protein FLJ20274 [Homo sapiens]
  misc_feature (271)..(443): NCBI GI NO: 38174056 NR Description: Unknown (protein for MGC:75804)
  misc_feature (282)..(442): NCBI GI NO: 2988398 NR Description: Unknown gene product [Homo sapiens]
  misc_feature (243)..(437): NCBI GI NO: 34859071 NR Description: similar to RIKEN cDNA 6330575P11
  misc_feature (243)..(437): NCBI GI NO: 21704176 NR Description: RIKEN cDNA 6330575P11 [Mus musculus]
  misc_feature (250)..(442): NCBI GI NO: 34365206 NR Description: hypothetical protein [Homo sapiens]
NPRETPSQARHQMASAGGKPNANTGGDTKGRKRKFLPHGKPVRKGAYPLRPGVQGFFITCDGGREHQATREAISLLDTFYEDLVDGKVFDEKPKSIPDKPLNKKIKFEDSDSSDDEDEGHSVEEADNGNDVEKGEAKSSEQQQEVPGALEVVSKEDEEQVETADGSAPKKQRIEDPLVSEQTEPKVPTDEPTETTDDKPKESTDKPAETTDDKPKESTDKPAETTDDKPKESTDKPTETSDKPKASNDKPKEFTGKPKASNDIPIDDLIDEDLKQLGDRKKRLFASVDSGCNGCIFIQMHKRGGDPGPVEIVQNMMSSAASTRKHMSRFILRVLPAEVVCYASEEEITRAVTPLVEKYFPKESPSGHKFAVLYEARSNTGIDRMKIINAVAKSIPQPHKVDLSNPDKTIIVQIAKTICMIGVVERYKELSKFNLRQLTSPPEK

SEQ ID NO: 12776 - protein, 431 aa, Triticum aestivum
  peptide (1)..(431): Ceres Seq. ID no. 13596874
  misc_feature (320)..(412): Pfam Name: Pfam Description:  THUMP domain
  misc_feature (143)..(427): NCBI GI NO: 18416857 NR Description: expressed protein [Arabidopsis thaliana]
  misc_feature (12)..(232): NCBI GI NO: 18416857 NR Description: expressed protein [Arabidopsis thaliana]
  misc_feature (215)..(431): NCBI GI NO: 24657540 NR Description: CG15014-PA [Drosophila melanogaster]
  misc_feature (238)..(430): NCBI GI NO: 8923247 NR Description: hypothetical protein FLJ20274 [Homo sapiens]
  misc_feature (238)..(430): NCBI GI NO: 12653357 NR Description: hypothetical protein FLJ20274 [Homo sapiens]
  misc_feature (259)..(431): NCBI GI NO: 38174056 NR Description: Unknown (protein for MGC:75804)
  misc_feature (270)..(430): NCBI GI NO: 2988398 NR Description: Unknown gene product [Homo sapiens]
  misc_feature (231)..(425): NCBI GI NO: 34859071 NR Description: similar to RIKEN cDNA 6330575P11
  misc_feature (231)..(425): NCBI GI NO: 21704176 NR Description: RIKEN cDNA 6330575P11 [Mus musculus]
  misc_feature (238)..(430): NCBI GI NO: 34365206 NR Description: hypothetical protein [Homo sapiens]
MASAGGKPNANTGGDTKGRKRKFLPHGKPVRKGAYPLRPGVQGFFITCDGGREHQATREAISLLDTFYEDLVDGKVFDEKPKSIPDKPLNKKIKFEDSDSSDDEDEGHSVEEADNGNDVEKGEAKSSEQQQEVPGALEVVSKEDEEQVETADGSAPKKQRIEDPLVSEQTEPKVPTDEPTETTDDKPKESTDKPAETTDDKPKESTDKPAETTDDKPKESTDKPTETSDKPKASNDKPKEFTGKPKASNDIPIDDLIDEDLKQLGDRKKRLFASVDSGCNGCIFIQMHKRGGDPGPVEIVQNMMSSAASTRKHMSRFILRVLPAEVVCYASEEEITRAVTPLVEKYFPKESPSGHKFAVLYEARSNTGIDRMKIINAVAKSIPQPHKVDLSNPDKTIIVQIAKTICMIGVVERYKELSKFNLRQLTSPPEK

SEQ ID NO: 12777 - DNA, 1478 bp, Triticum aestivum
  misc_feature (1)..(1478): Ceres Seq. ID no. 14314092
ctcacccacactcacgctcgcacccacaccaccggccggccgcccgcgtctgtcaaccgaaagcagcacagcgcccccacggtcggtctacatctactacccaccgcctggttctcctccgaaaccacgcccgtctactagttgtgtgccgatcgaactagcgcgtacgtgaaaaatgcaccgccagatggccgcgccggtggctgccgctgtggcgtgggcgccgctgctgctggtgctgctctgggcggcggggtgcgcgggccaggcgctggtgccgggcgtgatgatcttcggggactcggtggtggacgccggcaacaacaaccggctggccacgctggtgcgcgccgacttcccgccctacggccgcgacttcccggccacccacgcgcccaccggccgcttctgcaacggcaagctcgccaccgactacaccgtggagagcctggggctcagctcgtacccgccggcgtacctgagcgaggaggcgcagagcgacaacaggaccctcctccacggcgccaacttcgcctccggcgccgccggctacctcgacgccaccgccgcgctctacggcgccatctcgctggggcggcagctggactacttcaaggagtaccagtccaaggtggcggcggtggccggcgagaagcgcgcggcggcgctcacgtccgggtccatctacgtggtgagcgccgggacgagcgactacgtgcagaactactacgtgaacgccatgctggccgccgcctacacccccgaccagttcgccgacgcgctcatgcagccattcacggccttcgtcgagaggctgtacgggctgggagcgcggcggatcggggtgacgtcgctgccgcccatggggtgcctgccggcgtccgtcaccctcttcggcggcggcggcgggggcggctgcgtggagcggctcaacaacgactccctcaccttcaacgccaagctgcaggcggcgtcggacgcggccaagaagcgccactcggacctcaagctcgtcgtcttcgacatctacaacccgctcctcaacctcgtcgccgaccccatgagcgccgggttcttcgagtctcggcgcgcgtgctgtgggacggggaccatcgagacgtcggtgctgtgccaccagggggcgccggggacgtgcgccaacgccaccggctacgtcttctgggacggcttccaccccaccgacgccgccaacaaggtgctcgccgacgcgctgctcctccagggactccagctcatctcctagctagctgctcagtccttcctcgccgctccaatggcgctctgacaccgcaccgaccgtcttgtgcatgtctgtccgtttacctcctggcttttcttgcttgtcatctctactaccggatcatctctcctgctgttttgtttgctttcaactactactgtgtttccgtgcttttgtgtgatgtgaatgtgatccgtaatgtgatatagcggcactc

SEQ ID NO: 12778 - protein, 362 aa, Triticum aestivum
  peptide (1)..(362): Ceres Seq. ID no. 14314093
  misc_feature (37)..(353): Pfam Name: Pfam Description:  GDSL-like Lipase/Acylhydrolase
  misc_feature (9)..(362): NCBI GI NO: 13174242 NR Description: putative proline-rich protein [Oryza sativa]
  misc_feature (18)..(362): NCBI GI NO: 9758010 NR Description: proline-rich protein APG-like
  misc_feature (19)..(362): NCBI GI NO: 15237531 NR Description: GDSL-motif lipase/hydrolase protein
  misc_feature (41)..(362): NCBI GI NO: 15237528 NR Description: GDSL-motif lipase/hydrolase protein
  misc_feature (31)..(362): NCBI GI NO: 15237137 NR Description: lipase, putative [Arabidopsis thaliana]
  misc_feature (18)..(362): NCBI GI NO: 30693763 NR Description: GDSL-motif lipase/hydrolase protein
  misc_feature (33)..(361): NCBI GI NO: 15228189 NR Description: GDSL-motif lipase/hydrolase protein
  misc_feature (38)..(361): NCBI GI NO: 2062167 NR Description: Proline-rich protein APG isolog
  misc_feature (18)..(362): NCBI GI NO: 10638955 NR Description: putative proline-rich protein APG isolog
  misc_feature (18)..(300): NCBI GI NO: 11280580 NR Description: hypothetical protein T4D2
MHRQMAAPVAAAVAWAPLLLVLLWAAGCAGQALVPGVMIFGDSVVDAGNNNRLATLVRADFPPYGRDFPATHAPTGRFCNGKLATDYTVESLGLSSYPPAYLSEEAQSDNRTLLHGANFASGAAGYLDATAALYGAISLGRQLDYFKEYQSKVAAVAGEKRAAALTSGSIYVVSAGTSDYVQNYYVNAMLAAAYTPDQFADALMQPFTAFVERLYGLGARRIGVTSLPPMGCLPASVTLFGGGGGGGCVERLNNDSLTFNAKLQAASDAAKKRHSDLKLVVFDIYNPLLNLVADPMSAGFFESRRACCGTGTIETSVLCHQGAPGTCANATGYVFWDGFHPTDAANKVLADALLLQGLQLIS

SEQ ID NO: 12779 - protein, 358 aa, Triticum aestivum
  peptide (1)..(358): Ceres Seq. ID no. 14314094
  misc_feature (33)..(349): Pfam Name: Pfam Description:  GDSL-like Lipase/Acylhydrolase
  misc_feature (5)..(358): NCBI GI NO: 13174242 NR Description: putative proline-rich protein [Oryza sativa]
  misc_feature (14)..(358): NCBI GI NO: 9758010 NR Description: proline-rich protein APG-like
  misc_feature (15)..(358): NCBI GI NO: 15237531 NR Description: GDSL-motif lipase/hydrolase protein
  misc_feature (37)..(358): NCBI GI NO: 15237528 NR Description: GDSL-motif lipase/hydrolase protein
  misc_feature (27)..(358): NCBI GI NO: 15237137 NR Description: lipase, putative [Arabidopsis thaliana]
  misc_feature (14)..(358): NCBI GI NO: 30693763 NR Description: GDSL-motif lipase/hydrolase protein
  misc_feature (29)..(357): NCBI GI NO: 15228189 NR Description: GDSL-motif lipase/hydrolase protein
  misc_feature (34)..(357): NCBI GI NO: 2062167 NR Description: Proline-rich protein APG isolog
  misc_feature (14)..(358): NCBI GI NO: 10638955 NR Description: putative proline-rich protein APG isolog
  misc_feature (14)..(296): NCBI GI NO: 11280580 NR Description: hypothetical protein T4D2
MAAPVAAAVAWAPLLLVLLWAAGCAGQALVPGVMIFGDSVVDAGNNNRLATLVRADFPPYGRDFPATHAPTGRFCNGKLATDYTVESLGLSSYPPAYLSEEAQSDNRTLLHGANFASGAAGYLDATAALYGAISLGRQLDYFKEYQSKVAAVAGEKRAAALTSGSIYVVSAGTSDYVQNYYVNAMLAAAYTPDQFADALMQPFTAFVERLYGLGARRIGVTSLPPMGCLPASVTLFGGGGGGGCVERLNNDSLTFNAKLQAASDAAKKRHSDLKLVVFDIYNPLLNLVADPMSAGFFESRRACCGTGTIETSVLCHQGAPGTCANATGYVFWDGFHPTDAANKVLADALLLQGLQLIS

SEQ ID NO: 12780 - protein, 325 aa, Triticum aestivum
  peptide (1)..(325): Ceres Seq. ID no. 14314095
  misc_feature (1)..(316): Pfam Name: Pfam Description:  GDSL-like Lipase/Acylhydrolase
  misc_feature (1)..(325): NCBI GI NO: 13174242 NR Description: putative proline-rich protein [Oryza sativa]
  misc_feature (1)..(325): NCBI GI NO: 9758010 NR Description: proline-rich protein APG-like
  misc_feature (1)..(325): NCBI GI NO: 15237531 NR Description: GDSL-motif lipase/hydrolase protein
  misc_feature (4)..(325): NCBI GI NO: 15237528 NR Description: GDSL-motif lipase/hydrolase protein
  misc_feature (1)..(325): NCBI GI NO: 15237137 NR Description: lipase, putative [Arabidopsis thaliana]
  misc_feature (1)..(325): NCBI GI NO: 30693763 NR Description: GDSL-motif lipase/hydrolase protein
  misc_feature (1)..(324): NCBI GI NO: 15228189 NR Description: GDSL-motif lipase/hydrolase protein
  misc_feature (1)..(324): NCBI GI NO: 2062167 NR Description: Proline-rich protein APG isolog
  misc_feature (1)..(325): NCBI GI NO: 10638955 NR Description: putative proline-rich protein APG isolog
  misc_feature (1)..(263): NCBI GI NO: 11280580 NR Description: hypothetical protein T4D2
MIFGDSVVDAGNNNRLATLVRADFPPYGRDFPATHAPTGRFCNGKLATDYTVESLGLSSYPPAYLSEEAQSDNRTLLHGANFASGAAGYLDATAALYGAISLGRQLDYFKEYQSKVAAVAGEKRAAALTSGSIYVVSAGTSDYVQNYYVNAMLAAAYTPDQFADALMQPFTAFVERLYGLGARRIGVTSLPPMGCLPASVTLFGGGGGGGCVERLNNDSLTFNAKLQAASDAAKKRHSDLKLVVFDIYNPLLNLVADPMSAGFFESRRACCGTGTIETSVLCHQGAPGTCANATGYVFWDGFHPTDAANKVLADALLLQGLQLIS

SEQ ID NO: 12781 - DNA, 1534 bp, Triticum aestivum
  misc_feature (1)..(1534): Ceres Seq. ID no. 12778345
ataccgctcccatctcacacaacccccttaaaccccagaagcctccatccgcggcgcccccaacgaaaaccctagcccgccatggccctcgcgctccgcctccgtcgggccctcgccgccgcctccacctccgcatccctcctccgtccgactgcctccgccgcggcatccccccatcgggctcccctcctcgcccctttcgtcgcgccgctgccgcgcccgttcctccccgggggcgccgccggcttccggtcgacggcggcggcagcggcacggggaaactacggcggtggggcggacgacgccaaaatcgaccccgacgagatcctcttcgaggggtgcgactacaaccactggctcatcaccatggagttccccgaccccaagccctcccgcgaggagatgatcgagacctacctgcagaccctcgccaaggtcgtcggaagttatgaggaggctaagaagaggatgtatgctcttagtacaacaacatatgttgggtttcaagctgtaatgactgaggaaatgtcagaaaagtttcgcggattgcctggagttgtttttatcttgcctgattcatatttatacccagagacaaaggagtatggaggagacaaatacgagaatggtgtcataactccaagaccaccacctgttcagtatagcaaaccgtcaaggaatgatagaaaccgcaactgtcgtggaaattacgaaaacagtcctccaccgcaaggtaattaccagaacaggtcgccaccacaaggaaacttccaagggtcccgcccacagcaagacgtaagaggctacgctccacagcagaattacgcacaagctgggcaagatggtagaggttatgggaggaatgattctgccgaccatccaggttacaatgcgcctggtgggtaccaagggcgtgtaaatgaagccggtcaaggtttccaagatccacaagagcgcaggagtttctcgcaaggacaggaaggagatctcaggcctggtggcccttcagcacctggaaattatggtcaaccgcctgcacctggaaattatggtcaaccacctgcacctggaaattacggtcaaccgcctgcacctggaaattatggtcaaccacctgctcctggatcctatgggaagccatctggacctccagcttatggacaaccgtctgggtcgagatatcctggaggtaaccaagggggtcctggttatggtggagacaacagacagggtgcagcgcctgcatatggaggggataacttgcaaggggtttctggtcagtatcctagcccaggtgaaggacaacaagggaactggcagggtaggcagtaaggacctgatgagaagtagcttcacttaagaacaaggcattagttcctctacttgaaatgtagaaatttccacctgtaaaataaacagctgaactactttattttgtcttgttgcctgcattcacatcagacttattattgatgtgcgttactatctcttgtagccatatatttgacgtttggaaaggcttgtggagtctggc

SEQ ID NO: 12782 - protein, 416 aa, Triticum aestivum
  peptide (1)..(416): Ceres Seq. ID no. 12778346
  misc_feature (208)..(416): Pfam Name: Pfam Description:  High molecular weight glutenin subunit
  misc_feature (6)..(383): NCBI GI NO: 15235263 NR Description: DAG-like protein; protein id: At4g20020.1
  misc_feature (10)..(216): NCBI GI NO: 38636775 NR Description: putative DAG protein
  misc_feature (39)..(416): NCBI GI NO: 15241580 NR Description: unknown protein; protein id: At5g44780.1
  misc_feature (15)..(226): NCBI GI NO: 15220382 NR Description: DAG protein, putative; protein id: At1g11430
  misc_feature (15)..(226): NCBI GI NO: 21593052 NR Description: DAG protein, putative [Arabidopsis thaliana]
  misc_feature (1)..(391): NCBI GI NO: 18400602 NR Description: expressed protein; protein id: At3g15000
  misc_feature (14)..(227): NCBI GI NO: 6014904 NR Description: DAG PROTEIN, CHLOROPLAST PRECURSOR
  misc_feature (79)..(229): NCBI GI NO: 27754695 NR Description: putative DAG protein [Arabidopsis thaliana]
  misc_feature (79)..(229): NCBI GI NO: 15230785 NR Description: DAG protein, putative; protein id: At3g06790.1
  misc_feature (1)..(207): NCBI GI NO: 34897972 NR Description: putative plastid protein
MALALRLRRALAAASTSASLLRPTASAAASPHRAPLLAPFVAPLPRPFLPGGAAGFRSTAAAAARGNYGGGADDAKIDPDEILFEGCDYNHWLITMEFPDPKPSREEMIETYLQTLAKVVGSYEEAKKRMYALSTTTYVGFQAVMTEEMSEKFRGLPGVVFILPDSYLYPETKEYGGDKYENGVITPRPPPVQYSKPSRNDRNRNCRGNYENSPPPQGNYQNRSPPQGNFQGSRPQQDVRGYAPQQNYAQAGQDGRGYGRNDSADHPGYNAPGGYQGRVNEAGQGFQDPQERRSFSQGQEGDLRPGGPSAPGNYGQPPAPGNYGQPPAPGNYGQPPAPGNYGQPPAPGSYGKPSGPPAYGQPSGSRYPGGNQGGPGYGGDNRQGAAPAYGGDNLQGVSGQYPSPGEGQQGNWQGRQ

SEQ ID NO: 12783 - protein, 321 aa, Triticum aestivum
  peptide (1)..(321): Ceres Seq. ID no. 12778347
  misc_feature (113)..(321): Pfam Name: Pfam Description:  High molecular weight glutenin subunit
  misc_feature (1)..(288): NCBI GI NO: 15235263 NR Description: DAG-like protein; protein id: At4g20020.1
  misc_feature (1)..(121): NCBI GI NO: 38636775 NR Description: putative DAG protein
  misc_feature (1)..(321): NCBI GI NO: 15241580 NR Description: unknown protein; protein id: At5g44780.1
  misc_feature (1)..(131): NCBI GI NO: 15220382 NR Description: DAG protein, putative; protein id: At1g11430
  misc_feature (1)..(131): NCBI GI NO: 21593052 NR Description: DAG protein, putative [Arabidopsis thaliana]
  misc_feature (1)..(296): NCBI GI NO: 18400602 NR Description: expressed protein; protein id: At3g15000
  misc_feature (1)..(132): NCBI GI NO: 6014904 NR Description: DAG PROTEIN, CHLOROPLAST PRECURSOR
  misc_feature (1)..(134): NCBI GI NO: 27754695 NR Description: putative DAG protein [Arabidopsis thaliana]
  misc_feature (1)..(134): NCBI GI NO: 15230785 NR Description: DAG protein, putative; protein id: At3g06790.1
  misc_feature (1)..(112): NCBI GI NO: 34897972 NR Description: putative plastid protein
MEFPDPKPSREEMIETYLQTLAKVVGSYEEAKKRMYALSTTTYVGFQAVMTEEMSEKFRGLPGVVFILPDSYLYPETKEYGGDKYENGVITPRPPPVQYSKPSRNDRNRNCRGNYENSPPPQGNYQNRSPPQGNFQGSRPQQDVRGYAPQQNYAQAGQDGRGYGRNDSADHPGYNAPGGYQGRVNEAGQGFQDPQERRSFSQGQEGDLRPGGPSAPGNYGQPPAPGNYGQPPAPGNYGQPPAPGNYGQPPAPGSYGKPSGPPAYGQPSGSRYPGGNQGGPGYGGDNRQGAAPAYGGDNLQGVSGQYPSPGEGQQGNWQGRQ

SEQ ID NO: 12784 - protein, 309 aa, Triticum aestivum
  peptide (1)..(309): Ceres Seq. ID no. 12778348
  misc_feature (101)..(309): Pfam Name: Pfam Description:  High molecular weight glutenin subunit
  misc_feature (1)..(276): NCBI GI NO: 15235263 NR Description: DAG-like protein; protein id: At4g20020.1
  misc_feature (1)..(109): NCBI GI NO: 38636775 NR Description: putative DAG protein
  misc_feature (1)..(309): NCBI GI NO: 15241580 NR Description: unknown protein; protein id: At5g44780.1
  misc_feature (1)..(119): NCBI GI NO: 15220382 NR Description: DAG protein, putative; protein id: At1g11430
  misc_feature (1)..(119): NCBI GI NO: 21593052 NR Description: DAG protein, putative [Arabidopsis thaliana]
  misc_feature (1)..(284): NCBI GI NO: 18400602 NR Description: expressed protein; protein id: At3g15000
  misc_feature (1)..(120): NCBI GI NO: 6014904 NR Description: DAG PROTEIN, CHLOROPLAST PRECURSOR
  misc_feature (1)..(122): NCBI GI NO: 27754695 NR Description: putative DAG protein [Arabidopsis thaliana]
  misc_feature (1)..(122): NCBI GI NO: 15230785 NR Description: DAG protein, putative; protein id: At3g06790.1
  misc_feature (1)..(100): NCBI GI NO: 34897972 NR Description: putative plastid protein
MIETYLQTLAKVVGSYEEAKKRMYALSTTTYVGFQAVMTEEMSEKFRGLPGVVFILPDSYLYPETKEYGGDKYENGVITPRPPPVQYSKPSRNDRNRNCRGNYENSPPPQGNYQNRSPPQGNFQGSRPQQDVRGYAPQQNYAQAGQDGRGYGRNDSADHPGYNAPGGYQGRVNEAGQGFQDPQERRSFSQGQEGDLRPGGPSAPGNYGQPPAPGNYGQPPAPGNYGQPPAPGNYGQPPAPGSYGKPSGPPAYGQPSGSRYPGGNQGGPGYGGDNRQGAAPAYGGDNLQGVSGQYPSPGEGQQGNWQGRQ

SEQ ID NO: 12785 - DNA, 1236 bp, Triticum aestivum
  misc_feature (1)..(1236): Ceres Seq. ID no. 13654922
  misc_feature (1107)..(1107): n is a, c, t, g, unknown, or other
  misc_feature (1108)..(1108): n is a, c, t, g, unknown, or other
acctaccccagtggccagccctatagacgacttcctgtctccttccggcggccacctccgtccatcgctctccgccgccgccgccacccggactctaaatcccttgctcctctccaccggaaaccttgaccggccgaggaggcagcacattcacaccggcggcgtgatctggtctggtctgctagattgatcgttcattcactccattgatgacgctctctgcttccccgcactccccgccgccgtctacctcccggcccccgctcctctcctggcccagctagccagccggcgcgagcgagcgagctccccgtccaccgtccagctattagccaagctccttcgaggccggcaatggcggcgcccaggcccaagtccccgctcgacccctgcggccgccaccggctgcagctcgccgtcgacgcgctccaccgccagatcagcttcctcgagggggagatcagttccattgaagggctccatgctgcctccatatgctgcaaagaggtcgatgagttcataggaaagaatgccgatccattcatcacgatttcatctgagaagggaaatgctgatcaatctcatcgcttcccaaagaagattcgaacccggtgggcgtgtttgagctgcttcccgtggatctgcggcggcgggtgctccgccgtccagctcaaggggccgagctgctgctgcggatgcccccgttgctgcgtggggagcgggggctgcggcggcggaccctcgtgtggctgctcatgctcctgcgccggttgctcctcctcttgcgcgtgccctgcctgcgccggctgcggcgccgcgtgctgcggcggtgcccctcgccctcgctgctgcctgtgttcatgaggcgccctattgagatttttcctcttctttgttcttgctgtgtgcgttgcctgtaggctcaggctcggctggtgtttttgacgggcatgatgatgatgatgtatttctggctcagttggcgctgtggatttgcctggttttacttgccacagcgatggatcccttgtgctttcgtccttgctatagtctcctatgttgtaattaaaggtttggagataactgcagaatgaacggttcttctcnnaaaaaaaaaaaaaaaaaaaaaaaaaaaaaaaaaaaaaaaaaaaaaaaaaaaaaaaaaaaaaaaaaaaaaaaacccaaaaaaaaaaaaaaaaagttttttgaatcgggggaacttggggggggggcggg

SEQ ID NO: 12786 - protein, 169 aa, Triticum aestivum
  peptide (1)..(169): Ceres Seq. ID no. 13654923
  misc_feature (92)..(156): Pfam Name: Pfam Description:  Chorion protein
  misc_feature (2)..(51): NCBI GI NO: 30017557 NR Description: hypothetical protein
  misc_feature (96)..(168): NCBI GI NO: 225134 NR Description: chorion protein A14
  misc_feature (92)..(159): NCBI GI NO: 116298 NR Description: CHORION CLASS HIGH-CYSTEINE HCB PROTEIN 13PRECURSOR
  misc_feature (92)..(159): NCBI GI NO: 6015487 NR Description: Hc-B chorion protein [Bombyx mori]
  misc_feature (88)..(168): NCBI GI NO: 34147131 NR Description: RIKEN cDNA A030003K21 [Mus musculus]
  misc_feature (97)..(166): NCBI GI NO: 20853287 NR Description: hypothetical protein XP_147288 [Mus musculus]
  misc_feature (89)..(166): NCBI GI NO: 225150 NR Description: chorion protein B11
  misc_feature (96)..(169): NCBI GI NO: 225150 NR Description: chorion protein B11
  misc_feature (96)..(168): NCBI GI NO: 102922 NR Description: high-cysteine chorion A 12 protein precursor -silkworm
  misc_feature (96)..(168): NCBI GI NO: 116295 NR Description: CHORION CLASS HIGH-CYSTEINE HCA PROTEIN 12PRECURSOR
MAAPRPKSPLDPCGRHRLQLAVDALHRQISFLEGEISSIEGLHAASICCKEVDEFIGKNADPFITISSEKGNADQSHRFPKKIRTRWACLSCFPWICGGGCSAVQLKGPSCCCGCPRCCVGSGGCGGGPSCGCSCSCAGCSSSCACPACAGCGAACCGGAPRPRCCLCS

SEQ ID NO: 12787 - DNA, 1534 bp, Triticum aestivum
  misc_feature (1)..(1534): Ceres Seq. ID no. 13654809
gtcctcccctccctcgcgagtccgaagtcaaggcgaaaaccctcgaggcgaagcgagagtcagataggataccgcgagagacgagagtcgagtgagagggtggaagggaagccgagatgaagctcaacgtgaagaccctcaagggcacaagcttcgagatcgaggcgacccccgaggcctcggtgggtgaggtcaagagaatcatcgagagtgctcaggggcagaatgtgtaccctgcggatcagctgatgatcatatatcaaggaaaaattcttaaggatgataccactctggaagttaataaggttgcagagaacagcttccttgttataatgctgtctaagccgaaggcgtcgtctagtggtgcttctactgcttcaaagacacctgttagtcagtctcaacctgccactccacctgcccctgttacctcagctgcaagatcaccaccttcacaggcacctgttgctgcatctgaaccggcgcctcccagtgcacagccttcagctgtctctgatactccatctcctgcagtaactgcatcaggcgatgctgatgtatacagtcaggctgcatcaaaccttgtctctggcggcagtctagaacagacagtccaacaaattcttgacatgggcggtggaacctgggaacgtgatatggttgtccgtgcattacgtgctgcatataacaaccctgagagggctattgactatctgtattctggaatacctgaatctgtagaggccycacctgtggctcgagcacctgctcctgctcaacaggcaccaaacctgcaggctcctcaggctcaggctgcacctctaccaccagtgcagccatctggtggcgtctctgcagggcctaatgcaaatcctctaaaccttttcccgcagggtattccaagtggcggggcaaatgctggtgccggtgtgggtgccggtgctggtgcccttgatgcattgcgacagcttccacagttccaagcactgcttgcattggtccaggctaatccccaaatcctgcagccaatgcttcaagagctggggaaacaaaatccgcagatcctgcggttgattcaggaaaatcaggctgagtttctccgcctggtaaatgaaacacctgagagtggtgctggcggaaatatactaggcgcactcgcagctcaaatgccacaggcagttcaagttactccagaagaacgggaggccatccagcggctcgaggcgatggggttcaaccgtgagcttgtgttggaggtcttctttgcatgcaacagggatgaagaactggctgccaactatcttttggatcatggccacgagtttgaggaacaacaatagatgttagattggtgttaccgtcgaaagacagaagagtcagtgacataagcagtacagtttggtgtcgttcttatatcttgctgctgaatatcactactagtacttgtcattagtgcgatgctgctgactttaaatttcttgtatcctggaaattctttctaagtacatatcaatatcaatattcaaacctcatg

SEQ ID NO: 12788 - protein, 407 aa, Triticum aestivum
  peptide (1)..(407): Ceres Seq. ID no. 15219694
  misc_feature (1)..(78): Pfam Name: Pfam Description:  Ubiquitin family
  misc_feature (1)..(405): NCBI GI NO: 5640111 NR Description: RAD23 protein [Lycopersicon esculentum]
  misc_feature (1)..(405): NCBI GI NO: 38175472 NR Description: putative osRAD23
  misc_feature (1)..(406): NCBI GI NO: 15240922 NR Description: DNA repair protein RAD23, putative
  misc_feature (1)..(406): NCBI GI NO: 14335004 NR Description: unknown protein [Arabidopsis thaliana]
  misc_feature (122)..(405): NCBI GI NO: 30409726 NR Description: RAD23-like protein [Arabidopsis thaliana]
  misc_feature (1)..(82): NCBI GI NO: 30409726 NR Description: RAD23-like protein [Arabidopsis thaliana]
  misc_feature (80)..(405): NCBI GI NO: 15232924 NR Description: RAD23 -related [Arabidopsis thaliana]
  misc_feature (1)..(345): NCBI GI NO: 7446459 NR Description: RAD23 protein, isoform I - carrot
  misc_feature (1)..(405): NCBI GI NO: 7446460 NR Description: RAD23 protein, isoform II - carrot
  misc_feature (83)..(406): NCBI GI NO: 7446462 NR Description: RAD23 protein homolog - rice
  misc_feature (211)..(211): Xaa is any aa, unknown or other
MKLNVKTLKGTSFEIEATPEASVGEVKRIIESAQGQNVYPADQLMIIYQGKILKDDTTLEVNKVAENSFLVIMLSKPKASSSGASTASKTPVSQSQPATPPAPVTSAARSPPSQAPVAASEPAPPSAQPSAVSDTPSPAVTASGDADVYSQAASNLVSGGSLEQTVQQILDMGGGTWERDMVVRALRAAYNNPERAIDYLYSGIPESVEAXPVARAPAPAQQAPNLQAPQAQAAPLPPVQPSGGVSAGPNANPLNLFPQGIPSGGANAGAGVGAGAGALDALRQLPQFQALLALVQANPQILQPMLQELGKQNPQILRLIQENQAEFLRLVNETPESGAGGNILGALAAQMPQAVQVTPEEREAIQRLEAMGFNRELVLEVFFACNRDEELAANYLLDHGHEFEEQQ

SEQ ID NO: 12789 - protein, 363 aa, Triticum aestivum
  peptide (1)..(363): Ceres Seq. ID no. 15219695
  misc_feature (117)..(159): Pfam Name: Pfam Description:  UBA/TS-N domain
  misc_feature (1)..(361): NCBI GI NO: 5640111 NR Description: RAD23 protein [Lycopersicon esculentum]
  misc_feature (1)..(361): NCBI GI NO: 38175472 NR Description: putative osRAD23
  misc_feature (1)..(362): NCBI GI NO: 15240922 NR Description: DNA repair protein RAD23, putative
  misc_feature (1)..(362): NCBI GI NO: 14335004 NR Description: unknown protein [Arabidopsis thaliana]
  misc_feature (78)..(361): NCBI GI NO: 30409726 NR Description: RAD23-like protein [Arabidopsis thaliana]
  misc_feature (1)..(38): NCBI GI NO: 30409726 NR Description: RAD23-like protein [Arabidopsis thaliana]
  misc_feature (36)..(361): NCBI GI NO: 15232924 NR Description: RAD23 -related [Arabidopsis thaliana]
  misc_feature (1)..(301): NCBI GI NO: 7446459 NR Description: RAD23 protein, isoform I - carrot
  misc_feature (1)..(361): NCBI GI NO: 7446460 NR Description: RAD23 protein, isoform II - carrot
  misc_feature (39)..(362): NCBI GI NO: 7446462 NR Description: RAD23 protein homolog - rice
  misc_feature (167)..(167): Xaa is any aa, unknown or other
MIIYQGKILKDDTTLEVNKVAENSFLVIMLSKPKASSSGASTASKTPVSQSQPATPPAPVTSAARSPPSQAPVAASEPAPPSAQPSAVSDTPSPAVTASGDADVYSQAASNLVSGGSLEQTVQQILDMGGGTWERDMVVRALRAAYNNPERAIDYLYSGIPESVEAXPVARAPAPAQQAPNLQAPQAQAAPLPPVQPSGGVSAGPNANPLNLFPQGIPSGGANAGAGVGAGAGALDALRQLPQFQALLALVQANPQILQPMLQELGKQNPQILRLIQENQAEFLRLVNETPESGAGGNILGALAAQMPQAVQVTPEEREAIQRLEAMGFNRELVLEVFFACNRDEELAANYLLDHGHEFEEQQ

SEQ ID NO: 12790 - protein, 335 aa, Triticum aestivum
  peptide (1)..(335): Ceres Seq. ID no. 15219696
  misc_feature (89)..(131): Pfam Name: Pfam Description:  UBA/TS-N domain
  misc_feature (1)..(333): NCBI GI NO: 5640111 NR Description: RAD23 protein [Lycopersicon esculentum]
  misc_feature (1)..(333): NCBI GI NO: 38175472 NR Description: putative osRAD23
  misc_feature (1)..(334): NCBI GI NO: 15240922 NR Description: DNA repair protein RAD23, putative
  misc_feature (1)..(334): NCBI GI NO: 14335004 NR Description: unknown protein [Arabidopsis thaliana]
  misc_feature (50)..(333): NCBI GI NO: 30409726 NR Description: RAD23-like protein [Arabidopsis thaliana]
  misc_feature (8)..(333): NCBI GI NO: 15232924 NR Description: RAD23 -related [Arabidopsis thaliana]
  misc_feature (1)..(273): NCBI GI NO: 7446459 NR Description: RAD23 protein, isoform I - carrot
  misc_feature (1)..(333): NCBI GI NO: 7446460 NR Description: RAD23 protein, isoform II - carrot
  misc_feature (11)..(334): NCBI GI NO: 7446462 NR Description: RAD23 protein homolog - rice
  misc_feature (1)..(258): NCBI GI NO: 30409730 NR Description: RAD23-like protein [Arabidopsis thaliana]
  misc_feature (139)..(139): Xaa is any aa, unknown or other
MLSKPKASSSGASTASKTPVSQSQPATPPAPVTSAARSPPSQAPVAASEPAPPSAQPSAVSDTPSPAVTASGDADVYSQAASNLVSGGSLEQTVQQILDMGGGTWERDMVVRALRAAYNNPERAIDYLYSGIPESVEAXPVARAPAPAQQAPNLQAPQAQAAPLPPVQPSGGVSAGPNANPLNLFPQGIPSGGANAGAGVGAGAGALDALRQLPQFQALLALVQANPQILQPMLQELGKQNPQILRLIQENQAEFLRLVNETPESGAGGNILGALAAQMPQAVQVTPEEREAIQRLEAMGFNRELVLEVFFACNRDEELAANYLLDHGHEFEEQQ

SEQ ID NO: 12791 - DNA, 1382 bp, Triticum aestivum
  misc_feature (1)..(1382): Ceres Seq. ID no. 12615622
aaaaaaccaagtctcgcacgccatcttggcaagcactctctcctcccccaccgcgccgccgagctccgcctccggcagacgcaagcaggccacctcggacgaattcttcttcccctactcctcgtatctaccgcgatggcgtcgggtggagatctcccatccgggtttgctgatgagagcaaaagtacgaaaacagaaggatcatccaacgaacgtcaaggggttcctccagctgccgctgcaggcttgtcgggtcctttcgatttttcttctatgcaaagtttgctcaatgatccatctataaaggagatggcagaccagattgcaagggaccctgcattcaatcagatggctgagcagctacagaaaggtgctcagactgcaggagaacagggcatgcctccattggatcctcatcaatacatggaaacaatgcaaaaggtcatggaaaaccctcagtttatgacaatggcagagcgcctcgggactgctcttatgcaggatcctgctatgtccagtatgctggaaaatttgactagtccaacacataaggaggagcttgaagagcgcatgtctcggattaaggaagatccagccttgaagccaattcttgatgagttagagaatggtggtcctgctgcaatgataaagtactggaatgaccctgaaactcttcaaaagattggccaggcaatgggaactaccatgccgtttagcactgtctctactgctgaaccttctggtactgaagaaactgaagaagaaggtgaagatgaagacgaatccattgtccaccacactgccagtgttggtgacggtgagggtctgaagaaggctctagatggtggagcagacaaggatgaagaagactctgagggaagaagggccttgcactttgcatgtggatatggtgagttcaagtgtgcggaaatcctccttgaggcgggtgctgctgtagatgccatggataagaacaagaacaccccactgcattacgctgctggctatggccggaaagagtgtgtggatcttctgttgaagcacggtgctgctgtcactctccaaaacatggatgggaagacgcccatcgacgtcgccaagctcaacaaccaggacgaggtcctcaagctgctcgagaaggacgtgttcctgtaaatcacttcacttggcccccatgaagagacatcatgttttacatcccttggcattggttttatatagtcatacacgaatcggcattttattcgttgtgtaagaatctactgttagctagcctgcaggccgactggctgaggttagaactgcatgttactgtatatggagacctgtgtatcgtccactttgtttctgttgattccactagagtaatccaagatgtactc

SEQ ID NO: 12792 - protein, 384 aa, Triticum aestivum
  peptide (1)..(384): Ceres Seq. ID no. 12615623
  misc_feature (325)..(357): Pfam Name: Pfam Description:  Ankyrin repeat
  misc_feature (58)..(384): NCBI GI NO: 38175562 NR Description: putative ankyrin domain protein
  misc_feature (48)..(384): NCBI GI NO: 24637568 NR Description: ankyrin domain protein [Nicotiana tabacum]
  misc_feature (48)..(384): NCBI GI NO: 13310811 NR Description: ankyrin-repeat protein HBP1 [Nicotiana tabacum]
  misc_feature (60)..(384): NCBI GI NO: 29826242 NR Description: TGB12K interacting protein 2 [Nicotiana tabacum]
  misc_feature (60)..(384): NCBI GI NO: 29826244 NR Description: TGB12K interacting protein 3 [Nicotiana tabacum]
  misc_feature (46)..(384): NCBI GI NO: 27573339 NR Description: unknown protein
  misc_feature (58)..(384): NCBI GI NO: 15237008 NR Description: ankyrin repeat-containing protein 2
  misc_feature (58)..(384): NCBI GI NO: 3478700 NR Description: AFT protein [Arabidopsis thaliana]
  misc_feature (58)..(384): NCBI GI NO: 4205079 NR Description: ankyrin repeat-containing protein 2
  misc_feature (82)..(384): NCBI GI NO: 30690372 NR Description: ankyrin repeat-containing protein 2
KKPSLARHLGKHSLLPHRAAELRLRQTQAGHLGRILLPLLLVSTAMASGGDLPSGFADESKSTKTEGSSNERQGVPPAAAAGLSGPFDFSSMQSLLNDPSIKEMADQIARDPAFNQMAEQLQKGAQTAGEQGMPPLDPHQYMETMQKVMENPQFMTMAERLGTALMQDPAMSSMLENLTSPTHKEELEERMSRIKEDPALKPILDELENGGPAAMIKYWNDPETLQKIGQAMGTTMPFSTVSTAEPSGTEETEEEGEDEDESIVHHTASVGDGEGLKKALDGGADKDEEDSEGRRALHFACGYGEFKCAEILLEAGAAVDAMDKNKNTPLHYAAGYGRKECVDLLLKHGAAVTLQNMDGKTPIDVAKLNNQDEVLKLLEKDVFL

SEQ ID NO: 12793 - protein, 339 aa, Triticum aestivum
  peptide (1)..(339): Ceres Seq. ID no. 12615624
  misc_feature (280)..(312): Pfam Name: Pfam Description:  Ankyrin repeat
  misc_feature (13)..(339): NCBI GI NO: 38175562 NR Description: putative ankyrin domain protein
  misc_feature (3)..(339): NCBI GI NO: 24637568 NR Description: ankyrin domain protein [Nicotiana tabacum]
  misc_feature (3)..(339): NCBI GI NO: 13310811 NR Description: ankyrin-repeat protein HBP1 [Nicotiana tabacum]
  misc_feature (15)..(339): NCBI GI NO: 29826242 NR Description: TGB12K interacting protein 2 [Nicotiana tabacum]
  misc_feature (15)..(339): NCBI GI NO: 29826244 NR Description: TGB12K interacting protein 3 [Nicotiana tabacum]
  misc_feature (1)..(339): NCBI GI NO: 27573339 NR Description: unknown protein
  misc_feature (13)..(339): NCBI GI NO: 15237008 NR Description: ankyrin repeat-containing protein 2
  misc_feature (13)..(339): NCBI GI NO: 3478700 NR Description: AFT protein [Arabidopsis thaliana]
  misc_feature (13)..(339): NCBI GI NO: 4205079 NR Description: ankyrin repeat-containing protein 2
  misc_feature (37)..(339): NCBI GI NO: 30690372 NR Description: ankyrin repeat-containing protein 2
MASGGDLPSGFADESKSTKTEGSSNERQGVPPAAAAGLSGPFDFSSMQSLLNDPSIKEMADQIARDPAFNQMAEQLQKGAQTAGEQGMPPLDPHQYMETMQKVMENPQFMTMAERLGTALMQDPAMSSMLENLTSPTHKEELEERMSRIKEDPALKPILDELENGGPAAMIKYWNDPETLQKIGQAMGTTMPFSTVSTAEPSGTEETEEEGEDEDESIVHHTASVGDGEGLKKALDGGADKDEEDSEGRRALHFACGYGEFKCAEILLEAGAAVDAMDKNKNTPLHYAAGYGRKECVDLLLKHGAAVTLQNMDGKTPIDVAKLNNQDEVLKLLEKDVFL

SEQ ID NO: 12794 - protein, 293 aa, Triticum aestivum
  peptide (1)..(293): Ceres Seq. ID no. 12615625
  misc_feature (234)..(266): Pfam Name: Pfam Description:  Ankyrin repeat
  misc_feature (1)..(293): NCBI GI NO: 38175562 NR Description: putative ankyrin domain protein
  misc_feature (1)..(293): NCBI GI NO: 24637568 NR Description: ankyrin domain protein [Nicotiana tabacum]
  misc_feature (1)..(293): NCBI GI NO: 13310811 NR Description: ankyrin-repeat protein HBP1 [Nicotiana tabacum]
  misc_feature (1)..(293): NCBI GI NO: 29826242 NR Description: TGB12K interacting protein 2 [Nicotiana tabacum]
  misc_feature (1)..(293): NCBI GI NO: 29826244 NR Description: TGB12K interacting protein 3 [Nicotiana tabacum]
  misc_feature (1)..(293): NCBI GI NO: 27573339 NR Description: unknown protein
  misc_feature (1)..(293): NCBI GI NO: 15237008 NR Description: ankyrin repeat-containing protein 2
  misc_feature (1)..(293): NCBI GI NO: 3478700 NR Description: AFT protein [Arabidopsis thaliana]
  misc_feature (1)..(293): NCBI GI NO: 4205079 NR Description: ankyrin repeat-containing protein 2
  misc_feature (1)..(293): NCBI GI NO: 30690372 NR Description: ankyrin repeat-containing protein 2
MQSLLNDPSIKEMADQIARDPAFNQMAEQLQKGAQTAGEQGMPPLDPHQYMETMQKVMENPQFMTMAERLGTALMQDPAMSSMLENLTSPTHKEELEERMSRIKEDPALKPILDELENGGPAAMIKYWNDPETLQKIGQAMGTTMPFSTVSTAEPSGTEETEEEGEDEDESIVHHTASVGDGEGLKKALDGGADKDEEDSEGRRALHFACGYGEFKCAEILLEAGAAVDAMDKNKNTPLHYAAGYGRKECVDLLLKHGAAVTLQNMDGKTPIDVAKLNNQDEVLKLLEKDVFL

SEQ ID NO: 12795 - DNA, 1415 bp, Triticum aestivum
  misc_feature (1)..(1415): Ceres Seq. ID no. 13596868
attaaaccgagcgccagtggatctctcctcgggcatcggcatcggagcggagagagagagagagagagccacccagccatgagatggtatgcatcggtaggctgagggcgctggtgcttcgtgcggcggcgggcgcgggcgcgggcaggcgccggtgggccagggtcctgtgcggtcgggcggtcgatgtgtgcgtgacaccccgtccgcgcgggcacggttggcgtggattccgggcggtggctggcgccaggacgaagatgatgctcgattcctccgactctgactccggcgctccggcggggcagctgcagctgcagcgccgcgcggttgctgctgggacccagccgcaggatggagggtacgccagtgcggggtggcagagggaagatggtaaactgaaatgtgggtattcaagttttagagggaaaagggctacaatggaggatttctatgatgtaaaactaactgaaattgatggacacgctgttagcctatttggtgtattcgatggtcatggggggtcacgtgctgctgagtatttgaaggagcatttgttcgagaaccttatgaaacaccccaagttcttgactgatacaaagcttgctataagtgaaacatatcagaagacagatgcagatttcttagaatcagaatcaagtgctttcagggatgatggttccacagcttcgactgcggttttagtgggtggccatctatatgtagcaaatgttggtgactcccgtgctgttatttcaaaagccgggaaagctagggcactctcagtagatcacaaacctaacaggtctgatgaacgcaagagaattgaaaatgctggaggtgttgtcatctgggctggtacttggagggtaggtggcgtactggcaatgtcccgtgcgtttggtaatcgtctactgaagccatttgtggtggcagaacctgaaattcaggaagaattgattaatggagaattggagagcctggttcttgccagtgatgggctttgggatgccgtagaaaatgaggaagctgtgtcccttgcaaaaacagaagatgtgccagagtctgcggccaggaaactgacggagattgcctactctcgtggcagcgctgacaatattacatgcatcgtggtgcaattccaccatgataaaattacaggatgagatggactacagctgatttaaggtttctctgcttcaggcctctttttatcctgcaagcggagtggggtttctcccacatctatttttgcctctgtggcaactgctcaggacttcctctattgattctttcctttgtgtggcagaccttttctcttttgagaattgtaatgggaatttttgagtttgatgtatccatgtctatgtctgtactaatacttgttatatttaatataaaaagagtgagttacg

SEQ ID NO: 12796 - protein, 360 aa, Triticum aestivum
  peptide (1)..(360): Ceres Seq. ID no. 13596869
  misc_feature (106)..(346): Pfam Name: Pfam Description:  Protein phosphatase 2C
  misc_feature (1)..(357): NCBI GI NO: 18423476 NR Description: protein phosphatase 2C (PP2C), putative
  misc_feature (1)..(357): NCBI GI NO: 18086420 NR Description: AT5g53140/MFH8_8 [Arabidopsis thaliana]
  misc_feature (120)..(357): NCBI GI NO: 9757995 NR Description: protein phosphatase 2C-like [Arabidopsis thaliana]
  misc_feature (120)..(358): NCBI GI NO: 34912708 NR Description: putative protein phosphatase 2C-like protein
  misc_feature (91)..(360): NCBI GI NO: 30689144 NR Description: protein phosphatase 2C (PP2C), putative
  misc_feature (82)..(357): NCBI GI NO: 18416366 NR Description: protein phosphatase 2C (PP2C) -related
  misc_feature (88)..(353): NCBI GI NO: 20146110 NR Description: protein phosphatase 2C
  misc_feature (95)..(360): NCBI GI NO: 15238651 NR Description: protein phosphatase 2C (PP2C), putative
  misc_feature (89)..(355): NCBI GI NO: 38345197 NR Description: OSJNBa0015K02.7
  misc_feature (102)..(289): NCBI GI NO: 7486331 NR Description: hypothetical protein F28M20
MVCIGRLRALVLRAAAGAGAGRRRWARVLCGRAVDVCVTPRPRGHGWRGFRAVAGARTKMMLDSSDSDSGAPAGQLQLQRRAVAAGTQPQDGGYASAGWQREDGKLKCGYSSFRGKRATMEDFYDVKLTEIDGHAVSLFGVFDGHGGSRAAEYLKEHLFENLMKHPKFLTDTKLAISETYQKTDADFLESESSAFRDDGSTASTAVLVGGHLYVANVGDSRAVISKAGKARALSVDHKPNRSDERKRIENAGGVVIWAGTWRVGGVLAMSRAFGNRLLKPFVVAEPEIQEELINGELESLVLASDGLWDAVENEEAVSLAKTEDVPESAARKLTEIAYSRGSADNITCIVVQFHHDKITG

SEQ ID NO: 12797 - protein, 301 aa, Triticum aestivum
  peptide (1)..(301): Ceres Seq. ID no. 13596870
  misc_feature (47)..(287): Pfam Name: Pfam Description:  Protein phosphatase 2C
  misc_feature (1)..(298): NCBI GI NO: 18423476 NR Description: protein phosphatase 2C (PP2C), putative
  misc_feature (1)..(298): NCBI GI NO: 18086420 NR Description: AT5g53140/MFH8_8 [Arabidopsis thaliana]
  misc_feature (61)..(298): NCBI GI NO: 9757995 NR Description: protein phosphatase 2C-like [Arabidopsis thaliana]
  misc_feature (61)..(299): NCBI GI NO: 34912708 NR Description: putative protein phosphatase 2C-like protein
  misc_feature (32)..(301): NCBI GI NO: 30689144 NR Description: protein phosphatase 2C (PP2C), putative
  misc_feature (23)..(298): NCBI GI NO: 18416366 NR Description: protein phosphatase 2C (PP2C) -related
  misc_feature (29)..(294): NCBI GI NO: 20146110 NR Description: protein phosphatase 2C
  misc_feature (36)..(301): NCBI GI NO: 15238651 NR Description: protein phosphatase 2C (PP2C), putative
  misc_feature (30)..(296): NCBI GI NO: 38345197 NR Description: OSJNBa0015K02.7
  misc_feature (43)..(230): NCBI GI NO: 7486331 NR Description: hypothetical protein F28M20
MMLDSSDSDSGAPAGQLQLQRRAVAAGTQPQDGGYASAGWQREDGKLKCGYSSFRGKRATMEDFYDVKLTEIDGHAVSLFGVFDGHGGSRAAEYLKEHLFENLMKHPKFLTDTKLAISETYQKTDADFLESESSAFRDDGSTASTAVLVGGHLYVANVGDSRAVISKAGKARALSVDHKPNRSDERKRIENAGGVVIWAGTWRVGGVLAMSRAFGNRLLKPFVVAEPEIQEELINGELESLVLASDGLWDAVENEEAVSLAKTEDVPESAARKLTEIAYSRGSADNITCIVVQFHHDKITG

SEQ ID NO: 12798 - protein, 300 aa, Triticum aestivum
  peptide (1)..(300): Ceres Seq. ID no. 13596871
  misc_feature (46)..(286): Pfam Name: Pfam Description:  Protein phosphatase 2C
  misc_feature (1)..(297): NCBI GI NO: 18423476 NR Description: protein phosphatase 2C (PP2C), putative
  misc_feature (1)..(297): NCBI GI NO: 18086420 NR Description: AT5g53140/MFH8_8 [Arabidopsis thaliana]
  misc_feature (60)..(297): NCBI GI NO: 9757995 NR Description: protein phosphatase 2C-like [Arabidopsis thaliana]
  misc_feature (60)..(298): NCBI GI NO: 34912708 NR Description: putative protein phosphatase 2C-like protein
  misc_feature (31)..(300): NCBI GI NO: 30689144 NR Description: protein phosphatase 2C (PP2C), putative
  misc_feature (22)..(297): NCBI GI NO: 18416366 NR Description: protein phosphatase 2C (PP2C) -related
  misc_feature (28)..(293): NCBI GI NO: 20146110 NR Description: protein phosphatase 2C
  misc_feature (35)..(300): NCBI GI NO: 15238651 NR Description: protein phosphatase 2C (PP2C), putative
  misc_feature (29)..(295): NCBI GI NO: 38345197 NR Description: OSJNBa0015K02.7
  misc_feature (42)..(229): NCBI GI NO: 7486331 NR Description: hypothetical protein F28M20
MLDSSDSDSGAPAGQLQLQRRAVAAGTQPQDGGYASAGWQREDGKLKCGYSSFRGKRATMEDFYDVKLTEIDGHAVSLFGVFDGHGGSRAAEYLKEHLFENLMKHPKFLTDTKLAISETYQKTDADFLESESSAFRDDGSTASTAVLVGGHLYVANVGDSRAVISKAGKARALSVDHKPNRSDERKRIENAGGVVIWAGTWRVGGVLAMSRAFGNRLLKPFVVAEPEIQEELINGELESLVLASDGLWDAVENEEAVSLAKTEDVPESAARKLTEIAYSRGSADNITCIVVQFHHDKITG

SEQ ID NO: 12799 - DNA, 1113 bp, Triticum aestivum
  misc_feature (1)..(1113): Ceres Seq. ID no. 15224290
gagccgcagagacgttcgcaccaactcctctgaactctgaagcctgaacggagcggcggagaggaaggggagagatcacccaccggcggcgaggggagatggccggaggcgaggaagggtggaggaggagcggcatcgaggtgagcaccctgcagttcggctacgacggggaggcgccgctcttcgcgcgcttcaacctccgcgtcgcccccggctcgcgctgcctcctcgtcggcgccaacggatccggcaagactactctcttgaagattcttgcaggaaaacatatggttggaggaaaggatgttgtccgtgttcttaatggttctgcttttcatgacacacaattcgtgtgcagtggtgacctttcctacttgggtggttcttggagtcggaatgtcagttcagttggtgatgttccactacaaggcgatttctctgctgagcacatgatatttggagttgatggggttgatcctgttaggcgagagaagctgattgatctactggatattgatctgcaatggcgcatgcataaagtttcagatggacagcgccgcagggtacaaatttgcatgggtcttcttcatccatacaaggtactcttactcgatgagatcaccgtggatctcgatgtcgtgaccaggatggatctcctcgacttcttcaaggaagaatgcgagcagagggaagccacgatcgtctacgccacccacatattcgacgggctggagacatgggccaccgacatcgcgtacatccaagagggcgagctgaaaaagtcggcgaaatactcggacatcgaagagctgaagacggccaagaacctgctgtcggtcgttgagtcatggctgaaatccgagaccaagctcccgaagaaagaacccgcccgcgtcgagagccagcccaggcgcccttccccgttcgacgcctcccctttccgggcgtcgcgccacatggcctactaccgatgatgaccgtgtaaaacctctgcacccattccggtgccatgcaactctggagtctgtatcttccttttttttgttccccatccatccctgtatacggcaatgtatctatctaaatctaaataataaacaagtcgagcgtgcc

SEQ ID NO: 12800 - protein, 291 aa, Triticum aestivum
  peptide (1)..(291): Ceres Seq. ID no. 15224291
  misc_feature (39)..(224): Pfam Name: Pfam Description:  ABC transporter
  misc_feature (13)..(291): NCBI GI NO: 18379174 NR Description: ABC transporter family protein
  misc_feature (13)..(291): NCBI GI NO: 15240093 NR Description: ABC transporter family protein
  misc_feature (13)..(291): NCBI GI NO: 21592901 NR Description: NBD-like protein [Arabidopsis thaliana]
  misc_feature (13)..(291): NCBI GI NO: 25406749 NR Description: hypothetical protein
  misc_feature (5)..(261): NCBI GI NO: 15241744 NR Description: ABC transporter family protein
  misc_feature (39)..(257): NCBI GI NO: 19115648 NR Description: probable ATP-dependent transporter
  misc_feature (1)..(257): NCBI GI NO: 38107624 NR Description: hypothetical protein MG09520.4
  misc_feature (13)..(248): NCBI GI NO: 32405648 NR Description: hypothetical protein [Neurospora crassa]
  misc_feature (13)..(242): NCBI GI NO: 14318491 NR Description: CCR4 associated factor; Caf16p
  misc_feature (90)..(271): NCBI GI NO: 40738662 NR Description: hypothetical protein AN6512.2
MAGGEEGWRRSGIEVSTLQFGYDGEAPLFARFNLRVAPGSRCLLVGANGSGKTTLLKILAGKHMVGGKDVVRVLNGSAFHDTQFVCSGDLSYLGGSWSRNVSSVGDVPLQGDFSAEHMIFGVDGVDPVRREKLIDLLDIDLQWRMHKVSDGQRRRVQICMGLLHPYKVLLLDEITVDLDVVTRMDLLDFFKEECEQREATIVYATHIFDGLETWATDIAYIQEGELKKSAKYSDIEELKTAKNLLSVVESWLKSETKLPKKEPARVESQPRRPSPFDASPFRASRHMAYYR

SEQ ID NO: 12801 - protein, 228 aa, Triticum aestivum
  peptide (1)..(228): Ceres Seq. ID no. 15224292
  misc_feature (1)..(161): Pfam Name: Pfam Description:  ABC transporter
  misc_feature (1)..(228): NCBI GI NO: 18379174 NR Description: ABC transporter family protein
  misc_feature (1)..(228): NCBI GI NO: 15240093 NR Description: ABC transporter family protein
  misc_feature (1)..(228): NCBI GI NO: 21592901 NR Description: NBD-like protein [Arabidopsis thaliana]
  misc_feature (1)..(228): NCBI GI NO: 25406749 NR Description: hypothetical protein
  misc_feature (1)..(198): NCBI GI NO: 15241744 NR Description: ABC transporter family protein
  misc_feature (1)..(194): NCBI GI NO: 19115648 NR Description: probable ATP-dependent transporter
  misc_feature (1)..(194): NCBI GI NO: 38107624 NR Description: hypothetical protein MG09520.4
  misc_feature (1)..(185): NCBI GI NO: 32405648 NR Description: hypothetical protein [Neurospora crassa]
  misc_feature (1)..(179): NCBI GI NO: 14318491 NR Description: CCR4 associated factor; Caf16p
  misc_feature (27)..(208): NCBI GI NO: 40738662 NR Description: hypothetical protein AN6512.2
MVGGKDVVRVLNGSAFHDTQFVCSGDLSYLGGSWSRNVSSVGDVPLQGDFSAEHMIFGVDGVDPVRREKLIDLLDIDLQWRMHKVSDGQRRRVQICMGLLHPYKVLLLDEITVDLDVVTRMDLLDFFKEECEQREATIVYATHIFDGLETWATDIAYIQEGELKKSAKYSDIEELKTAKNLLSVVESWLKSETKLPKKEPARVESQPRRPSPFDASPFRASRHMAYYR

SEQ ID NO: 12802 - protein, 174 aa, Triticum aestivum
  peptide (1)..(174): Ceres Seq. ID no. 15224293
  misc_feature (1)..(107): Pfam Name: Pfam Description:  ABC transporter
  misc_feature (1)..(174): NCBI GI NO: 18379174 NR Description: ABC transporter family protein
  misc_feature (1)..(174): NCBI GI NO: 15240093 NR Description: ABC transporter family protein
  misc_feature (1)..(174): NCBI GI NO: 21592901 NR Description: NBD-like protein [Arabidopsis thaliana]
  misc_feature (1)..(174): NCBI GI NO: 25406749 NR Description: hypothetical protein
  misc_feature (1)..(144): NCBI GI NO: 15241744 NR Description: ABC transporter family protein
  misc_feature (1)..(140): NCBI GI NO: 19115648 NR Description: probable ATP-dependent transporter
  misc_feature (1)..(140): NCBI GI NO: 38107624 NR Description: hypothetical protein MG09520.4
  misc_feature (1)..(131): NCBI GI NO: 32405648 NR Description: hypothetical protein [Neurospora crassa]
  misc_feature (1)..(125): NCBI GI NO: 14318491 NR Description: CCR4 associated factor; Caf16p
  misc_feature (1)..(154): NCBI GI NO: 40738662 NR Description: hypothetical protein AN6512.2
MIFGVDGVDPVRREKLIDLLDIDLQWRMHKVSDGQRRRVQICMGLLHPYKVLLLDEITVDLDVVTRMDLLDFFKEECEQREATIVYATHIFDGLETWATDIAYIQEGELKKSAKYSDIEELKTAKNLLSVVESWLKSETKLPKKEPARVESQPRRPSPFDASPFRASRHMAYYR

SEQ ID NO: 12803 - DNA, 1372 bp, Triticum aestivum
  misc_feature (1)..(1372): Ceres Seq. ID no. 12585444
catctcaacgaagaaaaggagcggccgaatctccagccccacgatttccccacgcgcacccaccaccgacccggcccccaaaaccctacgccgcgcaaaccctagcggcggccgccgcccccctcctcatcagcaatgtccggcatcctgcggctcgccggcgccgccagatccttctcccgcgcgttggctccggccgcgccgcaccaccgcaggctcgcggcatcggcggccgccctggcggaggacgatgcgtgctggaccgagtgggaggaggaggaggaggaggcgcggcggcagcgcgcccgcgcatcggcgaccgccgcggagtcttgcccggcggacggcggtcccaggggcgtgcagtgggtggtgatgggccgccccggcccgcagaagcacgcccacgccgcgcgcctcgccgaggtcctcgccgtgccgtacatctccatgggcacgctcgtcaggcaggagctcagccccacatcctcgctctacaagaagattgctaattcggtgaatgaagggaagcttgtgccagaggatatcatatttgggttgctgactaagcgtctcgaggagggatactacaagggtgaaaatggatttatccttgacggaatcccacgtacccgtgtgcaagctgagattcttgatgagatcgttgacatcgacttggttctgaacttcaaatgtgctggtaactgtttcatgaagaagcgatctggaggcgacatatgttcccactgtgggcagcattttggtgtcagcagtctggtgtctagggagcgtaatctctcccttggaagctctacatggcctgctcaggcacaacatgcttctgttataggcctggaaaacccaaggatggagaagctgcgtgcttatgctgagcagaccaagcagctggaagattactacaagaagcacaggaaacttgtggagttgaagacatccgctcgccctggtgaaacctggcaggggctcgtagctgcccttcacctccagcatctagacccatccccaacaccacacaaactcaccgtgtaattatcatccactgagtctaaggatctacattgtgatcctcacctgcgacatacgtagtatgtttctaagttttgtgagttctggctgaggagtcagtcggctgtggtgctttggtctttatctgttataggtataatgtaaggctctggtctttactgttatagataaaatgtaagcgattttgtagacccgcttgcttatatgtttgtaacggagagctttgaacttgcaagtgcaagtgtgcggtgtgccaggctccgctgtgctgttgttttgagtaccagttttgatcaatatataagttactgtgaatgttgtgcgc

SEQ ID NO: 12804 - protein, 304 aa, Triticum aestivum
  peptide (1)..(304): Ceres Seq. ID no. 12585445
  misc_feature (27)..(188): NCBI GI NO: 6091724 NR Description: putative adenylate kinase [Arabidopsis thaliana]
  misc_feature (27)..(188): NCBI GI NO: 30678433 NR Description: adenylate kinase -related [Arabidopsis thaliana]
  misc_feature (50)..(291): NCBI GI NO: 30687836 NR Description: adenylate kinase -related [Arabidopsis thaliana]
  misc_feature (63)..(290): NCBI GI NO: 15228109 NR Description: putative adenylate kinase; protein id: At2g37250
  misc_feature (66)..(299): NCBI GI NO: 29427816 NR Description: Adenylate kinase, chloroplast precursor
  misc_feature (26)..(290): NCBI GI NO: 32488408 NR Description: OSJNBa0043A12.38
  misc_feature (124)..(291): NCBI GI NO: 6063552 NR Description: ESTs AU065232
  misc_feature (29)..(129): NCBI GI NO: 6063552 NR Description: ESTs AU065232
  misc_feature (79)..(288): NCBI GI NO: 11498284 NR Description: adenylate kinase (adk) [Archaeoglobus fulgidus]
  misc_feature (65)..(292): NCBI GI NO: 27370911 NR Description: Similar to Adenylate kinase 2 [Xenopus laevis]
MSGILRLAGAARSFSRALAPAAPHHRRLAASAAALAEDDACWTEWEEEEEEARRQRARASATAAESCPADGGPRGVQWVVMGRPGPQKHAHAARLAEVLAVPYISMGTLVRQELSPTSSLYKKIANSVNEGKLVPEDIIFGLLTKRLEEGYYKGENGFILDGIPRTRVQAEILDEIVDIDLVLNFKCAGNCFMKKRSGGDICSHCGQHFGVSSLVSRERNLSLGSSTWPAQAQHASVIGLENPRMEKLRAYAEQTKQLEDYYKKHRKLVELKTSARPGETWQGLVAALHLQHLDPSPTPHKLTV

SEQ ID NO: 12805 - protein, 224 aa, Triticum aestivum
  peptide (1)..(224): Ceres Seq. ID no. 12585446
  misc_feature (1)..(108): NCBI GI NO: 6091724 NR Description: putative adenylate kinase [Arabidopsis thaliana]
  misc_feature (1)..(108): NCBI GI NO: 30678433 NR Description: adenylate kinase -related [Arabidopsis thaliana]
  misc_feature (1)..(211): NCBI GI NO: 30687836 NR Description: adenylate kinase -related [Arabidopsis thaliana]
  misc_feature (1)..(210): NCBI GI NO: 15228109 NR Description: putative adenylate kinase; protein id: At2g37250
  misc_feature (1)..(219): NCBI GI NO: 29427816 NR Description: Adenylate kinase, chloroplast precursor
  misc_feature (1)..(210): NCBI GI NO: 32488408 NR Description: OSJNBa0043A12.38
  misc_feature (44)..(211): NCBI GI NO: 6063552 NR Description: ESTs AU065232
  misc_feature (1)..(49): NCBI GI NO: 6063552 NR Description: ESTs AU065232
  misc_feature (1)..(208): NCBI GI NO: 11498284 NR Description: adenylate kinase (adk) [Archaeoglobus fulgidus]
  misc_feature (1)..(212): NCBI GI NO: 27370911 NR Description: Similar to Adenylate kinase 2 [Xenopus laevis]
MGRPGPQKHAHAARLAEVLAVPYISMGTLVRQELSPTSSLYKKIANSVNEGKLVPEDIIFGLLTKRLEEGYYKGENGFILDGIPRTRVQAEILDEIVDIDLVLNFKCAGNCFMKKRSGGDICSHCGQHFGVSSLVSRERNLSLGSSTWPAQAQHASVIGLENPRMEKLRAYAEQTKQLEDYYKKHRKLVELKTSARPGETWQGLVAALHLQHLDPSPTPHKLTV

SEQ ID NO: 12806 - protein, 199 aa, Triticum aestivum
  peptide (1)..(199): Ceres Seq. ID no. 12585447
  misc_feature (1)..(83): NCBI GI NO: 6091724 NR Description: putative adenylate kinase [Arabidopsis thaliana]
  misc_feature (1)..(83): NCBI GI NO: 30678433 NR Description: adenylate kinase -related [Arabidopsis thaliana]
  misc_feature (1)..(186): NCBI GI NO: 30687836 NR Description: adenylate kinase -related [Arabidopsis thaliana]
  misc_feature (1)..(185): NCBI GI NO: 15228109 NR Description: putative adenylate kinase; protein id: At2g37250
  misc_feature (1)..(194): NCBI GI NO: 29427816 NR Description: Adenylate kinase, chloroplast precursor
  misc_feature (1)..(185): NCBI GI NO: 32488408 NR Description: OSJNBa0043A12.38
  misc_feature (19)..(186): NCBI GI NO: 6063552 NR Description: ESTs AU065232
  misc_feature (1)..(24): NCBI GI NO: 6063552 NR Description: ESTs AU065232
  misc_feature (1)..(183): NCBI GI NO: 11498284 NR Description: adenylate kinase (adk) [Archaeoglobus fulgidus]
  misc_feature (1)..(187): NCBI GI NO: 27370911 NR Description: Similar to Adenylate kinase 2 [Xenopus laevis]
MGTLVRQELSPTSSLYKKIANSVNEGKLVPEDIIFGLLTKRLEEGYYKGENGFILDGIPRTRVQAEILDEIVDIDLVLNFKCAGNCFMKKRSGGDICSHCGQHFGVSSLVSRERNLSLGSSTWPAQAQHASVIGLENPRMEKLRAYAEQTKQLEDYYKKHRKLVELKTSARPGETWQGLVAALHLQHLDPSPTPHKLTV

SEQ ID NO: 12807 - DNA, 1348 bp, Triticum aestivum
  misc_feature (1)..(1348): Ceres Seq. ID no. 13596554
ctcgaaccgaccgacaggccgtggtgcgcatctctcccactatctggctcaggtttcttgcctcggctctcgattttgtcatagcattcgctgttcccgtggtgtctgtagccgcgggcgggtgggcgagatccggttgcggcggccatggtgaaggagaccgcctactacgaaaccctgggggtcagcgtcgacgcctccccctccgacatcaagaaggcctactacgtccaggccaggctggtgcacccggacaagaatcccggcaaccccgacgcggcgcgcaaattccaggatctcggagaggcctaccaagtcctaagcgatccagcgaagaaggaggcttatgataagcatggaaaggagggtctttcccaggataacatggttgatcctgctgctgtatttgggatgctttttggaagcgactattttgaagattatgttggtcagcttgctctggcatccatcgcttcagtggaggttgatgaaggtttaagcagtcaagatgccagagcaaaggttcaagataagataaaagagttgcaaactgaaagagagaaaaagcttactcagagcctaaaggatcgacttcagccatatgtggatggtagaaaggatgattttgtgcactgggcgaatgcagaagccaagcgtttatcagaagcagcttttggtgaggctatgcttcacactgttggatatatttatgtaaggcaagcggcaagagaacttggaaagagtaaattgtatatgggtgtaccattcatagctgagtgggtaagagacaagggtcataccattaaatcacaagttcatgctgcttcaggtgctattgctctgatgcagctacaagaaggaatgaaaaaggtggaggagggtgccgacaaggaagagcagcttatgaagagttttgaggagaaaaaagaagccatgcttaattctctatggaaaattaatgtggtcgatatcgagtcaactctttcccgagtatgccaagcagttcttaaagatagcactgtctcaaaagatgttctgaagttgcgaggaaaagcgttgaaaaagcttggaacgatattccaaggcgcggaatctctgtaccatcgtgagaacagcctacgtgtggagtctccgatgaaagaggatggaacgacatcgtcgcactgaagactgataacatttttaacaatttgtgaattattcggatctctgtgcattattgtctgcttgtattattttgacacagcaggtttgctctggacgcaccctgtatgtatgggtttccttgttttctgtaaaaagggtgaatgctgagacacgaagcatctctgttattgacccggcattc

SEQ ID NO: 12808 - protein, 339 aa, Triticum aestivum
  peptide (1)..(339): Ceres Seq. ID no. 15221926
  misc_feature (6)..(71): Pfam Name: Pfam Description:  DnaJ domain
  misc_feature (1)..(201): NCBI GI NO: 25458468 NR Description: dnaJ-like protein [imported] - rice
  misc_feature (229)..(312): NCBI GI NO: 25458468 NR Description: dnaJ-like protein [imported] - rice
  misc_feature (1)..(327): NCBI GI NO: 15234962 NR Description: DnaJ protein family [Arabidopsis thaliana]
  misc_feature (1)..(338): NCBI GI NO: 15226572 NR Description: DnaJ protein family [Arabidopsis thaliana]
  misc_feature (1)..(339): NCBI GI NO: 15223142 NR Description: DnaJ protein family [Arabidopsis thaliana]
  misc_feature (1)..(339): NCBI GI NO: 26449747 NR Description: putative DnaJ protein [Arabidopsis thaliana]
  misc_feature (1)..(339): NCBI GI NO: 18394951 NR Description: DnaJ protein family [Arabidopsis thaliana]
  misc_feature (1)..(337): NCBI GI NO: 30699227 NR Description: DnaJ protein family [Arabidopsis thaliana]
  misc_feature (1)..(339): NCBI GI NO: 2230757 NR Description: dnaJ-like protein [Arabidopsis thaliana]
  misc_feature (1)..(290): NCBI GI NO: 25406486 NR Description: hypothetical protein F22K20.12
MVKETAYYETLGVSVDASPSDIKKAYYVQARLVHPDKNPGNPDAARKFQDLGEAYQVLSDPAKKEAYDKHGKEGLSQDNMVDPAAVFGMLFGSDYFEDYVGQLALASIASVEVDEGLSSQDARAKVQDKIKELQTEREKKLTQSLKDRLQPYVDGRKDDFVHWANAEAKRLSEAAFGEAMLHTVGYIYVRQAARELGKSKLYMGVPFIAEWVRDKGHTIKSQVHAASGAIALMQLQEGMKKVEEGADKEEQLMKSFEEKKEAMLNSLWKINVVDIESTLSRVCQAVLKDSTVSKDVLKLRGKALKKLGTIFQGAESLYHRENSLRVESPMKEDGTTSSH

SEQ ID NO: 12809 - protein, 260 aa, Triticum aestivum
  peptide (1)..(260): Ceres Seq. ID no. 15221927
  misc_feature (1)..(122): NCBI GI NO: 25458468 NR Description: dnaJ-like protein [imported] - rice
  misc_feature (150)..(233): NCBI GI NO: 25458468 NR Description: dnaJ-like protein [imported] - rice
  misc_feature (1)..(248): NCBI GI NO: 15234962 NR Description: DnaJ protein family [Arabidopsis thaliana]
  misc_feature (1)..(259): NCBI GI NO: 15226572 NR Description: DnaJ protein family [Arabidopsis thaliana]
  misc_feature (1)..(260): NCBI GI NO: 15223142 NR Description: DnaJ protein family [Arabidopsis thaliana]
  misc_feature (1)..(260): NCBI GI NO: 26449747 NR Description: putative DnaJ protein [Arabidopsis thaliana]
  misc_feature (1)..(260): NCBI GI NO: 18394951 NR Description: DnaJ protein family [Arabidopsis thaliana]
  misc_feature (1)..(258): NCBI GI NO: 30699227 NR Description: DnaJ protein family [Arabidopsis thaliana]
  misc_feature (1)..(260): NCBI GI NO: 2230757 NR Description: dnaJ-like protein [Arabidopsis thaliana]
  misc_feature (1)..(211): NCBI GI NO: 25406486 NR Description: hypothetical protein F22K20.12
MVDPAAVFGMLFGSDYFEDYVGQLALASIASVEVDEGLSSQDARAKVQDKIKELQTEREKKLTQSLKDRLQPYVDGRKDDFVHWANAEAKRLSEAAFGEAMLHTVGYIYVRQAARELGKSKLYMGVPFIAEWVRDKGHTIKSQVHAASGAIALMQLQEGMKKVEEGADKEEQLMKSFEEKKEAMLNSLWKINVVDIESTLSRVCQAVLKDSTVSKDVLKLRGKALKKLGTIFQGAESLYHRENSLRVESPMKEDGTTSSH

SEQ ID NO: 12810 - protein, 251 aa, Triticum aestivum
  peptide (1)..(251): Ceres Seq. ID no. 15221928
  misc_feature (1)..(113): NCBI GI NO: 25458468 NR Description: dnaJ-like protein [imported] - rice
  misc_feature (141)..(224): NCBI GI NO: 25458468 NR Description: dnaJ-like protein [imported] - rice
  misc_feature (1)..(239): NCBI GI NO: 15234962 NR Description: DnaJ protein family [Arabidopsis thaliana]
  misc_feature (1)..(250): NCBI GI NO: 15226572 NR Description: DnaJ protein family [Arabidopsis thaliana]
  misc_feature (1)..(251): NCBI GI NO: 15223142 NR Description: DnaJ protein family [Arabidopsis thaliana]
  misc_feature (1)..(251): NCBI GI NO: 26449747 NR Description: putative DnaJ protein [Arabidopsis thaliana]
  misc_feature (1)..(251): NCBI GI NO: 18394951 NR Description: DnaJ protein family [Arabidopsis thaliana]
  misc_feature (1)..(249): NCBI GI NO: 30699227 NR Description: DnaJ protein family [Arabidopsis thaliana]
  misc_feature (1)..(251): NCBI GI NO: 2230757 NR Description: dnaJ-like protein [Arabidopsis thaliana]
  misc_feature (1)..(202): NCBI GI NO: 25406486 NR Description: hypothetical protein F22K20.12
MLFGSDYFEDYVGQLALASIASVEVDEGLSSQDARAKVQDKIKELQTEREKKLTQSLKDRLQPYVDGRKDDFVHWANAEAKRLSEAAFGEAMLHTVGYIYVRQAARELGKSKLYMGVPFIAEWVRDKGHTIKSQVHAASGAIALMQLQEGMKKVEEGADKEEQLMKSFEEKKEAMLNSLWKINVVDIESTLSRVCQAVLKDSTVSKDVLKLRGKALKKLGTIFQGAESLYHRENSLRVESPMKEDGTTSSH

SEQ ID NO: 12811 - DNA, 1225 bp, Triticum aestivum
  misc_feature (1)..(1225): Ceres Seq. ID no. 12615485
atcctaaatcctccccaatccaggcgacaaggatctcgccatggcgccgccgcccaccgccgccgcggccgtccgttgccacccgcacatcctccgcaggggcctcctgcccgcttcgtcgccgctgctccccttcgcctcccgggtggcctcctccacgccgctccgcgcccagcccctgcgcttctcgctctcccccgtccccaagagcatctcctcctcctcgacctcccacatccccgtgcgctccctcttcaccgggatcgtcgaggaggtcggccgcgtgcgccgcatcggcccgccgcccacgcctcctgggggcgggggagacgcggctcccggtgtcgacctcgaggtcgagaccaagaacctcctcgccgggacgcagctgggcgacagcatcgccgtcgacgggacgtgcctcaccgtggcggccatcgacaccgctgcctccacgctcaccttcggcgtcgcgccggagaccctccggtgcacgtcactcggcgagcgcgtcgcgggcgacgacgttaacctcgagcgcgcgctcacgccggcgtctcgcatgggcgggcacttcgtccagggccacgtcgacggcaccggcgagatcgccgcgttccggcccgagggcgattctatctgggtcaccgtgcgtgcgccgccagagatcctcagcttgctcgtgcctaaggggttcgtcgccgtggacggaaccagcctcaccgtcgtcaatgtgaacgaggaggccgggtggttcgacttcatgcttgtgcgctacacgcaggacaatgttgtgctgccaaagaagaaggttggggataaggtgaaccttgaggctgacattcttgggaagtatgtagtgaagctacttgccgggagattggaggcaacatcaaaggcaaattcttgagttgtgcctgttggactgatgaactactatcagtattagtgcagcgtattcttgtccatcaataatagtgcattttttgcactaatgagtgaagctttttttcgtactaggggggtgatatagttcatgccattgcctgtttccatgtaaaagttatagcgtttccgcatggagaagcttttttcgggtgtgcatgatctgttaaccccattcaaatgaacaagatttgtttagttgttcataccaggagtccagcttttctgggacaacaatgaatgctagtgctcgtttgagtttatatttgatcattgcctg

SEQ ID NO: 12812 - protein, 289 aa, Triticum aestivum
  peptide (1)..(289): Ceres Seq. ID no. 12615486
  misc_feature (181)..(267): Pfam Name: Pfam Description:  Lumazine binding domain
  misc_feature (29)..(288): NCBI GI NO: 21593865 NR Description: putative riboflavin synthase alpha chain
  misc_feature (30)..(288): NCBI GI NO: 18399445 NR Description: putative riboflavin synthase alpha chain
  misc_feature (101)..(277): NCBI GI NO: 25287068 NR Description: probable riboflavin synthase alpha chain
  misc_feature (71)..(282): NCBI GI NO: 32414525 NR Description: hypothetical protein [Neurospora crassa]
  misc_feature (71)..(283): NCBI GI NO: 22971150 NR Description: hypothetical protein [Chloroflexus aurantiacus]
  misc_feature (71)..(288): NCBI GI NO: 40740140 NR Description: hypothetical protein AN4231.2
  misc_feature (71)..(277): NCBI GI NO: 23020140 NR Description: hypothetical protein
  misc_feature (71)..(281): NCBI GI NO: 19075812 NR Description: riboflavin synthase alpha chain
  misc_feature (71)..(275): NCBI GI NO: 18252608 NR Description: riboflavin synthase [Pichia guilliermondii]
  misc_feature (71)..(289): NCBI GI NO: 6319733 NR Description: Riboflavin biosynthesis; Rib5p
MAPPPTAAAAVRCHPHILRRGLLPASSPLLPFASRVASSTPLRAQPLRFSLSPVPKSISSSSTSHIPVRSLFTGIVEEVGRVRRIGPPPTPPGGGGDAAPGVDLEVETKNLLAGTQLGDSIAVDGTCLTVAAIDTAASTLTFGVAPETLRCTSLGERVAGDDVNLERALTPASRMGGHFVQGHVDGTGEIAAFRPEGDSIWVTVRAPPEILSLLVPKGFVAVDGTSLTVVNVNEEAGWFDFMLVRYTQDNVVLPKKKVGDKVNLEADILGKYVVKLLAGRLEATSKANS

SEQ ID NO: 12813 - protein, 244 aa, Triticum aestivum
  peptide (1)..(244): Ceres Seq. ID no. 12615487
  misc_feature (1)..(154): Pfam Name: Pfam Description:  Formin Homology 2 Domain
  misc_feature (1)..(244): NCBI GI NO: 23017082 NR Description: hypothetical protein [Thermobifida fusca]
  misc_feature (3)..(244): NCBI GI NO: 13592175 NR Description: ppg3 [Leishmania major]
  misc_feature (43)..(244): NCBI GI NO: 11359723 NR Description: proteophosphoglycan, membrane-associated
  misc_feature (3)..(244): NCBI GI NO: 13592175 NR Description: ppg3 [Leishmania major]
  misc_feature (31)..(244): NCBI GI NO: 11359723 NR Description: proteophosphoglycan, membrane-associated
  misc_feature (3)..(244): NCBI GI NO: 13592175 NR Description: ppg3 [Leishmania major]
  misc_feature (3)..(243): NCBI GI NO: 11359723 NR Description: proteophosphoglycan, membrane-associated
  misc_feature (2)..(183): NCBI GI NO: 25143299 NR Description: pre-mRNA splicing SR protein related RSR-1 (68
  misc_feature (3)..(244): NCBI GI NO: 13592175 NR Description: ppg3 [Leishmania major]
  misc_feature (3)..(244): NCBI GI NO: 13592175 NR Description: ppg3 [Leishmania major]
PKSSPIQATRISPWRRRPPPPRPSVATRTSSAGASCPLRRRCSPSPPGWPPPRRSAPSPCASRSPPSPRASPPPRPPTSPCAPSSPGSSRRSAACAASARRPRLLGAGETRLPVSTSRSRPRTSSPGRSWATASPSTGRASPWRPSTPLPPRSPSASRRRPSGARHSASASRATTLTSSARSRRRLAWAGTSSRATSTAPARSPRSGPRAILSGSPCVRRQRSSACSCLRGSSPWTEPASPSSM

SEQ ID NO: 12814 - protein, 176 aa, Triticum aestivum
  peptide (1)..(176): Ceres Seq. ID no. 12615488
ILNPPQSRRQGSRHGAAAHRRRGRPLPPAHPPQGPPARFVAAAPLRLPGGLLHAAPRPAPALLALPRPQEHLLLLDLPHPRALPLHRDRRGGRPRAPHRPAAHASWGRGRRGSRCRPRGRDQEPPRRDAAGRQHRRRRDVPHRGGHRHRCLHAHLRRRAGDPPVHVTRRARRGRRR

SEQ ID NO: 12815 - DNA, 907 bp, Triticum aestivum
  misc_feature (1)..(907): Ceres Seq. ID no. 12593115
cttctccccccttttgttcgtctcctaaaccgccgccagcatggacgccaagaagaggtcgccgcccgccccctcggccgccggagccgcgccccccgcggccaacggatacttcaactccgtcttctccgcgccggcgtcgcctgcggcaaatccaagagacgccaggcagatggacctgtacacgatactgaacaagcagaaccccaaagggcagagtggtgggggcattgcaggtaatgccaaatcccatggcagccctactataggtcgtgttgcttaccaagatggaaaacagttttatccaaacgagtcctcagagtcaccttattttggctcgtctgtgcattacggtggccgggacttctatgacagctctccacacaagcaagctgatgaatcacccagaaattataaggaggataatgcggatggctccctggctaccagaggtgattggtggcaaggttcgctttactactaaaaatactttgcaatggactctcctactgtgaacaaggaataaaaaggagtacgtcgagctggtaggctgtagagttgacatgagtcatcaggcataagaaaagtcatagtggaactacatctgttccgtcggtggtggcagtatttagatgcatcagtcacctaggcagacgtagacgtaccatgtgtctcttttctttgccttactagatttgagtgatgaaatgtaatgggactggtagggcagcagcaagtaggtcctacaaaaagttgctgctattttgcaactgacgagatcacttgctgtatgcgttatgtatcctagttcgtggttgtgttttggtaatatttggatttgcacatctgtttcggtctaccatttgtttgctgacagaaccatgatatgaacttgtgacaatggtct

SEQ ID NO: 12816 - protein, 147 aa, Triticum aestivum
  peptide (1)..(147): Ceres Seq. ID no. 12593116
  misc_feature (1)..(147): NCBI GI NO: 34908300 NR Description: P0005H10.22
  misc_feature (12)..(147): NCBI GI NO: 15241665 NR Description: putative protein; protein id: At5g02020
  misc_feature (64)..(147): NCBI GI NO: 22326622 NR Description: hypothetical protein; protein id: At5g05965.1
MDAKKRSPPAPSAAGAAPPAANGYFNSVFSAPASPAANPRDARQMDLYTILNKQNPKGQSGGGIAGNAKSHGSPTIGRVAYQDGKQFYPNESSESPYFGSSVHYGGRDFYDSSPHKQADESPRNYKEDNADGSLATRGDWWQGSLYY

SEQ ID NO: 12817 - protein, 103 aa, Triticum aestivum
  peptide (1)..(103): Ceres Seq. ID no. 12593117
  misc_feature (1)..(103): NCBI GI NO: 34908300 NR Description: P0005H10.22
  misc_feature (1)..(103): NCBI GI NO: 15241665 NR Description: putative protein; protein id: At5g02020
  misc_feature (20)..(103): NCBI GI NO: 22326622 NR Description: hypothetical protein; protein id: At5g05965.1
MDLYTILNKQNPKGQSGGGIAGNAKSHGSPTIGRVAYQDGKQFYPNESSESPYFGSSVHYGGRDFYDSSPHKQADESPRNYKEDNADGSLATRGDWWQGSLYY

SEQ ID NO: 12818 - protein, 79 aa, Triticum aestivum
  peptide (1)..(79): Ceres Seq. ID no. 12593118
LLPPFVRLLNRRQHGRQEEVAARPLGRRSRAPRGQRILQLRLLRAGVACGKSKRRQADGPVHDTEQAEPQRAEWWGHCR

SEQ ID NO: 12819 - DNA, 927 bp, Triticum aestivum
  misc_feature (1)..(927): Ceres Seq. ID no. 13662452
accaccctccctccatccacacctcagcctcagctcacctgctcctgctctccttgcctccctccatccgtcctccttgggattgggagagaagagaccacgagcaactcatccaaacaatgaagagcaggacgcagagcggccgcggaggagccatggtcgccgacgggggcagcaagatggagcgcaaggaggtggagaagaaccggcggctgcacatgaagggactctgcctcaagctctcctccctcctcccctcctcctcctcagcccaccacctccgccattattcttcctcgccgccgtccagcaacaaggacgcgacgacgcagctggaccagctggacagcgcggcggcgtacatcaagaagctcaagagccgggtcgacgaactcaagcgccgcaagcaggccgtcgtctccggcaccgctggctgctcgtcctccgtctccgccggcgactacaagggagcagcactgtccacaactgcgctgcctgtgatcgaggtgcggcaccaggacggaacgctggacgtggcgctggcgagcgaggccgggcggccgttccggctgcacgaggtgatcgccgtcctggagcaggagggcgccgaggtggtcagcgccagcttttcggtcgtgggtgacaagatcttctacacggtccattcccaggcattgtacccccgcatcggcctcgaggccggccgggtcgcccaccggctgcgcggcctcgccgcagccgcagccatctcgccgtcggtcctcctgacatgatctctttctctctttcttcgttgttttgccatggtgacagattagctgatctatgggcagcttagcttagtactgctctactctgctcgtgagtgagcttcaggtttgtctgaaatctactagtgtaggcacgtgcttgcgtatcctcctttct

SEQ ID NO: 12820 - protein, 256 aa, Triticum aestivum
  peptide (1)..(256): Ceres Seq. ID no. 13662453
  misc_feature (58)..(125): Pfam Name: Pfam Description:  Helix-loop-helix DNA-binding domain
  misc_feature (47)..(243): NCBI GI NO: 34894144 NR Description: P0482C06.20
  misc_feature (27)..(243): NCBI GI NO: 34894136 NR Description: P0482C06.16
  misc_feature (56)..(221): NCBI GI NO: 7486970 NR Description: hypothetical protein T13K14
  misc_feature (56)..(221): NCBI GI NO: 22328838 NR Description: bHLH protein family [Arabidopsis thaliana]
  misc_feature (102)..(243): NCBI GI NO: 25402607 NR Description: protein T10O24.23
  misc_feature (114)..(241): NCBI GI NO: 5091553 NR Description: T10O24.22 [Arabidopsis thaliana]
  misc_feature (123)..(241): NCBI GI NO: 18391177 NR Description: expressed protein [Arabidopsis thaliana]
HPPSIHTSASAHLLLLSLPPSIRPPWDWERRDHEQLIQTMKSRTQSGRGGAMVADGGSKMERKEVEKNRRLHMKGLCLKLSSLLPSSSSAHHLRHYSSSPPSSNKDATTQLDQLDSAAAYIKKLKSRVDELKRRKQAVVSGTAGCSSSVSAGDYKGAALSTTALPVIEVRHQDGTLDVALASEAGRPFRLHEVIAVLEQEGAEVVSASFSVVGDKIFYTVHSQALYPRIGLEAGRVAHRLRGLAAAAAISPSVLLT

SEQ ID NO: 12821 - protein, 217 aa, Triticum aestivum
  peptide (1)..(217): Ceres Seq. ID no. 13662454
  misc_feature (19)..(86): Pfam Name: Pfam Description:  Helix-loop-helix DNA-binding domain
  misc_feature (8)..(204): NCBI GI NO: 34894144 NR Description: P0482C06.20
  misc_feature (1)..(204): NCBI GI NO: 34894136 NR Description: P0482C06.16
  misc_feature (17)..(182): NCBI GI NO: 7486970 NR Description: hypothetical protein T13K14
  misc_feature (17)..(182): NCBI GI NO: 22328838 NR Description: bHLH protein family [Arabidopsis thaliana]
  misc_feature (63)..(204): NCBI GI NO: 25402607 NR Description: protein T10O24.23
  misc_feature (75)..(202): NCBI GI NO: 5091553 NR Description: T10O24.22 [Arabidopsis thaliana]
  misc_feature (84)..(202): NCBI GI NO: 18391177 NR Description: expressed protein [Arabidopsis thaliana]
MKSRTQSGRGGAMVADGGSKMERKEVEKNRRLHMKGLCLKLSSLLPSSSSAHHLRHYSSSPPSSNKDATTQLDQLDSAAAYIKKLKSRVDELKRRKQAVVSGTAGCSSSVSAGDYKGAALSTTALPVIEVRHQDGTLDVALASEAGRPFRLHEVIAVLEQEGAEVVSASFSVVGDKIFYTVHSQALYPRIGLEAGRVAHRLRGLAAAAAISPSVLLT

SEQ ID NO: 12822 - protein, 213 aa, Triticum aestivum
  peptide (1)..(213): Ceres Seq. ID no. 13662455
PPSLHPHLSLSSPAPALLASLHPSSLGLGEKRPRATHPNNEEQDAERPRRSHGRRRGQQDGAQGGGEEPAAAHEGTLPQALLPPPLLLLSPPPPPLFFLAAVQQQGRDDAAGPAGQRGGVHQEAQEPGRRTQAPQAGRRLRHRWLLVLRLRRRLQGSSTVHNCAACDRGAAPGRNAGRGAGERGRAAVPAARGDRRPGAGGRRGGQRQLFGRG

SEQ ID NO: 12823 - DNA, 1565 bp, Triticum aestivum
  misc_feature (1)..(1565): Ceres Seq. ID no. 14302306
gtgcccctcgcctccatcactcactctcacagccccccagctagctagtgccctctgcatctcgtgctcggagaacttagatcagcacagagcgagggtcgattagcagctgatcggcagatcatgggcgtggagggctgctgcaacaagaaggtgatggaggaggaggccctggtgaagaagatcaccggcctcgccgcggccatcggcgagctgccctcgctgagcccctcgccggcggtgaacgcgctcttcaccgagctggtgacgtcctgcatcccggcgagcaccgtcgacgtcgacgcgctgggcccggaggcgcaggagatgcgcgcccgcctcatccgcctctgcgccgacgccgagggccacctggaggcgcactactccgacctcctcgccgcgcacgacaacccgctcgaccacctcaccctcttcccctacttcaacaactacatcaagctcagccagctggagcacggcctcctcgcccgccacgtcccgggcccggccccggcccgcgtcgccttcctcggctccggcccgctgccgctcagctccctcgtgctcgccgcgcgccacctgcccgacgcctccttcgacaactacgacatctccggcgaggccaacgagcgcgccagccggctggtccgcaacgacgccgacgccggcgcgcgcatggcgttccgcacggcagacgtggccgacgtgacgaccgagctggcgggctacgacgtggtgttcctggcggcgctggtgggcatggcggccgaggagaaggcgcgcctggtggagcacctcgggaggcacatggcccccggcgcggcgctcgtggtgcggagcgcgcacggcgcgcgcgggttcctgtacccggtggtggaccccgaggagatccggcgaggcgggttcgaggtgctcaccgtgcaccacccggaggacgaggtgatcaactccgtcatcatcgcgcgcaaggcggcggcgccagcagccgtcgccgccgacggcgacgtgccggtgaacaacggcggcatgccggcccagtgcgcggtggcggtgagcagaccgtgcctgggctgcgcctgcgagctggggacgagggcgcaccagaagatgaaggagatggccatggaggagatggaggcgtaggccggccggcactccggcagacaccgtcaccgtcatcgcccagagcacggtgatgcatgaactcacccaccgattaatatttgcccgattaatcaccgaccgatacatacatgcatggtaataattggtttgtcctcatgcatggatggatggacgtggctacttatttaccataattattaatccttgcctgcgtatggctggctggattatttattttctaccgtaatcgtgccgtgtttgttttagcaatcgtctgacagctgctatatgcctccgggtttaacatagaggagggggatgatatgtgtcgtgttgtggtgtggtgagatcgagtcgagtcgagttgcctgcctgctagctgttgttgtaataagtgtttttgacactctatatgactcaagtgatccatcatcacc

SEQ ID NO: 12824 - protein, 340 aa, Triticum aestivum
  peptide (1)..(340): Ceres Seq. ID no. 14302307
  misc_feature (6)..(292): Pfam Name: Pfam Description:  Nicotianamine synthase protein
  misc_feature (1)..(340): NCBI GI NO: 27151636 NR Description: Nicotianamine synthase 9
  misc_feature (14)..(338): NCBI GI NO: 20387260 NR Description: nicotianamine synthase 1 [Zea mays]
  misc_feature (15)..(338): NCBI GI NO: 34898148 NR Description: nicotianamine synthase 3
  misc_feature (15)..(338): NCBI GI NO: 11176988 NR Description: nicotianamine synthase 3
  misc_feature (13)..(338): NCBI GI NO: 27151640 NR Description: Probable nicotianamine synthase 2
  misc_feature (13)..(334): NCBI GI NO: 27151634 NR Description: Probable nicotianamine synthase 1
  misc_feature (16)..(338): NCBI GI NO: 27151641 NR Description: Probable nicotianamine synthase 3
  misc_feature (13)..(334): NCBI GI NO: 20387262 NR Description: ZmNAS3 [Zea mays]
  misc_feature (13)..(338): NCBI GI NO: 27151630 NR Description: Probable nicotianamine synthase 2
  misc_feature (12)..(334): NCBI GI NO: 19911064 NR Description: ZmNAS2 [Zea mays]
MGVEGCCNKKVMEEEALVKKITGLAAAIGELPSLSPSPAVNALFTELVTSCIPASTVDVDALGPEAQEMRARLIRLCADAEGHLEAHYSDLLAAHDNPLDHLTLFPYFNNYIKLSQLEHGLLARHVPGPAPARVAFLGSGPLPLSSLVLAARHLPDASFDNYDISGEANERASRLVRNDADAGARMAFRTADVADVTTELAGYDVVFLAALVGMAAEEKARLVEHLGRHMAPGAALVVRSAHGARGFLYPVVDPEEIRRGGFEVLTVHHPEDEVINSVIIARKAAAPAAVAADGDVPVNNGGMPAQCAVAVSRPCLGCACELGTRAHQKMKEMAMEEMEA

SEQ ID NO: 12825 - protein, 329 aa, Triticum aestivum
  peptide (1)..(329): Ceres Seq. ID no. 14302308
  misc_feature (1)..(281): Pfam Name: Pfam Description:  Nicotianamine synthase protein
  misc_feature (1)..(329): NCBI GI NO: 27151636 NR Description: Nicotianamine synthase 9
  misc_feature (3)..(327): NCBI GI NO: 20387260 NR Description: nicotianamine synthase 1 [Zea mays]
  misc_feature (4)..(327): NCBI GI NO: 34898148 NR Description: nicotianamine synthase 3
  misc_feature (4)..(327): NCBI GI NO: 11176988 NR Description: nicotianamine synthase 3
  misc_feature (2)..(327): NCBI GI NO: 27151640 NR Description: Probable nicotianamine synthase 2
  misc_feature (2)..(323): NCBI GI NO: 27151634 NR Description: Probable nicotianamine synthase 1
  misc_feature (5)..(327): NCBI GI NO: 27151641 NR Description: Probable nicotianamine synthase 3
  misc_feature (2)..(323): NCBI GI NO: 20387262 NR Description: ZmNAS3 [Zea mays]
  misc_feature (2)..(327): NCBI GI NO: 27151630 NR Description: Probable nicotianamine synthase 2
  misc_feature (1)..(323): NCBI GI NO: 19911064 NR Description: ZmNAS2 [Zea mays]
MEEEALVKKITGLAAAIGELPSLSPSPAVNALFTELVTSCIPASTVDVDALGPEAQEMRARLIRLCADAEGHLEAHYSDLLAAHDNPLDHLTLFPYFNNYIKLSQLEHGLLARHVPGPAPARVAFLGSGPLPLSSLVLAARHLPDASFDNYDISGEANERASRLVRNDADAGARMAFRTADVADVTTELAGYDVVFLAALVGMAAEEKARLVEHLGRHMAPGAALVVRSAHGARGFLYPVVDPEEIRRGGFEVLTVHHPEDEVINSVIIARKAAAPAAVAADGDVPVNNGGMPAQCAVAVSRPCLGCACELGTRAHQKMKEMAMEEMEA

SEQ ID NO: 12826 - protein, 272 aa, Triticum aestivum
  peptide (1)..(272): Ceres Seq. ID no. 14302309
  misc_feature (1)..(224): Pfam Name: Pfam Description:  Nicotianamine synthase protein
  misc_feature (1)..(272): NCBI GI NO: 27151636 NR Description: Nicotianamine synthase 9
  misc_feature (1)..(270): NCBI GI NO: 20387260 NR Description: nicotianamine synthase 1 [Zea mays]
  misc_feature (1)..(270): NCBI GI NO: 34898148 NR Description: nicotianamine synthase 3
  misc_feature (1)..(270): NCBI GI NO: 11176988 NR Description: nicotianamine synthase 3
  misc_feature (1)..(270): NCBI GI NO: 27151640 NR Description: Probable nicotianamine synthase 2
  misc_feature (1)..(266): NCBI GI NO: 27151634 NR Description: Probable nicotianamine synthase 1
  misc_feature (1)..(270): NCBI GI NO: 27151641 NR Description: Probable nicotianamine synthase 3
  misc_feature (1)..(266): NCBI GI NO: 20387262 NR Description: ZmNAS3 [Zea mays]
  misc_feature (1)..(270): NCBI GI NO: 27151630 NR Description: Probable nicotianamine synthase 2
  misc_feature (1)..(266): NCBI GI NO: 19911064 NR Description: ZmNAS2 [Zea mays]
MRARLIRLCADAEGHLEAHYSDLLAAHDNPLDHLTLFPYFNNYIKLSQLEHGLLARHVPGPAPARVAFLGSGPLPLSSLVLAARHLPDASFDNYDISGEANERASRLVRNDADAGARMAFRTADVADVTTELAGYDVVFLAALVGMAAEEKARLVEHLGRHMAPGAALVVRSAHGARGFLYPVVDPEEIRRGGFEVLTVHHPEDEVINSVIIARKAAAPAAVAADGDVPVNNGGMPAQCAVAVSRPCLGCACELGTRAHQKMKEMAMEEMEA

SEQ ID NO: 12827 - DNA, 1263 bp, Triticum aestivum
  misc_feature (1)..(1263): Ceres Seq. ID no. 12615491
aatgaacatcttctccaaaggaggctctcccgttaggcccgttctctgatggagtcgcttgcctcgcaagcgaagccggctgccgtgctctggctcgccggcttcctccaggccgcgcgtctccaccgcgtcgtctccttctgcgtcagctcgagggctctgtcgatcagaatcgctcagtgcttcctgctcaacgggttcatcttcctggggagcttgctaaccttgaaatcagtggtcattccaactcttctatggatactgcccgagcaatgcgatcaatcatggggacaacatctatgtgaacacacaacagctgttgccttgtattcgttcttacgttcggggcttgtcgagattttctatgtattttggttttatcccctctacatcttcagctttataataagtacactttggtatggtgacattgctaagcatgctttggctgttgtgaaaagtaagaagctggatgcaagtcaagcacctgactctgaccctcacagcacatctgtatcagcagataggcctgaaggatttgatggggttgcgattggtgttggagagcaggtctattcgatacttcttttgactattttctttgctgaggttacagtgattggttacataccttaccttggtaaggcaatgaacttcatgttactgtctttgatgtatgcctactactgcttcgagtacaagtggaacttctttgcagtgagcctgaatcaccggcttgatttctttgagtcaaattgggctttctttgccggatttggtagtccatgtgtacttccgattttcttcttctctcctcttacaagttatggtgtgatggcaatactatacccactgtttgtcatgacagctgctggtacacaagaagagcaaaccattgatgaactgaaatctttgcatggagggaaactgaatagaatacccttgttctttgtcgcgaagcgactaacgacgcaagcgctgcagttgctcccagaggcacaaaaggagcaatgagtggtccacataatcacatgaactcagagttgcatagttctcatggaagtgatcatgtggaagctgcatctgagaggtgcatagttcacgcgaaagcgtggctgctcatgtgcgccacaccgcaatgtaaatattctgtaccattgccgctgtacatatacatatattgggccaataaaaaagaaactatggttgtccacgagatacatactgcaactgaagaaggaaatatacaaacatatactgtcc

SEQ ID NO: 12828 - protein, 321 aa, Triticum aestivum
  peptide (1)..(321): Ceres Seq. ID no. 12615492
  misc_feature (125)..(216): NCBI GI NO: 30680261 NR Description: predicted protein [Arabidopsis thaliana]
  misc_feature (4)..(55): NCBI GI NO: 30680261 NR Description: predicted protein [Arabidopsis thaliana]
  misc_feature (109)..(284): NCBI GI NO: 19920698 NR Description: CG15626-PA [Drosophila melanogaster]
  misc_feature (109)..(274): NCBI GI NO: 12803171 NR Description: Similar to etoposide-induced mRNA [Homo sapiens]
  misc_feature (109)..(274): NCBI GI NO: 30585325 NR Description: Homo sapiens etoposide-induced mRNA
  misc_feature (109)..(274): NCBI GI NO: 34863067 NR Description: similar to EI24 [Rattus norvegicus]
  misc_feature (109)..(274): NCBI GI NO: 6681289 NR Description: etoposide induced 2.4 mRNA [Mus musculus]
  misc_feature (109)..(274): NCBI GI NO: 6631104 NR Description: etoposide-induced mRNA [Homo sapiens]
  misc_feature (109)..(274): NCBI GI NO: 31223768 NR Description: ENSANGP00000010382 [Anopheles gambiae]
MESLASQAKPAAVLWLAGFLQAARLHRVVSFCVSSRALSIRIAQCFLLNGFIFLGSLLTLKSVVIPTLLWILPEQCDQSWGQHLCEHTTAVALYSFLRSGLVEIFYVFWFYPLYIFSFIISTLWYGDIAKHALAVVKSKKLDASQAPDSDPHSTSVSADRPEGFDGVAIGVGEQVYSILLLTIFFAEVTVIGYIPYLGKAMNFMLLSLMYAYYCFEYKWNFFAVSLNHRLDFFESNWAFFAGFGSPCVLPIFFFSPLTSYGVMAILYPLFVMTAAGTQEEQTIDELKSLHGGKLNRIPLFFVAKRLTTQALQLLPEAQKEQ

SEQ ID NO: 12829 - DNA, 1156 bp, Triticum aestivum
  misc_feature (1)..(1156): Ceres Seq. ID no. 13596555
gaaaaatctaggcatgcatctcgccgccgactacccccaccgcggcggtggccgcctcggcctagggccattcgcggcagcggtgctccgcaccgacaaccgtcgccgtgcgattgcaggcggcgcggtcctcgcctcggcgctgcttctcgtggccacaccacgactccgccactcgccggcgctccacctcttcgccgacatgcgcaacctcctcggcgtgcccaacaccctcaacgtgctcaccgcctacccgcttctccttgctggagtaccaggactcatcctgtgcctcttcggcggtggatgcttcggcataagcttaaggtgggaggccttgggatggttcctcttctatgtggggaatgtaggggcagcatttggctcagcttactatcacctcaagccagatgatgaccggttaatttgggacaggttgccgatgatgatgtcggcctcctcgcttttgtcgatattggtaattgaaagagttgatgagagggctgggttatcttgtttgatctcgctcttgtctcttttactggtgagcagtgcgtgtgaaaggattcttgatgatatgcgcctgtgggtagttttaaacctggttccttgtgttgccattcctgcaatgctattcttgttcgcgccaaagtatacacactcaagattttggtttcttgctacaggcttttaccttctggcaagattcgaaggccttgccgacagaaaggtttacagtgtgaatagatatttcattagcggtcattccttggagcacctttgcttcgccatggttacattgatacttactgtgatgctatccttcagaaatattaagatcaccagggactcgtgactacaactccaccattgcttgtttgtaacaaatggcaaatttcctgtcagaatttctatgttcggaagggcccctccagagtccggaagcacctgaagaaacataaataggtgatctatgtatcctatctttccactacctgggtgactgacgccctccatccctgggcggcatagacaagtcctgtgagattatttcaatgtgtgttcatgtcgtgagttatttgtgtttggagcttgttaactggaccagcagaaacattggacgactatattgcaatttatacagatttcagctgtc

SEQ ID NO: 12830 - protein, 284 aa, Triticum aestivum
  peptide (1)..(284): Ceres Seq. ID no. 13596556
  misc_feature (5)..(106): NCBI GI NO: 34903592 NR Description: P0419B01.9
  misc_feature (177)..(280): NCBI GI NO: 34903592 NR Description: P0419B01.9
  misc_feature (34)..(282): NCBI GI NO: 15239801 NR Description: expressed protein [Arabidopsis thaliana]
  misc_feature (40)..(284): NCBI GI NO: 15223970 NR Description: expressed protein [Arabidopsis thaliana]
  misc_feature (34)..(284): NCBI GI NO: 34905818 NR Description: P0483G10.13
  misc_feature (60)..(284): NCBI GI NO: 29653854 NR Description: membrane protein, putative
  misc_feature (32)..(264): NCBI GI NO: 23029224 NR Description: hypothetical protein
  misc_feature (24)..(264): NCBI GI NO: 27376099 NR Description: blr0988 [Bradyrhizobium japonicum]
KNLGMHLAADYPHRGGGRLGLGPFAAAVLRTDNRRRAIAGGAVLASALLLVATPRLRHSPALHLFADMRNLLGVPNTLNVLTAYPLLLAGVPGLILCLFGGGCFGISLRWEALGWFLFYVGNVGAAFGSAYYHLKPDDDRLIWDRLPMMMSASSLLSILVIERVDERAGLSCLISLLSLLLVSSACERILDDMRLWVVLNLVPCVAIPAMLFLFAPKYTHSRFWFLATGFYLLARFEGLADRKVYSVNRYFISGHSLEHLCFAMVTLILTVMLSFRNIKITRDS

SEQ ID NO: 12831 - protein, 280 aa, Triticum aestivum
  peptide (1)..(280): Ceres Seq. ID no. 13596557
  misc_feature (1)..(102): NCBI GI NO: 34903592 NR Description: P0419B01.9
  misc_feature (173)..(276): NCBI GI NO: 34903592 NR Description: P0419B01.9
  misc_feature (30)..(278): NCBI GI NO: 15239801 NR Description: expressed protein [Arabidopsis thaliana]
  misc_feature (36)..(280): NCBI GI NO: 15223970 NR Description: expressed protein [Arabidopsis thaliana]
  misc_feature (30)..(280): NCBI GI NO: 34905818 NR Description: P0483G10.13
  misc_feature (56)..(280): NCBI GI NO: 29653854 NR Description: membrane protein, putative
  misc_feature (28)..(260): NCBI GI NO: 23029224 NR Description: hypothetical protein
  misc_feature (20)..(260): NCBI GI NO: 27376099 NR Description: blr0988 [Bradyrhizobium japonicum]
MHLAADYPHRGGGRLGLGPFAAAVLRTDNRRRAIAGGAVLASALLLVATPRLRHSPALHLFADMRNLLGVPNTLNVLTAYPLLLAGVPGLILCLFGGGCFGISLRWEALGWFLFYVGNVGAAFGSAYYHLKPDDDRLIWDRLPMMMSASSLLSILVIERVDERAGLSCLISLLSLLLVSSACERILDDMRLWVVLNLVPCVAIPAMLFLFAPKYTHSRFWFLATGFYLLARFEGLADRKVYSVNRYFISGHSLEHLCFAMVTLILTVMLSFRNIKITRDS

SEQ ID NO: 12832 - protein, 217 aa, Triticum aestivum
  peptide (1)..(217): Ceres Seq. ID no. 13596558
  misc_feature (1)..(39): NCBI GI NO: 34903592 NR Description: P0419B01.9
  misc_feature (110)..(213): NCBI GI NO: 34903592 NR Description: P0419B01.9
  misc_feature (1)..(215): NCBI GI NO: 15239801 NR Description: expressed protein [Arabidopsis thaliana]
  misc_feature (1)..(217): NCBI GI NO: 15223970 NR Description: expressed protein [Arabidopsis thaliana]
  misc_feature (1)..(217): NCBI GI NO: 34905818 NR Description: P0483G10.13
  misc_feature (1)..(217): NCBI GI NO: 29653854 NR Description: membrane protein, putative
  misc_feature (1)..(197): NCBI GI NO: 23029224 NR Description: hypothetical protein
  misc_feature (1)..(197): NCBI GI NO: 27376099 NR Description: blr0988 [Bradyrhizobium japonicum]
MRNLLGVPNTLNVLTAYPLLLAGVPGLILCLFGGGCFGISLRWEALGWFLFYVGNVGAAFGSAYYHLKPDDDRLIWDRLPMMMSASSLLSILVIERVDERAGLSCLISLLSLLLVSSACERILDDMRLWVVLNLVPCVAIPAMLFLFAPKYTHSRFWFLATGFYLLARFEGLADRKVYSVNRYFISGHSLEHLCFAMVTLILTVMLSFRNIKITRDS

SEQ ID NO: 12833 - DNA, 1120 bp, Triticum aestivum
  misc_feature (1)..(1120): Ceres Seq. ID no. 12587345
cattccattcccccattccccgctccaacaacctccatctctcctctcctctcctctcctctcgtctccacagcagcagcagctccggttcgagctcgagcgaggaagaagtataccatttggcccgtgaagatgttggccatcttccagaagcaggtggcgcacgcgccgcaggagctcaacagcccgcgcggcagcaccgccaagcccaggaaccccgacgagatcctccgcgacttccacgccgcccaccccgccgacgccttctccacctccttcggcggcggcgccgccctcgcctgcgtcgccgcgcagccccgctccctcgccgccggcgggtaccagcggatgttctgcgggctggacgacatctactgcgtgttcatgggcacgctggacaacctgagcagtctgatgcggcagtacggcctcaccggccgctccaccaacgaggcgctgctggtgatcgaggcctaccgcacgctgcgcgaccggggcccctacccggcggaccaggtggtgaaggacctctccggctccttcgccttcgtcgtcttcgacaaccgcggccggtccgggtcgggggcggcggtgttcgcggcgcagagcacggacggcggggtgccgctgcactggggcgtggcggcggacgggtcggtggtgatctgcgacgaccgcggcgtggccaaggccgggtgcgggcggtcgtacgcgccgttcccgcccgggtgcatgttccacagcgagggcgggctcaagagcttcgagcaccccatgaaccgcctcaaggcgctccccagggtggacagcgagggcgtcatgtgcggcgccaacttcaaggtcgacgccttcaccaagatcaactccatgccccgcgtcggcagcgccaccaactgggccgccgcctgggacgacgccgccatctgatcctcgccggcgccggcgttgctctccgtcgtggcctcgtcgggcttgggcttattgcattttacttgtttttctttccttggcaatgtacattctgatctgatctgatctgagccgtgtgtgggcgtgggcgcgctggcacgtacggctgtttgcttgtacgatggaggaataagactttgcttccagtcct

SEQ ID NO: 12834 - protein, 340 aa, Triticum aestivum
  peptide (1)..(340): Ceres Seq. ID no. 12587346
  misc_feature (21)..(318): NCBI GI NO: 22960097 NR Description: hypothetical protein [Rhodobacter sphaeroides]
FHSPIPRSNNLHLSSPLLSSRLHSSSSSGSSSSEEEVYHLAREDVGHLPEAGGARAAGAQQPARQHRQAQEPRRDPPRLPRRPPRRRLLHLLRRRRRPRLRRRAAPLPRRRRVPADVLRAGRHLLRVHGHAGQPEQSDAAVRPHRPLHQRGAAGDRGLPHAARPGPLPGGPGGEGPLRLLRLRRLRQPRPVRVGGGGVRGAEHGRRGAAALGRGGGRVGGDLRRPRRGQGRVRAVVRAVPARVHVPQRGRAQELRAPHEPPQGAPQGGQRGRHVRRQLQGRRLHQDQLHAPRRQRHQLGRRLGRRRHLILAGAGVALRRGLVGLGLIAFYLFFFPWQCTF

SEQ ID NO: 12835 - protein, 308 aa, Triticum aestivum
  peptide (1)..(308): Ceres Seq. ID no. 12587347
  misc_feature (45)..(306): NCBI GI NO: 542200 NR Description: hypothetical protein - garden asparagus
  misc_feature (45)..(304): NCBI GI NO: 9857931 NR Description: unknown [Glycine max]
  misc_feature (45)..(300): NCBI GI NO: 18416995 NR Description: putative protein; protein id: At4g27450
  misc_feature (45)..(300): NCBI GI NO: 7486256 NR Description: hypothetical protein F27G19
  misc_feature (45)..(302): NCBI GI NO: 18400774 NR Description: expressed protein; protein id: At3g15450
  misc_feature (44)..(303): NCBI GI NO: 7489016 NR Description: hypothetical protein - tomato
  misc_feature (45)..(300): NCBI GI NO: 20340249 NR Description: aluminum-induced protein-like protein
  misc_feature (45)..(300): NCBI GI NO: 15239993 NR Description: aluminum-induced protein-like
  misc_feature (19)..(300): NCBI GI NO: 30017570 NR Description: unknown protein
  misc_feature (45)..(300): NCBI GI NO: 32352176 NR Description: hypothetical protein
HSIPPFPAPTTSISPLLSSPLVSTAAAAPVRARARKKYTIWPVKMLAIFQKQVAHAPQELNSPRGSTAKPRNPDEILRDFHAAHPADAFSTSFGGGAALACVAAQPRSLAAGGYQRMFCGLDDIYCVFMGTLDNLSSLMRQYGLTGRSTNEALLVIEAYRTLRDRGPYPADQVVKDLSGSFAFVVFDNRGRSGSGAAVFAAQSTDGGVPLHWGVAADGSVVICDDRGVAKAGCGRSYAPFPPGCMFHSEGGLKSFEHPMNRLKALPRVDSEGVMCGANFKVDAFTKINSMPRVGSATNWAAAWDDAAI

SEQ ID NO: 12836 - protein, 264 aa, Triticum aestivum
  peptide (1)..(264): Ceres Seq. ID no. 12587348
  misc_feature (1)..(262): NCBI GI NO: 542200 NR Description: hypothetical protein - garden asparagus
  misc_feature (1)..(260): NCBI GI NO: 9857931 NR Description: unknown [Glycine max]
  misc_feature (1)..(256): NCBI GI NO: 18416995 NR Description: putative protein; protein id: At4g27450
  misc_feature (1)..(256): NCBI GI NO: 7486256 NR Description: hypothetical protein F27G19
  misc_feature (1)..(258): NCBI GI NO: 18400774 NR Description: expressed protein; protein id: At3g15450
  misc_feature (1)..(259): NCBI GI NO: 7489016 NR Description: hypothetical protein - tomato
  misc_feature (1)..(256): NCBI GI NO: 20340249 NR Description: aluminum-induced protein-like protein
  misc_feature (1)..(256): NCBI GI NO: 15239993 NR Description: aluminum-induced protein-like
  misc_feature (1)..(256): NCBI GI NO: 30017570 NR Description: unknown protein
  misc_feature (1)..(256): NCBI GI NO: 32352176 NR Description: hypothetical protein
MLAIFQKQVAHAPQELNSPRGSTAKPRNPDEILRDFHAAHPADAFSTSFGGGAALACVAAQPRSLAAGGYQRMFCGLDDIYCVFMGTLDNLSSLMRQYGLTGRSTNEALLVIEAYRTLRDRGPYPADQVVKDLSGSFAFVVFDNRGRSGSGAAVFAAQSTDGGVPLHWGVAADGSVVICDDRGVAKAGCGRSYAPFPPGCMFHSEGGLKSFEHPMNRLKALPRVDSEGVMCGANFKVDAFTKINSMPRVGSATNWAAAWDDAAI

SEQ ID NO: 12837 - DNA, 697 bp, Triticum aestivum
  misc_feature (1)..(697): Ceres Seq. ID no. 15175129
acaccgcagcatcagcagcccgcctcacatcccacccaaacccagcctccccacacgctccaaccaccagcacgcatggcacccaaggcggcggagaagaagccggtggtggccgcggagaagaccccggcggggaagaagcccaaggcggagaagcgggcgccggcgtccaaggaggccggcggcgagggcaagacgaggggcaggaagaagggcagcaaggccaagaagggcgtggagacgtacaagatctacatcttcaaggtgctgaagcaggtgcacgagatcaaggacttcctgctgacggcgcgccggaaggacgcgcggtcggtgcggatcaagaggaccaaggacgccgtcaagttcaaggtgcgctgctccaggtacctctacacgctctgcgtcttcgacgccgacaaggccaacaagctcaagcagtccctcccaccaggtttgagcgtccaggaggtttaagcatcaagccagacaatgccttttctagtagcgggaatgttctatccatcttgctttagtaactgttagcaggctctccttgtttacccccattaagagagttttgatgtcccaagactggaatgtaatgttgggagctatgtggttgaacctgtgaggatttttgtgttattttcacttgctggagaaggagatccattatcttatcctaaattggtttagt

SEQ ID NO: 12838 - protein, 176 aa, Triticum aestivum
  peptide (1)..(176): Ceres Seq. ID no. 15175130
  misc_feature (14)..(155): Pfam Name: Pfam Description:  High molecular weight glutenin subunit
  misc_feature (96)..(160): NCBI GI NO: 7489588 NR Description: ribosomal protein homolog - rice
TAASAARLTSHPNPASPHAPTTSTHGTQGGGEEAGGGRGEDPGGEEAQGGEAGAGVQGGRRRGQDEGQEEGQQGQEGRGDVQDLHLQGAEAGARDQGLPADGAPEGRAVGADQEDQGRRQVQGALLQVPLHALRLRRRQGQQAQAVPPTRFERPGGLSIKPDNAFSSSGNVLSILL

SEQ ID NO: 12839 - protein, 157 aa, Triticum aestivum
  peptide (1)..(157): Ceres Seq. ID no. 15175131
  misc_feature (91)..(157): Pfam Name: Pfam Description:  Ribosomal L38e protein family
  misc_feature (91)..(157): NCBI GI NO: 33146530 NR Description: putative 60S ribosomal protein L38
  misc_feature (91)..(157): NCBI GI NO: 34898514 NR Description: putative 60S ribosomal protein L38
  misc_feature (91)..(157): NCBI GI NO: 15224284 NR Description: 60S ribosomal protein L38 (RPL38A)
  misc_feature (91)..(157): NCBI GI NO: 1173043 NR Description: 60S RIBOSOMAL PROTEIN L38
  misc_feature (30)..(94): NCBI GI NO: 122033 NR Description: HISTONE H2B.2
  misc_feature (91)..(157): NCBI GI NO: 15825507 NR Description: ribosomal protein L38 [Branchiostoma belcheri]
  misc_feature (91)..(157): NCBI GI NO: 27497793 NR Description: 60S ribosomal protein L38
  misc_feature (27)..(155): NCBI GI NO: 34875039 NR Description: similar to tweety homolog 2 [Rattus norvegicus]
  misc_feature (17)..(94): NCBI GI NO: 399854 NR Description: Histone H2B.2
  misc_feature (17)..(94): NCBI GI NO: 34895900 NR Description: putative histone H2B
TPQHQQPASHPTQTQPPHTLQPPARMAPKAAEKKPVVAAEKTPAGKKPKAEKRAPASKEAGGEGKTRGRKKGSKAKKGVETYKIYIFKVLKQVHEIKDFLLTARRKDARSVRIKRTKDAVKFKVRCSRYLYTLCVFDADKANKLKQSLPPGLSVQEV

SEQ ID NO: 12840 - protein, 132 aa, Triticum aestivum
  peptide (1)..(132): Ceres Seq. ID no. 15175132
  misc_feature (66)..(132): Pfam Name: Pfam Description:  Ribosomal L38e protein family
  misc_feature (66)..(132): NCBI GI NO: 33146530 NR Description: putative 60S ribosomal protein L38
  misc_feature (66)..(132): NCBI GI NO: 34898514 NR Description: putative 60S ribosomal protein L38
  misc_feature (66)..(132): NCBI GI NO: 15224284 NR Description: 60S ribosomal protein L38 (RPL38A)
  misc_feature (66)..(132): NCBI GI NO: 1173043 NR Description: 60S RIBOSOMAL PROTEIN L38
  misc_feature (5)..(69): NCBI GI NO: 122033 NR Description: HISTONE H2B.2
  misc_feature (66)..(132): NCBI GI NO: 15825507 NR Description: ribosomal protein L38 [Branchiostoma belcheri]
  misc_feature (66)..(132): NCBI GI NO: 27497793 NR Description: 60S ribosomal protein L38
  misc_feature (2)..(130): NCBI GI NO: 34875039 NR Description: similar to tweety homolog 2 [Rattus norvegicus]
  misc_feature (1)..(69): NCBI GI NO: 399854 NR Description: Histone H2B.2
  misc_feature (1)..(69): NCBI GI NO: 34895900 NR Description: putative histone H2B
MAPKAAEKKPVVAAEKTPAGKKPKAEKRAPASKEAGGEGKTRGRKKGSKAKKGVETYKIYIFKVLKQVHEIKDFLLTARRKDARSVRIKRTKDAVKFKVRCSRYLYTLCVFDADKANKLKQSLPPGLSVQEV

SEQ ID NO: 12841 - DNA, 1979 bp, Triticum aestivum
  misc_feature (1)..(1979): Ceres Seq. ID no. 14313559
atgagaagatcaccatagcactggacaacctcccgatcccgagcagctccgattggaaggccgccgtggcgagatcccgcgcgggcagggcctcgatgggaccaccgccgaccaggtggcccctgctggccgccctcgtcgcggcggcgctgctcgccggcgcggcggcggcgacggaggaggcctacgtcacgctgctctacggcgacgagttcgtcctcggcgtgcgcgtcctgggcaagtccatccgcgacaccggcacgcggcgggacatggtcgtgctcgtctccgacggcgtctccgagtactcgcgggagctcctcgaggctgatggttggatcgtgaagcgtataactttactggctaatcctaaccaagtgagaccaacgaggttttggggtgtctacacaaagttgaagatattcaacatgacaagctacaaaaaggttgtttatcttgatgcagatactgtagttgtaaaaagtatcgaggatgttttcaagtgtaggaagttctgtgggaacttgaagcattctgaaagaatgaattccggagtgatggttgtggagccatctgaaactgttttcaaggatatgattagccaagtagaccggttgccttcctacactggaggggatcaaggttttcttaattcatattatgctgattttgctaactcccgcgtgtatgagccagactcacctttaacacctgaaccggagacacagcgcctttctaccttgtataatgctgatgttggtctttacatgctagccaacaagtggatggttgatgaaaaggaacttagagttattcactacacactaggtccccttaaaccctgggactggtggacagcttggcttgtaaaacctgtggagatatggcaggatgttaggcaaaaacttgaagaatctcttccgggaaccggtgggggaaggaaccctcatgatcagctggtggtcaaatttttattcattcttcccttctgcctgctgttatttggttattaccaatcatgctttcagaactataaggattttccaagtgtgcagtctttatgtgcgtttgcaagaagaggccgtcataagtataagtctgaagaggcacttccatcttattcagcagttggtgtttcatcatctacattttctacttcaaatcaaagaatctcaaacgggccacatctgaagctgccttcttatttcggggcgattgctgtgctaatctgttttatgtctgctggtgtctctcttgcctttgctttcactatcattccacgacaaattatgccatggacaggtctgctactgatgtttgagtggaccttcgtggcattcttcttattgtttggtagctatctccgttttgtctatcgatggggaagtatcagtgcaactcatgtgggatatagcaattctgattcatcagagaatcacatggctacaggccatcatcagcgcaatatatctgacttcgacatggaggcgacattttactggacagggatggctgtcatagctatcattactgtattttcaccaactatcttgggtataactgcattatttacaaagctagggttgatggttgccggtggtgttctgctggcatcttttatgacgtatgcttcggtgcatcttgctatctcagccttccacaagggtcaaaaagataggaatgggtcgagaactagaagaatttgtttctggtgtttgtagtaagctttgtgcctgcattgttaatttagttcatgttgttgtacatttttactcaaggaaattttggtggttccgttggcacagatattccacttttgtaacactgatgccaaatcaaaggtacataggttccaatagttgacatgcagctcgcaggcctgcaagtgtaaagctttttgtctataaaactcttcctgccatttgctcgttgtacaatatgatcggcggttctatattggaactatggaacatgaactc

SEQ ID NO: 12842 - protein, 572 aa, Triticum aestivum
  peptide (1)..(572): Ceres Seq. ID no. 14313560
  misc_feature (34)..(260): NCBI GI NO: 38568059 NR Description: OSJNBa0073E02.8
  misc_feature (383)..(471): NCBI GI NO: 38568059 NR Description: OSJNBa0073E02.8
  misc_feature (277)..(342): NCBI GI NO: 38568059 NR Description: OSJNBa0073E02.8
  misc_feature (531)..(557): NCBI GI NO: 38568059 NR Description: OSJNBa0073E02.8
  misc_feature (39)..(571): NCBI GI NO: 22326882 NR Description: glycogenin glucosyltransferase
  misc_feature (39)..(571): NCBI GI NO: 18087513 NR Description: AT5g18480/F20L16_200 [Arabidopsis thaliana]
  misc_feature (134)..(304): NCBI GI NO: 7507569 NR Description: hypothetical protein T10B10
  misc_feature (143)..(304): NCBI GI NO: 17569749 NR Description: predicted CDS, glycosyl transferase, family 8
  misc_feature (143)..(303): NCBI GI NO: 39596633 NR Description: Hypothetical protein CBG07620
  misc_feature (54)..(281): NCBI GI NO: 22330689 NR Description: glycogenin glucosyltransferase
EKITIALDNLPIPSSSDWKAAVARSRAGRASMGPPPTRWPLLAALVAAALLAGAAAATEEAYVTLLYGDEFVLGVRVLGKSIRDTGTRRDMVVLVSDGVSEYSRELLEADGWIVKRITLLANPNQVRPTRFWGVYTKLKIFNMTSYKKVVYLDADTVVVKSIEDVFKCRKFCGNLKHSERMNSGVMVVEPSETVFKDMISQVDRLPSYTGGDQGFLNSYYADFANSRVYEPDSPLTPEPETQRLSTLYNADVGLYMLANKWMVDEKELRVIHYTLGPLKPWDWWTAWLVKPVEIWQDVRQKLEESLPGTGGGRNPHDQLVVKFLFILPFCLLLFGYYQSCFQNYKDFPSVQSLCAFARRGRHKYKSEEALPSYSAVGVSSSTFSTSNQRISNGPHLKLPSYFGAIAVLICFMSAGVSLAFAFTIIPRQIMPWTGLLLMFEWTFVAFFLLFGSYLRFVYRWGSISATHVGYSNSDSSENHMATGHHQRNISDFDMEATFYWTGMAVIAIITVFSPTILGITALFTKLGLMVAGGVLLASFMTYASVHLAISAFHKGQKDRNGSRTRRICFWCL

SEQ ID NO: 12843 - protein, 541 aa, Triticum aestivum
  peptide (1)..(541): Ceres Seq. ID no. 14313561
  misc_feature (3)..(229): NCBI GI NO: 38568059 NR Description: OSJNBa0073E02.8
  misc_feature (352)..(440): NCBI GI NO: 38568059 NR Description: OSJNBa0073E02.8
  misc_feature (246)..(311): NCBI GI NO: 38568059 NR Description: OSJNBa0073E02.8
  misc_feature (500)..(526): NCBI GI NO: 38568059 NR Description: OSJNBa0073E02.8
  misc_feature (8)..(540): NCBI GI NO: 22326882 NR Description: glycogenin glucosyltransferase
  misc_feature (8)..(540): NCBI GI NO: 18087513 NR Description: AT5g18480/F20L16_200 [Arabidopsis thaliana]
  misc_feature (103)..(273): NCBI GI NO: 7507569 NR Description: hypothetical protein T10B10
  misc_feature (112)..(273): NCBI GI NO: 17569749 NR Description: predicted CDS, glycosyl transferase, family 8
  misc_feature (112)..(272): NCBI GI NO: 39596633 NR Description: Hypothetical protein CBG07620
  misc_feature (23)..(250): NCBI GI NO: 22330689 NR Description: glycogenin glucosyltransferase
MGPPPTRWPLLAALVAAALLAGAAAATEEAYVTLLYGDEFVLGVRVLGKSIRDTGTRRDMVVLVSDGVSEYSRELLEADGWIVKRITLLANPNQVRPTRFWGVYTKLKIFNMTSYKKVVYLDADTVVVKSIEDVFKCRKFCGNLKHSERMNSGVMVVEPSETVFKDMISQVDRLPSYTGGDQGFLNSYYADFANSRVYEPDSPLTPEPETQRLSTLYNADVGLYMLANKWMVDEKELRVIHYTLGPLKPWDWWTAWLVKPVEIWQDVRQKLEESLPGTGGGRNPHDQLVVKFLFILPFCLLLFGYYQSCFQNYKDFPSVQSLCAFARRGRHKYKSEEALPSYSAVGVSSSTFSTSNQRISNGPHLKLPSYFGAIAVLICFMSAGVSLAFAFTIIPRQIMPWTGLLLMFEWTFVAFFLLFGSYLRFVYRWGSISATHVGYSNSDSSENHMATGHHQRNISDFDMEATFYWTGMAVIAIITVFSPTILGITALFTKLGLMVAGGVLLASFMTYASVHLAISAFHKGQKDRNGSRTRRICFWCL

SEQ ID NO: 12844 - protein, 482 aa, Triticum aestivum
  peptide (1)..(482): Ceres Seq. ID no. 14313562
  misc_feature (1)..(170): NCBI GI NO: 38568059 NR Description: OSJNBa0073E02.8
  misc_feature (293)..(381): NCBI GI NO: 38568059 NR Description: OSJNBa0073E02.8
  misc_feature (187)..(252): NCBI GI NO: 38568059 NR Description: OSJNBa0073E02.8
  misc_feature (441)..(467): NCBI GI NO: 38568059 NR Description: OSJNBa0073E02.8
  misc_feature (1)..(481): NCBI GI NO: 22326882 NR Description: glycogenin glucosyltransferase
  misc_feature (1)..(481): NCBI GI NO: 18087513 NR Description: AT5g18480/F20L16_200 [Arabidopsis thaliana]
  misc_feature (44)..(214): NCBI GI NO: 7507569 NR Description: hypothetical protein T10B10
  misc_feature (53)..(214): NCBI GI NO: 17569749 NR Description: predicted CDS, glycosyl transferase, family 8
  misc_feature (53)..(213): NCBI GI NO: 39596633 NR Description: Hypothetical protein CBG07620
  misc_feature (1)..(191): NCBI GI NO: 22330689 NR Description: glycogenin glucosyltransferase
MVVLVSDGVSEYSRELLEADGWIVKRITLLANPNQVRPTRFWGVYTKLKIFNMTSYKKVVYLDADTVVVKSIEDVFKCRKFCGNLKHSERMNSGVMVVEPSETVFKDMISQVDRLPSYTGGDQGFLNSYYADFANSRVYEPDSPLTPEPETQRLSTLYNADVGLYMLANKWMVDEKELRVIHYTLGPLKPWDWWTAWLVKPVEIWQDVRQKLEESLPGTGGGRNPHDQLVVKFLFILPFCLLLFGYYQSCFQNYKDFPSVQSLCAFARRGRHKYKSEEALPSYSAVGVSSSTFSTSNQRISNGPHLKLPSYFGAIAVLICFMSAGVSLAFAFTIIPRQIMPWTGLLLMFEWTFVAFFLLFGSYLRFVYRWGSISATHVGYSNSDSSENHMATGHHQRNISDFDMEATFYWTGMAVIAIITVFSPTILGITALFTKLGLMVAGGVLLASFMTYASVHLAISAFHKGQKDRNGSRTRRICFWCL

SEQ ID NO: 12845 - DNA, 1410 bp, Triticum aestivum
  misc_feature (1)..(1410): Ceres Seq. ID no. 14301538
ctcgatcttcttgtttcagcctccacacacttggccatctcgcaagccgtgacagggcgatcaatggcgcccctacgtccgcgcctggccgccctgctcgctctgtgcgcgtgcgccatggctccgccggcggccgccgccaacgtgtcgatcacgacgtgccggtccttctgcggcaacatcacggtggactacccgttcgcgctccacgccgggtgcggccacgcggggttccgcgacctgctctactgcatcgaccgcacgctcatgctgcacctcccctcgggctcctaccgcgtcctcgacatcgactacgcctaccgcggcctcaccctgcacgacccggccatgtccgactgccgcgccatcgaccgctccccgggcggccgcggcaacgggttcgtcgtcgagccgtggcgcgcgccgttcctggccccggacccggacaacgtgttcctcctcctcggctgccgcgccagctcgccgctcttccagggcttccccgaccgccacctgccgtgccggaacgtgtccgggatggggtgcggcgactactacggctgccccgcgtgggacgactacgggcgccggccgtcgggggcggcgtacgggtcggccgtgccgcccgagtgctgcgcggtctcgtagggcgccatccgggccgtgaacgtgagccggctccagtgcgaggggtacagcagcgcgtacagcctcgcgccggtgcgcgcggagggggccggcggctgggcgtacggcatccgggtggcgtgggcgctgccggaggcgaaccgggggttctgcggcgcgtgccgcgccacgggcggggtgtgcggccacgacgtggagagccgcggcgacctgtgcctctgcggtgactggaactcgacttccaactgcgactcctcggcggacgccgcgccgtcaagcaccgccacgcctggcatcgccattgccgctcttctcttggcccttctcgcctcaggattgtcgtccgggtcaatagcgaacatgtgagggacagagggagtgtgcctgtgaaggcgtcatgtttcatccaacagtggccactgacgagctgttcgtgccgccatgattacctccgccgtctggtgtaccgctgcaatacttttgtgtagacaaaaactagtgcgactgaaatgtttgtctgcggcataaatctttgattaggaaatcagtgtcatattacattcgaagtatacctacaaaacatatgcgagtcagaactggggtatattgtgagcttgctcgattcatcatgcttattcgatttgatgtggctccgtttgcatttgtgagtgatgcgttgcggtcctcgcggaggcatgaaaatatgtttgaatatgtttcgcccgtattaacgtataaatgcattacctagtttttttttcg

SEQ ID NO: 12846 - protein, 290 aa, Triticum aestivum
  peptide (1)..(290): Ceres Seq. ID no. 14301539
  misc_feature (110)..(288): NCBI GI NO: 29247944 NR Description: GLP_26_54603_52153 [Giardia lamblia ATCC 50803]
  misc_feature (58)..(270): NCBI GI NO: 23018788 NR Description: hypothetical protein [Thermobifida fusca]
RSSCFSLHTLGHLASRDRAINGAPTSAPGRPARSVRVRHGSAGGRRQRVDHDVPVLLRQHHGGLPVRAPRRVRPRGVPRPALLHRPHAHAAPPLGLLPRPRHRLRLPRPHPARPGHVRLPRHRPLPGRPRQRVRRRAVARAVPGPGPGQRVPPPRLPRQLAALPGLPRPPPAVPERVRDGVRRLLRLPRVGRLRAPAVGGGVRVGRAARVLRGLVGRHPGREREPAPVRGVQQRVQPRAGARGGGRRLGVRHPGGVGAAGGEPGVLRRVPRHGRGVRPRRGEPRRPVPLR

SEQ ID NO: 12847 - protein, 215 aa, Triticum aestivum
  peptide (1)..(215): Ceres Seq. ID no. 14301540
  misc_feature (51)..(215): NCBI GI NO: 15240650 NR Description: hypothetical protein [Arabidopsis thaliana]
  misc_feature (42)..(215): NCBI GI NO: 15229029 NR Description: expressed protein [Arabidopsis thaliana]
  misc_feature (46)..(215): NCBI GI NO: 18391149 NR Description: expressed protein [Arabidopsis thaliana]
  misc_feature (46)..(215): NCBI GI NO: 25372857 NR Description: protein F14N23.27
  misc_feature (22)..(215): NCBI GI NO: 18391330 NR Description: expressed protein [Arabidopsis thaliana]
LDLLVSASTHLAISQAVTGRSMAPLRPRLAALLALCACAMAPPAAAANVSITTCRSFCGNITVDYPFALHAGCGHAGFRDLLYCIDRTLMLHLPSGSYRVLDIDYAYRGLTLHDPAMSDCRAIDRSPGGRGNGFVVEPWRAPFLAPDPDNVFLLLGCRASSPLFQGFPDRHLPCRNVSGMGCGDYYGCPAWDDYGRRPSGAAYGSAVPPECCAVS

SEQ ID NO: 12848 - protein, 194 aa, Triticum aestivum
  peptide (1)..(194): Ceres Seq. ID no. 14301541
  misc_feature (30)..(194): NCBI GI NO: 15240650 NR Description: hypothetical protein [Arabidopsis thaliana]
  misc_feature (21)..(194): NCBI GI NO: 15229029 NR Description: expressed protein [Arabidopsis thaliana]
  misc_feature (25)..(194): NCBI GI NO: 18391149 NR Description: expressed protein [Arabidopsis thaliana]
  misc_feature (25)..(194): NCBI GI NO: 25372857 NR Description: protein F14N23.27
  misc_feature (1)..(194): NCBI GI NO: 18391330 NR Description: expressed protein [Arabidopsis thaliana]
MAPLRPRLAALLALCACAMAPPAAAANVSITTCRSFCGNITVDYPFALHAGCGHAGFRDLLYCIDRTLMLHLPSGSYRVLDIDYAYRGLTLHDPAMSDCRAIDRSPGGRGNGFVVEPWRAPFLAPDPDNVFLLLGCRASSPLFQGFPDRHLPCRNVSGMGCGDYYGCPAWDDYGRRPSGAAYGSAVPPECCAVS

SEQ ID NO: 12849 - DNA, 1362 bp, Triticum aestivum
  misc_feature (1)..(1362): Ceres Seq. ID no. 12615907
catcctgtttctattctgagtaaagtgagatactgcaattggactctggtgcttgtacagtactaagtcaacatgtctgatgactcaaggactgtccctcaggagcagctcccgtctgatgacctccacccgccgccaatgccagtgatcaacctgggtcatctcaaccttgatccagcgatacgagcttgcgtggttgaagatatcaccaaagcatgccgtgatctaggatacttccagattataaaccatgggatcagtcaatctgtcatggatggagctgttgacgcagcttcagatttcttcaaactgccaagtgagacaaaggaagagtttgcatcagacgacctccgacggcctgttagatatgacaccagctcaaaggacggcattagtatgtcacgggcatacctaaagcattatgcccatcccctgagtgaatgggtacaatattggccggaaaaacccccaatctacagggagtatatgggaaattttgctactgaagtaaggagggtggccttgcaactaatggaagccatactagaaggcctaggattgggcaaggattaccagcatgagaaatttgagcaaggactgcagctaatgtcagtgaattgctacccgaaagaatcagaaggtgatacagcgatagggctggcgccgcattccgactatggattccttaccatcttgttcacaagttgtcgaggcctggaggtcgtcgaccgcaacagcaacagctggaaagtggtccagccactcccacatgcattgcatgtccacgtaggagaccacatggaagtcctgagcaatggcaaaatcaagactgttgtgcaccgagctgttctgaatcctgaagaggcaaggatctccatggctagcattaatggtttcgcaatgcatgagaaggtctccagcgccagagagctcgtgaatgagcagaatcctgaaaagtacaccgcgagcagttttaatgacttcctcgactatctcacaagcaatctggacaacaagcaccggaactttcttgagagccttaggatgcaaggggcgtagtagggtataatctccacccgaagcacaaaatgatacctgcgacagtttgtctctatgcctacaaccgttcatctctctatattacttttgatctgaaagtactgaagttgttgtgtgttgtcatgctgttttggacaaattatctgtaatattactttcgatctgaaggcactgaagttgttgtgtgtgccatgctgttttcccctttcacccccactacattattacgagtttgtattaggtaaggggaaatccatgatgtaaactttatctagtaagataagatactgtatgctgttagtt

SEQ ID NO: 12850 - protein, 328 aa, Triticum aestivum
  peptide (1)..(328): Ceres Seq. ID no. 12615908
  misc_feature (175)..(273): Pfam Name: II Pfam Description: 2OG-Fe
  misc_feature (1)..(325): NCBI GI NO: 32488371 NR Description: OSJNBa0043A12.1
  misc_feature (1)..(325): NCBI GI NO: 32488372 NR Description: OSJNBa0043A12.2
  misc_feature (57)..(326): NCBI GI NO: 15240797 NR Description: putative protein; protein id: At5g07480.1
  misc_feature (23)..(324): NCBI GI NO: 7433240 NR Description: probable flavonol synthase
  misc_feature (23)..(324): NCBI GI NO: 30689834 NR Description: flavonol synthase family [Arabidopsis thaliana]
  misc_feature (133)..(324): NCBI GI NO: 15232291 NR Description: SRG1 - like protein; protein id: At3g60290.1
  misc_feature (23)..(98): NCBI GI NO: 15232291 NR Description: SRG1 - like protein; protein id: At3g60290.1
  misc_feature (32)..(325): NCBI GI NO: 15228020 NR Description: putative giberellin beta-hydroxylase
  misc_feature (9)..(316): NCBI GI NO: 37536444 NR Description: unknown protein
  misc_feature (27)..(316): NCBI GI NO: 38345872 NR Description: OSJNBa0064M23.14
MSDDSRTVPQEQLPSDDLHPPPMPVINLGHLNLDPAIRACVVEDITKACRDLGYFQIINHGISQSVMDGAVDAASDFFKLPSETKEEFASDDLRRPVRYDTSSKDGISMSRAYLKHYAHPLSEWVQYWPEKPPIYREYMGNFATEVRRVALQLMEAILEGLGLGKDYQHEKFEQGLQLMSVNCYPKESEGDTAIGLAPHSDYGFLTILFTSCRGLEVVDRNSNSWKVVQPLPHALHVHVGDHMEVLSNGKIKTVVHRAVLNPEEARISMASINGFAMHEKVSSARELVNEQNPEKYTASSFNDFLDYLTSNLDNKHRNFLESLRMQGA

SEQ ID NO: 12851 - protein, 306 aa, Triticum aestivum
  peptide (1)..(306): Ceres Seq. ID no. 12615909
  misc_feature (153)..(251): Pfam Name: II Pfam Description: 2OG-Fe
  misc_feature (1)..(303): NCBI GI NO: 32488371 NR Description: OSJNBa0043A12.1
  misc_feature (1)..(303): NCBI GI NO: 32488372 NR Description: OSJNBa0043A12.2
  misc_feature (35)..(304): NCBI GI NO: 15240797 NR Description: putative protein; protein id: At5g07480.1
  misc_feature (1)..(302): NCBI GI NO: 7433240 NR Description: probable flavonol synthase
  misc_feature (1)..(302): NCBI GI NO: 30689834 NR Description: flavonol synthase family [Arabidopsis thaliana]
  misc_feature (111)..(302): NCBI GI NO: 15232291 NR Description: SRG1 - like protein; protein id: At3g60290.1
  misc_feature (1)..(76): NCBI GI NO: 15232291 NR Description: SRG1 - like protein; protein id: At3g60290.1
  misc_feature (10)..(303): NCBI GI NO: 15228020 NR Description: putative giberellin beta-hydroxylase
  misc_feature (1)..(294): NCBI GI NO: 37536444 NR Description: unknown protein
  misc_feature (5)..(294): NCBI GI NO: 38345872 NR Description: OSJNBa0064M23.14
MPVINLGHLNLDPAIRACVVEDITKACRDLGYFQIINHGISQSVMDGAVDAASDFFKLPSETKEEFASDDLRRPVRYDTSSKDGISMSRAYLKHYAHPLSEWVQYWPEKPPIYREYMGNFATEVRRVALQLMEAILEGLGLGKDYQHEKFEQGLQLMSVNCYPKESEGDTAIGLAPHSDYGFLTILFTSCRGLEVVDRNSNSWKVVQPLPHALHVHVGDHMEVLSNGKIKTVVHRAVLNPEEARISMASINGFAMHEKVSSARELVNEQNPEKYTASSFNDFLDYLTSNLDNKHRNFLESLRMQGA

SEQ ID NO: 12852 - protein, 262 aa, Triticum aestivum
  peptide (1)..(262): Ceres Seq. ID no. 12615910
  misc_feature (109)..(207): Pfam Name: II Pfam Description: 2OG-Fe
  misc_feature (1)..(259): NCBI GI NO: 32488371 NR Description: OSJNBa0043A12.1
  misc_feature (1)..(259): NCBI GI NO: 32488372 NR Description: OSJNBa0043A12.2
  misc_feature (1)..(260): NCBI GI NO: 15240797 NR Description: putative protein; protein id: At5g07480.1
  misc_feature (1)..(258): NCBI GI NO: 7433240 NR Description: probable flavonol synthase
  misc_feature (1)..(258): NCBI GI NO: 30689834 NR Description: flavonol synthase family [Arabidopsis thaliana]
  misc_feature (67)..(258): NCBI GI NO: 15232291 NR Description: SRG1 - like protein; protein id: At3g60290.1
  misc_feature (1)..(32): NCBI GI NO: 15232291 NR Description: SRG1 - like protein; protein id: At3g60290.1
  misc_feature (1)..(259): NCBI GI NO: 15228020 NR Description: putative giberellin beta-hydroxylase
  misc_feature (1)..(250): NCBI GI NO: 37536444 NR Description: unknown protein
  misc_feature (1)..(250): NCBI GI NO: 38345872 NR Description: OSJNBa0064M23.14
MDGAVDAASDFFKLPSETKEEFASDDLRRPVRYDTSSKDGISMSRAYLKHYAHPLSEWVQYWPEKPPIYREYMGNFATEVRRVALQLMEAILEGLGLGKDYQHEKFEQGLQLMSVNCYPKESEGDTAIGLAPHSDYGFLTILFTSCRGLEVVDRNSNSWKVVQPLPHALHVHVGDHMEVLSNGKIKTVVHRAVLNPEEARISMASINGFAMHEKVSSARELVNEQNPEKYTASSFNDFLDYLTSNLDNKHRNFLESLRMQGA

SEQ ID NO: 12853 - DNA, 1449 bp, Triticum aestivum
  misc_feature (1)..(1449): Ceres Seq. ID no. 14303631
acgacgttcttcttccacttcccgccaaagaggagcttgcacaggtaaaacatcttgaaaaatctcaagggtgaacgaagtttcttggcgggcatgcagggcacgagagacatgtctgccaagggcggcaaggccctggtccagtcggacgcggggaagtatgtggcgtggtcgggcgtcgaccagccggagctcgctgcagaggggctcgggtgtggcttgctcctgctcaggccgctctccttcgcgctgccacactacgccgactgccacaagttcggctacgtcctccgaggctccggggtcgccggtgtcctcccggtcgccaccggggacgcctcccccgcggccagggagagggtcgtgcgcctcgaggccggcgacgtcatagccacgcgcactggggaggtctcgtggtggtacaacgacagcgacggcgatgcgggcgacctctcaatcgtgttcatgggcgacacggagcgcgctgtcagcccgggggacatgtcctacttctttctccccggcggcaacagcgtcctaggcggcttcgacgcgggcctcctcgccggggcatggcctggcgtgaccaaggagcaggccgccgccgtgttccggagccagccagccgtcctcctcaccgggctgagcaagaagctgcccggcgtccgcccgcgcgaggacgacaggaaacggctcgtcgtgaacgccggccaagtcgctgcaggaaccctgaagacgctcaccgcggccgacatggcggcgctgggcggcctggggatcagcgtggttctcggccggctcgagcccggcgccgcgcgcgcgccgtgggtgctacgcgagggtgcggcgcagttggtgtacgtggcacgcgggagcgcgcgcgtccaggtgtcttcttccgcgggcggcgagacgctgctgctggacgaggaggtcgccgcggggagcgtgttcgtcgtaccgcggttcgccgtgacgctcatctccgccggcgccgacggcgcacagtgggtctccctcatcaagagcgccaggcccgcggtggagcacctgaccggtgatggctcgatgctcggcggcctgaccgcgcaggtggtgcaggcgtcgctgagcgtggcgccggagttgctggagctgctcggagtccgcagcgccgagccgtcgcactgagcggtcggtgcacgcgttcgcgccgcggcgtccgttcactttccgtggcgtgtgtgtcccgtatgctccgttgacgtgcaccacacgattgtatttttatacgctgttacgtctctatacgtgcttacttacgtgaatgagcaaaataattgtgtgcattgttgtactcatatgagaccacaagtgtgttacccctcggcttgggttatatacgttgttacgtctcttacttacgtgcatgaggaaaataattctgcgcgttgttgtactcatatgtgc

SEQ ID NO: 12854 - protein, 358 aa, Triticum aestivum
  peptide (1)..(358): Ceres Seq. ID no. 14303632
  misc_feature (7)..(161): Pfam Name: Pfam Description:  Cupin
  misc_feature (6)..(348): NCBI GI NO: 28950668 NR Description: legumin-like protein [Zea mays]
  misc_feature (6)..(348): NCBI GI NO: 37730876 NR Description: legumin-like protein [Zea mays]
  misc_feature (6)..(345): NCBI GI NO: 15223000 NR Description: globulin (seed storage protein) - related
  misc_feature (6)..(345): NCBI GI NO: 21593610 NR Description: globulin-like protein [Arabidopsis thaliana]
  misc_feature (6)..(348): NCBI GI NO: 28950670 NR Description: legumin-like protein [Zea mays]
  misc_feature (6)..(345): NCBI GI NO: 15226926 NR Description: globulin (seed storage protein) - related
  misc_feature (6)..(348): NCBI GI NO: 34906084 NR Description: putative legumin-like protein
  misc_feature (19)..(181): NCBI GI NO: 7595348 NR Description: globulin-like protein [Cucumis melo]
  misc_feature (211)..(342): NCBI GI NO: 1495688 NR Description: legumin [Metasequoia glyptostroboides]
  misc_feature (82)..(169): NCBI GI NO: 1495688 NR Description: legumin [Metasequoia glyptostroboides]
MQGTRDMSAKGGKALVQSDAGKYVAWSGVDQPELAAEGLGCGLLLLRPLSFALPHYADCHKFGYVLRGSGVAGVLPVATGDASPAARERVVRLEAGDVIATRTGEVSWWYNDSDGDAGDLSIVFMGDTERAVSPGDMSYFFLPGGNSVLGGFDAGLLAGAWPGVTKEQAAAVFRSQPAVLLTGLSKKLPGVRPREDDRKRLVVNAGQVAAGTLKTLTAADMAALGGLGISVVLGRLEPGAARAPWVLREGAAQLVYVARGSARVQVSSSAGGETLLLDEEVAAGSVFVVPRFAVTLISAGADGAQWVSLIKSARPAVEHLTGDGSMLGGLTAQVVQASLSVAPELLELLGVRSAEPSH

SEQ ID NO: 12855 - protein, 352 aa, Triticum aestivum
  peptide (1)..(352): Ceres Seq. ID no. 14303633
  misc_feature (1)..(155): Pfam Name: Pfam Description:  Cupin
  misc_feature (1)..(342): NCBI GI NO: 28950668 NR Description: legumin-like protein [Zea mays]
  misc_feature (1)..(342): NCBI GI NO: 37730876 NR Description: legumin-like protein [Zea mays]
  misc_feature (1)..(339): NCBI GI NO: 15223000 NR Description: globulin (seed storage protein) - related
  misc_feature (1)..(339): NCBI GI NO: 21593610 NR Description: globulin-like protein [Arabidopsis thaliana]
  misc_feature (1)..(342): NCBI GI NO: 28950670 NR Description: legumin-like protein [Zea mays]
  misc_feature (1)..(339): NCBI GI NO: 15226926 NR Description: globulin (seed storage protein) - related
  misc_feature (1)..(342): NCBI GI NO: 34906084 NR Description: putative legumin-like protein
  misc_feature (13)..(175): NCBI GI NO: 7595348 NR Description: globulin-like protein [Cucumis melo]
  misc_feature (205)..(336): NCBI GI NO: 1495688 NR Description: legumin [Metasequoia glyptostroboides]
  misc_feature (76)..(163): NCBI GI NO: 1495688 NR Description: legumin [Metasequoia glyptostroboides]
MSAKGGKALVQSDAGKYVAWSGVDQPELAAEGLGCGLLLLRPLSFALPHYADCHKFGYVLRGSGVAGVLPVATGDASPAARERVVRLEAGDVIATRTGEVSWWYNDSDGDAGDLSIVFMGDTERAVSPGDMSYFFLPGGNSVLGGFDAGLLAGAWPGVTKEQAAAVFRSQPAVLLTGLSKKLPGVRPREDDRKRLVVNAGQVAAGTLKTLTAADMAALGGLGISVVLGRLEPGAARAPWVLREGAAQLVYVARGSARVQVSSSAGGETLLLDEEVAAGSVFVVPRFAVTLISAGADGAQWVSLIKSARPAVEHLTGDGSMLGGLTAQVVQASLSVAPELLELLGVRSAEPSH

SEQ ID NO: 12856 - protein, 234 aa, Triticum aestivum
  peptide (1)..(234): Ceres Seq. ID no. 14303634
  misc_feature (1)..(224): NCBI GI NO: 28950668 NR Description: legumin-like protein [Zea mays]
  misc_feature (1)..(224): NCBI GI NO: 37730876 NR Description: legumin-like protein [Zea mays]
  misc_feature (1)..(221): NCBI GI NO: 15223000 NR Description: globulin (seed storage protein) - related
  misc_feature (1)..(221): NCBI GI NO: 21593610 NR Description: globulin-like protein [Arabidopsis thaliana]
  misc_feature (1)..(224): NCBI GI NO: 28950670 NR Description: legumin-like protein [Zea mays]
  misc_feature (1)..(221): NCBI GI NO: 15226926 NR Description: globulin (seed storage protein) - related
  misc_feature (1)..(224): NCBI GI NO: 34906084 NR Description: putative legumin-like protein
  misc_feature (1)..(57): NCBI GI NO: 7595348 NR Description: globulin-like protein [Cucumis melo]
  misc_feature (87)..(218): NCBI GI NO: 1495688 NR Description: legumin [Metasequoia glyptostroboides]
  misc_feature (1)..(45): NCBI GI NO: 1495688 NR Description: legumin [Metasequoia glyptostroboides]
MGDTERAVSPGDMSYFFLPGGNSVLGGFDAGLLAGAWPGVTKEQAAAVFRSQPAVLLTGLSKKLPGVRPREDDRKRLVVNAGQVAAGTLKTLTAADMAALGGLGISVVLGRLEPGAARAPWVLREGAAQLVYVARGSARVQVSSSAGGETLLLDEEVAAGSVFVVPRFAVTLISAGADGAQWVSLIKSARPAVEHLTGDGSMLGGLTAQVVQASLSVAPELLELLGVRSAEPSH

SEQ ID NO: 12857 - DNA, 1231 bp, Triticum aestivum
  misc_feature (1)..(1231): Ceres Seq. ID no. 13596891
gaacatcctaatcgaaaaactgttcaccggcagcttacctcacctcggcgagttccactccatccgccaaagacgctctctactccccggacggcggcaatggagcaagcgagcccgccggcggggtcggcgaggaacaggaaggtggtgctgcgggagtacatcagccgcgcgccgagggaggacgacatggcgctcgtcgacggcggcgccgtgccgctgcgcgtccccgagggcgccgccggcccggccgtgctggtgaagaacctctacctctcctgcgacccctacatgcgcggccggatgcgggacttccacggctcctacatccccccgttcaagcccggatctgttatagaagggctgggcgtggcgagagtggtggattccactcatccggggttcgttgccggtgacattgtttcgggaatgactggctgggaggaatacagcttgattgacaagcctgaacagctgaacaagattcagcaaagtggcataccactctcctactatttggggcttctcggcatgcctggttttacagcttatgttggattctatgaaatttgctcgccgaaggaaggagagtttgtctttgtttctgctgcatcgggagcagttggccagattgttggtcaacttgcaaagctccatggctgctatgttgtcggaagtgctggaacaaatgaaaaagttaaactcctaaaagataagtttggattcgatgcagcttttaattacaaagaggagcctgacttgactgcagccctaaaaaggtactttcctgaaggtatcgacatctacttcgagaatgtaggaggaccaatgctagatgctgtactccttaacatgcggatgcatggtcgcatagcagtatgtgggatggtctcccagcacggcatgactgatcctgcagggatccacaacctcttctgcctggtgccaaaacggattagtatgaagggcttcatccagagtgattacatcaacttattcccacagttcctcgattacatgaccaagcattacaaggatggcaagattgcatatgtagaagacatgagcattgggctagagaacacaccagctgcctttgttggtctattcagcggtaaaaatgtgggcaaacaagtcgtgtgtgtgtcacaagagtgaagtacgtgtacattctgatgaatatacaaatatctcatgattcaaataaataataaaaattgtgaaccctctc

SEQ ID NO: 12858 - protein, 385 aa, Triticum aestivum
  peptide (1)..(385): Ceres Seq. ID no. 15221991
  misc_feature (132)..(382): Pfam Name: Pfam Description:  Zinc-binding dehydrogenase
  misc_feature (35)..(385): NCBI GI NO: 34907532 NR Description: putative allyl alcohol dehydrogenase
  misc_feature (43)..(385): NCBI GI NO: 38345384 NR Description: OSJNBa0067K08.13
  misc_feature (41)..(385): NCBI GI NO: 6692816 NR Description: allyl alcohol dehydrogenase [Nicotiana tabacum]
  misc_feature (46)..(385): NCBI GI NO: 15218717 NR Description: allyl alcohol dehydrogenase, putative
  misc_feature (119)..(385): NCBI GI NO: 25404554 NR Description: hypothetical protein F5I14.9
  misc_feature (46)..(116): NCBI GI NO: 25404554 NR Description: hypothetical protein F5I14.9
  misc_feature (46)..(385): NCBI GI NO: 15228456 NR Description: NADP-dependent oxidoreductase (P2), putative
  misc_feature (41)..(385): NCBI GI NO: 21593645 NR Description: allyl alcohol dehydrogenase, putative
  misc_feature (41)..(385): NCBI GI NO: 15222685 NR Description: NADP-dependent oxidoreductase, putative
  misc_feature (43)..(385): NCBI GI NO: 15237888 NR Description: NADP-dependent oxidoreductase (P1), putative
EHPNRKTVHRQLTSPRRVPLHPPKTLSTPRTAAMEQASPPAGSARNRKVVLREYISRAPREDDMALVDGGAVPLRVPEGAAGPAVLVKNLYLSCDPYMRGRMRDFHGSYIPPFKPGSVIEGLGVARVVDSTHPGFVAGDIVSGMTGWEEYSLIDKPEQLNKIQQSGIPLSYYLGLLGMPGFTAYVGFYEICSPKEGEFVFVSAASGAVGQIVGQLAKLHGCYVVGSAGTNEKVKLLKDKFGFDAAFNYKEEPDLTAALKRYFPEGIDIYFENVGGPMLDAVLLNMRMHGRIAVCGMVSQHGMTDPAGIHNLFCLVPKRISMKGFIQSDYINLFPQFLDYMTKHYKDGKIAYVEDMSIGLENTPAAFVGLFSGKNVGKQVVCVSQE

SEQ ID NO: 12859 - protein, 352 aa, Triticum aestivum
  peptide (1)..(352): Ceres Seq. ID no. 15221992
  misc_feature (99)..(349): Pfam Name: Pfam Description:  Zinc-binding dehydrogenase
  misc_feature (2)..(352): NCBI GI NO: 34907532 NR Description: putative allyl alcohol dehydrogenase
  misc_feature (10)..(352): NCBI GI NO: 38345384 NR Description: OSJNBa0067K08.13
  misc_feature (8)..(352): NCBI GI NO: 6692816 NR Description: allyl alcohol dehydrogenase [Nicotiana tabacum]
  misc_feature (13)..(352): NCBI GI NO: 15218717 NR Description: allyl alcohol dehydrogenase, putative
  misc_feature (86)..(352): NCBI GI NO: 25404554 NR Description: hypothetical protein F5I14.9
  misc_feature (13)..(83): NCBI GI NO: 25404554 NR Description: hypothetical protein F5I14.9
  misc_feature (13)..(352): NCBI GI NO: 15228456 NR Description: NADP-dependent oxidoreductase (P2), putative
  misc_feature (8)..(352): NCBI GI NO: 21593645 NR Description: allyl alcohol dehydrogenase, putative
  misc_feature (8)..(352): NCBI GI NO: 15222685 NR Description: NADP-dependent oxidoreductase, putative
  misc_feature (10)..(352): NCBI GI NO: 15237888 NR Description: NADP-dependent oxidoreductase (P1), putative
MEQASPPAGSARNRKVVLREYISRAPREDDMALVDGGAVPLRVPEGAAGPAVLVKNLYLSCDPYMRGRMRDFHGSYIPPFKPGSVIEGLGVARVVDSTHPGFVAGDIVSGMTGWEEYSLIDKPEQLNKIQQSGIPLSYYLGLLGMPGFTAYVGFYEICSPKEGEFVFVSAASGAVGQIVGQLAKLHGCYVVGSAGTNEKVKLLKDKFGFDAAFNYKEEPDLTAALKRYFPEGIDIYFENVGGPMLDAVLLNMRMHGRIAVCGMVSQHGMTDPAGIHNLFCLVPKRISMKGFIQSDYINLFPQFLDYMTKHYKDGKIAYVEDMSIGLENTPAAFVGLFSGKNVGKQVVCVSQE

SEQ ID NO: 12860 - protein, 322 aa, Triticum aestivum
  peptide (1)..(322): Ceres Seq. ID no. 15221993
  misc_feature (69)..(319): Pfam Name: Pfam Description:  Zinc-binding dehydrogenase
  misc_feature (1)..(322): NCBI GI NO: 34907532 NR Description: putative allyl alcohol dehydrogenase
  misc_feature (1)..(322): NCBI GI NO: 38345384 NR Description: OSJNBa0067K08.13
  misc_feature (1)..(322): NCBI GI NO: 6692816 NR Description: allyl alcohol dehydrogenase [Nicotiana tabacum]
  misc_feature (1)..(322): NCBI GI NO: 15218717 NR Description: allyl alcohol dehydrogenase, putative
  misc_feature (56)..(322): NCBI GI NO: 25404554 NR Description: hypothetical protein F5I14.9
  misc_feature (1)..(53): NCBI GI NO: 25404554 NR Description: hypothetical protein F5I14.9
  misc_feature (1)..(322): NCBI GI NO: 15228456 NR Description: NADP-dependent oxidoreductase (P2), putative
  misc_feature (1)..(322): NCBI GI NO: 21593645 NR Description: allyl alcohol dehydrogenase, putative
  misc_feature (1)..(322): NCBI GI NO: 15222685 NR Description: NADP-dependent oxidoreductase, putative
  misc_feature (1)..(322): NCBI GI NO: 15237888 NR Description: NADP-dependent oxidoreductase (P1), putative
MALVDGGAVPLRVPEGAAGPAVLVKNLYLSCDPYMRGRMRDFHGSYIPPFKPGSVIEGLGVARVVDSTHPGFVAGDIVSGMTGWEEYSLIDKPEQLNKIQQSGIPLSYYLGLLGMPGFTAYVGFYEICSPKEGEFVFVSAASGAVGQIVGQLAKLHGCYVVGSAGTNEKVKLLKDKFGFDAAFNYKEEPDLTAALKRYFPEGIDIYFENVGGPMLDAVLLNMRMHGRIAVCGMVSQHGMTDPAGIHNLFCLVPKRISMKGFIQSDYINLFPQFLDYMTKHYKDGKIAYVEDMSIGLENTPAAFVGLFSGKNVGKQVVCVSQE

SEQ ID NO: 12861 - DNA, 1230 bp, Triticum aestivum
  misc_feature (1)..(1230): Ceres Seq. ID no. 12598859
actcacaaatagcaccatacacgacacggacacgtacgcaaaaccttcttcccaaatctaaacccctctcttctccaaatggccaagagaaacctcctcctcctcctggcgctaatggcgctcgccacaagcatggaagccgcgtcggctaccacgagcacgaggaagctcatgttcctggtccagcccaagccgaacctcctcacgtaccacaacggcgccgtgctgcacggcgacatccccgtctccgtcctctggtatggccgcttcacggcggcgcagaaggccatcgtatccgacttcctcctctccctctcctccgcgccgcgcgcgtccccggcgccgtccgtgtcccagtggtggagcagcatccaccagctgtacctctccaaggcggcggccgtcggcaagcacggcgccggcgccaccaaggccgcccgggtggtcctgtccggccaggtctccgacgaggcgtgctcgctcgggaagagcctgaagctgtcccagctcccggcgctggcggcgaaggcgaggcccgccaagggcggtatcgcgctggtgctcacagcgcaggacgtgggcgtggagggcttctgcatgagccggtgcggccggcacgggaccgtggacgccaagtccggcacggcctacgtgtgggccggcaacccggcgacgcagtgcgccgggcagtgcgcgtggccgttccaccagccggcgtacgggccgcaggcgccgccgctggccgcgccgaacggcgacgtgggcatggacgggctcatcatcaacgtggcgagcatggtggccggcgcggtgaccaacccgttcggcgacgggttctaccagggggagcgcgaggcgccgctggaggccgcgacggcgtgcccgggggtgtacggcaagggcgcgtaccccgggtacgccggccagctgctggtggacggcgccaccggagcgagctacaacgcccacggtgcgcacgggaggaagtacctgctcccggcgctgttcgaccccgccacctcggcctgctccacgctggtgtaggagtacggcggcacagtggtagcgacaagtgatgtcagtccaatccgctagctgcccgtctagccaagagtgtattgggtacaactagtactgtaccgtagtgcatatatgtgtaaatagttcgtatatgagcttgtgtttggatcttctcatgctaaataaaaaatgtaaatcagcctttgtact

SEQ ID NO: 12862 - protein, 357 aa, Triticum aestivum
  peptide (1)..(357): Ceres Seq. ID no. 12598860
SQIAPYTTRTRTQNLLPKSKPLSSPNGQEKPPPPPGANGARHKHGSRVGYHEHEEAHVPGPAQAEPPHVPQRRRAARRHPRLRPLVWPLHGGAEGHRIRLPPLPLLRAARVPGAVRVPVVEQHPPAVPLQGGGRRQARRRRHQGRPGGPVRPGLRRGVLAREEPEAVPAPGAGGEGEARQGRYRAGAHSAGRGRGGLLHEPVRPARDRGRQVRHGLRVGRQPGDAVRRAVRVAVPPAGVRAAGAAAGRAERRRGHGRAHHQRGEHGGRRGDQPVRRRVLPGGARGAAGGRDGVPGGVRQGRVPRVRRPAAGGRRHRSELQRPRCAREEVPAPGAVRPRHLGLLHAGVGVRRHSGSDK

SEQ ID NO: 12863 - protein, 321 aa, Triticum aestivum
  peptide (1)..(321): Ceres Seq. ID no. 12598861
  misc_feature (42)..(321): Pfam Name: Pfam Description:  Phosphate-induced protein 1 conserved region
  misc_feature (27)..(321): NCBI GI NO: 3759184 NR Description: phi-1 [Nicotiana tabacum]
  misc_feature (34)..(321): NCBI GI NO: 15236667 NR Description: putative phi-1-like phosphate-induced protein
  misc_feature (34)..(321): NCBI GI NO: 21593043 NR Description: putative phi-1-like phosphate-induced protein
  misc_feature (44)..(320): NCBI GI NO: 15219504 NR Description: phosphate-induced
  misc_feature (34)..(321): NCBI GI NO: 15237656 NR Description: phi-1-like protein; protein id: At5g64260
  misc_feature (1)..(317): NCBI GI NO: 37533672 NR Description: putative phosphate-induced protein
  misc_feature (81)..(321): NCBI GI NO: 31074969 NR Description: erg-1 [Solanum tuberosum]
  misc_feature (140)..(320): NCBI GI NO: 13194680 NR Description: phosphate-induced protein 1-like protein
  misc_feature (50)..(321): NCBI GI NO: 15242420 NR Description: putative protein; protein id: At5g09440
  misc_feature (44)..(252): NCBI GI NO: 11762144 NR Description: At1g35140 [Arabidopsis thaliana]
MAKRNLLLLLALMALATSMEAASATTSTRKLMFLVQPKPNLLTYHNGAVLHGDIPVSVLWYGRFTAAQKAIVSDFLLSLSSAPRASPAPSVSQWWSSIHQLYLSKAAAVGKHGAGATKAARVVLSGQVSDEACSLGKSLKLSQLPALAAKARPAKGGIALVLTAQDVGVEGFCMSRCGRHGTVDAKSGTAYVWAGNPATQCAGQCAWPFHQPAYGPQAPPLAAPNGDVGMDGLIINVASMVAGAVTNPFGDGFYQGEREAPLEAATACPGVYGKGAYPGYAGQLLVDGATGASYNAHGAHGRKYLLPALFDPATSACSTLV

SEQ ID NO: 12864 - protein, 309 aa, Triticum aestivum
  peptide (1)..(309): Ceres Seq. ID no. 12598862
  misc_feature (30)..(309): Pfam Name: Pfam Description:  Phosphate-induced protein 1 conserved region
  misc_feature (15)..(309): NCBI GI NO: 3759184 NR Description: phi-1 [Nicotiana tabacum]
  misc_feature (22)..(309): NCBI GI NO: 15236667 NR Description: putative phi-1-like phosphate-induced protein
  misc_feature (22)..(309): NCBI GI NO: 21593043 NR Description: putative phi-1-like phosphate-induced protein
  misc_feature (32)..(308): NCBI GI NO: 15219504 NR Description: phosphate-induced
  misc_feature (22)..(309): NCBI GI NO: 15237656 NR Description: phi-1-like protein; protein id: At5g64260
  misc_feature (1)..(305): NCBI GI NO: 37533672 NR Description: putative phosphate-induced protein
  misc_feature (69)..(309): NCBI GI NO: 31074969 NR Description: erg-1 [Solanum tuberosum]
  misc_feature (128)..(308): NCBI GI NO: 13194680 NR Description: phosphate-induced protein 1-like protein
  misc_feature (38)..(309): NCBI GI NO: 15242420 NR Description: putative protein; protein id: At5g09440
  misc_feature (32)..(240): NCBI GI NO: 11762144 NR Description: At1g35140 [Arabidopsis thaliana]
MALATSMEAASATTSTRKLMFLVQPKPNLLTYHNGAVLHGDIPVSVLWYGRFTAAQKAIVSDFLLSLSSAPRASPAPSVSQWWSSIHQLYLSKAAAVGKHGAGATKAARVVLSGQVSDEACSLGKSLKLSQLPALAAKARPAKGGIALVLTAQDVGVEGFCMSRCGRHGTVDAKSGTAYVWAGNPATQCAGQCAWPFHQPAYGPQAPPLAAPNGDVGMDGLIINVASMVAGAVTNPFGDGFYQGEREAPLEAATACPGVYGKGAYPGYAGQLLVDGATGASYNAHGAHGRKYLLPALFDPATSACSTLV

SEQ ID NO: 12865 - DNA, 1476 bp, Triticum aestivum
  misc_feature (1)..(1476): Ceres Seq. ID no. 13596625
aaaaatcctcctcgcgtcacgcgtgaacccagccggatccccaaacctccttccggtccgacgcctcgtgccgccggcgccgacgggggacccctccgcctctcacgcgtgccgccgcccccgccgtcgccgtcccgtctccctcgccggggcatcgcgttccaccccgccggcgactaggaacacggcaccctgaagctcctgagctagagtaggaggggcaaaccatccagctgaagaatgaaaacacatgagcgtgctgccaacttggctcttgctggtttgagcttggcaccgctcgtgatcaatgtgaacccaaatttgaatgtgatactgacagcatgtcttactgtctatgtgggctgttaccgttctgtcaagtcaactccacccgctgagacaatgtccaaagagcatgctatgcggttccctttggtggggagtgctatgcttctgtcgctattccttctattcaagtttctctccaaggacctggtcaatactgttctcactgcctactttttcattcttggcattgctgcgctctgtgcaacgttgctccctaccgtcaaacgttttcttccagaaggatggaatgataatgccatcgtctggcgtgctccatatttccactcactgtcggtggagtttaccaagtctcaagttgtcgcttcagtccctggttttttcttttgcgtatggtatgccatgaagaagcattggctagcaaacaatgttttgggacttgctttctgcattcagggaattgagatgttatcactaggatcattcaaaaccggtggtattctcttggctggactttttgtgtatgacattttctgggttttcttcactccagttatggtcagtgttgctaaatcatttgatgctccaataaagcttctatttcccaccgcggatgccgcacggccgttctctatgcttggtcttggtgatattgttatacctggtatatttgttgcacttgcactccgtttcgatgtctcgagaaacattaagaaccgttacttcaatagtgcatttttgggatacactgcgggcatgacagtaacaatcgttgtgatgaactggtttcaagctgcacagcctgctctgctatacatcgttcctggcgtgactggttttgtggctgttcactctttgtggaatggtgaagtaaagccgctactggagttcaccgagacgcagcccgaggagggagccgccgaggaagaagaagattccagtcagagcaaaaaggtggactagcgctcgctcgggtcgggtcgggtctttttaattaattaggagaggagaaccaaaccaaagcaggatttcaaataggctgtatgatcttgagaatcgaaaaacgattcacatgatagaactctttttgttttgaaaggtcattaactatctgttttggtgagtggtagatgatggacgaaaagggaacatatatgctaaaagacttgc

SEQ ID NO: 12866 - protein, 342 aa, Triticum aestivum
  peptide (1)..(342): Ceres Seq. ID no. 13596626
  misc_feature (47)..(321): Pfam Name: Pfam Description:  Signal peptide peptidase
  misc_feature (1)..(340): NCBI GI NO: 18395487 NR Description: expressed protein [Arabidopsis thaliana]
  misc_feature (1)..(340): NCBI GI NO: 21593273 NR Description: unknown [Arabidopsis thaliana]
  misc_feature (29)..(338): NCBI GI NO: 18034682 NR Description: histocompatibility 13; presenilin-like protein 3
  misc_feature (29)..(342): NCBI GI NO: 25992191 NR Description: putative presenilin-like aspartyl protease
  misc_feature (29)..(342): NCBI GI NO: 34858994 NR Description: similar to histocompatibility 13
  misc_feature (29)..(338): NCBI GI NO: 26389558 NR Description: unnamed protein product [Mus musculus]
  misc_feature (29)..(342): NCBI GI NO: 20452374 NR Description: minor histocompatibility antigen H13 isoform 1
  misc_feature (29)..(340): NCBI GI NO: 17647929 NR Description: shanti CG11840-PA [Drosophila melanogaster]
  misc_feature (29)..(342): NCBI GI NO: 22761270 NR Description: unnamed protein product [Homo sapiens]
  misc_feature (29)..(342): NCBI GI NO: 23308607 NR Description: minor histocompatibility antigen 13 isoform 1
MKTHERAANLALAGLSLAPLVINVNPNLNVILTACLTVYVGCYRSVKSTPPAETMSKEHAMRFPLVGSAMLLSLFLLFKFLSKDLVNTVLTAYFFILGIAALCATLLPTVKRFLPEGWNDNAIVWRAPYFHSLSVEFTKSQVVASVPGFFFCVWYAMKKHWLANNVLGLAFCIQGIEMLSLGSFKTGGILLAGLFVYDIFWVFFTPVMVSVAKSFDAPIKLLFPTADAARPFSMLGLGDIVIPGIFVALALRFDVSRNIKNRYFNSAFLGYTAGMTVTIVVMNWFQAAQPALLYIVPGVTGFVAVHSLWNGEVKPLLEFTETQPEEGAAEEEEDSSQSKKVD

SEQ ID NO: 12867 - protein, 288 aa, Triticum aestivum
  peptide (1)..(288): Ceres Seq. ID no. 13596627
  misc_feature (1)..(267): Pfam Name: Pfam Description:  Signal peptide peptidase
  misc_feature (1)..(286): NCBI GI NO: 18395487 NR Description: expressed protein [Arabidopsis thaliana]
  misc_feature (1)..(286): NCBI GI NO: 21593273 NR Description: unknown [Arabidopsis thaliana]
  misc_feature (1)..(284): NCBI GI NO: 18034682 NR Description: histocompatibility 13; presenilin-like protein 3
  misc_feature (1)..(288): NCBI GI NO: 25992191 NR Description: putative presenilin-like aspartyl protease
  misc_feature (1)..(288): NCBI GI NO: 34858994 NR Description: similar to histocompatibility 13
  misc_feature (1)..(284): NCBI GI NO: 26389558 NR Description: unnamed protein product [Mus musculus]
  misc_feature (1)..(288): NCBI GI NO: 20452374 NR Description: minor histocompatibility antigen H13 isoform 1
  misc_feature (1)..(286): NCBI GI NO: 17647929 NR Description: shanti CG11840-PA [Drosophila melanogaster]
  misc_feature (1)..(288): NCBI GI NO: 22761270 NR Description: unnamed protein product [Homo sapiens]
  misc_feature (1)..(288): NCBI GI NO: 23308607 NR Description: minor histocompatibility antigen 13 isoform 1
MSKEHAMRFPLVGSAMLLSLFLLFKFLSKDLVNTVLTAYFFILGIAALCATLLPTVKRFLPEGWNDNAIVWRAPYFHSLSVEFTKSQVVASVPGFFFCVWYAMKKHWLANNVLGLAFCIQGIEMLSLGSFKTGGILLAGLFVYDIFWVFFTPVMVSVAKSFDAPIKLLFPTADAARPFSMLGLGDIVIPGIFVALALRFDVSRNIKNRYFNSAFLGYTAGMTVTIVVMNWFQAAQPALLYIVPGVTGFVAVHSLWNGEVKPLLEFTETQPEEGAAEEEEDSSQSKKVD

SEQ ID NO: 12868 - protein, 282 aa, Triticum aestivum
  peptide (1)..(282): Ceres Seq. ID no. 13596628
  misc_feature (1)..(261): Pfam Name: Pfam Description:  Signal peptide peptidase
  misc_feature (1)..(280): NCBI GI NO: 18395487 NR Description: expressed protein [Arabidopsis thaliana]
  misc_feature (1)..(280): NCBI GI NO: 21593273 NR Description: unknown [Arabidopsis thaliana]
  misc_feature (1)..(278): NCBI GI NO: 18034682 NR Description: histocompatibility 13; presenilin-like protein 3
  misc_feature (1)..(282): NCBI GI NO: 25992191 NR Description: putative presenilin-like aspartyl protease
  misc_feature (1)..(282): NCBI GI NO: 34858994 NR Description: similar to histocompatibility 13
  misc_feature (1)..(278): NCBI GI NO: 26389558 NR Description: unnamed protein product [Mus musculus]
  misc_feature (1)..(282): NCBI GI NO: 20452374 NR Description: minor histocompatibility antigen H13 isoform 1
  misc_feature (1)..(280): NCBI GI NO: 17647929 NR Description: shanti CG11840-PA [Drosophila melanogaster]
  misc_feature (1)..(282): NCBI GI NO: 22761270 NR Description: unnamed protein product [Homo sapiens]
  misc_feature (1)..(282): NCBI GI NO: 23308607 NR Description: minor histocompatibility antigen 13 isoform 1
MRFPLVGSAMLLSLFLLFKFLSKDLVNTVLTAYFFILGIAALCATLLPTVKRFLPEGWNDNAIVWRAPYFHSLSVEFTKSQVVASVPGFFFCVWYAMKKHWLANNVLGLAFCIQGIEMLSLGSFKTGGILLAGLFVYDIFWVFFTPVMVSVAKSFDAPIKLLFPTADAARPFSMLGLGDIVIPGIFVALALRFDVSRNIKNRYFNSAFLGYTAGMTVTIVVMNWFQAAQPALLYIVPGVTGFVAVHSLWNGEVKPLLEFTETQPEEGAAEEEEDSSQSKKVD

SEQ ID NO: 12869 - DNA, 1207 bp, Triticum aestivum
  misc_feature (1)..(1207): Ceres Seq. ID no. 12615854
aacaacagccaatccatcccatggaataataaagaaactggggcaccccactgcgtggccggtggcgaccgacggcgacccccgccctcaccgtaccctgctacgctccggcgagtccggccgaccgcctccgccacctttcgccgcacggcgtgaccgagtggacgggctcgacggcgggcatcggccggcgcgcgagggcgggagggatcggcgatgagcttcgcggatctggagtccggggcgctgcaggcgccccggagggggaggggcgccgacgccacgcgcgcgctcgtcttccagatcaccaccgcggtgtcctcctaccgccgcctcctcaactcgctcggcacgcccaaggacacgcccgccctccgtgatcagctgcagaagactagtcataaagtcctgcaattggcgaaggatgcgaaggagaaactgacgagtgctgctgaagcagacaagagcactggaactagtgcagacaagcgggtagccgacatgaagcttgccaaagattttgctgcgacgatggaggaattcaggaaacttcagaatcttgcaattcagagggagatggcatataagccggttgttccccagggtgctcagccaagctatactatgaatgatggaagatctgattttgataaaatgcctgaacagcgcgcattgcttgcagaaccaaacaggctagaggtgttgcaattggataatgaaattgttttcaatgaggctatcatcgaggaaagggaccaggcgattcaagacatccaacagcagattggtgaagtacatgaagcatttaaggatcttgctacgctcgtgcattcgcaaggaggcataatagaggaagtcgacagcaacattgaaaactctgcagccgcgaccagtgaagcgaagaaagaaatcggcaaagcgtccaagactcagaagtcaaattcatccttgctttgcctgcttatggtgatctttggggttgttttgcttatcgtgataatagttttggcatcttgagacacggatgcttagaggcctattggtgcactctgaggagccatattacgtgcaagattaatcctcgctgtgcgccgaagactgtcgctaactgaagtgtacattttctttttctcccctcttttttccttgtggtttgttagtgcgtattcttatgtggcgtgagtcctttttttttccagcggcttgc

SEQ ID NO: 12870 - protein, 266 aa, Triticum aestivum
  peptide (1)..(266): Ceres Seq. ID no. 12615855
  misc_feature (178)..(240): Pfam Name: Pfam Description:  SNARE domain
  misc_feature (1)..(266): NCBI GI NO: 22597174 NR Description: syntaxin [Glycine max]
  misc_feature (1)..(266): NCBI GI NO: 34902878 NR Description: unnamed protein product
  misc_feature (1)..(266): NCBI GI NO: 18422725 NR Description: syntaxin SYP22 (VAM3); protein id: At5g46860
  misc_feature (1)..(265): NCBI GI NO: 7488213 NR Description: probable syntaxin - Arabidopsis thaliana
  misc_feature (1)..(264): NCBI GI NO: 15237418 NR Description: syntaxin SYP21 (PEP12); protein id: At5g16830
  misc_feature (9)..(264): NCBI GI NO: 21595750 NR Description: syntaxin homologue [Arabidopsis thaliana]
  misc_feature (1)..(232): NCBI GI NO: 18414953 NR Description: syntaxin SYP23; protein id: At4g17730.1
  misc_feature (66)..(253): NCBI GI NO: 15222626 NR Description: syntaxin, putative; protein id: At1g32270.1
  misc_feature (144)..(253): NCBI GI NO: 25511677 NR Description: F5D14.3 protein - Arabidopsis thaliana
  misc_feature (66)..(131): NCBI GI NO: 25511677 NR Description: F5D14.3 protein - Arabidopsis thaliana
MSFADLESGALQAPRRGRGADATRALVFQITTAVSSYRRLLNSLGTPKDTPALRDQLQKTSHKVLQLAKDAKEKLTSAAEADKSTGTSADKRVADMKLAKDFAATMEEFRKLQNLAIQREMAYKPVVPQGAQPSYTMNDGRSDFDKMPEQRALLAEPNRLEVLQLDNEIVFNEAIIEERDQAIQDIQQQIGEVHEAFKDLATLVHSQGGIIEEVDSNIENSAAATSEAKKEIGKASKTQKSNSSLLCLLMVIFGVVLLIVIIVLAS

SEQ ID NO: 12871 - protein, 171 aa, Triticum aestivum
  peptide (1)..(171): Ceres Seq. ID no. 12615856
  misc_feature (83)..(145): Pfam Name: Pfam Description:  SNARE domain
  misc_feature (1)..(171): NCBI GI NO: 22597174 NR Description: syntaxin [Glycine max]
  misc_feature (1)..(171): NCBI GI NO: 34902878 NR Description: unnamed protein product
  misc_feature (1)..(171): NCBI GI NO: 18422725 NR Description: syntaxin SYP22 (VAM3); protein id: At5g46860
  misc_feature (1)..(170): NCBI GI NO: 7488213 NR Description: probable syntaxin - Arabidopsis thaliana
  misc_feature (1)..(169): NCBI GI NO: 15237418 NR Description: syntaxin SYP21 (PEP12); protein id: At5g16830
  misc_feature (1)..(169): NCBI GI NO: 21595750 NR Description: syntaxin homologue [Arabidopsis thaliana]
  misc_feature (1)..(137): NCBI GI NO: 18414953 NR Description: syntaxin SYP23; protein id: At4g17730.1
  misc_feature (1)..(158): NCBI GI NO: 15222626 NR Description: syntaxin, putative; protein id: At1g32270.1
  misc_feature (49)..(158): NCBI GI NO: 25511677 NR Description: F5D14.3 protein - Arabidopsis thaliana
  misc_feature (1)..(36): NCBI GI NO: 25511677 NR Description: F5D14.3 protein - Arabidopsis thaliana
MKLAKDFAATMEEFRKLQNLAIQREMAYKPVVPQGAQPSYTMNDGRSDFDKMPEQRALLAEPNRLEVLQLDNEIVFNEAIIEERDQAIQDIQQQIGEVHEAFKDLATLVHSQGGIIEEVDSNIENSAAATSEAKKEIGKASKTQKSNSSLLCLLMVIFGVVLLIVIIVLAS

SEQ ID NO: 12872 - protein, 161 aa, Triticum aestivum
  peptide (1)..(161): Ceres Seq. ID no. 12615857
  misc_feature (73)..(135): Pfam Name: Pfam Description:  SNARE domain
  misc_feature (1)..(161): NCBI GI NO: 22597174 NR Description: syntaxin [Glycine max]
  misc_feature (1)..(161): NCBI GI NO: 34902878 NR Description: unnamed protein product
  misc_feature (1)..(161): NCBI GI NO: 18422725 NR Description: syntaxin SYP22 (VAM3); protein id: At5g46860
  misc_feature (1)..(160): NCBI GI NO: 7488213 NR Description: probable syntaxin - Arabidopsis thaliana
  misc_feature (1)..(159): NCBI GI NO: 15237418 NR Description: syntaxin SYP21 (PEP12); protein id: At5g16830
  misc_feature (1)..(159): NCBI GI NO: 21595750 NR Description: syntaxin homologue [Arabidopsis thaliana]
  misc_feature (1)..(127): NCBI GI NO: 18414953 NR Description: syntaxin SYP23; protein id: At4g17730.1
  misc_feature (1)..(148): NCBI GI NO: 15222626 NR Description: syntaxin, putative; protein id: At1g32270.1
  misc_feature (39)..(148): NCBI GI NO: 25511677 NR Description: F5D14.3 protein - Arabidopsis thaliana
  misc_feature (1)..(26): NCBI GI NO: 25511677 NR Description: F5D14.3 protein - Arabidopsis thaliana
MEEFRKLQNLAIQREMAYKPVVPQGAQPSYTMNDGRSDFDKMPEQRALLAEPNRLEVLQLDNEIVFNEAIIEERDQAIQDIQQQIGEVHEAFKDLATLVHSQGGIIEEVDSNIENSAAATSEAKKEIGKASKTQKSNSSLLCLLMVIFGVVLLIVIIVLAS

SEQ ID NO: 12873 - DNA, 1377 bp, Triticum aestivum
  misc_feature (1)..(1377): Ceres Seq. ID no. 13662567
cccgccccgccccgccccttccctccctcccttcctcccccaaattcgcccaacaccttcggaaccccaatggcgagctttaacgccgccggcgccggcgccgccaaccccaaccctaacaaatccctcgaggtgcgtgcgcttggccaatactgttgcccttggtctaaatggctaaaacctaatgtgtgggtcgattcgaccggggactgccttcgtttcgtgcaggtgaatccggcgcccggggactcggtttccagcctcagcttcagccccaaggcgaaccacctaattgccacctcctgggacaaccaggttcggtgctgggaggttcagcctggcggccaatgccaggcgaaggcgtctatttcgcacgatcagccagtcttgtgctctgcctggaaggatgacgggactactgttttttcgggaggttgtgacaaagtggtgaagatgtggccgctgctgtctggcggccaggccacggccttctcagggcatgaggcgccggtcaaagaactcgcctggataccacagatgagccttcttgtcagtgggtcttgggataagactctgaggtactgggacattcggcaacctaatccagctcatgttcagcaacttccggagcgctgctatgcactctcacttagttatcctctaatggcggtcggtactgctgatcgcaacgtagttatcttcaatctgcagaatccacaggctgaattcaagaggatcgtgtcacctttgaaattccagacaaggtgtatcgccgccttccctgatcaacaaggattcttggttggatcaatagagggacgcgttggtgttcatcatgtagatgattctaatcaaagcaagaatttcacattcaaatgtcaccgcgagggcaatgatatattctctgttaactcgctgaactttcatcctgtgcaccatacatttgctactgcaggctctgatggaggtttcaacttttgggacaaggacagtaaacaaagactgaaggcttttagtaagtgcccatcacccatcacatgcagcacatttaatcaggatggctcaatctttgcttatgcggtatgctatgattggagcaagggtgccgagaagcataatccttctactgcaaagacaaatatctttctgcatagcgtgcaggaatctgatgtcaaaggaaagccccgtactggaaaaaagtagacttggaaatggcaagctgcagatctgtgctccgaacctgatgagtttgccgtcgcttgatgctaattacccgcacgagtgttttaatcttttagatcttgactctgtagggcattccttcatctctgagactgcaggcgtatcttctataatgtttaaacacaataaagtggg

SEQ ID NO: 12874 - protein, 400 aa, Triticum aestivum
  peptide (1)..(400): Ceres Seq. ID no. 13662568
  misc_feature (117)..(154): Pfam Name: Pfam Description:  WD domain, G-beta repeat
  misc_feature (75)..(400): NCBI GI NO: 34913020 NR Description: putative mRNA export protein
  misc_feature (76)..(400): NCBI GI NO: 38636797 NR Description: putative RAE1 (RNA export 1, S.pombe) homolog
  misc_feature (76)..(398): NCBI GI NO: 15220198 NR Description: transducin / WD-40 repeat protein family
  misc_feature (76)..(267): NCBI GI NO: 3122671 NR Description: Hypothetical RAE1-like protein At1g80670
  misc_feature (321)..(347): NCBI GI NO: 3122671 NR Description: Hypothetical RAE1-like protein At1g80670
  misc_feature (72)..(399): NCBI GI NO: 4506399 NR Description: RAE1 (RNA export 1, S
  misc_feature (72)..(399): NCBI GI NO: 2231592 NR Description: mRNA-associated protein mrnp41 [Homo sapiens]
  misc_feature (72)..(399): NCBI GI NO: 28201956 NR Description: RAE1 RNA export 1 homolog
  misc_feature (72)..(399): NCBI GI NO: 29436458 NR Description: Similar to RAE1 RNA export 1 homolog (S. pombe)
  misc_feature (72)..(399): NCBI GI NO: 34860864 NR Description: similar to RAE1 RNA export 1 homolog
PAPPRPFPPSLPPPNSPNTFGTPMASFNAAGAGAANPNPNKSLEVRALGQYCCPWSKWLKPNVWVDSTGDCLRFVQVNPAPGDSVSSLSFSPKANHLIATSWDNQVRCWEVQPGGQCQAKASISHDQPVLCSAWKDDGTTVFSGGCDKVVKMWPLLSGGQATAFSGHEAPVKELAWIPQMSLLVSGSWDKTLRYWDIRQPNPAHVQQLPERCYALSLSYPLMAVGTADRNVVIFNLQNPQAEFKRIVSPLKFQTRCIAAFPDQQGFLVGSIEGRVGVHHVDDSNQSKNFTFKCHREGNDIFSVNSLNFHPVHHTFATAGSDGGFNFWDKDSKQRLKAFSKCPSPITCSTFNQDGSIFAYAVCYDWSKGAEKHNPSTAKTNIFLHSVQESDVKGKPRTGKK

SEQ ID NO: 12875 - protein, 377 aa, Triticum aestivum
  peptide (1)..(377): Ceres Seq. ID no. 13662569
  misc_feature (94)..(131): Pfam Name: Pfam Description:  WD domain, G-beta repeat
  misc_feature (52)..(377): NCBI GI NO: 34913020 NR Description: putative mRNA export protein
  misc_feature (53)..(377): NCBI GI NO: 38636797 NR Description: putative RAE1 (RNA export 1, S.pombe) homolog
  misc_feature (53)..(375): NCBI GI NO: 15220198 NR Description: transducin / WD-40 repeat protein family
  misc_feature (53)..(244): NCBI GI NO: 3122671 NR Description: Hypothetical RAE1-like protein At1g80670
  misc_feature (298)..(324): NCBI GI NO: 3122671 NR Description: Hypothetical RAE1-like protein At1g80670
  misc_feature (49)..(376): NCBI GI NO: 4506399 NR Description: RAE1 (RNA export 1, S
  misc_feature (49)..(376): NCBI GI NO: 2231592 NR Description: mRNA-associated protein mrnp41 [Homo sapiens]
  misc_feature (49)..(376): NCBI GI NO: 28201956 NR Description: RAE1 RNA export 1 homolog
  misc_feature (49)..(376): NCBI GI NO: 29436458 NR Description: Similar to RAE1 RNA export 1 homolog (S. pombe)
  misc_feature (49)..(376): NCBI GI NO: 34860864 NR Description: similar to RAE1 RNA export 1 homolog
MASFNAAGAGAANPNPNKSLEVRALGQYCCPWSKWLKPNVWVDSTGDCLRFVQVNPAPGDSVSSLSFSPKANHLIATSWDNQVRCWEVQPGGQCQAKASISHDQPVLCSAWKDDGTTVFSGGCDKVVKMWPLLSGGQATAFSGHEAPVKELAWIPQMSLLVSGSWDKTLRYWDIRQPNPAHVQQLPERCYALSLSYPLMAVGTADRNVVIFNLQNPQAEFKRIVSPLKFQTRCIAAFPDQQGFLVGSIEGRVGVHHVDDSNQSKNFTFKCHREGNDIFSVNSLNFHPVHHTFATAGSDGGFNFWDKDSKQRLKAFSKCPSPITCSTFNQDGSIFAYAVCYDWSKGAEKHNPSTAKTNIFLHSVQESDVKGKPRTGKK

SEQ ID NO: 12876 - protein, 249 aa, Triticum aestivum
  peptide (1)..(249): Ceres Seq. ID no. 13662570
  misc_feature (1)..(249): NCBI GI NO: 34913020 NR Description: putative mRNA export protein
  misc_feature (1)..(249): NCBI GI NO: 38636797 NR Description: putative RAE1 (RNA export 1, S.pombe) homolog
  misc_feature (1)..(247): NCBI GI NO: 15220198 NR Description: transducin / WD-40 repeat protein family
  misc_feature (1)..(116): NCBI GI NO: 3122671 NR Description: Hypothetical RAE1-like protein At1g80670
  misc_feature (170)..(196): NCBI GI NO: 3122671 NR Description: Hypothetical RAE1-like protein At1g80670
  misc_feature (1)..(248): NCBI GI NO: 4506399 NR Description: RAE1 (RNA export 1, S
  misc_feature (1)..(248): NCBI GI NO: 2231592 NR Description: mRNA-associated protein mrnp41 [Homo sapiens]
  misc_feature (1)..(248): NCBI GI NO: 28201956 NR Description: RAE1 RNA export 1 homolog
  misc_feature (1)..(248): NCBI GI NO: 29436458 NR Description: Similar to RAE1 RNA export 1 homolog (S. pombe)
  misc_feature (1)..(248): NCBI GI NO: 34860864 NR Description: similar to RAE1 RNA export 1 homolog
MWPLLSGGQATAFSGHEAPVKELAWIPQMSLLVSGSWDKTLRYWDIRQPNPAHVQQLPERCYALSLSYPLMAVGTADRNVVIFNLQNPQAEFKRIVSPLKFQTRCIAAFPDQQGFLVGSIEGRVGVHHVDDSNQSKNFTFKCHREGNDIFSVNSLNFHPVHHTFATAGSDGGFNFWDKDSKQRLKAFSKCPSPITCSTFNQDGSIFAYAVCYDWSKGAEKHNPSTAKTNIFLHSVQESDVKGKPRTGKK

SEQ ID NO: 12877 - DNA, 1293 bp, Triticum aestivum
  misc_feature (1)..(1293): Ceres Seq. ID no. 13655251
tttttctcccgccctcgcaaccacctcccctcccctgtcctgccgagagtctcttctcttctcgtctctcgtcgcctcccgagtctccggcgaccacgccaactagacggccatggagcaaggcgccgactccgcggcggcgaggcggatggccagggtcgcctcccacctccgcccgcccacctcgcagatggaggaggtggccatcttgaagggctctgattgccgtgcaaaaggtgcggcaccagggttcaaggtcgcagtcctgggtgcatctggtggaattggccagccgctctcgctgctcatgaagatgaaccctcttgtttcggtgctccatttatatgatgttgtcaacacacctggtgtcacagctgacattagccacatgaacaccggtgctgtggtgcgtggcttcttgggtcagtcacaattggaaagtgctcttactggaatggatcttgtgatcattcctgctggcattcctcggaaacctgggatgacaagggatgatttgttcaacatcaatgccgggattgttcggactctttgtgagggaattgcaaaatgctgcccaaatgcgattgtgaatgtgatcagtaaccctgtaaattctaccgttccgatcgctgctgaagtatttaaaaaagctggaacatatgatcctaagcgcctattgggggtgacaacacttgatgtagtgagagccaatacctttgtgggagaggttcttggacttgaccccagagatgtcaatgttcctgttgttggtgggcatgcaggagttacgatattaccactcctttcacaggtgaatcctccctgctcgtttacctcagaagaaattagttatctcacttctcgcatacagaatggtgggacagaagtagttgaggccaaagcaggagcaggatccgcgactctttccatggcctacgcagcagccaaattcgcggacgcgtgcctgagagggctgcgcggcgacgccgggatagtggagtgctcttacatagcctgtcaggtgacggagctgcccttcttcgcgtccaaggtgcggctgggccggtcgggcgtcgaggaggtcctgccgctcggcccgctgaacgagtttgagagggcggggctggagaaggccaagggcgagctggccgagagcatccacaagggcgtcgcctttgccaacaagtgaagtgaagacaagagaagagaaatctttcgccccagcatagaaatctgagatgcctcttgcttcctgggagcaacggtcgccgtgtcattgtctcatctccctgt

SEQ ID NO: 12878 - protein, 358 aa, Triticum aestivum
  peptide (1)..(358): Ceres Seq. ID no. 13655252
  misc_feature (192)..(355): Pfam Name: Pfam Description:  lactate/malate dehydrogenase
  misc_feature (1)..(358): NCBI GI NO: 3183079 NR Description: MALATE DEHYDROGENASE, GLYOXYSOMAL PRECURSOR
  misc_feature (11)..(355): NCBI GI NO: 126894 NR Description: MALATE DEHYDROGENASE, GLYOXYSOMAL PRECURSOR
  misc_feature (11)..(355): NCBI GI NO: 1170897 NR Description: MALATE DEHYDROGENASE, GLYOXYSOMAL PRECURSOR
  misc_feature (8)..(358): NCBI GI NO: 34915204 NR Description: putative  glyoxysomal malate dehydrogenase
  misc_feature (5)..(358): NCBI GI NO: 1346501 NR Description: MALATE DEHYDROGENASE, GLYOXYSOMAL PRECURSOR
  misc_feature (6)..(358): NCBI GI NO: 169977 NR Description: malate dehydrogenase
  misc_feature (9)..(358): NCBI GI NO: 15242466 NR Description: malate dehydrogenase, glyoxysomal
  misc_feature (9)..(358): NCBI GI NO: 16323157 NR Description: AT5g09660/F17I14_150 [Arabidopsis thaliana]
  misc_feature (11)..(358): NCBI GI NO: 15227752 NR Description: malate dehydrogenase, glyoxysomal, putative
  misc_feature (9)..(358): NCBI GI NO: 12644436 NR Description: Malate dehydrogenase 1, glyoxysomal precursor
MEQGADSAAARRMARVASHLRPPTSQMEEVAILKGSDCRAKGAAPGFKVAVLGASGGIGQPLSLLMKMNPLVSVLHLYDVVNTPGVTADISHMNTGAVVRGFLGQSQLESALTGMDLVIIPAGIPRKPGMTRDDLFNINAGIVRTLCEGIAKCCPNAIVNVISNPVNSTVPIAAEVFKKAGTYDPKRLLGVTTLDVVRANTFVGEVLGLDPRDVNVPVVGGHAGVTILPLLSQVNPPCSFTSEEISYLTSRIQNGGTEVVEAKAGAGSATLSMAYAAAKFADACLRGLRGDAGIVECSYIACQVTELPFFASKVRLGRSGVEEVLPLGPLNEFERAGLEKAKGELAESIHKGVAFANK

SEQ ID NO: 12879 - protein, 346 aa, Triticum aestivum
  peptide (1)..(346): Ceres Seq. ID no. 13655253
  misc_feature (180)..(343): Pfam Name: Pfam Description:  lactate/malate dehydrogenase
  misc_feature (1)..(346): NCBI GI NO: 3183079 NR Description: MALATE DEHYDROGENASE, GLYOXYSOMAL PRECURSOR
  misc_feature (1)..(343): NCBI GI NO: 126894 NR Description: MALATE DEHYDROGENASE, GLYOXYSOMAL PRECURSOR
  misc_feature (1)..(343): NCBI GI NO: 1170897 NR Description: MALATE DEHYDROGENASE, GLYOXYSOMAL PRECURSOR
  misc_feature (1)..(346): NCBI GI NO: 34915204 NR Description: putative  glyoxysomal malate dehydrogenase
  misc_feature (1)..(346): NCBI GI NO: 1346501 NR Description: MALATE DEHYDROGENASE, GLYOXYSOMAL PRECURSOR
  misc_feature (1)..(346): NCBI GI NO: 169977 NR Description: malate dehydrogenase
  misc_feature (1)..(346): NCBI GI NO: 15242466 NR Description: malate dehydrogenase, glyoxysomal
  misc_feature (1)..(346): NCBI GI NO: 16323157 NR Description: AT5g09660/F17I14_150 [Arabidopsis thaliana]
  misc_feature (1)..(346): NCBI GI NO: 15227752 NR Description: malate dehydrogenase, glyoxysomal, putative
  misc_feature (1)..(346): NCBI GI NO: 12644436 NR Description: Malate dehydrogenase 1, glyoxysomal precursor
MARVASHLRPPTSQMEEVAILKGSDCRAKGAAPGFKVAVLGASGGIGQPLSLLMKMNPLVSVLHLYDVVNTPGVTADISHMNTGAVVRGFLGQSQLESALTGMDLVIIPAGIPRKPGMTRDDLFNINAGIVRTLCEGIAKCCPNAIVNVISNPVNSTVPIAAEVFKKAGTYDPKRLLGVTTLDVVRANTFVGEVLGLDPRDVNVPVVGGHAGVTILPLLSQVNPPCSFTSEEISYLTSRIQNGGTEVVEAKAGAGSATLSMAYAAAKFADACLRGLRGDAGIVECSYIACQVTELPFFASKVRLGRSGVEEVLPLGPLNEFERAGLEKAKGELAESIHKGVAFANK

SEQ ID NO: 12880 - protein, 332 aa, Triticum aestivum
  peptide (1)..(332): Ceres Seq. ID no. 13655254
  misc_feature (166)..(329): Pfam Name: Pfam Description:  lactate/malate dehydrogenase
  misc_feature (1)..(332): NCBI GI NO: 3183079 NR Description: MALATE DEHYDROGENASE, GLYOXYSOMAL PRECURSOR
  misc_feature (1)..(329): NCBI GI NO: 126894 NR Description: MALATE DEHYDROGENASE, GLYOXYSOMAL PRECURSOR
  misc_feature (1)..(329): NCBI GI NO: 1170897 NR Description: MALATE DEHYDROGENASE, GLYOXYSOMAL PRECURSOR
  misc_feature (1)..(332): NCBI GI NO: 34915204 NR Description: putative  glyoxysomal malate dehydrogenase
  misc_feature (1)..(332): NCBI GI NO: 1346501 NR Description: MALATE DEHYDROGENASE, GLYOXYSOMAL PRECURSOR
  misc_feature (1)..(332): NCBI GI NO: 169977 NR Description: malate dehydrogenase
  misc_feature (1)..(332): NCBI GI NO: 15242466 NR Description: malate dehydrogenase, glyoxysomal
  misc_feature (1)..(332): NCBI GI NO: 16323157 NR Description: AT5g09660/F17I14_150 [Arabidopsis thaliana]
  misc_feature (1)..(332): NCBI GI NO: 15227752 NR Description: malate dehydrogenase, glyoxysomal, putative
  misc_feature (1)..(332): NCBI GI NO: 12644436 NR Description: Malate dehydrogenase 1, glyoxysomal precursor
MEEVAILKGSDCRAKGAAPGFKVAVLGASGGIGQPLSLLMKMNPLVSVLHLYDVVNTPGVTADISHMNTGAVVRGFLGQSQLESALTGMDLVIIPAGIPRKPGMTRDDLFNINAGIVRTLCEGIAKCCPNAIVNVISNPVNSTVPIAAEVFKKAGTYDPKRLLGVTTLDVVRANTFVGEVLGLDPRDVNVPVVGGHAGVTILPLLSQVNPPCSFTSEEISYLTSRIQNGGTEVVEAKAGAGSATLSMAYAAAKFADACLRGLRGDAGIVECSYIACQVTELPFFASKVRLGRSGVEEVLPLGPLNEFERAGLEKAKGELAESIHKGVAFANK

SEQ ID NO: 12881 - DNA, 1264 bp, Triticum aestivum
  misc_feature (1)..(1264): Ceres Seq. ID no. 13655237
aaggattcatctcgtttacctcttctctgcaaggatccctcgagtattcccctcaagctcctcagaaatggcgaccggaagtaatagtagtagccaagagagcaagcagccaggccccgagctgcccaagcagctgccgttcgattttctcaagaaaatcaccaacgatttcggccaagaccggaagataagcggaagccccttcggcacactctacaaggggattgtgccagatgacggcagagtgattgccgtgaagaaacttcaggagaacgcgccaatgccagcagataagcagttcaacagagaggtccagaatgtgatgtccctcaagcatgagaacatagtggagcttgtcgggttctgctgcgaaacgcagaagaaactggtgcagtttgataagagatacatccaggcggacatcaccgaaagcttaatctgctatgagtatttacctaatgggagccttcaggagaatctttttgagcccaaggggtccactaaaccagaaattggttgggacgtacgcttcaaaataatcaaggggatttgccaaggcttacgttttctacacaagttggatattcccattgtccatatggatttgaagcctgagaatatactgttggatgcaaatatggtgccaaagatagcggattttgcactctcaagggtctttggccaagaacaaaccagactctgcacgcaaacagttgtcggatcatatgggtacatggctccagaatatctttacagaggtgaaatatcagcccagtcagacatatacagtttaggcctagtgataattgagatcaccactggagagcagaatcctcgcgaaaaagaccaaccatctgcaagaagttttgttgataaagtgcgtaaagaatggacgctggagaacataacatccaaatattcatcactggatcatgaaagcctccaacaagttaaaacatgcattgatatcgggtcaaactgtgttgagattgataggacaaaaagacctcgcatagaagaaattgttgactcgctcaacggactacgttcaagccaaaaagttaccgaggtctcccgtccgcctacaactggcaagaagctaatgggctccatttttggtctgaagaaatgaaacatgcacgcctgttactgctggaagattgtaactttaatttggaaataggagcctttgttgccatctcgtcctggaagcatttaagtgtaattttcttatgtgtaatatgtctttttattactattagtc

SEQ ID NO: 12882 - protein, 376 aa, Triticum aestivum
  peptide (1)..(376): Ceres Seq. ID no. 13655238
  misc_feature (149)..(345): NCBI GI NO: 37532178 NR Description: putative receptor-like protein kinase
  misc_feature (44)..(143): NCBI GI NO: 37532178 NR Description: putative receptor-like protein kinase
  misc_feature (41)..(353): NCBI GI NO: 38344521 NR Description: OSJNBa0016N04.14
  misc_feature (43)..(348): NCBI GI NO: 21728344 NR Description: stem rust resistance protein Rpg1
  misc_feature (43)..(348): NCBI GI NO: 21929723 NR Description: barley stem rust resistance protein
  misc_feature (43)..(348): NCBI GI NO: 21929729 NR Description: barley stem rust resistance protein
  misc_feature (7)..(346): NCBI GI NO: 21929723 NR Description: barley stem rust resistance protein
  misc_feature (315)..(359): NCBI GI NO: 21929723 NR Description: barley stem rust resistance protein
  misc_feature (7)..(346): NCBI GI NO: 21929729 NR Description: barley stem rust resistance protein
  misc_feature (315)..(359): NCBI GI NO: 21929729 NR Description: barley stem rust resistance protein
RIHLVYLFSARIPRVFPSSSSEMATGSNSSSQESKQPGPELPKQLPFDFLKKITNDFGQDRKISGSPFGTLYKGIVPDDGRVIAVKKLQENAPMPADKQFNREVQNVMSLKHENIVELVGFCCETQKKLVQFDKRYIQADITESLICYEYLPNGSLQENLFEPKGSTKPEIGWDVRFKIIKGICQGLRFLHKLDIPIVHMDLKPENILLDANMVPKIADFALSRVFGQEQTRLCTQTVVGSYGYMAPEYLYRGEISAQSDIYSLGLVIIEITTGEQNPREKDQPSARSFVDKVRKEWTLENITSKYSSLDHESLQQVKTCIDIGSNCVEIDRTKRPRIEEIVDSLNGLRSSQKVTEVSRPPTTGKKLMGSIFGLKK

SEQ ID NO: 12883 - protein, 354 aa, Triticum aestivum
  peptide (1)..(354): Ceres Seq. ID no. 13655239
  misc_feature (127)..(323): NCBI GI NO: 37532178 NR Description: putative receptor-like protein kinase
  misc_feature (22)..(121): NCBI GI NO: 37532178 NR Description: putative receptor-like protein kinase
  misc_feature (19)..(331): NCBI GI NO: 38344521 NR Description: OSJNBa0016N04.14
  misc_feature (21)..(326): NCBI GI NO: 21728344 NR Description: stem rust resistance protein Rpg1
  misc_feature (21)..(326): NCBI GI NO: 21929729 NR Description: barley stem rust resistance protein
  misc_feature (21)..(326): NCBI GI NO: 21929723 NR Description: barley stem rust resistance protein
  misc_feature (1)..(324): NCBI GI NO: 21929723 NR Description: barley stem rust resistance protein
  misc_feature (293)..(337): NCBI GI NO: 21929723 NR Description: barley stem rust resistance protein
  misc_feature (1)..(324): NCBI GI NO: 21929729 NR Description: barley stem rust resistance protein
  misc_feature (293)..(337): NCBI GI NO: 21929729 NR Description: barley stem rust resistance protein
MATGSNSSSQESKQPGPELPKQLPFDFLKKITNDFGQDRKISGSPFGTLYKGIVPDDGRVIAVKKLQENAPMPADKQFNREVQNVMSLKHENIVELVGFCCETQKKLVQFDKRYIQADITESLICYEYLPNGSLQENLFEPKGSTKPEIGWDVRFKIIKGICQGLRFLHKLDIPIVHMDLKPENILLDANMVPKIADFALSRVFGQEQTRLCTQTVVGSYGYMAPEYLYRGEISAQSDIYSLGLVIIEITTGEQNPREKDQPSARSFVDKVRKEWTLENITSKYSSLDHESLQQVKTCIDIGSNCVEIDRTKRPRIEEIVDSLNGLRSSQKVTEVSRPPTTGKKLMGSIFGLKK

SEQ ID NO: 12884 - protein, 283 aa, Triticum aestivum
  peptide (1)..(283): Ceres Seq. ID no. 13655240
  misc_feature (56)..(252): NCBI GI NO: 37532178 NR Description: putative receptor-like protein kinase
  misc_feature (1)..(50): NCBI GI NO: 37532178 NR Description: putative receptor-like protein kinase
  misc_feature (1)..(260): NCBI GI NO: 38344521 NR Description: OSJNBa0016N04.14
  misc_feature (1)..(255): NCBI GI NO: 21728344 NR Description: stem rust resistance protein Rpg1
  misc_feature (1)..(255): NCBI GI NO: 21929723 NR Description: barley stem rust resistance protein
  misc_feature (1)..(255): NCBI GI NO: 21929729 NR Description: barley stem rust resistance protein
  misc_feature (1)..(253): NCBI GI NO: 21929723 NR Description: barley stem rust resistance protein
  misc_feature (222)..(266): NCBI GI NO: 21929723 NR Description: barley stem rust resistance protein
  misc_feature (1)..(253): NCBI GI NO: 21929729 NR Description: barley stem rust resistance protein
  misc_feature (222)..(266): NCBI GI NO: 21929729 NR Description: barley stem rust resistance protein
MPADKQFNREVQNVMSLKHENIVELVGFCCETQKKLVQFDKRYIQADITESLICYEYLPNGSLQENLFEPKGSTKPEIGWDVRFKIIKGICQGLRFLHKLDIPIVHMDLKPENILLDANMVPKIADFALSRVFGQEQTRLCTQTVVGSYGYMAPEYLYRGEISAQSDIYSLGLVIIEITTGEQNPREKDQPSARSFVDKVRKEWTLENITSKYSSLDHESLQQVKTCIDIGSNCVEIDRTKRPRIEEIVDSLNGLRSSQKVTEVSRPPTTGKKLMGSIFGLKK

SEQ ID NO: 12885 - DNA, 1230 bp, Triticum aestivum
  misc_feature (1)..(1230): Ceres Seq. ID no. 13655124
acacccttccagctcgcgacgccacctgagacctgaccacctcggctgctactgctagacgggcacggcctcgccgactccttcttccatcagggttcgacagctcacccttttggatccaagttcaggtttgatctgtgaggaagttcaactctgcagtgctgttccgaatcggaagcttgatcatggaaggagccactcccacttccgctccctcgagcacaaggattgctgtggtcaccggcgggagcaaagggatcgggctggaggcgtgcaagcagctggcaggcggcggcgccatcaccgttgttctgacggccaggaacgagacgaggggaacagcggcggtcgagcagatcaagcggctggggcacgcagatgtcatctttcatcagctggacatcacggatgcttccagcatcgctcgactcgcagatttcctcaagacccgtttcgggaagcttgacatcctggtgaataacgccgcgacggatgggattgagcatgtcattgatccagtttatggcttaacgcccggcgatgaaacgttcaatggcatggacgcgggccagaggatcaattggatgtggaccagctgccgccagacgtacgagaccgcgaaacagggcctgcagacaaactactacggcacgaagcgggtgacggaggctctcctgcccctgctccgatcctcgtccgacggaaggatcgtcaacgtctcctccaacttcggattgctcagctttttcaggaacgaggagctgaagcaggagctgaacgacgtcgacagcctgaccgagkgagaggctggacgagctgctggccatgttcctcaaggacttcgaggccggcggcgcggaggcgcgcgggtggccggccgagttctcggcgtacaaggtggccaaggccgccatgaacgcctactcgagaatcctggccaagaggcacccggagctgcgcgtcaactgcgcgcaccccggctacgtgaagacggatatcaccaggaactccgggatcctgacgccggaggagggcgcgcgcaacatcaccagcgttgcgctgctgccggaaggcgggcccaccggcaagtacttctccgaaggcgaggaggcatccttcgtgtgaaagagcatctgtagtactactgttttgttgcgcttatctgtggtgtgtggtgggataatctgcaaagtcgagttcaaaaaaaggaataaagttacgttagtttgg

SEQ ID NO: 12886 - protein, 317 aa, Triticum aestivum
  peptide (1)..(317): Ceres Seq. ID no. 15219205
  misc_feature (13)..(213): NCBI GI NO: 38346772 NR Description: OSJNBa0081C01.23
  misc_feature (1)..(205): NCBI GI NO: 38346774 NR Description: OSJNBa0081C01.25
  misc_feature (7)..(205): NCBI GI NO: 38346769 NR Description: OSJNBa0081C01.20
  misc_feature (1)..(205): NCBI GI NO: 38346768 NR Description: OSJNBa0081C01.19
  misc_feature (1)..(205): NCBI GI NO: 38346767 NR Description: OSJNBa0081C01.18
  misc_feature (14)..(201): NCBI GI NO: 33146492 NR Description: carbonyl reductase -like protein
  misc_feature (14)..(205): NCBI GI NO: 34559416 NR Description: (-)-isopiperitenone reductase [Mentha x piperita]
  misc_feature (9)..(205): NCBI GI NO: 15233062 NR Description: short-chain dehydrogenase/reductase family protein
  misc_feature (13)..(231): NCBI GI NO: 25518668 NR Description: hypothetical protein T1N6
  misc_feature (14)..(231): NCBI GI NO: 18378884 NR Description: short-chain dehydrogenase/reductase family protein
  misc_feature (206)..(206): Xaa is any aa, unknown or other
MEGATPTSAPSSTRIAVVTGGSKGIGLEACKQLAGGGAITVVLTARNETRGTAAVEQIKRLGHADVIFHQLDITDASSIARLADFLKTRFGKLDILVNNAATDGIEHVIDPVYGLTPGDETFNGMDAGQRINWMWTSCRQTYETAKQGLQTNYYGTKRVTEALLPLLRSSSDGRIVNVSSNFGLLSFFRNEELKQELNDVDSLTEXEAGRAAGHVPQGLRGRRRGGARVAGRVLGVQGGQGRHERLLENPGQEAPGAARQLRAPRLREDGYHQELRDPDAGGGRAQHHQRCAAAGRRAHRQVLLRRRGGILRVKEHL

SEQ ID NO: 12887 - protein, 193 aa, Triticum aestivum
  peptide (1)..(193): Ceres Seq. ID no. 15219206
  misc_feature (1)..(89): NCBI GI NO: 38346772 NR Description: OSJNBa0081C01.23
  misc_feature (1)..(81): NCBI GI NO: 38346774 NR Description: OSJNBa0081C01.25
  misc_feature (1)..(81): NCBI GI NO: 38346769 NR Description: OSJNBa0081C01.20
  misc_feature (1)..(81): NCBI GI NO: 38346768 NR Description: OSJNBa0081C01.19
  misc_feature (1)..(81): NCBI GI NO: 38346767 NR Description: OSJNBa0081C01.18
  misc_feature (1)..(77): NCBI GI NO: 33146492 NR Description: carbonyl reductase -like protein
  misc_feature (1)..(81): NCBI GI NO: 34559416 NR Description: (-)-isopiperitenone reductase [Mentha x piperita]
  misc_feature (1)..(81): NCBI GI NO: 15233062 NR Description: short-chain dehydrogenase/reductase family protein
  misc_feature (1)..(107): NCBI GI NO: 25518668 NR Description: hypothetical protein T1N6
  misc_feature (1)..(107): NCBI GI NO: 18378884 NR Description: short-chain dehydrogenase/reductase family protein
  misc_feature (82)..(82): Xaa is any aa, unknown or other
MDAGQRINWMWTSCRQTYETAKQGLQTNYYGTKRVTEALLPLLRSSSDGRIVNVSSNFGLLSFFRNEELKQELNDVDSLTEXEAGRAAGHVPQGLRGRRRGGARVAGRVLGVQGGQGRHERLLENPGQEAPGAARQLRAPRLREDGYHQELRDPDAGGGRAQHHQRCAAAGRRAHRQVLLRRRGGILRVKEHL

SEQ ID NO: 12888 - protein, 184 aa, Triticum aestivum
  peptide (1)..(184): Ceres Seq. ID no. 15219207
  misc_feature (1)..(80): NCBI GI NO: 38346772 NR Description: OSJNBa0081C01.23
  misc_feature (1)..(72): NCBI GI NO: 38346774 NR Description: OSJNBa0081C01.25
  misc_feature (1)..(72): NCBI GI NO: 38346769 NR Description: OSJNBa0081C01.20
  misc_feature (1)..(72): NCBI GI NO: 38346768 NR Description: OSJNBa0081C01.19
  misc_feature (1)..(72): NCBI GI NO: 38346767 NR Description: OSJNBa0081C01.18
  misc_feature (1)..(68): NCBI GI NO: 33146492 NR Description: carbonyl reductase -like protein
  misc_feature (1)..(72): NCBI GI NO: 34559416 NR Description: (-)-isopiperitenone reductase [Mentha x piperita]
  misc_feature (1)..(72): NCBI GI NO: 15233062 NR Description: short-chain dehydrogenase/reductase family protein
  misc_feature (1)..(98): NCBI GI NO: 25518668 NR Description: hypothetical protein T1N6
  misc_feature (1)..(98): NCBI GI NO: 18378884 NR Description: short-chain dehydrogenase/reductase family protein
  misc_feature (73)..(73): Xaa is any aa, unknown or other
MWTSCRQTYETAKQGLQTNYYGTKRVTEALLPLLRSSSDGRIVNVSSNFGLLSFFRNEELKQELNDVDSLTEXEAGRAAGHVPQGLRGRRRGGARVAGRVLGVQGGQGRHERLLENPGQEAPGAARQLRAPRLREDGYHQELRDPDAGGGRAQHHQRCAAAGRRAHRQVLLRRRGGILRVKEHL

SEQ ID NO: 12889 - DNA, 1318 bp, Triticum aestivum
  misc_feature (1)..(1318): Ceres Seq. ID no. 13596892
aagcttcttctgtgtcttccagcttgggcagcaggcaggcgtgtgagctcgaatccaagaggccggagacgatggatctggtgaacggcgcgctcaactgggcggcgatgcccgccatggtcgcctccctcctgctcttctacccgccctactacctcttcaagctctgctactccttcctctcctacctcttccccgacgacctcaagcgcaaggtcgtcctcatcaccggcgcctcctccggcatcggcgagcaactggcctaccagtacgccaccaagggggcatgccttgccctgctcgccaggagggagtggagcctgcggcaggtcgccgaccgcgccttcgagctcggcgcgcccgacgtcatcattctccccggcgacgtcgcagaccccgacgactgcaacagatttgttcaggccacaatcgaccactacggccgattggaccatcttgtgtgcaacgctggaattgcgagcgtgggcgcttttcaggagattcctgacgttactaactacagcccgcagcttgatgtcaacttctggggtgcagttcagtccacttttgctgctctgccccatcttaaaaggacccgagggaggatcgtggtcaccgcctccgcaaccggatggaaccctgttccgcgaatggttttctataatgccgccaatgccgcactgattaacttcttcgagaccctacggtcggagcttggtagtgaagttggcatcacaatagtgacgcctgggtggatcgagtccgagatgtccaaaggcaagtttctcaaggagcacggcggcgtggaggttgatcaagaatatcgagatgcccaaatcggtctcttcccggtggagtacgcgaagaactgcgcgagggccatggtgcaggcagctcgccaaggtgaccgttacctcaccgtgccgtcatggttcggaacaatgtacctgtggagggtgtttgcgccggaggtcgtcgagttctgctaccgcctcctgtatatgcacggccatggcggtggcgaccagaccgacgcgccgagcaagacgatggcccagggtggcgggaagcagatgctgtacccctcctcgctgcgctcttcggacgtcaaaaacgactagaaacttactatagttcgcatcctttgatcgaggacgtggatcctggtgtgcaggctagtttgttctctactaagctttaggtgtggatgctactgctggttagctagtttgtaatcccgaataagctgtgttctgtgttttgtaatattagtgttgtgttgtgtgcttgtaatattagttctgtgtttgagactgcg

SEQ ID NO: 12890 - protein, 372 aa, Triticum aestivum
  peptide (1)..(372): Ceres Seq. ID no. 15221994
  misc_feature (24)..(372): NCBI GI NO: 18423187 NR Description: short-chain dehydrogenase/reductase family protein
  misc_feature (24)..(372): NCBI GI NO: 15824408 NR Description: steroleosin [Sesamum indicum]
  misc_feature (24)..(332): NCBI GI NO: 15241261 NR Description: short-chain dehydrogenase/reductase family protein
  misc_feature (24)..(369): NCBI GI NO: 21311775 NR Description: steroleosin-B [Sesamum indicum]
  misc_feature (24)..(354): NCBI GI NO: 15234888 NR Description: short-chain dehydrogenase/reductase family protein
  misc_feature (24)..(325): NCBI GI NO: 8777392 NR Description: 11-beta-hydroxysteroid dehydrogenase-like
  misc_feature (24)..(325): NCBI GI NO: 15241203 NR Description: short-chain dehydrogenase/reductase family protein
  misc_feature (24)..(334): NCBI GI NO: 15232777 NR Description: short-chain dehydrogenase/reductase family protein
  misc_feature (24)..(334): NCBI GI NO: 15232779 NR Description: short-chain dehydrogenase/reductase family protein
  misc_feature (66)..(326): NCBI GI NO: 24372033 NR Description: oxidoreductase
ASSVSSSLGSRQACELESKRPETMDLVNGALNWAAMPAMVASLLLFYPPYYLFKLCYSFLSYLFPDDLKRKVVLITGASSGIGEQLAYQYATKGACLALLARREWSLRQVADRAFELGAPDVIILPGDVADPDDCNRFVQATIDHYGRLDHLVCNAGIASVGAFQEIPDVTNYSPQLDVNFWGAVQSTFAALPHLKRTRGRIVVTASATGWNPVPRMVFYNAANAALINFFETLRSELGSEVGITIVTPGWIESEMSKGKFLKEHGGVEVDQEYRDAQIGLFPVEYAKNCARAMVQAARQGDRYLTVPSWFGTMYLWRVFAPEVVEFCYRLLYMHGHGGGDQTDAPSKTMAQGGGKQMLYPSSLRSSDVKND

SEQ ID NO: 12891 - protein, 349 aa, Triticum aestivum
  peptide (1)..(349): Ceres Seq. ID no. 15221995
  misc_feature (1)..(349): NCBI GI NO: 18423187 NR Description: short-chain dehydrogenase/reductase family protein
  misc_feature (1)..(349): NCBI GI NO: 15824408 NR Description: steroleosin [Sesamum indicum]
  misc_feature (1)..(309): NCBI GI NO: 15241261 NR Description: short-chain dehydrogenase/reductase family protein
  misc_feature (1)..(346): NCBI GI NO: 21311775 NR Description: steroleosin-B [Sesamum indicum]
  misc_feature (1)..(331): NCBI GI NO: 15234888 NR Description: short-chain dehydrogenase/reductase family protein
  misc_feature (1)..(302): NCBI GI NO: 8777392 NR Description: 11-beta-hydroxysteroid dehydrogenase-like
  misc_feature (1)..(302): NCBI GI NO: 15241203 NR Description: short-chain dehydrogenase/reductase family protein
  misc_feature (1)..(311): NCBI GI NO: 15232777 NR Description: short-chain dehydrogenase/reductase family protein
  misc_feature (1)..(311): NCBI GI NO: 15232779 NR Description: short-chain dehydrogenase/reductase family protein
  misc_feature (43)..(303): NCBI GI NO: 24372033 NR Description: oxidoreductase
MDLVNGALNWAAMPAMVASLLLFYPPYYLFKLCYSFLSYLFPDDLKRKVVLITGASSGIGEQLAYQYATKGACLALLARREWSLRQVADRAFELGAPDVIILPGDVADPDDCNRFVQATIDHYGRLDHLVCNAGIASVGAFQEIPDVTNYSPQLDVNFWGAVQSTFAALPHLKRTRGRIVVTASATGWNPVPRMVFYNAANAALINFFETLRSELGSEVGITIVTPGWIESEMSKGKFLKEHGGVEVDQEYRDAQIGLFPVEYAKNCARAMVQAARQGDRYLTVPSWFGTMYLWRVFAPEVVEFCYRLLYMHGHGGGDQTDAPSKTMAQGGGKQMLYPSSLRSSDVKND

SEQ ID NO: 12892 - protein, 337 aa, Triticum aestivum
  peptide (1)..(337): Ceres Seq. ID no. 15221996
  misc_feature (1)..(337): NCBI GI NO: 18423187 NR Description: short-chain dehydrogenase/reductase family protein
  misc_feature (1)..(337): NCBI GI NO: 15824408 NR Description: steroleosin [Sesamum indicum]
  misc_feature (1)..(297): NCBI GI NO: 15241261 NR Description: short-chain dehydrogenase/reductase family protein
  misc_feature (1)..(334): NCBI GI NO: 21311775 NR Description: steroleosin-B [Sesamum indicum]
  misc_feature (1)..(319): NCBI GI NO: 15234888 NR Description: short-chain dehydrogenase/reductase family protein
  misc_feature (1)..(290): NCBI GI NO: 8777392 NR Description: 11-beta-hydroxysteroid dehydrogenase-like
  misc_feature (1)..(290): NCBI GI NO: 15241203 NR Description: short-chain dehydrogenase/reductase family protein
  misc_feature (1)..(299): NCBI GI NO: 15232777 NR Description: short-chain dehydrogenase/reductase family protein
  misc_feature (1)..(299): NCBI GI NO: 15232779 NR Description: short-chain dehydrogenase/reductase family protein
  misc_feature (31)..(291): NCBI GI NO: 24372033 NR Description: oxidoreductase
MPAMVASLLLFYPPYYLFKLCYSFLSYLFPDDLKRKVVLITGASSGIGEQLAYQYATKGACLALLARREWSLRQVADRAFELGAPDVIILPGDVADPDDCNRFVQATIDHYGRLDHLVCNAGIASVGAFQEIPDVTNYSPQLDVNFWGAVQSTFAALPHLKRTRGRIVVTASATGWNPVPRMVFYNAANAALINFFETLRSELGSEVGITIVTPGWIESEMSKGKFLKEHGGVEVDQEYRDAQIGLFPVEYAKNCARAMVQAARQGDRYLTVPSWFGTMYLWRVFAPEVVEFCYRLLYMHGHGGGDQTDAPSKTMAQGGGKQMLYPSSLRSSDVKND

SEQ ID NO: 12893 - DNA, 1427 bp, Triticum aestivum
  misc_feature (1)..(1427): Ceres Seq. ID no. 13596735
  misc_feature (1043)..(1043): n is a, c, t, g, unknown, or other
caacatcctaatcgaaaaatctatccgtttcgttgcgacctacgctccactcgctgtctcagtctccagcaacaaaaggagcacactaccctgccggctcacacccgctgccggagcacctacgcacagactaggcagccatgcgtcgcctccactacaccatcaccaccctgctctccgcaacctgcctccttctgcacgccatggcgtcgccggcactgcctgacccggggtcgctcgagccgtccctgctcttcccgtcggccggcgcctcccaggcccaacccgccgcggcatccaccatcccggcattccccgagcagtccgaggccgcggccacctcttccgtctgccagctcaccccttccccgccgctcctcccggccgtcctggcctcctgcaacgccggcagcggcagcggcgtcctcccgccgcggctgcggtgctgcccggccctggccgcgtggctgtacgccgcgtacgcgcccaccgcgttggggagcgacggcagcaggtggtcgaagctccccgccgcggcggcggacgtgacggacctgccgctgctgccggacgacgtggaggagtgcgcgggcgccgcggagcgcgcgctgaggtccgcgggagcgacgctgccgcagccgcaggcggggagcaacaatgggacgacgtgcgacgtgcccttctgctactgcgggataaggctgaggcggccggtctgcgcgctgccggcgggcagggctgcgaggaggctggagagggactgcgcgcggccggggctcgccggctgctcccggtgcctccgggcgctgaacctgctgaacgccattggagagaagaacgccacgtcggggaaggccagtcatggcgggaagccacgtgagcgtgactgccagctcatggggctgacgtggctgctgcagcggaacgccacgaggcatcgggcggccgccacggcggtcctccaggccctcatggcggccgaggaggcgggggctaccagcgcgcccgccacgtgctcgctccccgtcgatggcctgccgctngccgtcgcgtcgtcggagatcaacggcgccgccgatgtgtcccccatgggcagcctgcttcttcgctttctgctggggacgtctgccttcatcttgtcccggcggttctgagcaaaatctgatcttcgctgcgcggtctctttgctatttcttctgtgtttgcacttctgatgttgaattagtagttgttcaatttgtttgtacttctgatgatgtttagttcttgaaaggctagggactagagagtggacttcgttactgtaattatatgcaatcccggtggggatgcctaatctagtgagcgtgcattgcatctccatttaavcraaaaaaaaaaaaaaaaaaaaaaaaaaaaagaaaaaaaaaaaaaaaaaagcttatcga

SEQ ID NO: 12894 - protein, 337 aa, Triticum aestivum
  peptide (1)..(337): Ceres Seq. ID no. 15221961
  misc_feature (37)..(323): NCBI GI NO: 34394002 NR Description: unknown protein
  misc_feature (36)..(305): NCBI GI NO: 18417127 NR Description: expressed protein [Arabidopsis thaliana]
  misc_feature (36)..(305): NCBI GI NO: 21593735 NR Description: unknown [Arabidopsis thaliana]
  misc_feature (12)..(326): NCBI GI NO: 18401752 NR Description: expressed protein [Arabidopsis thaliana]
  misc_feature (301)..(301): Xaa is any aa, unknown or other
MRRLHYTITTLLSATCLLLHAMASPALPDPGSLEPSLLFPSAGASQAQPAAASTIPAFPEQSEAAATSSVCQLTPSPPLLPAVLASCNAGSGSGVLPPRLRCCPALAAWLYAAYAPTALGSDGSRWSKLPAAAADVTDLPLLPDDVEECAGAAERALRSAGATLPQPQAGSNNGTTCDVPFCYCGIRLRRPVCALPAGRAARRLERDCARPGLAGCSRCLRALNLLNAIGEKNATSGKASHGGKPRERDCQLMGLTWLLQRNATRHRAAATAVLQALMAAEEAGATSAPATCSLPVDGLPXAVASSEINGAADVSPMGSLLLRFLLGTSAFILSRRF

SEQ ID NO: 12895 - protein, 316 aa, Triticum aestivum
  peptide (1)..(316): Ceres Seq. ID no. 15221962
  misc_feature (16)..(302): NCBI GI NO: 34394002 NR Description: unknown protein
  misc_feature (15)..(284): NCBI GI NO: 18417127 NR Description: expressed protein [Arabidopsis thaliana]
  misc_feature (15)..(284): NCBI GI NO: 21593735 NR Description: unknown [Arabidopsis thaliana]
  misc_feature (1)..(305): NCBI GI NO: 18401752 NR Description: expressed protein [Arabidopsis thaliana]
  misc_feature (280)..(280): Xaa is any aa, unknown or other
MASPALPDPGSLEPSLLFPSAGASQAQPAAASTIPAFPEQSEAAATSSVCQLTPSPPLLPAVLASCNAGSGSGVLPPRLRCCPALAAWLYAAYAPTALGSDGSRWSKLPAAAADVTDLPLLPDDVEECAGAAERALRSAGATLPQPQAGSNNGTTCDVPFCYCGIRLRRPVCALPAGRAARRLERDCARPGLAGCSRCLRALNLLNAIGEKNATSGKASHGGKPRERDCQLMGLTWLLQRNATRHRAAATAVLQALMAAEEAGATSAPATCSLPVDGLPXAVASSEINGAADVSPMGSLLLRFLLGTSAFILSRRF

SEQ ID NO: 12896 - protein, 182 aa, Triticum aestivum
  peptide (1)..(182): Ceres Seq. ID no. 15221963
  misc_feature (43)..(164): Pfam Name: SPRR Pfam Description: Cornifin
  misc_feature (30)..(182): NCBI GI NO: 17939907 NR Description: UL36 protein [Pseudorabies virus]
  misc_feature (6)..(182): NCBI GI NO: 11360318 NR Description: probable mucin DKFZp434C196.1 - human (fragment)
  misc_feature (21)..(182): NCBI GI NO: 25143299 NR Description: pre-mRNA splicing SR protein related RSR-1 (68
  misc_feature (55)..(181): NCBI GI NO: 8650496 NR Description: 163R* [porcine adenovirus 3]
  misc_feature (26)..(178): NCBI GI NO: 283045 NR Description: hydroxyproline-rich glycoprotein - maize
  misc_feature (47)..(178): NCBI GI NO: 38345019 NR Description: OSJNBa0029H02.3
  misc_feature (51)..(180): NCBI GI NO: 2429362 NR Description: proline rich protein [Santalum album]
  misc_feature (23)..(181): NCBI GI NO: 7949115 NR Description: Ser/Arg-related nuclear matrix protein
  misc_feature (47)..(182): NCBI GI NO: 5821151 NR Description: RNA binding protein [Homo sapiens]
  misc_feature (47)..(182): NCBI GI NO: 6634015 NR Description: KIAA0324 protein [Homo sapiens]
QHPNRKIYPFRCDLRSTRCLSLQQQKEHTTLPAHTRCRSTYAQTRQPCVASTTPSPPCSPQPASFCTPWRRRHCLTRGRSSRPCSSRRPAPPRPNPPRHPPSRHSPSSPRPRPPLPSASSPLPRRSSRPSWPPATPAAAAASSRRGCGAARPWPRGCTPRTRPPRWGATAAGGRSSPPRRRT

SEQ ID NO: 12897 - DNA, 1100 bp, Triticum aestivum
  misc_feature (1)..(1100): Ceres Seq. ID no. 13598455
gattgatcctctttcgcctctgtaccgcgtgtcggtcctcgcgagttcgccgtggaacaccccatgggctccggcgaggacaaccccggaggaaccggtggaggagtcggcgggatagtccggggtgcggtgctgaaggcgctcgtcgtcttcggcggcgttattctgatccggcggctgcgccgctccaccacccggtgggaccacgcccgcgccgtcgccgacgccctctctggtgaaaagttctcgagggagcaggcgaggcaggatcctggaaactatttcaaccttagaatgctcacttgccctgcaactgagatggtggatggttctggagtgctctactttgagcaagcattttggagagctccagaaaaacctttccgacaaagattctacatggtaaagccatgtccaaaggagatgaaatgtgacgttgagttgagttcttatgcaattagagatgttgaagagtacaagaatttctgtgaccgaccaaaagatcagaggccgcagccagaagaagtaattgcggatatcgcagagcatttgaccaccatacacttatcacgatgtgaacgtggaaaacgctgcttatatgaaggatcaaccccaccgggaggttttcccaacagttggagcggtgcagcatattgtacatctgatctgtccattcataagaatggtgaaatacacatttgggacaagggttttgacgacgatgggagccaggtttggggaaccaaggctggcccttacgagtttaagcctgctcccaagtccaattatgatgacatgttctcacctttaaatttctctgcccccttgtcactagagaagatggaaagatcatatgcaattgatgaccagtagatgagcattgttaatacattttattgttagagaacaccataagaatatcatgtgtttatatattttgacagtatctctgatcatcaacaaatggtaattctgtgggtgaacacttgcaatgcctgacaacatagtgagatataacaattgtcatattgcagctaacatgagttatgtaagcagacggagcattaattctaatgttcgttagatggagatgcttgttg

SEQ ID NO: 12898 - protein, 269 aa, Triticum aestivum
  peptide (1)..(269): Ceres Seq. ID no. 13598456
  misc_feature (3)..(268): NCBI GI NO: 15241343 NR Description: expressed protein [Arabidopsis thaliana]
  misc_feature (3)..(268): NCBI GI NO: 21554618 NR Description: unknown [Arabidopsis thaliana]
  misc_feature (52)..(235): NCBI GI NO: 37520007 NR Description: hypothetical protein glr0438
MGSGEDNPGGTGGGVGGIVRGAVLKALVVFGGVILIRRLRRSTTRWDHARAVADALSGEKFSREQARQDPGNYFNLRMLTCPATEMVDGSGVLYFEQAFWRAPEKPFRQRFYMVKPCPKEMKCDVELSSYAIRDVEEYKNFCDRPKDQRPQPEEVIADIAEHLTTIHLSRCERGKRCLYEGSTPPGGFPNSWSGAAYCTSDLSIHKNGEIHIWDKGFDDDGSQVWGTKAGPYEFKPAPKSNYDDMFSPLNFSAPLSLEKMERSYAIDDQ

SEQ ID NO: 12899 - protein, 192 aa, Triticum aestivum
  peptide (1)..(192): Ceres Seq. ID no. 13598457
  misc_feature (1)..(191): NCBI GI NO: 15241343 NR Description: expressed protein [Arabidopsis thaliana]
  misc_feature (1)..(191): NCBI GI NO: 21554618 NR Description: unknown [Arabidopsis thaliana]
  misc_feature (1)..(158): NCBI GI NO: 37520007 NR Description: hypothetical protein glr0438
MLTCPATEMVDGSGVLYFEQAFWRAPEKPFRQRFYMVKPCPKEMKCDVELSSYAIRDVEEYKNFCDRPKDQRPQPEEVIADIAEHLTTIHLSRCERGKRCLYEGSTPPGGFPNSWSGAAYCTSDLSIHKNGEIHIWDKGFDDDGSQVWGTKAGPYEFKPAPKSNYDDMFSPLNFSAPLSLEKMERSYAIDDQ

SEQ ID NO: 12900 - protein, 184 aa, Triticum aestivum
  peptide (1)..(184): Ceres Seq. ID no. 13598458
  misc_feature (1)..(183): NCBI GI NO: 15241343 NR Description: expressed protein [Arabidopsis thaliana]
  misc_feature (1)..(183): NCBI GI NO: 21554618 NR Description: unknown [Arabidopsis thaliana]
  misc_feature (1)..(150): NCBI GI NO: 37520007 NR Description: hypothetical protein glr0438
MVDGSGVLYFEQAFWRAPEKPFRQRFYMVKPCPKEMKCDVELSSYAIRDVEEYKNFCDRPKDQRPQPEEVIADIAEHLTTIHLSRCERGKRCLYEGSTPPGGFPNSWSGAAYCTSDLSIHKNGEIHIWDKGFDDDGSQVWGTKAGPYEFKPAPKSNYDDMFSPLNFSAPLSLEKMERSYAIDDQ

SEQ ID NO: 12901 - DNA, 1073 bp, Triticum aestivum
  misc_feature (1)..(1073): Ceres Seq. ID no. 12585331
aagaccgcgtcccaaccgaaaatccccaattccccaccaccgacagcgtcggtgagagagatggcgtcggcgacggagatgcagccgctggcaccgtcgggctaccgccgggcgccggagatgaaggagaaggtggaggcgtcgtcgatcgacctggaggcggggaacggggagacgctctacccggggatctcgcgcggggagaacgccctccgctggggcttcatccgcaaggtctacggcatcctctgcgcgcagctggtcctcaccaccgtcgtctccgccatcaccgtcttctaccccaccctcaacgccacgctctccaactcgcccgtcctcgcgctcgtgctcgccgtcctccccttcatcctgatgatcccattgtacatctatcagcacagacaccctcacaatcttgctatcttgggtttgttcactctgtgcttgagcttcagcattggtgtggcttgtgcaaacactgaaggaactattgtgcttcaagcattggtactgacctcagctgtggttgtctctctgactgcatacacattctgggccgcaaagaagggcaaggaatttagttaccttggaccgtttctgttttctgctctcaccatcctggtcgtgataagctttacccagatcttcttcccatttggacctgcatcgaatgctgtgatcggtgggtttggagctctagtcttctcaggcttcatcgtctacgacactgagaacttgataaagcgccacacttatgacgagtacatctgggcgtctgttgagctttacctcgacatcctcaacctgttcctgaccatcctacagatgctcaggcagaatgacaactgatgggtcctgtctgaaccaccaggaccttgtgccaacccaggcatatgtccaacatttatcaagtcttttgaattgctatctacataacttggaagacatggtagtaagtttttgccatcatccagagatgaggccaaagtacaaccatatgtataggtgttctattgtgagtttatgtgcctgagtgttgttaaactgccaacaatcagtgatcgtatgaacgt

SEQ ID NO: 12902 - protein, 282 aa, Triticum aestivum
  peptide (1)..(282): Ceres Seq. ID no. 12585332
  misc_feature (68)..(281): Pfam Name: Pfam Description:  Uncharacterised protein family UPF0005
  misc_feature (32)..(282): NCBI GI NO: 18414455 NR Description: Expressed protein; protein id: At4g15470
  misc_feature (32)..(242): NCBI GI NO: 15810201 NR Description: AT4g15470/dl3775w [Arabidopsis thaliana]
  misc_feature (51)..(281): NCBI GI NO: 34393841 NR Description: putative z-protein
  misc_feature (60)..(282): NCBI GI NO: 14626300 NR Description: putative receptor-associated protein
  misc_feature (51)..(278): NCBI GI NO: 15218701 NR Description: putative glutamate/aspartate-binding peptide
  misc_feature (51)..(282): NCBI GI NO: 15229411 NR Description: putative protein; protein id: At3g63310.1
  misc_feature (51)..(278): NCBI GI NO: 15235466 NR Description: putative glutamate-/aspartate-binding peptide
  misc_feature (64)..(282): NCBI GI NO: 34393840 NR Description: putative z-protein
  misc_feature (32)..(125): NCBI GI NO: 7485070 NR Description: hypothetical protein - Arabidopsis thaliana
  misc_feature (162)..(233): NCBI GI NO: 7485070 NR Description: hypothetical protein - Arabidopsis thaliana
KTASQPKIPNSPPPTASVREMASATEMQPLAPSGYRRAPEMKEKVEASSIDLEAGNGETLYPGISRGENALRWGFIRKVYGILCAQLVLTTVVSAITVFYPTLNATLSNSPVLALVLAVLPFILMIPLYIYQHRHPHNLAILGLFTLCLSFSIGVACANTEGTIVLQALVLTSAVVVSLTAYTFWAAKKGKEFSYLGPFLFSALTILVVISFTQIFFPFGPASNAVIGGFGALVFSGFIVYDTENLIKRHTYDEYIWASVELYLDILNLFLTILQMLRQNDN

SEQ ID NO: 12903 - protein, 262 aa, Triticum aestivum
  peptide (1)..(262): Ceres Seq. ID no. 12585333
  misc_feature (48)..(261): Pfam Name: Pfam Description:  Uncharacterised protein family UPF0005
  misc_feature (12)..(262): NCBI GI NO: 18414455 NR Description: Expressed protein; protein id: At4g15470
  misc_feature (12)..(222): NCBI GI NO: 15810201 NR Description: AT4g15470/dl3775w [Arabidopsis thaliana]
  misc_feature (31)..(261): NCBI GI NO: 34393841 NR Description: putative z-protein
  misc_feature (40)..(262): NCBI GI NO: 14626300 NR Description: putative receptor-associated protein
  misc_feature (31)..(258): NCBI GI NO: 15218701 NR Description: putative glutamate/aspartate-binding peptide
  misc_feature (31)..(262): NCBI GI NO: 15229411 NR Description: putative protein; protein id: At3g63310.1
  misc_feature (31)..(258): NCBI GI NO: 15235466 NR Description: putative glutamate-/aspartate-binding peptide
  misc_feature (44)..(262): NCBI GI NO: 34393840 NR Description: putative z-protein
  misc_feature (12)..(105): NCBI GI NO: 7485070 NR Description: hypothetical protein - Arabidopsis thaliana
  misc_feature (142)..(213): NCBI GI NO: 7485070 NR Description: hypothetical protein - Arabidopsis thaliana
MASATEMQPLAPSGYRRAPEMKEKVEASSIDLEAGNGETLYPGISRGENALRWGFIRKVYGILCAQLVLTTVVSAITVFYPTLNATLSNSPVLALVLAVLPFILMIPLYIYQHRHPHNLAILGLFTLCLSFSIGVACANTEGTIVLQALVLTSAVVVSLTAYTFWAAKKGKEFSYLGPFLFSALTILVVISFTQIFFPFGPASNAVIGGFGALVFSGFIVYDTENLIKRHTYDEYIWASVELYLDILNLFLTILQMLRQNDN

SEQ ID NO: 12904 - protein, 256 aa, Triticum aestivum
  peptide (1)..(256): Ceres Seq. ID no. 12585334
  misc_feature (42)..(255): Pfam Name: Pfam Description:  Uncharacterised protein family UPF0005
  misc_feature (6)..(256): NCBI GI NO: 18414455 NR Description: Expressed protein; protein id: At4g15470
  misc_feature (6)..(216): NCBI GI NO: 15810201 NR Description: AT4g15470/dl3775w [Arabidopsis thaliana]
  misc_feature (25)..(255): NCBI GI NO: 34393841 NR Description: putative z-protein
  misc_feature (34)..(256): NCBI GI NO: 14626300 NR Description: putative receptor-associated protein
  misc_feature (25)..(252): NCBI GI NO: 15218701 NR Description: putative glutamate/aspartate-binding peptide
  misc_feature (25)..(256): NCBI GI NO: 15229411 NR Description: putative protein; protein id: At3g63310.1
  misc_feature (25)..(252): NCBI GI NO: 15235466 NR Description: putative glutamate-/aspartate-binding peptide
  misc_feature (38)..(256): NCBI GI NO: 34393840 NR Description: putative z-protein
  misc_feature (6)..(99): NCBI GI NO: 7485070 NR Description: hypothetical protein - Arabidopsis thaliana
  misc_feature (136)..(207): NCBI GI NO: 7485070 NR Description: hypothetical protein - Arabidopsis thaliana
MQPLAPSGYRRAPEMKEKVEASSIDLEAGNGETLYPGISRGENALRWGFIRKVYGILCAQLVLTTVVSAITVFYPTLNATLSNSPVLALVLAVLPFILMIPLYIYQHRHPHNLAILGLFTLCLSFSIGVACANTEGTIVLQALVLTSAVVVSLTAYTFWAAKKGKEFSYLGPFLFSALTILVVISFTQIFFPFGPASNAVIGGFGALVFSGFIVYDTENLIKRHTYDEYIWASVELYLDILNLFLTILQMLRQNDN

SEQ ID NO: 12905 - DNA, 1374 bp, Triticum aestivum
  misc_feature (1)..(1374): Ceres Seq. ID no. 15226831
tagaacatcctaatcgaaaaaaaagaaagctctagctagctagctacttcgcaaattttgcgtgcatcgatcgacgatggctgacttctcgtccagcaacggcgtcccgccggggttccggttccaccctaccgacgaggagctgctgctctactacctcaagaagaagatcggcttcgaaaagttcgacctcgaggtcatcagggaggtcgacctcaacaagatcgagccatgggacctccaagagagatgccggatcgggtctgcgccgcagaacgagtggtacttcttcagccacaaggaccgcaagtacccgacggggtcgcggacgaaccgcgcgacgacggccgggttctggaaggcaacggggagggacaagtgcatccgcaccagctaccgcaagatcgggatgcgcaagacgctcgtcttctaccgcggccgcgccccacacggccagaagtccgactggatcatgcacgagtaccgcctcgaggaaatcgacgaagcccagggcggcaccagcgaggatggatgggtggtgtgccgcgtgttcaagaagaagtgtttcttcaagatcgccggaggcggcgaggggagctcgagccagagcgcggacgccggcggcggccacatggccgtgtcctcgccgctgggtggccacgaccacgctgacagggccgccatggcatcccactacatgcacgggatgcacccgcagtaccacccccagcacgcctcttccttctactactcccagatgcaaccaccggaggcggcctactcgcaccacgtgcaggtccaggacctcctcaccaaccaccggccggccgccgacgcagctggcggcgggtatgatttctccagcctgccggtcgagcaccctggcctggacgtcggcagcagcgacggcgtcgcggcggatgggctggccgaaggaagagatcagacaaacggtgcagccgatcagcagtggcagccgatggacgggttcagcaacggcgggggcgccgctgcagtacagcagatgagcgccatgaactccgggcaacgaggtggggagatggatttgtggggatatgggaggtaaattcaacatcaccaagacatgagaaagtgcatccgcatgcatgaatgttgcatgcaagtgggaaggaggatcctgaaaatactggtaatgttgttggagagttatcattggtttttggtgtactgtatatgttgtgttattaatttatcccaatttattgttgtctaatgtaataagaactacggatacatatcggtatgtaagattgtaagtggtgatttgtgcgtgtacatgtgtttgcaaagagaaaaacacaagaatttaagtttgtgattttcttgccatgt

SEQ ID NO: 12906 - protein, 336 aa, Triticum aestivum
  peptide (1)..(336): Ceres Seq. ID no. 15226832
  misc_feature (10)..(139): Pfam Name: NAM Pfam Description: No apical meristem
  misc_feature (5)..(336): NCBI GI NO: 15235031 NR Description: No apical meristem (NAM) protein family
  misc_feature (5)..(240): NCBI GI NO: 15217491 NR Description: No apical meristem (NAM) protein family
  misc_feature (6)..(149): NCBI GI NO: 6006373 NR Description: Similar to NAM like protein (AC005310)
  misc_feature (147)..(206): NCBI GI NO: 6006373 NR Description: Similar to NAM like protein (AC005310)
  misc_feature (1)..(321): NCBI GI NO: 15219419 NR Description: NAM (no apical meristem) protein -related
  misc_feature (10)..(232): NCBI GI NO: 6730944 NR Description: OsNAC7 protein [Oryza sativa]
  misc_feature (1)..(253): NCBI GI NO: 38605889 NR Description: OSJNBb0020O11.1
  misc_feature (6)..(167): NCBI GI NO: 15223299 NR Description: No apical meristem (NAM) protein family
  misc_feature (1)..(200): NCBI GI NO: 7485760 NR Description: NAM (no apical meristem)-like protein
  misc_feature (1)..(200): NCBI GI NO: 27754598 NR Description: putative NAM (no apical meristem) protein
MADFSSSNGVPPGFRFHPTDEELLLYYLKKKIGFEKFDLEVIREVDLNKIEPWDLQERCRIGSAPQNEWYFFSHKDRKYPTGSRTNRATTAGFWKATGRDKCIRTSYRKIGMRKTLVFYRGRAPHGQKSDWIMHEYRLEEIDEAQGGTSEDGWVVCRVFKKKCFFKIAGGGEGSSSQSADAGGGHMAVSSPLGGHDHADRAAMASHYMHGMHPQYHPQHASSFYYSQMQPPEAAYSHHVQVQDLLTNHRPAADAAGGGYDFSSLPVEHPGLDVGSSDGVAADGLAEGRDQTNGAADQQWQPMDGFSNGGGAAAVQQMSAMNSGQRGGEMDLWGYGR

SEQ ID NO: 12907 - protein, 225 aa, Triticum aestivum
  peptide (1)..(225): Ceres Seq. ID no. 15226833
  misc_feature (1)..(225): NCBI GI NO: 15235031 NR Description: No apical meristem (NAM) protein family
  misc_feature (1)..(129): NCBI GI NO: 15217491 NR Description: No apical meristem (NAM) protein family
  misc_feature (1)..(38): NCBI GI NO: 6006373 NR Description: Similar to NAM like protein (AC005310)
  misc_feature (36)..(95): NCBI GI NO: 6006373 NR Description: Similar to NAM like protein (AC005310)
  misc_feature (1)..(210): NCBI GI NO: 15219419 NR Description: NAM (no apical meristem) protein -related
  misc_feature (1)..(121): NCBI GI NO: 6730944 NR Description: OsNAC7 protein [Oryza sativa]
  misc_feature (1)..(142): NCBI GI NO: 38605889 NR Description: OSJNBb0020O11.1
  misc_feature (1)..(56): NCBI GI NO: 15223299 NR Description: No apical meristem (NAM) protein family
  misc_feature (1)..(89): NCBI GI NO: 7485760 NR Description: NAM (no apical meristem)-like protein
  misc_feature (1)..(89): NCBI GI NO: 30690500 NR Description: No apical meristem (NAM) protein family
MRKTLVFYRGRAPHGQKSDWIMHEYRLEEIDEAQGGTSEDGWVVCRVFKKKCFFKIAGGGEGSSSQSADAGGGHMAVSSPLGGHDHADRAAMASHYMHGMHPQYHPQHASSFYYSQMQPPEAAYSHHVQVQDLLTNHRPAADAAGGGYDFSSLPVEHPGLDVGSSDGVAADGLAEGRDQTNGAADQQWQPMDGFSNGGGAAAVQQMSAMNSGQRGGEMDLWGYGR

SEQ ID NO: 12908 - protein, 204 aa, Triticum aestivum
  peptide (1)..(204): Ceres Seq. ID no. 15226834
  misc_feature (1)..(204): NCBI GI NO: 15235031 NR Description: No apical meristem (NAM) protein family
  misc_feature (1)..(108): NCBI GI NO: 15217491 NR Description: No apical meristem (NAM) protein family
  misc_feature (1)..(17): NCBI GI NO: 6006373 NR Description: Similar to NAM like protein (AC005310)
  misc_feature (15)..(74): NCBI GI NO: 6006373 NR Description: Similar to NAM like protein (AC005310)
  misc_feature (1)..(189): NCBI GI NO: 15219419 NR Description: NAM (no apical meristem) protein -related
  misc_feature (1)..(100): NCBI GI NO: 6730944 NR Description: OsNAC7 protein [Oryza sativa]
  misc_feature (1)..(121): NCBI GI NO: 38605889 NR Description: OSJNBb0020O11.1
  misc_feature (1)..(35): NCBI GI NO: 15223299 NR Description: No apical meristem (NAM) protein family
  misc_feature (1)..(68): NCBI GI NO: 7485760 NR Description: NAM (no apical meristem)-like protein
  misc_feature (1)..(68): NCBI GI NO: 27754598 NR Description: putative NAM (no apical meristem) protein
MHEYRLEEIDEAQGGTSEDGWVVCRVFKKKCFFKIAGGGEGSSSQSADAGGGHMAVSSPLGGHDHADRAAMASHYMHGMHPQYHPQHASSFYYSQMQPPEAAYSHHVQVQDLLTNHRPAADAAGGGYDFSSLPVEHPGLDVGSSDGVAADGLAEGRDQTNGAADQQWQPMDGFSNGGGAAAVQQMSAMNSGQRGGEMDLWGYGR

SEQ ID NO: 12909 - DNA, 1425 bp, Triticum aestivum
  misc_feature (1)..(1425): Ceres Seq. ID no. 15226041
acatccttacctgtagttttcctcactcccttgacccccgcccgtccctaactaaagccactagcggtagtaatccttgtcaagccgggtgacaccgcggagggagcggagcatggaggccatggacgtcaagtaccggccggccctctaccccaacggctccgtcaagaagctccggcaggcggccgcgccgccgccgccgccggtggaggccgtgcccacgtacaaggagtgcctcaagaaccacgcggcggccatcggcgcgcacgccgtcgacggctgcggcgagtggatgcccgtggtggagctcaacaccgccgacccggcctcgtataagtgcgcggcctgcggctgccaccgcaacttccaccgcctcgtgatggtggagggctcgccgccgcccccgcccccgcccccgccggccctgctgccggcgccgcccgtgcccatgcccatgccggccaccgtgctccatggcctgcggcagcgcgcgcacgggcatgagacgccggaggaccggctcccgggcgtcgacggcgacgactctgactccgactcggatggctccgagtacgacgacgagcgctccgtctccccgccccagcaccctccgcccgcgcacctcccggccccggtggcgcagcagccgccgccgtacatctcttccgcgccacacccgcacatgctgctctctctcaactccagcgcgccgggggcgccgcagggccagagcaggctccccgcccagctctcgccggcgacggcgccgccgccccacgggatgatgccggccaggaagcggttccgcaccaagttcaccgcggagcagaagcagcggatgcaggagctgtcggagcggctggggtggcggctgcagaagcgcgacgagggcgtggtcgacgagtggtgccgcgacatcggcgtcagcaagggcgtcttcaaggtctggatgcacaacaacaagcacaactacctcggcggccacagcgcccgccgcagcgcctcagccgcggcctcctccgccgcgaccacccccaccgcccctgccgccggcgggccattccgtctcgccccggccagccccgcaccaggagcgccattcaacccctccgccagccacagctccccggcccccacgggcacgggcttcaacatgaacggtaccgcctcctccgcctccaccgccaccaccaccgccacgcccacccccatcttcgccgccggccgcaagctgaacggagcctcatcgccgcagtcggcgtgagctagggagagcagaggcagagaagaaggagagggaaggagaaaggcaaagacatttagctttcatttcagttatcattgcattacttttctttctttctgtagtttggatcgatcgttggttctactaagaaattaaccccaagaaagggtgccgtctgg

SEQ ID NO: 12910 - protein, 383 aa, Triticum aestivum
  peptide (1)..(383): Ceres Seq. ID no. 15226042
  misc_feature (95)..(221): Pfam Name: Pfam Description:  Formin Homology 2 Domain
  misc_feature (166)..(298): NCBI GI NO: 15242243 NR Description: expressed protein [Arabidopsis thaliana]
  misc_feature (34)..(105): NCBI GI NO: 15242243 NR Description: expressed protein [Arabidopsis thaliana]
  misc_feature (165)..(307): NCBI GI NO: 13277218 NR Description: ZF-HD homeobox protein [Flaveria bidentis]
  misc_feature (29)..(87): NCBI GI NO: 13277218 NR Description: ZF-HD homeobox protein [Flaveria bidentis]
  misc_feature (165)..(315): NCBI GI NO: 13277216 NR Description: ZF-HD homeobox protein [Flaveria trinervia]
  misc_feature (29)..(87): NCBI GI NO: 13277216 NR Description: ZF-HD homeobox protein [Flaveria trinervia]
  misc_feature (168)..(342): NCBI GI NO: 32480091 NR Description: OSJNBb0086G13.8
  misc_feature (38)..(130): NCBI GI NO: 32480091 NR Description: OSJNBb0086G13.8
  misc_feature (178)..(285): NCBI GI NO: 13374061 NR Description: ZF-HD homeobox protein [Flaveria bidentis]
  misc_feature (38)..(93): NCBI GI NO: 13374061 NR Description: ZF-HD homeobox protein [Flaveria bidentis]
MEAMDVKYRPALYPNGSVKKLRQAAAPPPPPVEAVPTYKECLKNHAAAIGAHAVDGCGEWMPVVELNTADPASYKCAACGCHRNFHRLVMVEGSPPPPPPPPPALLPAPPVPMPMPATVLHGLRQRAHGHETPEDRLPGVDGDDSDSDSDGSEYDDERSVSPPQHPPPAHLPAPVAQQPPPYISSAPHPHMLLSLNSSAPGAPQGQSRLPAQLSPATAPPPHGMMPARKRFRTKFTAEQKQRMQELSERLGWRLQKRDEGVVDEWCRDIGVSKGVFKVWMHNNKHNYLGGHSARRSASAAASSAATTPTAPAAGGPFRLAPASPAPGAPFNPSASHSSPAPTGTGFNMNGTASSASTATTTATPTPIFAAGRKLNGASSPQSA

SEQ ID NO: 12911 - protein, 380 aa, Triticum aestivum
  peptide (1)..(380): Ceres Seq. ID no. 15226043
  misc_feature (92)..(218): Pfam Name: Pfam Description:  Formin Homology 2 Domain
  misc_feature (163)..(295): NCBI GI NO: 15242243 NR Description: expressed protein [Arabidopsis thaliana]
  misc_feature (31)..(102): NCBI GI NO: 15242243 NR Description: expressed protein [Arabidopsis thaliana]
  misc_feature (162)..(304): NCBI GI NO: 13277218 NR Description: ZF-HD homeobox protein [Flaveria bidentis]
  misc_feature (26)..(84): NCBI GI NO: 13277218 NR Description: ZF-HD homeobox protein [Flaveria bidentis]
  misc_feature (162)..(312): NCBI GI NO: 13277216 NR Description: ZF-HD homeobox protein [Flaveria trinervia]
  misc_feature (26)..(84): NCBI GI NO: 13277216 NR Description: ZF-HD homeobox protein [Flaveria trinervia]
  misc_feature (165)..(339): NCBI GI NO: 32480091 NR Description: OSJNBb0086G13.8
  misc_feature (35)..(127): NCBI GI NO: 32480091 NR Description: OSJNBb0086G13.8
  misc_feature (175)..(282): NCBI GI NO: 13374061 NR Description: ZF-HD homeobox protein [Flaveria bidentis]
  misc_feature (35)..(90): NCBI GI NO: 13374061 NR Description: ZF-HD homeobox protein [Flaveria bidentis]
MDVKYRPALYPNGSVKKLRQAAAPPPPPVEAVPTYKECLKNHAAAIGAHAVDGCGEWMPVVELNTADPASYKCAACGCHRNFHRLVMVEGSPPPPPPPPPALLPAPPVPMPMPATVLHGLRQRAHGHETPEDRLPGVDGDDSDSDSDGSEYDDERSVSPPQHPPPAHLPAPVAQQPPPYISSAPHPHMLLSLNSSAPGAPQGQSRLPAQLSPATAPPPHGMMPARKRFRTKFTAEQKQRMQELSERLGWRLQKRDEGVVDEWCRDIGVSKGVFKVWMHNNKHNYLGGHSARRSASAAASSAATTPTAPAAGGPFRLAPASPAPGAPFNPSASHSSPAPTGTGFNMNGTASSASTATTTATPTPIFAAGRKLNGASSPQSA

SEQ ID NO: 12912 - protein, 323 aa, Triticum aestivum
  peptide (1)..(323): Ceres Seq. ID no. 15226044
  misc_feature (35)..(161): Pfam Name: Pfam Description:  Formin Homology 2 Domain
  misc_feature (106)..(238): NCBI GI NO: 15242243 NR Description: expressed protein [Arabidopsis thaliana]
  misc_feature (1)..(45): NCBI GI NO: 15242243 NR Description: expressed protein [Arabidopsis thaliana]
  misc_feature (105)..(247): NCBI GI NO: 13277218 NR Description: ZF-HD homeobox protein [Flaveria bidentis]
  misc_feature (1)..(27): NCBI GI NO: 13277218 NR Description: ZF-HD homeobox protein [Flaveria bidentis]
  misc_feature (105)..(255): NCBI GI NO: 13277216 NR Description: ZF-HD homeobox protein [Flaveria trinervia]
  misc_feature (1)..(27): NCBI GI NO: 13277216 NR Description: ZF-HD homeobox protein [Flaveria trinervia]
  misc_feature (108)..(282): NCBI GI NO: 32480091 NR Description: OSJNBb0086G13.8
  misc_feature (1)..(70): NCBI GI NO: 32480091 NR Description: OSJNBb0086G13.8
  misc_feature (118)..(225): NCBI GI NO: 13374061 NR Description: ZF-HD homeobox protein [Flaveria bidentis]
  misc_feature (1)..(33): NCBI GI NO: 13374061 NR Description: ZF-HD homeobox protein [Flaveria bidentis]
MPVVELNTADPASYKCAACGCHRNFHRLVMVEGSPPPPPPPPPALLPAPPVPMPMPATVLHGLRQRAHGHETPEDRLPGVDGDDSDSDSDGSEYDDERSVSPPQHPPPAHLPAPVAQQPPPYISSAPHPHMLLSLNSSAPGAPQGQSRLPAQLSPATAPPPHGMMPARKRFRTKFTAEQKQRMQELSERLGWRLQKRDEGVVDEWCRDIGVSKGVFKVWMHNNKHNYLGGHSARRSASAAASSAATTPTAPAAGGPFRLAPASPAPGAPFNPSASHSSPAPTGTGFNMNGTASSASTATTTATPTPIFAAGRKLNGASSPQSA

SEQ ID NO: 12913 - DNA, 1852 bp, Triticum aestivum
  misc_feature (1)..(1852): Ceres Seq. ID no. 13596857
aggattggttgagttcgtctccgcgccgccgccgccgccgtcaatctcctcggtatatcaagccactccagatggcaacctatgagcccaagaacatcctcataaccggtgccgcaggtttcatcgcgtcccacgtggcaaaccgtctggtcaggaattacccgcgctacaacatcgtcattctcgacagggtcgactattgctccagccttagaaacctcgacccttctcgtggatccccgaatttcaagtttgtcaggggcgacatcgccagtgccgacttggtgaaccacctcctggtcaccgagtcgatcgataccgtcatgcactttgctgcccagactcacgtcgacaactccttcagctgttcctttgagttcaccaaaaacaatgtgtacggtacccacatcctcctcgaggcatgcaagcaggttaagatcagaaggttcattcatgtcagcaccgatgaagtctacggagaaactgatgtcaatgctgttgttggtaaccatgaggaatctcggctgcttccgacgaacccgtattcggctacgaaagccggggcagagatgctggtgatggcctacgcaaggtcctataatcttccggtgatcaccacacgaggtaacaatgtgtatgggccaaaccagttccccgagaagctcatccccaaatttgctctcctggcaatgagaggcctgccactcccggtttatgggaatggctcgaatgccaggagctacttgtactgtgaggatgtcgcagaagcctttgatgttgttcttcacagaggagaggttgggcatgtgtataacatcgccgcggctaaggagaggggagtggtggatgtggccagggacatatgtgagattcttggggtggaccctgagaaggccatcaagttcgtggaggacaggccgttcaatgaccaaaggtactttgtggacggtgagaagatgaggaggctggggtggttggagcgcacaacgtgggaggagggactgaggaagacggtggagtggtacgccagcaatgctgattactggggagatgttggcgttgtcttgcgagggcagcatcgtaactggacatatgctgcctcatcaccgcaagctgatgaagcagttgaggatcctaagttgaaaagcgcaagatcgaagtgcagggcaatgttataaactttacacccatgcatccataggcacaggaggcaacaacacgattcaagcctcaaataagagtgagtttcctaagctactactgccattgtgtcttgcacacaactgttacgagtgcacagattttgcctaaaggttcagtctattttaatggaggcatgcctttcttttcctgatgaattaatggaggcagtctagtggtgatttgcttacatcttaaatcttcataattcttttacatggatgaattacaaatgcctttttccatctccaagatctagtgcatcaccttgagttgtagagaaaatctcctttgtatcagtgaattacgctagttggactcgaggatatagccaagattaattatctccaagatcagttgtcagccataagtgctggcctgctgggagcttcttaatcttgatgcagtaagtagtctttttaaggccggtaatactttcaggtatagcatgaactagtaatgtgagcgcgctttgctgcgccgctcttcactgggacgtctatcttccagaaaatctgttcacttgttctcaaataacaacttaacgatctgaagagaactgtgagattgatgtgaatctgttttcttgttttttagttgaaatcttatttcttgttggcatgaaagaaatcatggactcttttctagtgac

SEQ ID NO: 12914 - protein, 391 aa, Triticum aestivum
  peptide (1)..(391): Ceres Seq. ID no. 13596858
  misc_feature (32)..(344): Pfam Name: Pfam Description:  NAD dependent epimerase/dehydratase family
  misc_feature (24)..(355): NCBI GI NO: 15218420 NR Description: NAD-dependent epimerase/dehydratase family
  misc_feature (24)..(355): NCBI GI NO: 15231926 NR Description: NAD-dependent epimerase/dehydratase family
  misc_feature (26)..(355): NCBI GI NO: 25405640 NR Description: hypothetical protein F22G10.13
  misc_feature (30)..(348): NCBI GI NO: 30173340 NR Description: dTDP-D-glucose 4,6-dehydratase
  misc_feature (30)..(351): NCBI GI NO: 7657641 NR Description: TDP-glucose 4,6-dehydratase
  misc_feature (32)..(362): NCBI GI NO: 33413324 NR Description: putative dTDP-glucose 4,6-dehydratase
  misc_feature (30)..(337): NCBI GI NO: 21313168 NR Description: RIKEN cDNA 2610025M23 [Mus musculus]
  misc_feature (30)..(360): NCBI GI NO: 15679777 NR Description: dTDP-glucose 4,6-dehydratase
  misc_feature (32)..(376): NCBI GI NO: 16357461 NR Description: dTDP-glucose 4,6-dehydratase
  misc_feature (32)..(348): NCBI GI NO: 21227269 NR Description: dTDP-glucose 4,6-dehydratase
DWLSSSPRRRRRRQSPRYIKPLQMATYEPKNILITGAAGFIASHVANRLVRNYPRYNIVILDRVDYCSSLRNLDPSRGSPNFKFVRGDIASADLVNHLLVTESIDTVMHFAAQTHVDNSFSCSFEFTKNNVYGTHILLEACKQVKIRRFIHVSTDEVYGETDVNAVVGNHEESRLLPTNPYSATKAGAEMLVMAYARSYNLPVITTRGNNVYGPNQFPEKLIPKFALLAMRGLPLPVYGNGSNARSYLYCEDVAEAFDVVLHRGEVGHVYNIAAAKERGVVDVARDICEILGVDPEKAIKFVEDRPFNDQRYFVDGEKMRRLGWLERTTWEEGLRKTVEWYASNADYWGDVGVVLRGQHRNWTYAASSPQADEAVEDPKLKSARSKCRAML

SEQ ID NO: 12915 - protein, 368 aa, Triticum aestivum
  peptide (1)..(368): Ceres Seq. ID no. 13596859
  misc_feature (9)..(321): Pfam Name: Pfam Description:  NAD dependent epimerase/dehydratase family
  misc_feature (1)..(332): NCBI GI NO: 15218420 NR Description: NAD-dependent epimerase/dehydratase family
  misc_feature (1)..(332): NCBI GI NO: 15231926 NR Description: NAD-dependent epimerase/dehydratase family
  misc_feature (3)..(332): NCBI GI NO: 25405640 NR Description: hypothetical protein F22G10.13
  misc_feature (7)..(325): NCBI GI NO: 30173340 NR Description: dTDP-D-glucose 4,6-dehydratase
  misc_feature (7)..(328): NCBI GI NO: 7657641 NR Description: TDP-glucose 4,6-dehydratase
  misc_feature (9)..(339): NCBI GI NO: 33413324 NR Description: putative dTDP-glucose 4,6-dehydratase
  misc_feature (7)..(314): NCBI GI NO: 21313168 NR Description: RIKEN cDNA 2610025M23 [Mus musculus]
  misc_feature (7)..(337): NCBI GI NO: 15679777 NR Description: dTDP-glucose 4,6-dehydratase
  misc_feature (9)..(353): NCBI GI NO: 16357461 NR Description: dTDP-glucose 4,6-dehydratase
  misc_feature (9)..(325): NCBI GI NO: 21227269 NR Description: dTDP-glucose 4,6-dehydratase
MATYEPKNILITGAAGFIASHVANRLVRNYPRYNIVILDRVDYCSSLRNLDPSRGSPNFKFVRGDIASADLVNHLLVTESIDTVMHFAAQTHVDNSFSCSFEFTKNNVYGTHILLEACKQVKIRRFIHVSTDEVYGETDVNAVVGNHEESRLLPTNPYSATKAGAEMLVMAYARSYNLPVITTRGNNVYGPNQFPEKLIPKFALLAMRGLPLPVYGNGSNARSYLYCEDVAEAFDVVLHRGEVGHVYNIAAAKERGVVDVARDICEILGVDPEKAIKFVEDRPFNDQRYFVDGEKMRRLGWLERTTWEEGLRKTVEWYASNADYWGDVGVVLRGQHRNWTYAASSPQADEAVEDPKLKSARSKCRAML

SEQ ID NO: 12916 - protein, 284 aa, Triticum aestivum
  peptide (1)..(284): Ceres Seq. ID no. 13596860
  misc_feature (1)..(237): Pfam Name: Pfam Description:  NAD dependent epimerase/dehydratase family
  misc_feature (1)..(248): NCBI GI NO: 15218420 NR Description: NAD-dependent epimerase/dehydratase family
  misc_feature (1)..(248): NCBI GI NO: 15231926 NR Description: NAD-dependent epimerase/dehydratase family
  misc_feature (1)..(248): NCBI GI NO: 25405640 NR Description: hypothetical protein F22G10.13
  misc_feature (1)..(241): NCBI GI NO: 30173340 NR Description: dTDP-D-glucose 4,6-dehydratase
  misc_feature (1)..(244): NCBI GI NO: 7657641 NR Description: TDP-glucose 4,6-dehydratase
  misc_feature (1)..(255): NCBI GI NO: 33413324 NR Description: putative dTDP-glucose 4,6-dehydratase
  misc_feature (1)..(230): NCBI GI NO: 21313168 NR Description: RIKEN cDNA 2610025M23 [Mus musculus]
  misc_feature (1)..(253): NCBI GI NO: 15679777 NR Description: dTDP-glucose 4,6-dehydratase
  misc_feature (1)..(269): NCBI GI NO: 16357461 NR Description: dTDP-glucose 4,6-dehydratase
  misc_feature (1)..(241): NCBI GI NO: 21227269 NR Description: dTDP-glucose 4,6-dehydratase
MHFAAQTHVDNSFSCSFEFTKNNVYGTHILLEACKQVKIRRFIHVSTDEVYGETDVNAVVGNHEESRLLPTNPYSATKAGAEMLVMAYARSYNLPVITTRGNNVYGPNQFPEKLIPKFALLAMRGLPLPVYGNGSNARSYLYCEDVAEAFDVVLHRGEVGHVYNIAAAKERGVVDVARDICEILGVDPEKAIKFVEDRPFNDQRYFVDGEKMRRLGWLERTTWEEGLRKTVEWYASNADYWGDVGVVLRGQHRNWTYAASSPQADEAVEDPKLKSARSKCRAML

SEQ ID NO: 12917 - DNA, 1058 bp, Triticum aestivum
  misc_feature (1)..(1058): Ceres Seq. ID no. 12625361
cctaaacccgagagtaacaaaatccttatcccaagcttagcatccccggtctcctcggtttctcctcctccccgaaccctcgctccatcactctctccctctcccactccggcgcgcgctcagctgaatctcgccgcaggagcaatggcgtcggtgcatctgtgcggcccgaaggtggcgtcggcggcgatggcgaagccggcgctggcggacgggctccgcatccccacttcgtcgtcggcgcgtcccgtgccgacggggcgcaggctccggggcctcgtcgtcagggccgccacggtcgtgtcgcccaagtatacttctgtgaaaccattgggagatagggtactagtgaagaccaagactactgaggataaaactgctggagggatattgcttccaacaacagctcagtcaagaccacaagcaggggaggttgttgcagttggagaggggagaagcttaggcagcaacatcgttgagatcagtgttccggttggtgccaaagttatttactctaaatacgctggcaccgagctggaattcaatgataccacccacctcattatgaaagaagatgacatcattggtattcttgacactgatgacgtgaaagatctgaagccactgagtgaccgtattctcattaaggttgcagagtctgaagaggaaactgctggcggtttgctattgacacaggcgtcgaaagagaagccttccgttggaacagtggtcgctgttggccccgggccattgggcgatgatggcagcaggacaccattgtcaatcactcctggaagcagcgtgctgtactccaagtatgcaggaagcgagttcaagggttcggaaggcgagtacattgttctcaggtcatccgacgtgatagcggtgctgtcatcataagcttgccctgccctacgtgaactaggaattttgatatttagtccaaaaccttgtttggttattgctctttgcttgtgattggtgaactgtgaattgcttcttcgctctatcgtggaaatgctgcttgatagttttaataagatgacggcttagactcc

SEQ ID NO: 12918 - protein, 299 aa, Triticum aestivum
  peptide (1)..(299): Ceres Seq. ID no. 12625362
  misc_feature (204)..(298): Pfam Name: Pfam Description:  Chaperonin 10 Kd subunit
  misc_feature (49)..(298): NCBI GI NO: 21780187 NR Description: cp10-like protein [Gossypium hirsutum]
  misc_feature (49)..(298): NCBI GI NO: 15242045 NR Description: chloroplast Cpn21 protein; protein id: At5g20720
  misc_feature (49)..(298): NCBI GI NO: 7331143 NR Description: chaperonin 21 precursor [Lycopersicon esculentum]
  misc_feature (49)..(298): NCBI GI NO: 25453528 NR Description: chaperonin 10 [imported] - Arabidopsis thaliana
  misc_feature (70)..(298): NCBI GI NO: 399241 NR Description: 20 kDa chaperonin, chloroplast precursor
  misc_feature (200)..(298): NCBI GI NO: 11467285 NR Description: GroES [Cyanophora paradoxa]
  misc_feature (203)..(297): NCBI GI NO: 22297730 NR Description: 10kD chaperonin
  misc_feature (200)..(298): NCBI GI NO: 23040551 NR Description: hypothetical protein
  misc_feature (202)..(297): NCBI GI NO: 29839360 NR Description: 10 kDa chaperonin (Protein Cpn10) (groES protein)
  misc_feature (206)..(296): NCBI GI NO: 37522465 NR Description: chaperonin GroES [Gloeobacter violaceus]
PKPESNKILIPSLASPVSSVSPPPRTLAPSLSPSPTPARAQLNLAAGAMASVHLCGPKVASAAMAKPALADGLRIPTSSSARPVPTGRRLRGLVVRAATVVSPKYTSVKPLGDRVLVKTKTTEDKTAGGILLPTTAQSRPQAGEVVAVGEGRSLGSNIVEISVPVGAKVIYSKYAGTELEFNDTTHLIMKEDDIIGILDTDDVKDLKPLSDRILIKVAESEEETAGGLLLTQASKEKPSVGTVVAVGPGPLGDDGSRTPLSITPGSSVLYSKYAGSEFKGSEGEYIVLRSSDVIAVLSS

SEQ ID NO: 12919 - protein, 251 aa, Triticum aestivum
  peptide (1)..(251): Ceres Seq. ID no. 12625363
  misc_feature (156)..(250): Pfam Name: Pfam Description:  Chaperonin 10 Kd subunit
  misc_feature (1)..(250): NCBI GI NO: 21780187 NR Description: cp10-like protein [Gossypium hirsutum]
  misc_feature (1)..(250): NCBI GI NO: 15242045 NR Description: chloroplast Cpn21 protein; protein id: At5g20720
  misc_feature (1)..(250): NCBI GI NO: 7331143 NR Description: chaperonin 21 precursor [Lycopersicon esculentum]
  misc_feature (1)..(250): NCBI GI NO: 25453528 NR Description: chaperonin 10 [imported] - Arabidopsis thaliana
  misc_feature (22)..(250): NCBI GI NO: 399241 NR Description: 20 kDa chaperonin, chloroplast precursor
  misc_feature (152)..(250): NCBI GI NO: 11467285 NR Description: GroES [Cyanophora paradoxa]
  misc_feature (155)..(249): NCBI GI NO: 22297730 NR Description: 10kD chaperonin
  misc_feature (152)..(250): NCBI GI NO: 23040551 NR Description: hypothetical protein
  misc_feature (154)..(249): NCBI GI NO: 29839360 NR Description: 10 kDa chaperonin (Protein Cpn10) (groES protein)
  misc_feature (158)..(248): NCBI GI NO: 37522465 NR Description: chaperonin GroES [Gloeobacter violaceus]
MASVHLCGPKVASAAMAKPALADGLRIPTSSSARPVPTGRRLRGLVVRAATVVSPKYTSVKPLGDRVLVKTKTTEDKTAGGILLPTTAQSRPQAGEVVAVGEGRSLGSNIVEISVPVGAKVIYSKYAGTELEFNDTTHLIMKEDDIIGILDTDDVKDLKPLSDRILIKVAESEEETAGGLLLTQASKEKPSVGTVVAVGPGPLGDDGSRTPLSITPGSSVLYSKYAGSEFKGSEGEYIVLRSSDVIAVLSS

SEQ ID NO: 12920 - protein, 236 aa, Triticum aestivum
  peptide (1)..(236): Ceres Seq. ID no. 12625364
  misc_feature (141)..(235): Pfam Name: Pfam Description:  Chaperonin 10 Kd subunit
  misc_feature (1)..(235): NCBI GI NO: 21780187 NR Description: cp10-like protein [Gossypium hirsutum]
  misc_feature (1)..(235): NCBI GI NO: 15242045 NR Description: chloroplast Cpn21 protein; protein id: At5g20720
  misc_feature (1)..(235): NCBI GI NO: 7331143 NR Description: chaperonin 21 precursor [Lycopersicon esculentum]
  misc_feature (1)..(235): NCBI GI NO: 25453528 NR Description: chaperonin 10 [imported] - Arabidopsis thaliana
  misc_feature (7)..(235): NCBI GI NO: 399241 NR Description: 20 kDa chaperonin, chloroplast precursor
  misc_feature (137)..(235): NCBI GI NO: 11467285 NR Description: GroES [Cyanophora paradoxa]
  misc_feature (140)..(234): NCBI GI NO: 22297730 NR Description: 10kD chaperonin
  misc_feature (137)..(235): NCBI GI NO: 23040551 NR Description: hypothetical protein
  misc_feature (139)..(234): NCBI GI NO: 29839360 NR Description: 10 kDa chaperonin (Protein Cpn10) (groES protein)
  misc_feature (143)..(233): NCBI GI NO: 37522465 NR Description: chaperonin GroES [Gloeobacter violaceus]
MAKPALADGLRIPTSSSARPVPTGRRLRGLVVRAATVVSPKYTSVKPLGDRVLVKTKTTEDKTAGGILLPTTAQSRPQAGEVVAVGEGRSLGSNIVEISVPVGAKVIYSKYAGTELEFNDTTHLIMKEDDIIGILDTDDVKDLKPLSDRILIKVAESEEETAGGLLLTQASKEKPSVGTVVAVGPGPLGDDGSRTPLSITPGSSVLYSKYAGSEFKGSEGEYIVLRSSDVIAVLSS

SEQ ID NO: 12921 - DNA, 1578 bp, Triticum aestivum
  misc_feature (1)..(1578): Ceres Seq. ID no. 13596893
accaagcacaccggcacctaccatcgctctactccgcttcgagtccacagcacctcgcgcgcgctctacccaccataagccttcgggccttccgggagcccaagccatggcgcgcaagaagatccgggagtacgactccaagcgcctcctcaaggagcacctcaagcgcctggccggcatcgacctgcacatcctctccgcccaggtcacacaattgacggactttgcggagcttgtgaaccagcatccatggctgtcgaccaccaaactggttgtgaagcctgacatgctgttcgggaagcgtgggaagagtggccttgtggcactcaacctggatgtagcccaagtcaaggagtttgtgaaggagcggttgggagtcgaggtcgagatgggtggctgcaaagctccaattaccactttcatagttgagccgtttgtcccccacgatcaagagtactacctttcagttgtgtccgaaaggttgggtagcaccattagcttctcggaatgtggaggcattgaaatcgaggagaactgggacaaggttaagacagtctttcttccgaccgagaagccaatgacacctgatgcttgtgctcccttgattgcaacccttccactggaggcacgcggaaagattggtgatttcattaaaggagtgtttgctgtcttccaagacttagatttctcatttattgagatgaacccattcaccatggtgaatggggagccatatccgctggacatgagaggagaattggatgacactgcatctttcaagaacttcaagaagtggggaaatttagaattccctctaccattcggcagagttctcagttctacagaaagttttatccatgagctggacgacaagaccagcgcgtctttgaagttcacagttttgaacccaaagggacgcatctggacaatggttgctggaggtggtgccagtgtcatatatgctgacacggttggagatttgggatatgcttcagagttaggaaattatgcagaatacagtggtgctcccaaccaggaggaggttctgcagtatgctagagtagtacttgattgtgcgactgcggaccctgatggccgcaagagagcccttctcattggaggtggtatagccaacttcactgatgtcgctgccacttttagtggcatcattcaggcattaagagagaaggaatccaagttaaaggcatccaggatgcacctctatgttcgacgaggcggtccaaattaccaaactggactggcgaaaatgcgcaagcttggtgcagaaatcggtgttccgattgaggtgtatggaccggaagagacaatgactggcatctgcaagcaagcaattgaatgcattatggcggcatcataaatcaggatacagttgagaagtagtttgagatctacaaacaagaaactggctgccgcataaatgagagcatagtggcactaggttcacatcacatggttgattagtttcttcagaagttatttggacaaagacacatatattattgtcgtaaaggaacctgtactgttgtaatgtgacaaacaaaagatttattaccatgc

SEQ ID NO: 12922 - protein, 458 aa, Triticum aestivum
  peptide (1)..(458): Ceres Seq. ID no. 13596894
  misc_feature (36)..(455): NCBI GI NO: 15217510 NR Description: expressed protein [Arabidopsis thaliana]
  misc_feature (36)..(458): NCBI GI NO: 15919089 NR Description: ATP citrate lyase b-subunit [Lupinus albus]
  misc_feature (36)..(458): NCBI GI NO: 15220186 NR Description: ATP citrate-lyase -related [Arabidopsis thaliana]
  misc_feature (36)..(458): NCBI GI NO: 21593129 NR Description: ATP citrate-lyase, putative [Arabidopsis thaliana]
  misc_feature (36)..(458): NCBI GI NO: 15219818 NR Description: ATP citrate-lyase -related [Arabidopsis thaliana]
  misc_feature (36)..(458): NCBI GI NO: 19698853 NR Description: similar to ATP-citrate-lyase
  misc_feature (36)..(451): NCBI GI NO: 29293809 NR Description: ATP citrate lyase [Mus musculus]
  misc_feature (36)..(450): NCBI GI NO: 8392839 NR Description: ATP citrate lyase [Rattus norvegicus]
  misc_feature (36)..(451): NCBI GI NO: 38569421 NR Description: ATP citrate lyase isoform 1 [Homo sapiens]
  misc_feature (36)..(451): NCBI GI NO: 38569423 NR Description: ATP citrate lyase isoform 2 [Homo sapiens]
PSTPAPTIALLRFESTAPRARSTHHKPSGLPGAQAMARKKIREYDSKRLLKEHLKRLAGIDLHILSAQVTQLTDFAELVNQHPWLSTTKLVVKPDMLFGKRGKSGLVALNLDVAQVKEFVKERLGVEVEMGGCKAPITTFIVEPFVPHDQEYYLSVVSERLGSTISFSECGGIEIEENWDKVKTVFLPTEKPMTPDACAPLIATLPLEARGKIGDFIKGVFAVFQDLDFSFIEMNPFTMVNGEPYPLDMRGELDDTASFKNFKKWGNLEFPLPFGRVLSSTESFIHELDDKTSASLKFTVLNPKGRIWTMVAGGGASVIYADTVGDLGYASELGNYAEYSGAPNQEEVLQYARVVLDCATADPDGRKRALLIGGGIANFTDVAATFSGIIQALREKESKLKASRMHLYVRRGGPNYQTGLAKMRKLGAEIGVPIEVYGPEETMTGICKQAIECIMAAS

SEQ ID NO: 12923 - protein, 423 aa, Triticum aestivum
  peptide (1)..(423): Ceres Seq. ID no. 13596895
  misc_feature (1)..(420): NCBI GI NO: 15217510 NR Description: expressed protein [Arabidopsis thaliana]
  misc_feature (1)..(423): NCBI GI NO: 15919089 NR Description: ATP citrate lyase b-subunit [Lupinus albus]
  misc_feature (1)..(423): NCBI GI NO: 15220186 NR Description: ATP citrate-lyase -related [Arabidopsis thaliana]
  misc_feature (1)..(423): NCBI GI NO: 21593129 NR Description: ATP citrate-lyase, putative [Arabidopsis thaliana]
  misc_feature (1)..(423): NCBI GI NO: 15219818 NR Description: ATP citrate-lyase -related [Arabidopsis thaliana]
  misc_feature (1)..(423): NCBI GI NO: 19698853 NR Description: similar to ATP-citrate-lyase
  misc_feature (1)..(416): NCBI GI NO: 29293809 NR Description: ATP citrate lyase [Mus musculus]
  misc_feature (1)..(415): NCBI GI NO: 8392839 NR Description: ATP citrate lyase [Rattus norvegicus]
  misc_feature (1)..(416): NCBI GI NO: 38569421 NR Description: ATP citrate lyase isoform 1 [Homo sapiens]
  misc_feature (1)..(416): NCBI GI NO: 38569423 NR Description: ATP citrate lyase isoform 2 [Homo sapiens]
MARKKIREYDSKRLLKEHLKRLAGIDLHILSAQVTQLTDFAELVNQHPWLSTTKLVVKPDMLFGKRGKSGLVALNLDVAQVKEFVKERLGVEVEMGGCKAPITTFIVEPFVPHDQEYYLSVVSERLGSTISFSECGGIEIEENWDKVKTVFLPTEKPMTPDACAPLIATLPLEARGKIGDFIKGVFAVFQDLDFSFIEMNPFTMVNGEPYPLDMRGELDDTASFKNFKKWGNLEFPLPFGRVLSSTESFIHELDDKTSASLKFTVLNPKGRIWTMVAGGGASVIYADTVGDLGYASELGNYAEYSGAPNQEEVLQYARVVLDCATADPDGRKRALLIGGGIANFTDVAATFSGIIQALREKESKLKASRMHLYVRRGGPNYQTGLAKMRKLGAEIGVPIEVYGPEETMTGICKQAIECIMAAS

SEQ ID NO: 12924 - protein, 363 aa, Triticum aestivum
  peptide (1)..(363): Ceres Seq. ID no. 13596896
  misc_feature (1)..(360): NCBI GI NO: 15217510 NR Description: expressed protein [Arabidopsis thaliana]
  misc_feature (1)..(363): NCBI GI NO: 15919089 NR Description: ATP citrate lyase b-subunit [Lupinus albus]
  misc_feature (1)..(363): NCBI GI NO: 15220186 NR Description: ATP citrate-lyase -related [Arabidopsis thaliana]
  misc_feature (1)..(363): NCBI GI NO: 21593129 NR Description: ATP citrate-lyase, putative [Arabidopsis thaliana]
  misc_feature (1)..(363): NCBI GI NO: 15219818 NR Description: ATP citrate-lyase -related [Arabidopsis thaliana]
  misc_feature (1)..(363): NCBI GI NO: 19698853 NR Description: similar to ATP-citrate-lyase
  misc_feature (1)..(356): NCBI GI NO: 29293809 NR Description: ATP citrate lyase [Mus musculus]
  misc_feature (1)..(355): NCBI GI NO: 8392839 NR Description: ATP citrate lyase [Rattus norvegicus]
  misc_feature (1)..(356): NCBI GI NO: 38569421 NR Description: ATP citrate lyase isoform 1 [Homo sapiens]
  misc_feature (1)..(356): NCBI GI NO: 38569423 NR Description: ATP citrate lyase isoform 2 [Homo sapiens]
MLFGKRGKSGLVALNLDVAQVKEFVKERLGVEVEMGGCKAPITTFIVEPFVPHDQEYYLSVVSERLGSTISFSECGGIEIEENWDKVKTVFLPTEKPMTPDACAPLIATLPLEARGKIGDFIKGVFAVFQDLDFSFIEMNPFTMVNGEPYPLDMRGELDDTASFKNFKKWGNLEFPLPFGRVLSSTESFIHELDDKTSASLKFTVLNPKGRIWTMVAGGGASVIYADTVGDLGYASELGNYAEYSGAPNQEEVLQYARVVLDCATADPDGRKRALLIGGGIANFTDVAATFSGIIQALREKESKLKASRMHLYVRRGGPNYQTGLAKMRKLGAEIGVPIEVYGPEETMTGICKQAIECIMAAS

SEQ ID NO: 12925 - DNA, 1561 bp, Triticum aestivum
  misc_feature (1)..(1561): Ceres Seq. ID no. 14301475
aagaccagctacagaccagctacagcctagagctgagcattgcatttggtgttagactagcgcttgcccaccctgccatgacgtccaaggtagccaacagctccggcagcaacaatgcggatgccaagctatcgccgtcggggctccccgtccgggaggtcccgggcggctacggcgttcccttcttgtcgccgctgcgcgaccgccttgactactactacttccagggcgcggaggagtacttccgctcccgcatcgcccggaacggcggcgccaccgtgctgcgcgtcaacatgccccccgggccgttcatcaccaccgacttccgcgtcgtcgccttcctcgacgcgcgcagcttcagcgtgctcctcgacgacgccaaggtcgacaagaccgacacgctcgacgggaccttcatgccctccctcgcgctcttcggcggctaccgcccgctcgccttcctcgacgctgccgacccccaccacgccgcgctcaagcgcgtcatgatcagcctcgccgccgcgcggatgcaccacgtcgcgccggccttccgcaccgctttcggcgccgtgttcgacgccgccgacgccggcctcggcgacggccccgtccagttcaacaagctcaacgagcaccacatgttcgacttcacctgctccgcgctgttcggcggcacgccgccgagcaaggccatgggcgacggcgccgtgaccaaggccatcaagtggctcggcgtgcagctgcacccgctcgccagtaagatcatcaagccgtggctgctcgaggatctccttctccacaccttccgcctgccgccgttgctggttcgccgggactacgccgacctgacagcctacttcgccgaagccaccatcgacaccgaggtcgacgtcttcgcctccaagatgatcaccgttgacagaaagcccatcaagctccagatctgggacacgccaggcgaagacagattcagatcgatcactagatcatactacgatgaagttgatggagctcttctagtttatgacatcaccaggagggaaacatttaatcatctcgcgaactggttaagggacgtgaggcaatttgcaaaggacaacatgacaataatgctagttggaaacaaatgtgatctatctcagaggcgtaccgtgagctatgaggaaggtaggaagtttgcaaatgagcatggtctgatctttgtggaggcatctgccaaaactgcacaaaatgttgaggagggtttcgttcagactgctggagtcatatacaagaaaatccaggatggcgccttctaataataagctgaaattgcaaaagtctatcatcaatttggtctgcttagtgaataatgagcacctggtgaacaagtgctggtaggcctggcctacttcctgcgtggatatttatgtagctgtgtgtttactacaaatcaagcagggacacctttaggctgattcaagagtgctatctgctatgttttttttttttgagggtgtgctatctgctatgtgatcactatgttgcgctgttcaataatcaacaatttcagtccagttct

SEQ ID NO: 12926 - protein, 431 aa, Triticum aestivum
  peptide (1)..(431): Ceres Seq. ID no. 14301476
  misc_feature (292)..(424): Pfam Name: Pfam Description:  Ras family
  misc_feature (48)..(289): NCBI GI NO: 34902306 NR Description: Putative allene oxide synthase
  misc_feature (48)..(289): NCBI GI NO: 32351269 NR Description: allene oxide synthase
  misc_feature (51)..(293): NCBI GI NO: 39980758 NR Description: allene oxide synthase [Zea mays]
  misc_feature (48)..(289): NCBI GI NO: 16506652 NR Description: allene oxide synthase [Oryza sativa]
  misc_feature (51)..(290): NCBI GI NO: 7452981 NR Description: allene oxide synthase
  misc_feature (51)..(290): NCBI GI NO: 28569578 NR Description: allene oxide synthase [Triticum aestivum]
  misc_feature (32)..(293): NCBI GI NO: 7452979 NR Description: allene oxide synthase
  misc_feature (292)..(431): NCBI GI NO: 1346957 NR Description: RAS-RELATED PROTEIN RAB-2-B
  misc_feature (9)..(286): NCBI GI NO: 7677376 NR Description: allene oxide synthase [Lycopersicon esculentum]
  misc_feature (9)..(286): NCBI GI NO: 20160364 NR Description: allene oxide synthase [Solanum tuberosum]
DQLQTSYSLELSIAFGVRLALAHPAMTSKVANSSGSNNADAKLSPSGLPVREVPGGYGVPFLSPLRDRLDYYYFQGAEEYFRSRIARNGGATVLRVNMPPGPFITTDFRVVAFLDARSFSVLLDDAKVDKTDTLDGTFMPSLALFGGYRPLAFLDAADPHHAALKRVMISLAAARMHHVAPAFRTAFGAVFDAADAGLGDGPVQFNKLNEHHMFDFTCSALFGGTPPSKAMGDGAVTKAIKWLGVQLHPLASKIIKPWLLEDLLLHTFRLPPLLVRRDYADLTAYFAEATIDTEVDVFASKMITVDRKPIKLQIWDTPGEDRFRSITRSYYDEVDGALLVYDITRRETFNHLANWLRDVRQFAKDNMTIMLVGNKCDLSQRRTVSYEEGRKFANEHGLIFVEASAKTAQNVEEGFVQTAGVIYKKIQDGAF

SEQ ID NO: 12927 - protein, 406 aa, Triticum aestivum
  peptide (1)..(406): Ceres Seq. ID no. 14301477
  misc_feature (267)..(399): Pfam Name: Pfam Description:  Ras family
  misc_feature (23)..(264): NCBI GI NO: 34902306 NR Description: Putative allene oxide synthase
  misc_feature (23)..(264): NCBI GI NO: 32351269 NR Description: allene oxide synthase
  misc_feature (26)..(268): NCBI GI NO: 39980758 NR Description: allene oxide synthase [Zea mays]
  misc_feature (23)..(264): NCBI GI NO: 16506652 NR Description: allene oxide synthase [Oryza sativa]
  misc_feature (26)..(265): NCBI GI NO: 7452981 NR Description: allene oxide synthase
  misc_feature (26)..(265): NCBI GI NO: 28569578 NR Description: allene oxide synthase [Triticum aestivum]
  misc_feature (7)..(268): NCBI GI NO: 7452979 NR Description: allene oxide synthase
  misc_feature (267)..(406): NCBI GI NO: 1346957 NR Description: RAS-RELATED PROTEIN RAB-2-B
  misc_feature (1)..(261): NCBI GI NO: 7677376 NR Description: allene oxide synthase [Lycopersicon esculentum]
  misc_feature (1)..(261): NCBI GI NO: 20160364 NR Description: allene oxide synthase [Solanum tuberosum]
MTSKVANSSGSNNADAKLSPSGLPVREVPGGYGVPFLSPLRDRLDYYYFQGAEEYFRSRIARNGGATVLRVNMPPGPFITTDFRVVAFLDARSFSVLLDDAKVDKTDTLDGTFMPSLALFGGYRPLAFLDAADPHHAALKRVMISLAAARMHHVAPAFRTAFGAVFDAADAGLGDGPVQFNKLNEHHMFDFTCSALFGGTPPSKAMGDGAVTKAIKWLGVQLHPLASKIIKPWLLEDLLLHTFRLPPLLVRRDYADLTAYFAEATIDTEVDVFASKMITVDRKPIKLQIWDTPGEDRFRSITRSYYDEVDGALLVYDITRRETFNHLANWLRDVRQFAKDNMTIMLVGNKCDLSQRRTVSYEEGRKFANEHGLIFVEASAKTAQNVEEGFVQTAGVIYKKIQDGAF

SEQ ID NO: 12928 - protein, 334 aa, Triticum aestivum
  peptide (1)..(334): Ceres Seq. ID no. 14301478
  misc_feature (195)..(327): Pfam Name: Pfam Description:  Ras family
  misc_feature (1)..(192): NCBI GI NO: 34902306 NR Description: Putative allene oxide synthase
  misc_feature (1)..(192): NCBI GI NO: 32351269 NR Description: allene oxide synthase
  misc_feature (1)..(196): NCBI GI NO: 39980758 NR Description: allene oxide synthase [Zea mays]
  misc_feature (1)..(192): NCBI GI NO: 16506652 NR Description: allene oxide synthase [Oryza sativa]
  misc_feature (1)..(193): NCBI GI NO: 7452981 NR Description: allene oxide synthase
  misc_feature (1)..(193): NCBI GI NO: 28569578 NR Description: allene oxide synthase [Triticum aestivum]
  misc_feature (1)..(196): NCBI GI NO: 7452979 NR Description: allene oxide synthase
  misc_feature (195)..(334): NCBI GI NO: 1346957 NR Description: RAS-RELATED PROTEIN RAB-2-B
  misc_feature (1)..(189): NCBI GI NO: 7677376 NR Description: allene oxide synthase [Lycopersicon esculentum]
  misc_feature (1)..(189): NCBI GI NO: 20160364 NR Description: allene oxide synthase [Solanum tuberosum]
MPPGPFITTDFRVVAFLDARSFSVLLDDAKVDKTDTLDGTFMPSLALFGGYRPLAFLDAADPHHAALKRVMISLAAARMHHVAPAFRTAFGAVFDAADAGLGDGPVQFNKLNEHHMFDFTCSALFGGTPPSKAMGDGAVTKAIKWLGVQLHPLASKIIKPWLLEDLLLHTFRLPPLLVRRDYADLTAYFAEATIDTEVDVFASKMITVDRKPIKLQIWDTPGEDRFRSITRSYYDEVDGALLVYDITRRETFNHLANWLRDVRQFAKDNMTIMLVGNKCDLSQRRTVSYEEGRKFANEHGLIFVEASAKTAQNVEEGFVQTAGVIYKKIQDGAF

SEQ ID NO: 12929 - DNA, 864 bp, Triticum aestivum
  misc_feature (1)..(864): Ceres Seq. ID no. 12585335
attactcccccgcagctcacggggcgaggcatccatcgattagccgttcccgactcggcgaaaggactgtctcgccgccgccgccggccgacgaggaggaggccaagatgttcttccacatcgtgctggagcggaacatgcagctgcacccgcggcacttcggccctcacctccgcgacaagctcgtcgccaagctcatgaaggacgtcgagggcacctgcagcgggcggcacggcttcgtcgtggcgatcacgggggtggaggacatcggcaaggggctcatccgggagggcacgggcttcgtcacgttccccgtcaagtaccagtgcgtcgtcttccgccccttcaaaggcgagatcctcgaggccgtcgtcaccatggtcaacaagatggggttcttcgcagaggctgggcctgtgcagatctttgtgtcaaaccatttgattcctgacgatatggagttccaatctggtgatgtgccaaactacacgacttctgatggatcggtgaaaattcaaaaagaaagtgaggttcgtctgaagattataggcactcgtgttgacgcaacagaaattttttgcatcggcacgataaaagacgactttctgggtgttatcagtgatcctggtggagcgctgtaaatgatccaaagaagactcggcatgctctccaacttccgcatcatcatatatctgggaagagtccccaaggaaggttgcgactgatctgtaatttgtgtcctgatgtaaaatgtgatgtcatgcctatctaatggaagtcagggtactgctagtgttaaaaaaaagtaactggcacctgtattatcgtaactatgatcttttctaattgtggtggttgatatgt

SEQ ID NO: 12930 - protein, 212 aa, Triticum aestivum
  peptide (1)..(212): Ceres Seq. ID no. 12585336
  misc_feature (113)..(195): Pfam Name: Pfam Description:  S1 RNA binding domain
  misc_feature (36)..(208): NCBI GI NO: 1173137 NR Description: DNA-DIRECTED RNA POLYMERASE II 19 KD POLYPEPTIDE
  misc_feature (36)..(211): NCBI GI NO: 15237831 NR Description: RNA polymerase II; protein id: At5g59180.1
  misc_feature (36)..(207): NCBI GI NO: 24647020 NR Description: CG31155-PA [Drosophila melanogaster]
  misc_feature (36)..(206): NCBI GI NO: 4505947 NR Description: DNA directed RNA polymerase II polypeptide G
  misc_feature (36)..(206): NCBI GI NO: 28278826 NR Description: Unknown (protein for MGC:55297) [Danio rerio]
  misc_feature (35)..(205): NCBI GI NO: 31241005 NR Description: ENSANGP00000017695 [Anopheles gambiae]
  misc_feature (36)..(204): NCBI GI NO: 39595528 NR Description: Hypothetical protein CBG04195
  misc_feature (35)..(204): NCBI GI NO: 17510349 NR Description: RNA polymerase Rpb7
  misc_feature (37)..(205): NCBI GI NO: 19114885 NR Description: RNA polymerase II subunit rpb7
  misc_feature (36)..(203): NCBI GI NO: 12655858 NR Description: RNA polymerase II subunit 7 [Candida albicans]
YSPAAHGARHPSISRSRLGERTVSPPPPADEEEAKMFFHIVLERNMQLHPRHFGPHLRDKLVAKLMKDVEGTCSGRHGFVVAITGVEDIGKGLIREGTGFVTFPVKYQCVVFRPFKGEILEAVVTMVNKMGFFAEAGPVQIFVSNHLIPDDMEFQSGDVPNYTTSDGSVKIQKESEVRLKIIGTRVDATEIFCIGTIKDDFLGVISDPGGAL

SEQ ID NO: 12931 - protein, 177 aa, Triticum aestivum
  peptide (1)..(177): Ceres Seq. ID no. 12585337
  misc_feature (78)..(160): Pfam Name: Pfam Description:  S1 RNA binding domain
  misc_feature (1)..(173): NCBI GI NO: 1173137 NR Description: DNA-DIRECTED RNA POLYMERASE II 19 KD POLYPEPTIDE
  misc_feature (1)..(176): NCBI GI NO: 15237831 NR Description: RNA polymerase II; protein id: At5g59180.1
  misc_feature (1)..(172): NCBI GI NO: 24647020 NR Description: CG31155-PA [Drosophila melanogaster]
  misc_feature (1)..(171): NCBI GI NO: 4505947 NR Description: DNA directed RNA polymerase II polypeptide G
  misc_feature (1)..(171): NCBI GI NO: 28278826 NR Description: Unknown (protein for MGC:55297) [Danio rerio]
  misc_feature (1)..(170): NCBI GI NO: 31241005 NR Description: ENSANGP00000017695 [Anopheles gambiae]
  misc_feature (1)..(169): NCBI GI NO: 39595528 NR Description: Hypothetical protein CBG04195
  misc_feature (1)..(169): NCBI GI NO: 17510349 NR Description: RNA polymerase Rpb7
  misc_feature (2)..(170): NCBI GI NO: 19114885 NR Description: RNA polymerase II subunit rpb7
  misc_feature (1)..(168): NCBI GI NO: 12655858 NR Description: RNA polymerase II subunit 7 [Candida albicans]
MFFHIVLERNMQLHPRHFGPHLRDKLVAKLMKDVEGTCSGRHGFVVAITGVEDIGKGLIREGTGFVTFPVKYQCVVFRPFKGEILEAVVTMVNKMGFFAEAGPVQIFVSNHLIPDDMEFQSGDVPNYTTSDGSVKIQKESEVRLKIIGTRVDATEIFCIGTIKDDFLGVISDPGGAL

SEQ ID NO: 12932 - protein, 167 aa, Triticum aestivum
  peptide (1)..(167): Ceres Seq. ID no. 12585338
  misc_feature (68)..(150): Pfam Name: Pfam Description:  S1 RNA binding domain
  misc_feature (1)..(163): NCBI GI NO: 1173137 NR Description: DNA-DIRECTED RNA POLYMERASE II 19 KD POLYPEPTIDE
  misc_feature (1)..(166): NCBI GI NO: 15237831 NR Description: RNA polymerase II; protein id: At5g59180.1
  misc_feature (1)..(162): NCBI GI NO: 24647020 NR Description: CG31155-PA [Drosophila melanogaster]
  misc_feature (1)..(161): NCBI GI NO: 4505947 NR Description: DNA directed RNA polymerase II polypeptide G
  misc_feature (1)..(161): NCBI GI NO: 28278826 NR Description: Unknown (protein for MGC:55297) [Danio rerio]
  misc_feature (1)..(160): NCBI GI NO: 31241005 NR Description: ENSANGP00000017695 [Anopheles gambiae]
  misc_feature (1)..(159): NCBI GI NO: 39595528 NR Description: Hypothetical protein CBG04195
  misc_feature (1)..(159): NCBI GI NO: 17510349 NR Description: RNA polymerase Rpb7
  misc_feature (1)..(160): NCBI GI NO: 19114885 NR Description: RNA polymerase II subunit rpb7
  misc_feature (1)..(158): NCBI GI NO: 12655858 NR Description: RNA polymerase II subunit 7 [Candida albicans]
MQLHPRHFGPHLRDKLVAKLMKDVEGTCSGRHGFVVAITGVEDIGKGLIREGTGFVTFPVKYQCVVFRPFKGEILEAVVTMVNKMGFFAEAGPVQIFVSNHLIPDDMEFQSGDVPNYTTSDGSVKIQKESEVRLKIIGTRVDATEIFCIGTIKDDFLGVISDPGGAL

SEQ ID NO: 12933 - DNA, 836 bp, Triticum aestivum
  misc_feature (1)..(836): Ceres Seq. ID no. 13655262
aacatcctaatcgaaaaaaaaagaatactagtcgctggacctcatcgatggccgtccggtgtcacgctgctgctaccttggtctcgtcccgagcgcacctgtcctcgtacctcccgcccctcctcccctccgcgcgaccccgacccaggacgacccgcagcggcggcggcagctacaggcgggccgccgttcgcgccatgggcgccgcgccgtcttcgccctcgccgtccggacaagccccagggaaagcggataacgcgtctctgagtgatgaggagttgaagaagcgcctcacaaaagaacagtattacgtcactcggcagaagggaactgagagggcattcacaggggaatactggaacactaaaaccccaggcatctaccattgcatctgctgtgacacccctctgtttgagtcatcaaccaagtttgatagtggtactggatggccgtcctattaccagccggttggcgacaatgtgaaaagcaagcttgatatgtcgatcttcttcatgcctcggaccgagtccctgtgtgccgtctgcgacgctcacctggggcatgttttcgacgacgggccaccgccgactgggaagagatattgcatcaacagcgcgtctctgaagtttaagccccagtagtccctggaagaagaatcaagatgcaagcaccagtgcgtcccatgtaaattttggttttggtatgaactatttccagtgtagtagcctagtccgcccggtctgcgcatgtaaattgataatttccaggtttgtaatttgtaaagccatttgtccgaaacatctgcatgttcctccatgagcagtaccgtttggccc

SEQ ID NO: 12934 - protein, 212 aa, Triticum aestivum
  peptide (1)..(212): Ceres Seq. ID no. 15219722
  misc_feature (90)..(208): Pfam Name: Pfam Description:  SelR domain
  misc_feature (62)..(208): NCBI GI NO: 30695559 NR Description: transcriptional regulator -related
  misc_feature (66)..(208): NCBI GI NO: 21593253 NR Description: transcriptional regulator, putative
  misc_feature (89)..(212): NCBI GI NO: 22298757 NR Description: ORF_ID:tlr1214~hypothetical protein
  misc_feature (89)..(209): NCBI GI NO: 37523588 NR Description: hypothetical protein gll4019
  misc_feature (89)..(212): NCBI GI NO: 33597872 NR Description: peptide methionine sulfoxide reductase
  misc_feature (89)..(209): NCBI GI NO: 23040381 NR Description: hypothetical protein
  misc_feature (89)..(212): NCBI GI NO: 33594433 NR Description: peptide methionine sulfoxide reductase
  misc_feature (75)..(212): NCBI GI NO: 28893017 NR Description: RIKEN cDNA D430026P16 gene [Mus musculus]
  misc_feature (68)..(211): NCBI GI NO: 37620216 NR Description: hypothetical protein LOC253827 [Homo sapiens]
  misc_feature (89)..(212): NCBI GI NO: 37523908 NR Description: hypothetical protein glr4339
HPNRKKKNTSRWTSSMAVRCHAAATLVSSRAHLSSYLPPLLPSARPRPRTTRSGGGSYRRAAVRAMGAAPSSPSPSGQAPGKADNASLSDEELKKRLTKEQYYVTRQKGTERAFTGEYWNTKTPGIYHCICCDTPLFESSTKFDSGTGWPSYYQPVGDNVKSKLDMSIFFMPRTESLCAVCDAHLGHVFDDGPPPTGKRYCINSASLKFKPQ

SEQ ID NO: 12935 - protein, 197 aa, Triticum aestivum
  peptide (1)..(197): Ceres Seq. ID no. 15219723
  misc_feature (75)..(193): Pfam Name: Pfam Description:  SelR domain
  misc_feature (47)..(193): NCBI GI NO: 30695559 NR Description: transcriptional regulator -related
  misc_feature (51)..(193): NCBI GI NO: 21593253 NR Description: transcriptional regulator, putative
  misc_feature (74)..(197): NCBI GI NO: 22298757 NR Description: ORF_ID:tlr1214~hypothetical protein
  misc_feature (74)..(194): NCBI GI NO: 37523588 NR Description: hypothetical protein gll4019
  misc_feature (74)..(197): NCBI GI NO: 33597872 NR Description: peptide methionine sulfoxide reductase
  misc_feature (74)..(194): NCBI GI NO: 23040381 NR Description: hypothetical protein
  misc_feature (74)..(197): NCBI GI NO: 33594433 NR Description: peptide methionine sulfoxide reductase
  misc_feature (60)..(197): NCBI GI NO: 28893017 NR Description: RIKEN cDNA D430026P16 gene [Mus musculus]
  misc_feature (53)..(196): NCBI GI NO: 37620216 NR Description: hypothetical protein LOC253827 [Homo sapiens]
  misc_feature (74)..(197): NCBI GI NO: 37523908 NR Description: hypothetical protein glr4339
MAVRCHAAATLVSSRAHLSSYLPPLLPSARPRPRTTRSGGGSYRRAAVRAMGAAPSSPSPSGQAPGKADNASLSDEELKKRLTKEQYYVTRQKGTERAFTGEYWNTKTPGIYHCICCDTPLFESSTKFDSGTGWPSYYQPVGDNVKSKLDMSIFFMPRTESLCAVCDAHLGHVFDDGPPPTGKRYCINSASLKFKPQ

SEQ ID NO: 12936 - protein, 147 aa, Triticum aestivum
  peptide (1)..(147): Ceres Seq. ID no. 15219724
  misc_feature (25)..(143): Pfam Name: Pfam Description:  SelR domain
  misc_feature (1)..(143): NCBI GI NO: 30695559 NR Description: transcriptional regulator -related
  misc_feature (1)..(143): NCBI GI NO: 21593253 NR Description: transcriptional regulator, putative
  misc_feature (24)..(147): NCBI GI NO: 22298757 NR Description: ORF_ID:tlr1214~hypothetical protein
  misc_feature (24)..(144): NCBI GI NO: 37523588 NR Description: hypothetical protein gll4019
  misc_feature (24)..(147): NCBI GI NO: 33597872 NR Description: peptide methionine sulfoxide reductase
  misc_feature (24)..(144): NCBI GI NO: 23040381 NR Description: hypothetical protein
  misc_feature (24)..(147): NCBI GI NO: 33594433 NR Description: peptide methionine sulfoxide reductase
  misc_feature (10)..(147): NCBI GI NO: 28893017 NR Description: RIKEN cDNA D430026P16 gene [Mus musculus]
  misc_feature (3)..(146): NCBI GI NO: 37620216 NR Description: hypothetical protein LOC253827 [Homo sapiens]
  misc_feature (24)..(147): NCBI GI NO: 37523908 NR Description: hypothetical protein glr4339
MGAAPSSPSPSGQAPGKADNASLSDEELKKRLTKEQYYVTRQKGTERAFTGEYWNTKTPGIYHCICCDTPLFESSTKFDSGTGWPSYYQPVGDNVKSKLDMSIFFMPRTESLCAVCDAHLGHVFDDGPPPTGKRYCINSASLKFKPQ

SEQ ID NO: 12937 - DNA, 816 bp, Triticum aestivum
  misc_feature (1)..(816): Ceres Seq. ID no. 12615300
aacccaaacccccgctaagcatcagcagcagtgcagcacctcccttctacctcctctgctctgcattcctccttccagctccagccgcaatcaatggccgccatgaagatcaccctcctcgccgtggccgcgatggccgtcttactaggcagcgcgtcagcggtaacctacaacgtcggcgatcagggcggttgggccctcagcaccgactacagcaactgggtgtccggcaagaagttcaacgtgggtgatgacatcgtcttcaagtactcgaccccgacgcacgacgtggtcgaggtcagcaaggccggctacgactcctgcagcaccgacggcgccatcaacaccttaacctccggcaacgacgtcatctccctcaacgccaccggcacccgctacttcatctgtggcgtccctaaccattgcagccccgccgccgccgccagcatgaaggtcgtgatcgacgtcgcctcgggctcctcctcgccgtcgtcacccatgccagctgcaggtcctggcgcgagcaactctcccccggcgccgccctccaacgccgctacctccgtcggtgccacagcaggatttggcctcgtcgccctcctggcggccggtctcatggcttgaacgcatatattgatcagctgccgcgcgcacatacgactttatcttttgttattaactactatactgtagttattatcacgggtgaatacatgtattcttttttagagcgagaatgtgatagttacttgtatctatcacgtctatatgtaatctgcaggccttcatgtctttttatataatgattctagactg

SEQ ID NO: 12938 - protein, 176 aa, Triticum aestivum; identical to SEQ ID NO: 6581
  peptide (1)..(176): Ceres Seq. ID no. 12615301
  misc_feature (34)..(115): Pfam Name: Pfam Description:  Plastocyanin-like domain
  misc_feature (1)..(176): NCBI GI NO: 4104058 NR Description: blue copper-binding protein homolog
  misc_feature (1)..(176): NCBI GI NO: 37651973 NR Description: blue copper binding protein
  misc_feature (2)..(176): NCBI GI NO: 38636763 NR Description: putative blue copper binding protein
  misc_feature (1)..(176): NCBI GI NO: 38636760 NR Description: putative blue copper binding protein
  misc_feature (1)..(175): NCBI GI NO: 38636761 NR Description: putative blue copper binding protein
  misc_feature (2)..(175): NCBI GI NO: 38636764 NR Description: putative blue copper binding protein
  misc_feature (1)..(175): NCBI GI NO: 38636838 NR Description: putative blue copper binding protein
  misc_feature (1)..(163): NCBI GI NO: 38346158 NR Description: OSJNBa0079A21.5
  misc_feature (1)..(175): NCBI GI NO: 34900010 NR Description: P0039H02.23
  misc_feature (8)..(174): NCBI GI NO: 34915492 NR Description: contains ESTsD24614

SEQ ID NO: 12939 - protein, 173 aa, Triticum aestivum; identical to SEQ ID NO: 6582
  peptide (1)..(173): Ceres Seq. ID no. 12615302
  misc_feature (31)..(112): Pfam Name: Pfam Description:  Plastocyanin-like domain
  misc_feature (1)..(173): NCBI GI NO: 4104058 NR Description: blue copper-binding protein homolog
  misc_feature (1)..(173): NCBI GI NO: 37651973 NR Description: blue copper binding protein
  misc_feature (1)..(173): NCBI GI NO: 38636763 NR Description: putative blue copper binding protein
  misc_feature (1)..(173): NCBI GI NO: 38636760 NR Description: putative blue copper binding protein
  misc_feature (1)..(172): NCBI GI NO: 38636761 NR Description: putative blue copper binding protein
  misc_feature (1)..(172): NCBI GI NO: 38636764 NR Description: putative blue copper binding protein
  misc_feature (1)..(172): NCBI GI NO: 38636838 NR Description: putative blue copper binding protein
  misc_feature (1)..(160): NCBI GI NO: 38346158 NR Description: OSJNBa0079A21.5
  misc_feature (1)..(172): NCBI GI NO: 34900010 NR Description: P0039H02.23
  misc_feature (5)..(171): NCBI GI NO: 34915492 NR Description: contains ESTsD24614

SEQ ID NO: 12940 - protein, 163 aa, Triticum aestivum; identical to SEQ ID NO: 6583
  peptide (1)..(163): Ceres Seq. ID no. 12615303
  misc_feature (21)..(102): Pfam Name: Pfam Description:  Plastocyanin-like domain
  misc_feature (1)..(163): NCBI GI NO: 4104058 NR Description: blue copper-binding protein homolog
  misc_feature (1)..(163): NCBI GI NO: 37651973 NR Description: blue copper binding protein
  misc_feature (1)..(163): NCBI GI NO: 38636763 NR Description: putative blue copper binding protein
  misc_feature (1)..(163): NCBI GI NO: 38636760 NR Description: putative blue copper binding protein
  misc_feature (1)..(162): NCBI GI NO: 38636761 NR Description: putative blue copper binding protein
  misc_feature (1)..(162): NCBI GI NO: 38636764 NR Description: putative blue copper binding protein
  misc_feature (1)..(162): NCBI GI NO: 38636838 NR Description: putative blue copper binding protein
  misc_feature (1)..(150): NCBI GI NO: 38346158 NR Description: OSJNBa0079A21.5
  misc_feature (1)..(162): NCBI GI NO: 34900010 NR Description: P0039H02.23
  misc_feature (1)..(161): NCBI GI NO: 34915492 NR Description: contains ESTsD24614

SEQ ID NO: 12941 - DNA, 924 bp, Triticum aestivum
  misc_feature (1)..(924): Ceres Seq. ID no. 15173118
gtaacaaatttgtttttttaggggttggtaacaagtaaacagggcacattcccggctgtctctactcccgggcggcgtgggcccgagatgcaggcgtggttctccggctctgggccctcgccctcctcgtcggcggcgtcttcgcagccgccgccatctctgctcgcggagtggaactcctacgccgccgcccgctccgccgaggaggatgtcggcggaggattcgggatcgacatcgaggccgccgtccgttccgccaacgaccgcgtcaccggcaccttcggcgtggtatctaaaggagttagagggttccctggcagcttccagtcctcaacaagcagtgttccatctggcaaatctctcatgtatttcggtctttttcttgccagtggcattttcctagttttcatcgcgttcacaatattcctgccagtcatggtaataatgcctcaaaagtttgcgatctgtttcacgatgggatgtgccttcatcattggatctttctttgcattgaaaggaccgaagaatcagctctatcatatgatttccagagagaggttacctttcaccattggatttgttggcagcatgtttgctaccatctatgtgtcaatggtgctccatagctacatactttctgttttcttctcttgtcttcagatccttgcgctagtatactatgccatctcatacttccctggtgggtctgctggaatgaagtttctgtcatctacccttgtggcctcagtgttgagatgcttcgggcgatgagttcacccgttagttgctctcacccatctgtctcgccctgtgttcagctcagtgacaattttttttcttttgctttgacatggagagtgtgtgtcaaagatgaccttggagcttgtgttcacagatatacatgcatgtccaacttaccgatac

SEQ ID NO: 12942 - protein, 227 aa, Triticum aestivum
  peptide (1)..(227): Ceres Seq. ID no. 15173119
  misc_feature (2)..(227): NCBI GI NO: 18416771 NR Description: expressed protein [Arabidopsis thaliana]
  misc_feature (2)..(227): NCBI GI NO: 15241114 NR Description: expressed protein [Arabidopsis thaliana]
  misc_feature (68)..(227): NCBI GI NO: 7486785 NR Description: hypothetical protein M3E9
  misc_feature (2)..(67): NCBI GI NO: 7486785 NR Description: hypothetical protein M3E9
  misc_feature (80)..(227): NCBI GI NO: 23619167 NR Description: hypothetical protein, conserved
  misc_feature (92)..(220): NCBI GI NO: 6319366 NR Description: similar to mammalian syntaxin 5; Sft2p
  misc_feature (90)..(213): NCBI GI NO: 40746734 NR Description: hypothetical protein AN1297.2
  misc_feature (76)..(223): NCBI GI NO: 17532001 NR Description: mammalian syntaxin 5 like (25.7 kD) (2J246)
  misc_feature (77)..(223): NCBI GI NO: 39597537 NR Description: Hypothetical protein CBG03219
  misc_feature (79)..(217): NCBI GI NO: 19115465 NR Description: putative membrane protein required for ER to Golgitransport by similarity to
MQAWFSGSGPSPSSSAASSQPPPSLLAEWNSYAAARSAEEDVGGGFGIDIEAAVRSANDRVTGTFGVVSKGVRGFPGSFQSSTSSVPSGKSLMYFGLFLASGIFLVFIAFTIFLPVMVIMPQKFAICFTMGCAFIIGSFFALKGPKNQLYHMISRERLPFTIGFVGSMFATIYVSMVLHSYILSVFFSCLQILALVYYAISYFPGGSAGMKFLSSTLVASVLRCFGR

SEQ ID NO: 12943 - protein, 135 aa, Triticum aestivum
  peptide (1)..(135): Ceres Seq. ID no. 15173120
  misc_feature (1)..(135): NCBI GI NO: 18416771 NR Description: expressed protein [Arabidopsis thaliana]
  misc_feature (1)..(135): NCBI GI NO: 15241114 NR Description: expressed protein [Arabidopsis thaliana]
  misc_feature (1)..(135): NCBI GI NO: 7486785 NR Description: hypothetical protein M3E9
  misc_feature (1)..(135): NCBI GI NO: 23619167 NR Description: hypothetical protein, conserved
  misc_feature (1)..(128): NCBI GI NO: 6319366 NR Description: similar to mammalian syntaxin 5; Sft2p
  misc_feature (1)..(121): NCBI GI NO: 40746734 NR Description: hypothetical protein AN1297.2
  misc_feature (1)..(131): NCBI GI NO: 17532001 NR Description: mammalian syntaxin 5 like (25.7 kD) (2J246)
  misc_feature (1)..(131): NCBI GI NO: 39597537 NR Description: Hypothetical protein CBG03219
  misc_feature (1)..(125): NCBI GI NO: 19115465 NR Description: putative membrane protein required for ER to Golgitransport by similarity to
  misc_feature (8)..(131): NCBI GI NO: 19571762 NR Description: similar to C18E9.10 [Tetraodon nigroviridis]
MYFGLFLASGIFLVFIAFTIFLPVMVIMPQKFAICFTMGCAFIIGSFFALKGPKNQLYHMISRERLPFTIGFVGSMFATIYVSMVLHSYILSVFFSCLQILALVYYAISYFPGGSAGMKFLSSTLVASVLRCFGR

SEQ ID NO: 12944 - DNA, 813 bp, Triticum aestivum
  misc_feature (1)..(813): Ceres Seq. ID no. 12584972
  misc_feature (199)..(199): n is a, c, t, g, unknown, or other
caattttcattccgaagtccctttcaacgagagagagggagagagagaggagcagttagttgagacccgagacggagatggatctgctggagaggagcgcagccactattaaggcggagcagggggaggcccagcgcaaggaagccgagaggaaggagcaggagcacaaggagcaggagacccagcagccagggctcancggccgacccccgctcgccaacggcaggtctggaatgttgccaatgtcgagccctccagcaaatccgggacagcttaccattttttatggtgggtcagtatgtgtgtatgactcagtgccaccagagaaggctcaagcaatcatgctcattgcagcagcagcagctgcggcctcaaaaagcaatggcaccactgctgttaagcctccagcgatgtctgcgaccaatgctatccaagccatgcttacgcggtcgctctcactccagagcacttctgtagcaaatggacaacctcaggctgtcgcggatcctggctcgatttgcaagcttcaggctgatcttcccatcgccaggagacactcccttcagcgcttcctggagaagcgccgtgacaggttagcatgaatgaagagtacaagtagcagtctacgttcttctggagcgtattatgagtattatgacccccttacatttgttgttttgtgtttccacatgctgtgtatggtgtaccacagcatttagaaatgcatttgtatgaggccaagtcttcaaaaccaagtcttgtacttctgtgccccgttcatgatcaatccaaattatgataaccgttctattt

SEQ ID NO: 12945 - protein, 174 aa, Triticum aestivum
  peptide (1)..(174): Ceres Seq. ID no. 12584973
  misc_feature (59)..(92): Pfam Name: Pfam Description:  ZIM motif
  misc_feature (1)..(173): NCBI GI NO: 32488878 NR Description: OSJNBa0060D06.16
  misc_feature (50)..(173): NCBI GI NO: 15242096 NR Description: putative protein; protein id: At5g20900
  misc_feature (22)..(173): NCBI GI NO: 23237931 NR Description: contains ESTsC26074
  misc_feature (65)..(173): NCBI GI NO: 29788814 NR Description: unknown protein
  misc_feature (60)..(147): NCBI GI NO: 39652276 NR Description: hypothetical protein [Solanum tuberosum]
  misc_feature (40)..(173): NCBI GI NO: 25406068 NR Description: hypothetical protein F5A18.12
  misc_feature (40)..(173): NCBI GI NO: 17064878 NR Description: Unknown protein [Arabidopsis thaliana]
  misc_feature (59)..(173): NCBI GI NO: 18410737 NR Description: expressed protein; protein id: At1g74950
  misc_feature (59)..(173): NCBI GI NO: 21592605 NR Description: unknown [Arabidopsis thaliana]
  misc_feature (41)..(41): Xaa is any aa, unknown or other
MDLLERSAATIKAEQGEAQRKEAERKEQEHKEQETQQPGLXGRPPLANGRSGMLPMSSPPANPGQLTIFYGGSVCVYDSVPPEKAQAIMLIAAAAAAASKSNGTTAVKPPAMSATNAIQAMLTRSLSLQSTSVANGQPQAVADPGSICKLQADLPIARRHSLQRFLEKRRDRLA

SEQ ID NO: 12946 - protein, 122 aa, Triticum aestivum
  peptide (1)..(122): Ceres Seq. ID no. 12584974
  misc_feature (7)..(40): Pfam Name: Pfam Description:  ZIM motif
  misc_feature (1)..(121): NCBI GI NO: 32488878 NR Description: OSJNBa0060D06.16
  misc_feature (1)..(121): NCBI GI NO: 15242096 NR Description: putative protein; protein id: At5g20900
  misc_feature (1)..(121): NCBI GI NO: 23237931 NR Description: contains ESTsC26074
  misc_feature (13)..(121): NCBI GI NO: 29788814 NR Description: unknown protein
  misc_feature (8)..(95): NCBI GI NO: 39652276 NR Description: hypothetical protein [Solanum tuberosum]
  misc_feature (1)..(121): NCBI GI NO: 25406068 NR Description: hypothetical protein F5A18.12
  misc_feature (1)..(121): NCBI GI NO: 17064878 NR Description: Unknown protein [Arabidopsis thaliana]
  misc_feature (7)..(121): NCBI GI NO: 18410737 NR Description: expressed protein; protein id: At1g74950
  misc_feature (7)..(121): NCBI GI NO: 21592605 NR Description: unknown [Arabidopsis thaliana]
MLPMSSPPANPGQLTIFYGGSVCVYDSVPPEKAQAIMLIAAAAAAASKSNGTTAVKPPAMSATNAIQAMLTRSLSLQSTSVANGQPQAVADPGSICKLQADLPIARRHSLQRFLEKRRDRLA

SEQ ID NO: 12947 - protein, 119 aa, Triticum aestivum
  peptide (1)..(119): Ceres Seq. ID no. 12584975
  misc_feature (4)..(37): Pfam Name: Pfam Description:  ZIM motif
  misc_feature (1)..(118): NCBI GI NO: 32488878 NR Description: OSJNBa0060D06.16
  misc_feature (1)..(118): NCBI GI NO: 15242096 NR Description: putative protein; protein id: At5g20900
  misc_feature (1)..(118): NCBI GI NO: 23237931 NR Description: contains ESTsC26074
  misc_feature (10)..(118): NCBI GI NO: 29788814 NR Description: unknown protein
  misc_feature (5)..(92): NCBI GI NO: 39652276 NR Description: hypothetical protein [Solanum tuberosum]
  misc_feature (1)..(118): NCBI GI NO: 25406068 NR Description: hypothetical protein F5A18.12
  misc_feature (1)..(118): NCBI GI NO: 17064878 NR Description: Unknown protein [Arabidopsis thaliana]
  misc_feature (4)..(118): NCBI GI NO: 18410737 NR Description: expressed protein; protein id: At1g74950
  misc_feature (4)..(118): NCBI GI NO: 21592605 NR Description: unknown [Arabidopsis thaliana]
MSSPPANPGQLTIFYGGSVCVYDSVPPEKAQAIMLIAAAAAAASKSNGTTAVKPPAMSATNAIQAMLTRSLSLQSTSVANGQPQAVADPGSICKLQADLPIARRHSLQRFLEKRRDRLA

SEQ ID NO: 12948 - DNA, 688 bp, Triticum aestivum
  misc_feature (1)..(688): Ceres Seq. ID no. 12597253
acacaaactcagagcattccgatacagcgcaaccgccgccaacaccactcctagcgagtcctcgccgccggagaagcagcaagaagatggccggaaggaagggtggcgacaggaagaaggcggtgacccgctccgtgaaggctgggctccagttccccgtcggccgcatcgggcgctacctcaagaagggccgctacgcccagcgcgtcggctccggcgcccccgtctacctcgccgccgtcctcgagtacctcgccgccgaggtcctggagcttgccggcaacgcggccaaggacaacaagaagacccgcatcatcccgcgccacctgctgctggccgtccgcaacgaccaggagctcggcaggctgctggccggcgtcaccatcgcccacggcggcgtgatccccaacatcaactccgtgctgctccccaagaagtccgccgccgccgccgagaaggaggccaagtcgcccaagaagaagacctccactaagtcccccaagaagaagaccgcggccaccaaagagtagcaggccccatagcttagccagtgttgcttagatccatttctcatggactaagatgagatcctgtatgtaatgcctgctagtctgtagtgcccgtcagatttgacgagcaaggttgacattgtgatatcagtgagaatggctaaagatgcaatcatttt

SEQ ID NO: 12949 - protein, 175 aa, Triticum aestivum
  peptide (1)..(175): Ceres Seq. ID no. 12597254
  misc_feature (30)..(145): Pfam Name: Pfam Description:  Core histone H2A/H2B/H3/H4
  misc_feature (29)..(175): NCBI GI NO: 2130104 NR Description: histone H2A.9 - wheat
  misc_feature (30)..(175): NCBI GI NO: 121965 NR Description: HISTONE H2A.1
  misc_feature (29)..(175): NCBI GI NO: 1161302 NR Description: histone H2A [Triticum aestivum]
  misc_feature (29)..(175): NCBI GI NO: 1076777 NR Description: histone H2A.3 - wheat
  misc_feature (29)..(175): NCBI GI NO: 1076776 NR Description: histone H2A.2 - wheat
  misc_feature (27)..(168): NCBI GI NO: 121982 NR Description: HISTONE H2A.2.2
  misc_feature (26)..(168): NCBI GI NO: 121974 NR Description: HISTONE H2A.2.1
  misc_feature (24)..(168): NCBI GI NO: 122007 NR Description: Histone H2A
  misc_feature (27)..(168): NCBI GI NO: 34914498 NR Description: putative histone H2A
  misc_feature (24)..(168): NCBI GI NO: 122003 NR Description: HISTONE H2A
TNSEHSDTAQPPPTPLLASPRRRRSSKKMAGRKGGDRKKAVTRSVKAGLQFPVGRIGRYLKKGRYAQRVGSGAPVYLAAVLEYLAAEVLELAGNAAKDNKKTRIIPRHLLLAVRNDQELGRLLAGVTIAHGGVIPNINSVLLPKKSAAAAEKEAKSPKKKTSTKSPKKKTAATKE

SEQ ID NO: 12950 - protein, 163 aa, Triticum aestivum
  peptide (1)..(163): Ceres Seq. ID no. 12597255
HKLRAFRYSATAANTTPSESSPPEKQQEDGRKEGWRQEEGGDPLREGWAPVPRRPHRALPQEGPLRPARRLRRPRLPRRRPRVPRRRGPGACRQRGQGQQEDPHHPAPPAAGRPQRPGARQAAGRRHHRPRRRDPQHQLRAAPQEVRRRRREGGQVAQEEDLH

SEQ ID NO: 12951 - protein, 147 aa, Triticum aestivum
  peptide (1)..(147): Ceres Seq. ID no. 12597256
  misc_feature (2)..(117): Pfam Name: Pfam Description:  Core histone H2A/H2B/H3/H4
  misc_feature (1)..(147): NCBI GI NO: 2130104 NR Description: histone H2A.9 - wheat
  misc_feature (2)..(147): NCBI GI NO: 121965 NR Description: HISTONE H2A.1
  misc_feature (1)..(147): NCBI GI NO: 1161302 NR Description: histone H2A [Triticum aestivum]
  misc_feature (1)..(147): NCBI GI NO: 1076777 NR Description: histone H2A.3 - wheat
  misc_feature (1)..(147): NCBI GI NO: 1076776 NR Description: histone H2A.2 - wheat
  misc_feature (1)..(140): NCBI GI NO: 121982 NR Description: HISTONE H2A.2.2
  misc_feature (1)..(140): NCBI GI NO: 121974 NR Description: HISTONE H2A.2.1
  misc_feature (1)..(140): NCBI GI NO: 122007 NR Description: Histone H2A
  misc_feature (1)..(140): NCBI GI NO: 34914498 NR Description: putative histone H2A
  misc_feature (1)..(140): NCBI GI NO: 122003 NR Description: HISTONE H2A
MAGRKGGDRKKAVTRSVKAGLQFPVGRIGRYLKKGRYAQRVGSGAPVYLAAVLEYLAAEVLELAGNAAKDNKKTRIIPRHLLLAVRNDQELGRLLAGVTIAHGGVIPNINSVLLPKKSAAAAEKEAKSPKKKTSTKSPKKKTAATKE

SEQ ID NO: 12952 - DNA, 831 bp, Triticum aestivum
  misc_feature (1)..(831): Ceres Seq. ID no. 13583556
cctaattccagaaccatcccctccgacctaggctatggctttcatcgtgtccaagctcgcgcgggcagccctcgcatcccgccccgttggagatattgctggtggcatctccccgtgtctctcccggctctatctggcggctggtaccagccgtcgcatgtttgcagctgcaggcggtcccaagtcaaaagaagcaccccgaatatttccccttgttgatgagaattccattaagtcgaaggaatccctatgggccttgtatgaatgctggtgcaagtattggggggtatcccgtgaccgtgaagagatggtccgccggttcaagtcatttgaggctactgcacagtgggtttacaaaatgaacaactctgggtgttcgcaagtgtctcaactgggcccgcatgcagatttttcagagagtgagtttgctgaggtggtgtttcctccacttcctgatgatgatgatgaagacataaaagagatggtgccaggtcaagatttgggccaggagcttgaggagcccttaaataattaattcgagaaattatgaacttgtcttactccatccgttcccaaatataagtctttctagagattcaacaagtgactacatacggagcaaaatgagtgaatctgcactctaaaatatgtctacatgcatacgtatgttgtagtccatttgaaatgtctaaaaagacttatatgtaggaacggatgagtatttggttgtggtaatactgtggtactgggattattgttgttgtctggttgttctcatggaaccaaattagaattgaaataactttgtgttattgctcaaaaaaaaaaaaa

SEQ ID NO: 12953 - protein, 166 aa, Triticum aestivum; identical to SEQ ID NO: 6609
  peptide (1)..(166): Ceres Seq. ID no. 13583557
  misc_feature (61)..(133): NCBI GI NO: 34897042 NR Description: hypothetical protein
  misc_feature (63)..(135): NCBI GI NO: 40786566 NR Description: putative cysteine proteinase
  misc_feature (1)..(111): NCBI GI NO: 38605767 NR Description: OSJNBa0044K18.10

SEQ ID NO: 12954 - protein, 125 aa, Triticum aestivum; identical to SEQ ID NO: 6610
  peptide (1)..(125): Ceres Seq. ID no. 13583558
  misc_feature (20)..(92): NCBI GI NO: 34897042 NR Description: hypothetical protein
  misc_feature (22)..(94): NCBI GI NO: 40786566 NR Description: putative cysteine proteinase
  misc_feature (1)..(70): NCBI GI NO: 38605767 NR Description: OSJNBa0044K18.10

SEQ ID NO: 12955 - DNA, 1112 bp, Triticum aestivum
  misc_feature (1)..(1112): Ceres Seq. ID no. 13654956
tccccgtgcactcgtccctccccttccccctttctcttttcgctccggcgagggcgacggcagatctgcgccgggcctaggatggtgaacgtcaactgggagctgcagggctgctgccagcacaaccaggtcgtcttcatcgccgccgtcggcgtctccaccgtcgtcatcctcgccctgtggaggacgttcctgctcacgcctttcaagctcatcaccgtcttcctccacgagaccagccacgccctcgcctgcaagctcacctgcggagatgttgagggcatgcaggtccatgctaatgagggtggtgttacacaaactcgcggtggcatttactggataatcttgcctgctggatatctgggttcatcattttggggaatggtgttcatactttcatctacacatctcctagctacaagaattgcggctggttgcttcatacttgcattaattattgttctctttgttgccaaaaattggtttctgcgctggctctgcattggtttcatcatattcattgctgttgtctgggttatacaagaatttacaactttccatgttctgaagtatgttattctattcataggtgttatgaatagcttattttcagtttacgatatctatgatgacaccatatcccgaagagtgaattcaagtgatgctgagaaatttgctgaaatctgcccttgcccttgcaatggcgttggatggggtgttatatggggattcatctcatttatttttctctgtgcgtcgatatatcttggactggttatattgtcctgagggcttgcacctcccatatattagcattttgacctgacagcgcaggcggtgcttgttgtttgtttccattggtccggacattggctgcagcttgtattgatccatgggggacaggttgttccaaatgtatacatagggcaatgagtttatgccataattaaggttgattgaaattggataggggcggttattgatgcgattcttccttgcgtttatagctcatgtagatggcatttgatatgcacagctgatatagtattatgttgttgttgagatggtattcatggaccaactggaatttattcagcaatgcctgcagtctc

SEQ ID NO: 12956 - protein, 262 aa, Triticum aestivum
  peptide (1)..(262): Ceres Seq. ID no. 13654957
  misc_feature (28)..(205): NCBI GI NO: 15219816 NR Description: expressed protein [Arabidopsis thaliana]
  misc_feature (32)..(256): NCBI GI NO: 23619420 NR Description: hypothetical protein, conserved
  misc_feature (41)..(254): NCBI GI NO: 40740899 NR Description: hypothetical protein AN4854.2
  misc_feature (43)..(258): NCBI GI NO: 32405840 NR Description: hypothetical protein
  misc_feature (95)..(256): NCBI GI NO: 23485893 NR Description: hypothetical protein [Plasmodium yoelii yoelii]
  misc_feature (28)..(92): NCBI GI NO: 26449599 NR Description: unknown protein [Arabidopsis thaliana]
  misc_feature (55)..(212): NCBI GI NO: 24212750 NR Description: conserved hypothetical protein
SPCTRPSPSPFLFSLRRGRRQICAGPRMVNVNWELQGCCQHNQVVFIAAVGVSTVVILALWRTFLLTPFKLITVFLHETSHALACKLTCGDVEGMQVHANEGGVTQTRGGIYWIILPAGYLGSSFWGMVFILSSTHLLATRIAAGCFILALIIVLFVAKNWFLRWLCIGFIIFIAVVWVIQEFTTFHVLKYVILFIGVMNSLFSVYDIYDDTISRRVNSSDAEKFAEICPCPCNGVGWGVIWGFISFIFLCASIYLGLVILS

SEQ ID NO: 12957 - protein, 235 aa, Triticum aestivum
  peptide (1)..(235): Ceres Seq. ID no. 13654958
  misc_feature (1)..(178): NCBI GI NO: 15219816 NR Description: expressed protein [Arabidopsis thaliana]
  misc_feature (5)..(229): NCBI GI NO: 23619420 NR Description: hypothetical protein, conserved
  misc_feature (14)..(227): NCBI GI NO: 40740899 NR Description: hypothetical protein AN4854.2
  misc_feature (16)..(231): NCBI GI NO: 32405840 NR Description: hypothetical protein
  misc_feature (68)..(229): NCBI GI NO: 23485893 NR Description: hypothetical protein [Plasmodium yoelii yoelii]
  misc_feature (1)..(65): NCBI GI NO: 26449599 NR Description: unknown protein [Arabidopsis thaliana]
  misc_feature (28)..(185): NCBI GI NO: 24212750 NR Description: conserved hypothetical protein
MVNVNWELQGCCQHNQVVFIAAVGVSTVVILALWRTFLLTPFKLITVFLHETSHALACKLTCGDVEGMQVHANEGGVTQTRGGIYWIILPAGYLGSSFWGMVFILSSTHLLATRIAAGCFILALIIVLFVAKNWFLRWLCIGFIIFIAVVWVIQEFTTFHVLKYVILFIGVMNSLFSVYDIYDDTISRRVNSSDAEKFAEICPCPCNGVGWGVIWGFISFIFLCASIYLGLVILS

SEQ ID NO: 12958 - protein, 168 aa, Triticum aestivum
  peptide (1)..(168): Ceres Seq. ID no. 13654959
  misc_feature (1)..(111): NCBI GI NO: 15219816 NR Description: expressed protein [Arabidopsis thaliana]
  misc_feature (1)..(162): NCBI GI NO: 23619420 NR Description: hypothetical protein, conserved
  misc_feature (1)..(160): NCBI GI NO: 40740899 NR Description: hypothetical protein AN4854.2
  misc_feature (1)..(164): NCBI GI NO: 32405840 NR Description: hypothetical protein
  misc_feature (1)..(162): NCBI GI NO: 23485893 NR Description: hypothetical protein [Plasmodium yoelii yoelii]
  misc_feature (1)..(118): NCBI GI NO: 24212750 NR Description: conserved hypothetical protein
MQVHANEGGVTQTRGGIYWIILPAGYLGSSFWGMVFILSSTHLLATRIAAGCFILALIIVLFVAKNWFLRWLCIGFIIFIAVVWVIQEFTTFHVLKYVILFIGVMNSLFSVYDIYDDTISRRVNSSDAEKFAEICPCPCNGVGWGVIWGFISFIFLCASIYLGLVILS

SEQ ID NO: 12959 - DNA, 563 bp, Triticum aestivum
  misc_feature (1)..(563): Ceres Seq. ID no. 12585220
aaggctagctctctcgctccttcgtcctcgcaagcatcacaccagatccaccgtaggagcaaggaagggagatccacctaacccaccaatggcggccgctgcttcctccagcgcgtggaaggcgaggtggctccgccccgaggcgtaccctatctttgcggcgacgggcgtggccgtggggatctgcgtcatgcagctggtgcgcaacatcaccaccaaccccgaggtccgggtgaccaaggagaacagggcggccggggtgctggacaaccacgacgagggccgccgctacgcgcgccaccccttccggaggttcatcgacggcaagtccgccgagatcatgcccggcatcaacagcttcttcaccgccccaccaaagaactagacgtcgttgtcgtcgccgtcggagagctctttcttcaacttgaagggtggaatcaatcccttcgcgagaattacattcttttttccgcatgaattcaagtactattcgccatgattgattgtcaggcgctgtactatattgatttttgtgatcatatataagtataaaacttgatctg

SEQ ID NO: 12960 - protein, 127 aa, Triticum aestivum
  peptide (1)..(127): Ceres Seq. ID no. 12585221
  misc_feature (31)..(126): NCBI GI NO: 34395050 NR Description: putative B12D protein
  misc_feature (41)..(124): NCBI GI NO: 2130028 NR Description: B12D protein - barley
  misc_feature (41)..(124): NCBI GI NO: 15228342 NR Description: B12D-like protein; protein id: At3g48140
  misc_feature (41)..(127): NCBI GI NO: 4530585 NR Description: B12D protein [Ipomoea batatas]
  misc_feature (41)..(126): NCBI GI NO: 2293568 NR Description: HvB12D homolog [Oryza sativa]
  misc_feature (41)..(119): NCBI GI NO: 34395047 NR Description: putative B12D protein
  misc_feature (43)..(124): NCBI GI NO: 16506646 NR Description: B12D-like protein [Castanea sativa]
  misc_feature (42)..(124): NCBI GI NO: 34394572 NR Description: unknown protein
  misc_feature (42)..(124): NCBI GI NO: 34394573 NR Description: hypothetical protein
  misc_feature (42)..(122): NCBI GI NO: 15230104 NR Description: gene_id:K17E7
RLALSLLRPRKHHTRSTVGARKGDPPNPPMAAAASSSAWKARWLRPEAYPIFAATGVAVGICVMQLVRNITTNPEVRVTKENRAAGVLDNHDEGRRYARHPFRRFIDGKSAEIMPGINSFFTAPPKN

SEQ ID NO: 12961 - protein, 98 aa, Triticum aestivum
  peptide (1)..(98): Ceres Seq. ID no. 12585222
  misc_feature (2)..(97): NCBI GI NO: 34395050 NR Description: putative B12D protein
  misc_feature (12)..(95): NCBI GI NO: 2130028 NR Description: B12D protein - barley
  misc_feature (12)..(95): NCBI GI NO: 15228342 NR Description: B12D-like protein; protein id: At3g48140
  misc_feature (12)..(98): NCBI GI NO: 4530585 NR Description: B12D protein [Ipomoea batatas]
  misc_feature (12)..(97): NCBI GI NO: 2293568 NR Description: HvB12D homolog [Oryza sativa]
  misc_feature (12)..(90): NCBI GI NO: 34395047 NR Description: putative B12D protein
  misc_feature (14)..(95): NCBI GI NO: 16506646 NR Description: B12D-like protein [Castanea sativa]
  misc_feature (13)..(95): NCBI GI NO: 34394572 NR Description: unknown protein
  misc_feature (13)..(95): NCBI GI NO: 34394573 NR Description: hypothetical protein
  misc_feature (13)..(93): NCBI GI NO: 15230104 NR Description: gene_id:K17E7
MAAAASSSAWKARWLRPEAYPIFAATGVAVGICVMQLVRNITTNPEVRVTKENRAAGVLDNHDEGRRYARHPFRRFIDGKSAEIMPGINSFFTAPPKN

SEQ ID NO: 12962 - protein, 64 aa, Triticum aestivum
  peptide (1)..(64): Ceres Seq. ID no. 12585223
  misc_feature (1)..(63): NCBI GI NO: 34395050 NR Description: putative B12D protein
  misc_feature (1)..(61): NCBI GI NO: 2130028 NR Description: B12D protein - barley
  misc_feature (1)..(61): NCBI GI NO: 15228342 NR Description: B12D-like protein; protein id: At3g48140
  misc_feature (1)..(64): NCBI GI NO: 4530585 NR Description: B12D protein [Ipomoea batatas]
  misc_feature (1)..(63): NCBI GI NO: 2293568 NR Description: HvB12D homolog [Oryza sativa]
  misc_feature (1)..(56): NCBI GI NO: 34395047 NR Description: putative B12D protein
  misc_feature (1)..(61): NCBI GI NO: 16506646 NR Description: B12D-like protein [Castanea sativa]
  misc_feature (1)..(61): NCBI GI NO: 34394572 NR Description: unknown protein
  misc_feature (1)..(61): NCBI GI NO: 34394573 NR Description: hypothetical protein
  misc_feature (1)..(59): NCBI GI NO: 15230104 NR Description: gene_id:K17E7
MQLVRNITTNPEVRVTKENRAAGVLDNHDEGRRYARHPFRRFIDGKSAEIMPGINSFFTAPPKN

SEQ ID NO: 12963 - DNA, 1031 bp, Triticum aestivum
  misc_feature (1)..(1031): Ceres Seq. ID no. 15175015
accaacggcagggagagacccgaccagcgtcccacccaacgacccagcgtcgacctacctcctaccctcatccatccacccattgatccatcgattgatttggttggattaattgatccgcccccgccactcacgcgtcgccgcaatcgccgtccccgctcttcctcgtcgggacaccgcgttccccgtccgcagtctctgaccgcctctgccgcgcggatcgctggtccacgggcgggatggacaagctggtgcagttcgggaagaggcatggttcgtggtgcgggtcatgtccggctacgaggagaggaggatccggtcctacaggctgcagctgcagcagcgcctccagcaggctcaggctaagaagaaggagattgagaaacaaccagagcaagttattctgtcagaggttcgtcaagtggttcagcagatgcaagctctcaatcagcacctcgaagaagctgaaactgccatagatgagtatttcaaaccgatcgacaagaatgctcagatcttaatagacatgcaaatggagaaagaagagaagcaaatgaaggagatgctccaagtaatgcgaggccaaatacaaatgcaaagagaaatcgagacgatgaaagccgaggccagtgccgtggagcctgtcgacacccaagcgagtgcaacaacggctgagattcctccgaaacaagaaaacactaaatagatactgtccgctgttacgttttccataagctagttattatgtgcgcatggatggactctttacatgggctcttgctgggctaggtaataagtagggatctacggcaacacaactgccaattttgtacctcgggtggtattctttttcgctgggcagagtttctcgtcttcctgacccgtgttgtttcctgttcgagacggtaaatcatggaagctttgtgcaatttgatgtgggctgtgagttgtggaaactgcaccgtgtgcgtaaccaaaatttgagtcctgtcctaagtaggaagcacaattttaagtacttgggaagcttt

SEQ ID NO: 12964 - protein, 138 aa, Triticum aestivum
  peptide (1)..(138): Ceres Seq. ID no. 15175016
  misc_feature (1)..(138): NCBI GI NO: 32488082 NR Description: OSJNBa0084A10.10
  misc_feature (1)..(124): NCBI GI NO: 18414798 NR Description: expressed protein [Arabidopsis thaliana]
  misc_feature (1)..(124): NCBI GI NO: 21618294 NR Description: unknown [Arabidopsis thaliana]
MSGYEERRIRSYRLQLQQRLQQAQAKKKEIEKQPEQVILSEVRQVVQQMQALNQHLEEAETAIDEYFKPIDKNAQILIDMQMEKEEKQMKEMLQVMRGQIQMQREIETMKAEASAVEPVDTQASATTAEIPPKQENTK

SEQ ID NO: 12965 - protein, 121 aa, Triticum aestivum
  peptide (1)..(121): Ceres Seq. ID no. 15175017
TNGRERPDQRPTQRPSVDLPPTLIHPPIDPSIDLVGLIDPPPPLTRRRNRRPRSSSSGHRVPRPQSLTASAARIAGPRAGWTSWCSSGRGMVRGAGHVRLRGEEDPVLQAAAAAAPPAGSG

SEQ ID NO: 12966 - protein, 90 aa, Triticum aestivum
  peptide (1)..(90): Ceres Seq. ID no. 15175018
  misc_feature (1)..(90): NCBI GI NO: 32488082 NR Description: OSJNBa0084A10.10
  misc_feature (1)..(76): NCBI GI NO: 18414798 NR Description: expressed protein [Arabidopsis thaliana]
  misc_feature (1)..(76): NCBI GI NO: 21618294 NR Description: unknown [Arabidopsis thaliana]
MQALNQHLEEAETAIDEYFKPIDKNAQILIDMQMEKEEKQMKEMLQVMRGQIQMQREIETMKAEASAVEPVDTQASATTAEIPPKQENTK

SEQ ID NO: 12967 - DNA, 600 bp, Triticum aestivum
  misc_feature (1)..(600): Ceres Seq. ID no. 13596853
atttagagtccaccccctccccttcctcctctgttccacctcaccaaccgaaaccaaaccaaccaatctaccacccctctccaatggcaaccgcgcccacgtcgcaccagctcgccgccggggcgccctggagctccctcccccgcggcgggttccgggcgctcacggactccgcccccgcctccgtccgcttctccgtcggtcgccgccgcgccgcccgcctagaggtgaaagcagctggaaacatcttcggggactacttccaggttgcaacttatggagagtctcatggaggcggtgttggctgcgttatcagtggttgtccacccagaatcccactcacggaggaagacatgcaaggagaccttgatcgaaggcggccgggtcagagcagaataacaaccccaaggaaggagaccgatacttgtaaaatcctttcagggacatacgaaggaatgaccactgggacaccaattcatgttcttgtcccaaacacggatcaaagagggggtgattacactgaaatggctaaggcgtacagaccttcccatgcggatttaacttatgaccctcaaatacgtgttagatctgtgcagggag

SEQ ID NO: 12968 - protein, 199 aa, Triticum aestivum
  peptide (1)..(199): Ceres Seq. ID no. 13596854
  misc_feature (87)..(198): Pfam Name: Pfam Description:  Chorismate synthase
  misc_feature (28)..(198): NCBI GI NO: 2492953 NR Description: Chorismate synthase 2, chloroplast precursor
  misc_feature (27)..(198): NCBI GI NO: 114182 NR Description: Chorismate synthase, chloroplast precursor
  misc_feature (44)..(198): NCBI GI NO: 18402389 NR Description: chorismate synthase
  misc_feature (28)..(198): NCBI GI NO: 2492952 NR Description: Chorismate synthase 1, chloroplast precursor
  misc_feature (44)..(198): NCBI GI NO: 11094811 NR Description: chorismate synthase precursor
  misc_feature (44)..(198): NCBI GI NO: 12229700 NR Description: Chorismate synthase, chloroplast precursor
  misc_feature (80)..(198): NCBI GI NO: 22298006 NR Description: chorismate synthase
  misc_feature (80)..(198): NCBI GI NO: 23126882 NR Description: hypothetical protein [Nostoc punctiforme]
  misc_feature (80)..(198): NCBI GI NO: 17228292 NR Description: chorismate synthase [Nostoc sp. PCC 7120]
  misc_feature (80)..(198): NCBI GI NO: 47477 NR Description: ORFA partial (138 AA) [Synechocystis sp. PCC 6803]
LESTPSPSSSVPPHQPKPNQPIYHPSPMATAPTSHQLAAGAPWSSLPRGGFRALTDSAPASVRFSVGRRRAARLEVKAAGNIFGDYFQVATYGESHGGGVGCVISGCPPRIPLTEEDMQGDLDRRRPGQSRITTPRKETDTCKILSGTYEGMTTGTPIHVLVPNTDQRGGDYTEMAKAYRPSHADLTYDPQIRVRSVQG

SEQ ID NO: 12969 - protein, 172 aa, Triticum aestivum
  peptide (1)..(172): Ceres Seq. ID no. 13596855
  misc_feature (60)..(171): Pfam Name: Pfam Description:  Chorismate synthase
  misc_feature (1)..(171): NCBI GI NO: 2492953 NR Description: Chorismate synthase 2, chloroplast precursor
  misc_feature (1)..(171): NCBI GI NO: 114182 NR Description: Chorismate synthase, chloroplast precursor
  misc_feature (17)..(171): NCBI GI NO: 18402389 NR Description: chorismate synthase
  misc_feature (1)..(171): NCBI GI NO: 2492952 NR Description: Chorismate synthase 1, chloroplast precursor
  misc_feature (17)..(171): NCBI GI NO: 11094811 NR Description: chorismate synthase precursor
  misc_feature (17)..(171): NCBI GI NO: 12229700 NR Description: Chorismate synthase, chloroplast precursor
  misc_feature (53)..(171): NCBI GI NO: 22298006 NR Description: chorismate synthase
  misc_feature (53)..(171): NCBI GI NO: 23126882 NR Description: hypothetical protein [Nostoc punctiforme]
  misc_feature (53)..(171): NCBI GI NO: 17228292 NR Description: chorismate synthase [Nostoc sp. PCC 7120]
  misc_feature (53)..(171): NCBI GI NO: 47477 NR Description: ORFA partial (138 AA) [Synechocystis sp. PCC 6803]
MATAPTSHQLAAGAPWSSLPRGGFRALTDSAPASVRFSVGRRRAARLEVKAAGNIFGDYFQVATYGESHGGGVGCVISGCPPRIPLTEEDMQGDLDRRRPGQSRITTPRKETDTCKILSGTYEGMTTGTPIHVLVPNTDQRGGDYTEMAKAYRPSHADLTYDPQIRVRSVQG

SEQ ID NO: 12970 - protein, 122 aa, Triticum aestivum
  peptide (1)..(122): Ceres Seq. ID no. 13596856
FRVHPLPFLLCSTSPTETKPTNLPPLSNGNRAHVAPARRRGALELPPPRRVPGAHGLRPRLRPLLRRSPPRRPPRGESSWKHLRGLLPGCNLWRVSWRRCWLRYQWLSTQNPTHGGRHARRP

SEQ ID NO: 12971 - DNA, 1724 bp, Triticum aestivum
  misc_feature (1)..(1724): Ceres Seq. ID no. 14302438
aaaactgaacccaagggttcgctacccgcccccctcccatcctcgcgatggcggctgcgacggcgacggcggcaggagcagccgctgcggccgcctccatatccttgtttgcgtactacttcctcttcggcaggagcggctccaagttcctatgggcccgcaccaccagcgcggacgaccggaggacgcggcggaagggcctcgtggaggccgtcggcaacacgcccctcatccgcatcaacagcctctccgacgccaccgggtgtgagattctggggaaggccgaatttctgaacccgggaggcagcgtgaaggaccgtgtggcggttaagattatcgaggaggctctgaaatctggggatcttgtctgtggtggtgtagtaacagaagggagtgccggaagcacggctattagcttggccactgttgctcctgcttatggctgtaggtgccatgttgttattcctgatgatgctgccgttgagaagtctcaaataattgaagcgcttggagctactgtggaacgagtgcgtcctgtttcaatcactcacagagaccattttgtcaatattgcaagaagaagggcattggaagccaatatagcatcagcacaaagggaacctaatcacatacaaactaatggttcagcctatgttgatactaaaacgctgaactccaaacaaactaacgggtcagcacatgccagttctgaagtgcctgacactggcaaatgttaccctaattctgattcaaagggaggtttctttgctgaccagtttgagaatatggcaaactatcgagcgcattacgaatggactggtcctgagatatggaagcaaactaaagggactgttcatgcctttgttgctgccgctggtactggcggtacgattgctggagtttcacgatatcttaaggaaatgaacagaaatgtccaatgctttttaatggatccacctggatctggtctgtttaataaggtaactagaggggttatgtacacaaaagaggaggctgagggcaaaaggctgaaaaatccttttgacactattactgaaggaattggaatcaacagggtcacagcaaattttatgatggcagaactggatggcgcttaccggggaacagatagagaagctgtcgagatgtcaaggtttctgctgagaagagatggactatttgttgggagttcttcagccatgaattgtgtcggggctgtaagagttgcccgggatttaggtccaggacatacaattgtgacaattctctgcgacagtgggatgaggcatctaagtaagttcttcaatgatgaatatttggccaatcatgggttgacaccaactgctactggtctggagtttctcgatcaataaaaacttcacaggggaatgcatgatttcagcaattttgtcattcctcgttgtctgtcctgaaaacagttgatgagtgaacaccgaggcgccgaaacattccatctaacaagggaactgttggctccagataatggacctcaaattttatgtcaccctaattgaaggttcccctggaagatatagttatgtactttagagtagttgtcatagccatttagtaggggttgggatagccaaccattcagactgttgtacactgcaaatcttcttgtttttctttagcctgttgtacactgctcaagtcaccaattcatctatgtatacgcagttatttatacaatcatctatgcg

SEQ ID NO: 12972 - protein, 441 aa, Triticum aestivum
  peptide (1)..(441): Ceres Seq. ID no. 14302439
  misc_feature (52)..(410): Pfam Name: Pfam Description:  Pyridoxal-phosphate dependent enzyme
  misc_feature (44)..(439): NCBI GI NO: 15222794 NR Description: pyridoxal-5'-phosphate-dependent enzyme
  misc_feature (1)..(439): NCBI GI NO: 8778327 NR Description: F14J16.13 [Arabidopsis thaliana]
  misc_feature (232)..(429): NCBI GI NO: 32422639 NR Description: hypothetical protein [Neurospora crassa]
  misc_feature (50)..(182): NCBI GI NO: 32422639 NR Description: hypothetical protein [Neurospora crassa]
  misc_feature (240)..(430): NCBI GI NO: 6321449 NR Description: Hypothetical ORF; Ygr012wp
  misc_feature (49)..(182): NCBI GI NO: 6321449 NR Description: Hypothetical ORF; Ygr012wp
  misc_feature (234)..(429): NCBI GI NO: 17548497 NR Description: PROBABLE CYSTEINE SYNTHASE A PROTEIN
  misc_feature (49)..(205): NCBI GI NO: 17548497 NR Description: PROBABLE CYSTEINE SYNTHASE A PROTEIN
  misc_feature (240)..(429): NCBI GI NO: 22979964 NR Description: hypothetical protein [Ralstonia metallidurans]
  misc_feature (49)..(205): NCBI GI NO: 22979964 NR Description: hypothetical protein [Ralstonia metallidurans]
MAAATATAAGAAAAAASISLFAYYFLFGRSGSKFLWARTTSADDRRTRRKGLVEAVGNTPLIRINSLSDATGCEILGKAEFLNPGGSVKDRVAVKIIEEALKSGDLVCGGVVTEGSAGSTAISLATVAPAYGCRCHVVIPDDAAVEKSQIIEALGATVERVRPVSITHRDHFVNIARRRALEANIASAQREPNHIQTNGSAYVDTKTLNSKQTNGSAHASSEVPDTGKCYPNSDSKGGFFADQFENMANYRAHYEWTGPEIWKQTKGTVHAFVAAAGTGGTIAGVSRYLKEMNRNVQCFLMDPPGSGLFNKVTRGVMYTKEEAEGKRLKNPFDTITEGIGINRVTANFMMAELDGAYRGTDREAVEMSRFLLRRDGLFVGSSSAMNCVGAVRVARDLGPGHTIVTILCDSGMRHLSKFFNDEYLANHGLTPTATGLEFLDQ

SEQ ID NO: 12973 - DNA, 869 bp, Triticum aestivum
  misc_feature (1)..(869): Ceres Seq. ID no. 13596932
cactagacgctcctccctatttagcaaatatgccatcctttgtggcgcgtcggaaaaaaccagagctcgtgctaccggcgcaagcaacaccgcacgagactctggctctctccgacgttgacgacgccatagacctgcgatttctgcagcctgccatcgagttctttcgtgctgtcgacatcgacattgatgaccacgggctggggcggcctgccacagctgccaaggtagtcaaggcggccctcgcgaaggctctggtgcactactacccgctggcaggccgtctccgggaggctgctgggggaaaactagccgtcgagtgcacaggggaaggcgtcgtgttcgtggaggcggaggcagacgtgtccatggatgagctcggcaagccgtcgcctctgccaccatacccgtgcgtggaagaactgttgtgcgaggtgggcgaccctagggttgttcttggagttcccttgttcttcatgcaggaggcactggacttccgatgggcgaagcgagttggcggcggcttacccatggtgggggacatctccttcgactctgtgagttgccacatgaggtgtaagaatggcaagggtcaggacgtgatcgtgataaacatgatattgccaggacctgcaatggacaagtttgagaaggagattgctgtttgggtgtgcaatggacaagacgaaaagtagtggtccggctcaattcgatcagcctcatacacccctactaaaataaaccccagcgagcaagtgcttaatcaccatgtcgttttgagtttgcgactatgtaggtgaggtcgtcgtaaatttgtaaacttctaaataaagtgccccctctcaataaattatgtttatgttaaacac

SEQ ID NO: 12974 - protein, 230 aa, Triticum aestivum
  peptide (1)..(230): Ceres Seq. ID no. 13596933
  misc_feature (12)..(160): Pfam Name: Pfam Description:  Transferase family
  misc_feature (12)..(160): NCBI GI NO: 29027875 NR Description: putative acetyl transferase
  misc_feature (168)..(223): NCBI GI NO: 29027875 NR Description: putative acetyl transferase
  misc_feature (12)..(160): NCBI GI NO: 37532050 NR Description: putative acetyl transferase
  misc_feature (163)..(230): NCBI GI NO: 37532050 NR Description: putative acetyl transferase
  misc_feature (50)..(160): NCBI GI NO: 37530404 NR Description: putative hsr201 hypersensitivity-related protein
  misc_feature (160)..(223): NCBI GI NO: 37530404 NR Description: putative hsr201 hypersensitivity-related protein
  misc_feature (10)..(160): NCBI GI NO: 37530402 NR Description: putative hsr201 hypersensitivity-related protein
  misc_feature (13)..(160): NCBI GI NO: 37535814 NR Description: putative hypersensitivity-related (hsr)protein
  misc_feature (163)..(219): NCBI GI NO: 37535814 NR Description: putative hypersensitivity-related (hsr)protein
  misc_feature (10)..(163): NCBI GI NO: 37530408 NR Description: putative hsr201 hypersensitivity-related protein
LDAPPYLANMPSFVARRKKPELVLPAQATPHETLALSDVDDAIDLRFLQPAIEFFRAVDIDIDDHGLGRPATAAKVVKAALAKALVHYYPLAGRLREAAGGKLAVECTGEGVVFVEAEADVSMDELGKPSPLPPYPCVEELLCEVGDPRVVLGVPLFFMQEALDFRWAKRVGGGLPMVGDISFDSVSCHMRCKNGKGQDVIVINMILPGPAMDKFEKEIAVWVCNGQDEK

SEQ ID NO: 12975 - protein, 221 aa, Triticum aestivum
  peptide (1)..(221): Ceres Seq. ID no. 13596934
  misc_feature (3)..(151): Pfam Name: Pfam Description:  Transferase family
  misc_feature (3)..(151): NCBI GI NO: 29027875 NR Description: putative acetyl transferase
  misc_feature (159)..(214): NCBI GI NO: 29027875 NR Description: putative acetyl transferase
  misc_feature (3)..(151): NCBI GI NO: 37532050 NR Description: putative acetyl transferase
  misc_feature (154)..(221): NCBI GI NO: 37532050 NR Description: putative acetyl transferase
  misc_feature (41)..(151): NCBI GI NO: 37530404 NR Description: putative hsr201 hypersensitivity-related protein
  misc_feature (151)..(214): NCBI GI NO: 37530404 NR Description: putative hsr201 hypersensitivity-related protein
  misc_feature (1)..(151): NCBI GI NO: 37530402 NR Description: putative hsr201 hypersensitivity-related protein
  misc_feature (4)..(151): NCBI GI NO: 37535814 NR Description: putative hypersensitivity-related (hsr)protein
  misc_feature (154)..(210): NCBI GI NO: 37535814 NR Description: putative hypersensitivity-related (hsr)protein
  misc_feature (1)..(154): NCBI GI NO: 37530408 NR Description: putative hsr201 hypersensitivity-related protein
MPSFVARRKKPELVLPAQATPHETLALSDVDDAIDLRFLQPAIEFFRAVDIDIDDHGLGRPATAAKVVKAALAKALVHYYPLAGRLREAAGGKLAVECTGEGVVFVEAEADVSMDELGKPSPLPPYPCVEELLCEVGDPRVVLGVPLFFMQEALDFRWAKRVGGGLPMVGDISFDSVSCHMRCKNGKGQDVIVINMILPGPAMDKFEKEIAVWVCNGQDEK

SEQ ID NO: 12976 - DNA, 473 bp, Triticum aestivum
  misc_feature (1)..(473): Ceres Seq. ID no. 12585230
acgtcgaaaccacgaccaagccaaaccaagcaagcaaccaagaagagattggtggatgagcctgaggtacatgatgagcatgagccgggtgggcgcgcgggcggcgctggccgtgcgggacaccgtcggcaggtccgccggcaaggccgacagggcgcaggcgccagcgcagcagcaggccatggccagggccggcagggcgccggcggagtcggcgcgggccaaggcaccgctggccaggagggccgccgaggagcggcggaggcgggcggcgcaggaggagtcgctccgcaccgtcatgttcctctccatgtggggccccaacgcctagcaccaaattagtattaccgattagcagtgtgcgtgcacatggtttacgtgccgtgtggttaagtgactctaagtttgcaaatctgtgcgtacaagccgaatgtaaagtaatacagttttgctaaagcacgtctaaatgtgcc

SEQ ID NO: 12977 - protein, 113 aa, Triticum aestivum
  peptide (1)..(113): Ceres Seq. ID no. 12585231
  misc_feature (29)..(87): Pfam Name: 20 copies Pfam Description: Collagen triple helix repeat
  misc_feature (33)..(94): NCBI GI NO: 13561998 NR Description: major ampullate spidroin 1
  misc_feature (33)..(94): NCBI GI NO: 13561998 NR Description: major ampullate spidroin 1
  misc_feature (33)..(96): NCBI GI NO: 1263285 NR Description: fibroin-2
  misc_feature (31)..(94): NCBI GI NO: 9625624 NR Description: nuclear antigen EBNA1 [Human herpesvirus 4]
  misc_feature (33)..(94): NCBI GI NO: 2911274 NR Description: spidroin 1 [Nephila clavipes]
  misc_feature (33)..(93): NCBI GI NO: 27261403 NR Description: fiber protein DP1B [synthetic construct]
  misc_feature (33)..(107): NCBI GI NO: 13561998 NR Description: major ampullate spidroin 1
  misc_feature (33)..(94): NCBI GI NO: 2914731 NR Description: dragline silk protein spidroin 1
  misc_feature (30)..(94): NCBI GI NO: 9625624 NR Description: nuclear antigen EBNA1 [Human herpesvirus 4]
  misc_feature (33)..(94): NCBI GI NO: 17063211 NR Description: dragline silk protein [Nephila clavipes]
TSKPRPSQTKQATKKRLVDEPEVHDEHEPGGRAGGAGRAGHRRQVRRQGRQGAGASAAAGHGQGRQGAGGVGAGQGTAGQEGRRGAAEAGGAGGVAPHRHVPLHVGPQRLAPN

SEQ ID NO: 12978 - protein, 109 aa, Triticum aestivum
  peptide (1)..(109): Ceres Seq. ID no. 12585232
  misc_feature (19)..(108): NCBI GI NO: 38344796 NR Description: OSJNBa0043L09.16
RRNHDQAKPSKQPRRDWWMSLRYMMSMSRVGARAALAVRDTVGRSAGKADRAQAPAQQQAMARAGRAPAESARAKAPLARRAAEERRRRAAQEESLRTVMFLSMWGPNA

SEQ ID NO: 12979 - protein, 91 aa, Triticum aestivum
  peptide (1)..(91): Ceres Seq. ID no. 12585233
  misc_feature (1)..(90): NCBI GI NO: 38344796 NR Description: OSJNBa0043L09.16
MSLRYMMSMSRVGARAALAVRDTVGRSAGKADRAQAPAQQQAMARAGRAPAESARAKAPLARRAAEERRRRAAQEESLRTVMFLSMWGPNA

SEQ ID NO: 12980 - DNA, 1162 bp, Triticum aestivum
  misc_feature (1)..(1162): Ceres Seq. ID no. 12585528
aatatctgctcatttatccccacaaagtcgagaggaagaaccctaggtacacctcatggagaacgccaaccaaggtgtggatccgcacgtgcttgatatagtcaattgcccggattgtggaaggcgggtggtgacgtttgtggcgaggcgcagccagtttgcgggcaagaggttctacaagtgccgcaaccacaacctggggagaggcgggtgtgatttctattggtggcaacaagcatatgcggagcacttggctgggcttggaccagtcgtgcctccattggcgcagatcaatcagggagaaaatggcatcggaggagcagatcaaggtggtcagatgcagccggcggatctagcaggaggccagtagatcggagggctggatgcctccaacatggcatccacggcggcccgatgttgcaaggtcttcgatccacgtggtggctgttggtcggcgtcaggaagccacaactcttgatcccgcatttatcaatatggtcatgtctgtcgggcaatatggctatttgcgttgccatcctttactggttgtggctgcaaatccgtgatcgatgcgcttgatgagtcgatccaatattagcagcttatggatgcttagtaggtgtcaagggttaagtagtattagcggtgtgcgcgtgttagccatatgcttttggcttggtaaccttgttgcttgtatgtttggacctatggctaacacgcgctccgcgagatccgcaagtaccagaagagcacggagctgctcatccgcaagctccccttccagcgcctcgtccgcgagatcgcccaggacttcaagaccgacctccgcttccagtcctccgccgtctccgcactgcaggaggccgccgaggcctacctcgtcggcctcttcgaggacaccaacctctgcgccatccacgccaagcgcgtcaccatcatgcccaaggacatccagctcgcccgccgcatccgtggcgagagggcctaggctgctccgtgcgcgtcgtcgtgtgttagatccaccttagccgttgttcagcggtcgagatgtgcgtgctcgtagtgtttgtttgtgccatggtggatgtagtgtgcctgatctgatgtcaccatcttgctgtcatcagtaatttaaatgaaaatgttggcggtctgttctaag

SEQ ID NO: 12981 - protein, 152 aa, Triticum aestivum
  peptide (1)..(152): Ceres Seq. ID no. 12585529
  misc_feature (64)..(143): Pfam Name: Pfam Description:  Mucin-like glycoprotein
  misc_feature (109)..(143): NCBI GI NO: 12847552 NR Description: unnamed protein product [Mus musculus]
  misc_feature (46)..(139): NCBI GI NO: 11359723 NR Description: proteophosphoglycan, membrane-associated
  misc_feature (32)..(148): NCBI GI NO: 24762383 NR Description: CG12491-PA [Drosophila melanogaster]
  misc_feature (46)..(152): NCBI GI NO: 11359723 NR Description: proteophosphoglycan, membrane-associated
  misc_feature (46)..(139): NCBI GI NO: 11359723 NR Description: proteophosphoglycan, membrane-associated
  misc_feature (46)..(139): NCBI GI NO: 11359723 NR Description: proteophosphoglycan, membrane-associated
  misc_feature (46)..(139): NCBI GI NO: 11359723 NR Description: proteophosphoglycan, membrane-associated
MRLMSRSNISSLWMLSRCQGLSSISGVRVLAICFWLGNLVACMFGPMANTRSARSASTRRARSCSSASSPSSASSARSPRTSRPTSASSPPPSPHCRRPPRPTSSASSRTPTSAPSTPSASPSCPRTSSSPAASVARGPRLLRARRRVLDPP

SEQ ID NO: 12982 - protein, 149 aa, Triticum aestivum
  peptide (1)..(149): Ceres Seq. ID no. 12585530
  misc_feature (61)..(140): Pfam Name: Pfam Description:  Mucin-like glycoprotein
  misc_feature (106)..(140): NCBI GI NO: 12847552 NR Description: unnamed protein product [Mus musculus]
  misc_feature (43)..(136): NCBI GI NO: 11359723 NR Description: proteophosphoglycan, membrane-associated
  misc_feature (29)..(145): NCBI GI NO: 24762383 NR Description: CG12491-PA [Drosophila melanogaster]
  misc_feature (43)..(149): NCBI GI NO: 11359723 NR Description: proteophosphoglycan, membrane-associated
  misc_feature (43)..(136): NCBI GI NO: 11359723 NR Description: proteophosphoglycan, membrane-associated
  misc_feature (43)..(136): NCBI GI NO: 11359723 NR Description: proteophosphoglycan, membrane-associated
  misc_feature (43)..(136): NCBI GI NO: 11359723 NR Description: proteophosphoglycan, membrane-associated
MSRSNISSLWMLSRCQGLSSISGVRVLAICFWLGNLVACMFGPMANTRSARSASTRRARSCSSASSPSSASSARSPRTSRPTSASSPPPSPHCRRPPRPTSSASSRTPTSAPSTPSASPSCPRTSSSPAASVARGPRLLRARRRVLDPP

SEQ ID NO: 12983 - protein, 139 aa, Triticum aestivum
  peptide (1)..(139): Ceres Seq. ID no. 12585531
  misc_feature (51)..(130): Pfam Name: Pfam Description:  Mucin-like glycoprotein
  misc_feature (96)..(130): NCBI GI NO: 12847552 NR Description: unnamed protein product [Mus musculus]
  misc_feature (33)..(126): NCBI GI NO: 11359723 NR Description: proteophosphoglycan, membrane-associated
  misc_feature (19)..(135): NCBI GI NO: 24762383 NR Description: CG12491-PA [Drosophila melanogaster]
  misc_feature (33)..(139): NCBI GI NO: 11359723 NR Description: proteophosphoglycan, membrane-associated
  misc_feature (33)..(126): NCBI GI NO: 11359723 NR Description: proteophosphoglycan, membrane-associated
  misc_feature (33)..(126): NCBI GI NO: 11359723 NR Description: proteophosphoglycan, membrane-associated
  misc_feature (33)..(126): NCBI GI NO: 11359723 NR Description: proteophosphoglycan, membrane-associated
MLSRCQGLSSISGVRVLAICFWLGNLVACMFGPMANTRSARSASTRRARSCSSASSPSSASSARSPRTSRPTSASSPPPSPHCRRPPRPTSSASSRTPTSAPSTPSASPSCPRTSSSPAASVARGPRLLRARRRVLDPP

SEQ ID NO: 12984 - protein, 104 aa, Triticum aestivum
  peptide (1)..(104): Ceres Seq. ID no. 12585532
MENANQGVDPHVLDIVNCPDCGRRVVTFVARRSQFAGKRFYKCRNHNLGRGGCDFYWWQQAYAEHLAGLGPVVPPLAQINQGENGIGGADQGGQMQPADLAGGQ

SEQ ID NO: 12985 - DNA, 789 bp, Triticum aestivum
  misc_feature (1)..(789): Ceres Seq. ID no. 13655108
acacaagtccggcgagcttctctctgatagtcctactcctgcagccccaagtctccgtcgcagcagcatccccatggccagcctcaacaacgcttcctggtccagcggcctctgcggctgcttcgacgacgtcggcggctgctgcctgacgttcttctgcccgtgcgtcgtcttcgggaggatcgccgagatcgtcgacatgggcgccacatcttgctgtgcgagcgggacggtgtacaccgcgctggcgtcgatgacggggatgggctgcttctactcctgcggctaccgctccaggctgcgggagcagtaccggctcaaggagacgccctgcggcgactgctgcgtccactggttctgcgaggcctgcgcgctctgccaggagtaccgcgagctcaagtcccgcggcttcgacatggccctcggatggcaggccaacatggagaagatggggaagaccacggcgccgcagacgcacgcggggatgactcgctagagcatccatgcggccaccgacgatgaatccattccatggtcgtcaatgtcagcttccagctcaagatgaagaatgccaccagtgtacggcgtctacttatgtcttgtcgcgagtcggtttgtgtttgtgatcgatgtgtagtgtgcctttctgttgttgtaaatcgtcgtttcccatccgtccacctccaccatctgtgatgtttatgtggacatttgaataaaagatgtatcggtcgggtctgtctgtggaagcagagtccatcatcgccctataattatgctttgaatttt

SEQ ID NO: 12986 - protein, 164 aa, Triticum aestivum
  peptide (1)..(164): Ceres Seq. ID no. 13655109
  misc_feature (33)..(133): Pfam Name: Pfam Description:  Protein of unknown function, DUF614
  misc_feature (14)..(161): NCBI GI NO: 34897270 NR Description: hypothetical protein
  misc_feature (31)..(164): NCBI GI NO: 8272626 NR Description: ORFX [Lycopersicon esculentum]
  misc_feature (31)..(164): NCBI GI NO: 8272628 NR Description: ORFX [Lycopersicon pennellii]
  misc_feature (31)..(164): NCBI GI NO: 27414005 NR Description: fw2.2 [Lycopersicon pimpinellifolium]
  misc_feature (31)..(164): NCBI GI NO: 27414017 NR Description: fw2.2 [Lycopersicon pennellii]
  misc_feature (25)..(164): NCBI GI NO: 4105794 NR Description: PGPS/D12 [Petunia x hybrida]
  misc_feature (31)..(164): NCBI GI NO: 27414003 NR Description: fw2.2 [Lycopersicon cheesmanii]
  misc_feature (14)..(149): NCBI GI NO: 34897274 NR Description: hypothetical protein
  misc_feature (86)..(164): NCBI GI NO: 38567706 NR Description: B1358B12.4
  misc_feature (9)..(92): NCBI GI NO: 31249752 NR Description: hypothetical protein
HKSGELLSDSPTPAAPSLRRSSIPMASLNNASWSSGLCGCFDDVGGCCLTFFCPCVVFGRIAEIVDMGATSCCASGTVYTALASMTGMGCFYSCGYRSRLREQYRLKETPCGDCCVHWFCEACALCQEYRELKSRGFDMALGWQANMEKMGKTTAPQTHAGMTR

SEQ ID NO: 12987 - protein, 140 aa, Triticum aestivum
  peptide (1)..(140): Ceres Seq. ID no. 13655110
  misc_feature (9)..(109): Pfam Name: Pfam Description:  Protein of unknown function, DUF614
  misc_feature (1)..(137): NCBI GI NO: 34897270 NR Description: hypothetical protein
  misc_feature (7)..(140): NCBI GI NO: 8272626 NR Description: ORFX [Lycopersicon esculentum]
  misc_feature (7)..(140): NCBI GI NO: 8272628 NR Description: ORFX [Lycopersicon pennellii]
  misc_feature (7)..(140): NCBI GI NO: 27414005 NR Description: fw2.2 [Lycopersicon pimpinellifolium]
  misc_feature (7)..(140): NCBI GI NO: 27414017 NR Description: fw2.2 [Lycopersicon pennellii]
  misc_feature (1)..(140): NCBI GI NO: 4105794 NR Description: PGPS/D12 [Petunia x hybrida]
  misc_feature (7)..(140): NCBI GI NO: 27414003 NR Description: fw2.2 [Lycopersicon cheesmanii]
  misc_feature (1)..(125): NCBI GI NO: 34897274 NR Description: hypothetical protein
  misc_feature (62)..(140): NCBI GI NO: 38567706 NR Description: B1358B12.4
  misc_feature (1)..(68): NCBI GI NO: 31249752 NR Description: hypothetical protein
MASLNNASWSSGLCGCFDDVGGCCLTFFCPCVVFGRIAEIVDMGATSCCASGTVYTALASMTGMGCFYSCGYRSRLREQYRLKETPCGDCCVHWFCEACALCQEYRELKSRGFDMALGWQANMEKMGKTTAPQTHAGMTR

SEQ ID NO: 12988 - protein, 98 aa, Triticum aestivum
  peptide (1)..(98): Ceres Seq. ID no. 13655111
  misc_feature (1)..(67): Pfam Name: Pfam Description:  Protein of unknown function, DUF614
  misc_feature (1)..(95): NCBI GI NO: 34897270 NR Description: hypothetical protein
  misc_feature (1)..(98): NCBI GI NO: 8272626 NR Description: ORFX [Lycopersicon esculentum]
  misc_feature (1)..(98): NCBI GI NO: 8272628 NR Description: ORFX [Lycopersicon pennellii]
  misc_feature (1)..(98): NCBI GI NO: 27414005 NR Description: fw2.2 [Lycopersicon pimpinellifolium]
  misc_feature (1)..(98): NCBI GI NO: 27414017 NR Description: fw2.2 [Lycopersicon pennellii]
  misc_feature (1)..(98): NCBI GI NO: 4105794 NR Description: PGPS/D12 [Petunia x hybrida]
  misc_feature (1)..(98): NCBI GI NO: 27414003 NR Description: fw2.2 [Lycopersicon cheesmanii]
  misc_feature (1)..(83): NCBI GI NO: 34897274 NR Description: hypothetical protein
  misc_feature (20)..(98): NCBI GI NO: 38567706 NR Description: B1358B12.4
  misc_feature (1)..(26): NCBI GI NO: 31249752 NR Description: hypothetical protein
MGATSCCASGTVYTALASMTGMGCFYSCGYRSRLREQYRLKETPCGDCCVHWFCEACALCQEYRELKSRGFDMALGWQANMEKMGKTTAPQTHAGMTR

SEQ ID NO: 12989 - DNA, 1061 bp, Triticum aestivum
  misc_feature (1)..(1061): Ceres Seq. ID no. 13596727
tacctagaacatcctaatcgaaaaaatagtccttcgcctgagccgctgaacccgaaccgaaccattttcactctctaaaccctacgccctcctccgccgccgcatccggccacccttcgccgccgcatccgaccatgggtagcaggctgggccgccgcgtgctccacttcgccaacctccccatcaagctcatgctccccccggcccccctatcctccgtccaggagttcgctgtcaggaccgtcccctccgcctccaaggtcgacatccgccgctgcctcgagtccgtctacggcttctccatcgccgaagtccgcaccctcaacatggagggaaagaagcaccgccgaggacccttcctcgccgccaagccagactacaagaaggcctacgtcactcttcaggccccgctctccgtttcccccgacatcttccccatcggcgcgatcctcggggagagggaacggaaggccagcgcagccgcggcgaggaggaaggttgtggaaggggcagaggtcgagggggagagggaggggaaggggaaacattggatggaggacgagagggagggcttctccagggccggatgcggcaagatcgtgtatgggaaccctgggaggctggggaacaagaggaggggacgtgccagggcgaatgagcaagctgacgaaaaggggggaaacttcccgtggaacgggatgcagctggctaccgagaaacctgctaggaaaagacactatcctcccaaggcacagggaggcatggtcttgaagcagagatcacacaggggatcagcgctgcgtggaaagagttgagttgtcgtcgcctcaaccatgagagagcaccgcgccatgaaacgcgatgcagtacgtgcatccatgactaatccgccagatccatgccgttttgcagtcacacaataaagatgcgttgatttagtatttataattggctttggttcccttttactttgctattaaagcgtgtagtgatttcagtctctcatgcacatggctggttacaatgtaacagcatttccttatctaaatttgattgtcttc

SEQ ID NO: 12990 - protein, 226 aa, Triticum aestivum
  peptide (1)..(226): Ceres Seq. ID no. 13596728
  misc_feature (8)..(102): Pfam Name: Pfam Description:  Ribosomal protein L23
  misc_feature (1)..(223): NCBI GI NO: 34394046 NR Description: unknown protein
  misc_feature (1)..(190): NCBI GI NO: 15236061 NR Description: expressed protein [Arabidopsis thaliana]
  misc_feature (1)..(190): NCBI GI NO: 21554117 NR Description: unknown [Arabidopsis thaliana]
MGSRLGRRVLHFANLPIKLMLPPAPLSSVQEFAVRTVPSASKVDIRRCLESVYGFSIAEVRTLNMEGKKHRRGPFLAAKPDYKKAYVTLQAPLSVSPDIFPIGAILGERERKASAAAARRKVVEGAEVEGEREGKGKHWMEDEREGFSRAGCGKIVYGNPGRLGNKRRGRARANEQADEKGGNFPWNGMQLATEKPARKRHYPPKAQGGMVLKQRSHRGSALRGKS

SEQ ID NO: 12991 - protein, 207 aa, Triticum aestivum
  peptide (1)..(207): Ceres Seq. ID no. 13596729
  misc_feature (1)..(83): Pfam Name: Pfam Description:  Ribosomal protein L23
  misc_feature (1)..(204): NCBI GI NO: 34394046 NR Description: unknown protein
  misc_feature (1)..(171): NCBI GI NO: 15236061 NR Description: expressed protein [Arabidopsis thaliana]
  misc_feature (1)..(171): NCBI GI NO: 21554117 NR Description: unknown [Arabidopsis thaliana]
MLPPAPLSSVQEFAVRTVPSASKVDIRRCLESVYGFSIAEVRTLNMEGKKHRRGPFLAAKPDYKKAYVTLQAPLSVSPDIFPIGAILGERERKASAAAARRKVVEGAEVEGEREGKGKHWMEDEREGFSRAGCGKIVYGNPGRLGNKRRGRARANEQADEKGGNFPWNGMQLATEKPARKRHYPPKAQGGMVLKQRSHRGSALRGKS

SEQ ID NO: 12992 - protein, 162 aa, Triticum aestivum
  peptide (1)..(162): Ceres Seq. ID no. 13596730
  misc_feature (1)..(159): NCBI GI NO: 34394046 NR Description: unknown protein
  misc_feature (1)..(126): NCBI GI NO: 15236061 NR Description: expressed protein [Arabidopsis thaliana]
  misc_feature (1)..(126): NCBI GI NO: 21554117 NR Description: unknown [Arabidopsis thaliana]
MEGKKHRRGPFLAAKPDYKKAYVTLQAPLSVSPDIFPIGAILGERERKASAAAARRKVVEGAEVEGEREGKGKHWMEDEREGFSRAGCGKIVYGNPGRLGNKRRGRARANEQADEKGGNFPWNGMQLATEKPARKRHYPPKAQGGMVLKQRSHRGSALRGKS

SEQ ID NO: 12993 - DNA, 977 bp, Triticum aestivum
  misc_feature (1)..(977): Ceres Seq. ID no. 13655287
ctccactcccgcaacccgctgctcctctcctggtgcgccgctcgacctcctcctttctcccactcaggtgcgccgccggccggccctcttcctctctccctccctctcaggatacaagtggaacaaggcatgggtgtaggtgctactcaggcgaagcacaccctcctctcctaaggaaatcatcgagcgagcaaggcccacttctaatgctcgttgcgtcctccccgattcccacccgtctcttcttcatagcgagcaccggtggcggctggtagagaggcgagccgagaggtgcagcgggctacaagtggagagatcaagcgagcgatgggccggaggatcctcaacgacgcgctgcgcacgatggtgaacgcggagcggcgggggaaggctacggcgcaactccagcccatctccggcgtcatgatctcgttcctcaatatcatgaagcaccgaggttacataaaaaatttcgacgtattcgatccacatagggttggaaaaatcaccgtggaacttcagggaaggattaaagattgcaaagctctcacttacaggcaggacctcagagccacggaaatagaaaaatacagaactaggatgcttccaacacggcagtggggctatgttgtggtgaccaccccaaatggcgttttagatcacgaggaagcaattaggcagaatgtgggcggccaggtcctcggttacttccattgaggaggaaacacagttatcccatgccgaatcagccctgggctgcattgtttatctttctgttatgactgaggtcattttatttggacatttagagcttgctgcttttgttcatggccaacagaaaatgggattacatgtcaaaagtagtatgtctggcgacactgacataaatattgtaatccttctttgggacagatatttctgtaggcgtaatacacccatgtactttgagatacacgagtaacattctagttcgagct

SEQ ID NO: 12994 - protein, 129 aa, Triticum aestivum
  peptide (1)..(129): Ceres Seq. ID no. 13655288
  misc_feature (6)..(129): Pfam Name: Pfam Description:  Ribosomal protein S8
  misc_feature (1)..(129): NCBI GI NO: 15233571 NR Description: 40S ribosomal protein S15A (RPS15aE)
  misc_feature (1)..(129): NCBI GI NO: 15224834 NR Description: 40S ribosomal protein S15A (RPS15aB)
  misc_feature (5)..(129): NCBI GI NO: 28411802 NR Description: ribosomal protein S15
  misc_feature (5)..(129): NCBI GI NO: 13560779 NR Description: cytoplasmic ribosomal protein S15a [Daucus carota]
  misc_feature (5)..(129): NCBI GI NO: 133793 NR Description: 40S RIBOSOMAL PROTEIN S15A (PPCB8)
  misc_feature (5)..(129): NCBI GI NO: 15223001 NR Description: 40S ribosomal protein S15A (RPS15aA)
  misc_feature (5)..(129): NCBI GI NO: 6683481 NR Description: wrp15a [Citrullus lanatus]
  misc_feature (5)..(129): NCBI GI NO: 15225502 NR Description: 40S ribosomal protein S15A (RPS15aC)
  misc_feature (5)..(129): NCBI GI NO: 15231316 NR Description: 40S ribosomal protein S15A (RPS15aD)
  misc_feature (5)..(129): NCBI GI NO: 2130985 NR Description: r-protein BnS15a [Brassica napus]
MGRRILNDALRTMVNAERRGKATAQLQPISGVMISFLNIMKHRGYIKNFDVFDPHRVGKITVELQGRIKDCKALTYRQDLRATEIEKYRTRMLPTRQWGYVVVTTPNGVLDHEEAIRQNVGGQVLGYFH

SEQ ID NO: 12995 - protein, 117 aa, Triticum aestivum
  peptide (1)..(117): Ceres Seq. ID no. 13655289
  misc_feature (1)..(117): Pfam Name: Pfam Description:  Ribosomal protein S8
  misc_feature (1)..(117): NCBI GI NO: 15233571 NR Description: 40S ribosomal protein S15A (RPS15aE)
  misc_feature (1)..(117): NCBI GI NO: 15224834 NR Description: 40S ribosomal protein S15A (RPS15aB)
  misc_feature (1)..(117): NCBI GI NO: 28411802 NR Description: ribosomal protein S15
  misc_feature (1)..(117): NCBI GI NO: 13560779 NR Description: cytoplasmic ribosomal protein S15a [Daucus carota]
  misc_feature (1)..(117): NCBI GI NO: 133793 NR Description: 40S RIBOSOMAL PROTEIN S15A (PPCB8)
  misc_feature (1)..(117): NCBI GI NO: 15223001 NR Description: 40S ribosomal protein S15A (RPS15aA)
  misc_feature (1)..(117): NCBI GI NO: 6683481 NR Description: wrp15a [Citrullus lanatus]
  misc_feature (1)..(117): NCBI GI NO: 15225502 NR Description: 40S ribosomal protein S15A (RPS15aC)
  misc_feature (1)..(117): NCBI GI NO: 15231316 NR Description: 40S ribosomal protein S15A (RPS15aD)
  misc_feature (1)..(117): NCBI GI NO: 2130985 NR Description: r-protein BnS15a [Brassica napus]
MVNAERRGKATAQLQPISGVMISFLNIMKHRGYIKNFDVFDPHRVGKITVELQGRIKDCKALTYRQDLRATEIEKYRTRMLPTRQWGYVVVTTPNGVLDHEEAIRQNVGGQVLGYFH

SEQ ID NO: 12996 - protein, 97 aa, Triticum aestivum
  peptide (1)..(97): Ceres Seq. ID no. 13655290
  misc_feature (1)..(97): Pfam Name: Pfam Description:  Ribosomal protein S8
  misc_feature (1)..(97): NCBI GI NO: 15233571 NR Description: 40S ribosomal protein S15A (RPS15aE)
  misc_feature (1)..(97): NCBI GI NO: 15224834 NR Description: 40S ribosomal protein S15A (RPS15aB)
  misc_feature (1)..(97): NCBI GI NO: 28411802 NR Description: ribosomal protein S15
  misc_feature (1)..(97): NCBI GI NO: 13560779 NR Description: cytoplasmic ribosomal protein S15a [Daucus carota]
  misc_feature (1)..(97): NCBI GI NO: 133793 NR Description: 40S RIBOSOMAL PROTEIN S15A (PPCB8)
  misc_feature (1)..(97): NCBI GI NO: 15223001 NR Description: 40S ribosomal protein S15A (RPS15aA)
  misc_feature (1)..(97): NCBI GI NO: 6683481 NR Description: wrp15a [Citrullus lanatus]
  misc_feature (1)..(97): NCBI GI NO: 15225502 NR Description: 40S ribosomal protein S15A (RPS15aC)
  misc_feature (1)..(97): NCBI GI NO: 15231316 NR Description: 40S ribosomal protein S15A (RPS15aD)
  misc_feature (1)..(97): NCBI GI NO: 2130985 NR Description: r-protein BnS15a [Brassica napus]
MISFLNIMKHRGYIKNFDVFDPHRVGKITVELQGRIKDCKALTYRQDLRATEIEKYRTRMLPTRQWGYVVVTTPNGVLDHEEAIRQNVGGQVLGYFH

SEQ ID NO: 12997 - DNA, 1031 bp, Triticum aestivum
  misc_feature (1)..(1031): Ceres Seq. ID no. 13598257
ttttttcaaccagacaccgcccctcttcttgctctctgctctcctctcctctcctcttctctcctctcccacacgcgtcctaaagcaagcaagctcggacgccatgagcaaggactgcggcaaccacggcgaggacgacatccggcgcacgtgccggcgcttcctggccttcctcttcttcctggccctggtggtggccgtcatcgccctcatcgtctacctcgtcctccgccccacgcacccgcgcttctatctccaggacgcctcgctccggcagctggacgtgctcaccgccaacgcctccgccgcggcgggcgtgctctccaccgtgctccaggtcaccgtcgcctcccgcaaccccaacgaccgcgtcggcgtctactacgaccgcctcgacgtctacgcctcctacaagtaccagcagatcacgctggcctccgcgctcccgccggtgtaccagggccacggcgacgtcgaggtgtggtccccggtgctctccggcccgaacgtccccttcgcgccctacctcgccgacgcgctcgccaaggacgtccaggccgggtacctcatcctccaggtgaagatcgacggccgcgtccggtggaaggtgggcagctggatctccggccactaccacatcttcgtgacctgccccgccttcctcatcggcaccggcggcaacggcgcgcccggggccaacgggctcaggttccagaccgccacctactgccacgtcgaggtctagccgtccgtccgtacgtgctctgcttcctcttcttcttcgtcatcttcctctgctccgtcggcggcggcgaggtaggtttcttgcgggtggcgcgcgcgcgtgcgcgtagccaagaagatcatcaaggctgaaggccaagggggtggtacatggtggtaataagtgttagcgtcgaggggtataggtgtaaaaaggaaaagagaatttagtgttggttactcctactaaattgtgttttgctcgtttttaattgttggtaaggtatttattccacgtttaattgtcg

SEQ ID NO: 12998 - protein, 291 aa, Triticum aestivum
  peptide (1)..(291): Ceres Seq. ID no. 13598258
  misc_feature (38)..(206): Pfam Name: Pfam Description:  Herpesvirus UL87 family
FFQPDTAPLLALCSPLLSSSLLSHTRPKASKLGRHEQGLRQPRRGRHPAHVPALPGLPLLPGPGGGRHRPHRLPRPPPHAPALLSPGRLAPAAGRAHRQRLRRGGRALHRAPGHRRLPQPQRPRRRLLRPPRRLRLLQVPADHAGLRAPAGVPGPRRRRGVVPGALRPERPLRALPRRRARQGRPGRVPHPPGEDRRPRPVEGGQLDLRPLPHLRDLPRLPHRHRRQRRARGQRAQVPDRHLLPRRGLAVRPYVLCFLFFFVIFLCSVGGGEVGFLRVARARARSQEDHQG

SEQ ID NO: 12999 - protein, 247 aa, Triticum aestivum
  peptide (1)..(247): Ceres Seq. ID no. 13598259
  misc_feature (35)..(247): NCBI GI NO: 38344036 NR Description: OJ991214_12.17
  misc_feature (37)..(247): NCBI GI NO: 38637038 NR Description: harpin-induced protein 1 family (HIN1)-like
  misc_feature (37)..(247): NCBI GI NO: 15229906 NR Description: harpin-induced protein 1 family (HIN1)
  misc_feature (37)..(247): NCBI GI NO: 28392929 NR Description: putative VAMP protein SEC22 [Arabidopsis thaliana]
  misc_feature (37)..(247): NCBI GI NO: 18399308 NR Description: harpin-induced protein 1 family (HIN1)
  misc_feature (35)..(247): NCBI GI NO: 15231227 NR Description: harpin-induced protein 1 family (HIN1)
  misc_feature (39)..(247): NCBI GI NO: 22326984 NR Description: harpin-induced protein 1 family (HIN1)
  misc_feature (36)..(247): NCBI GI NO: 15227538 NR Description: harpin-induced protein 1 family (HIN1)
  misc_feature (36)..(247): NCBI GI NO: 15240001 NR Description: harpin-induced protein, putative (HIN1)
  misc_feature (36)..(245): NCBI GI NO: 15233951 NR Description: harpin-induced protein 1 family (HIN1)
FFNQTPPLFLLSALLSSPLLSSPTRVLKQASSDAMSKDCGNHGEDDIRRTCRRFLAFLFFLALVVAVIALIVYLVLRPTHPRFYLQDASLRQLDVLTANASAAAGVLSTVLQVTVASRNPNDRVGVYYDRLDVYASYKYQQITLASALPPVYQGHGDVEVWSPVLSGPNVPFAPYLADALAKDVQAGYLILQVKIDGRVRWKVGSWISGHYHIFVTCPAFLIGTGGNGAPGANGLRFQTATYCHVEV

SEQ ID NO: 13000 - protein, 213 aa, Triticum aestivum
  peptide (1)..(213): Ceres Seq. ID no. 13598260
  misc_feature (1)..(213): NCBI GI NO: 38344036 NR Description: OJ991214_12.17
  misc_feature (3)..(213): NCBI GI NO: 38637038 NR Description: harpin-induced protein 1 family (HIN1)-like
  misc_feature (3)..(213): NCBI GI NO: 15229906 NR Description: harpin-induced protein 1 family (HIN1)
  misc_feature (3)..(213): NCBI GI NO: 28392929 NR Description: putative VAMP protein SEC22 [Arabidopsis thaliana]
  misc_feature (3)..(213): NCBI GI NO: 18399308 NR Description: harpin-induced protein 1 family (HIN1)
  misc_feature (1)..(213): NCBI GI NO: 15231227 NR Description: harpin-induced protein 1 family (HIN1)
  misc_feature (5)..(213): NCBI GI NO: 22326984 NR Description: harpin-induced protein 1 family (HIN1)
  misc_feature (2)..(213): NCBI GI NO: 15227538 NR Description: harpin-induced protein 1 family (HIN1)
  misc_feature (2)..(213): NCBI GI NO: 15240001 NR Description: harpin-induced protein, putative (HIN1)
  misc_feature (2)..(211): NCBI GI NO: 15233951 NR Description: harpin-induced protein 1 family (HIN1)
MSKDCGNHGEDDIRRTCRRFLAFLFFLALVVAVIALIVYLVLRPTHPRFYLQDASLRQLDVLTANASAAAGVLSTVLQVTVASRNPNDRVGVYYDRLDVYASYKYQQITLASALPPVYQGHGDVEVWSPVLSGPNVPFAPYLADALAKDVQAGYLILQVKIDGRVRWKVGSWISGHYHIFVTCPAFLIGTGGNGAPGANGLRFQTATYCHVEV

SEQ ID NO: 13001 - DNA, 1058 bp, Triticum aestivum
  misc_feature (1)..(1058): Ceres Seq. ID no. 13596742
gaatactcctaaattagtttagtgatttcgggtcccacgcccgtatcgctgctcctctcctgcgccgctggatctcctccttcctcccactcaggatacaaggggaagaaggcaggggtctaggtgctactccggcgcggcggcagagccaagcacacccatctctcttcaagcttggcccgcccagcaatttgtttgtagctccgccactgctgagacccctagtgttcccagccacgcctcgcccactcgcgctgtgtgtgcctcggagatggccggcgcgtcattttttgataggatggtttcccagcttcggtcgacatccaagtactacactggatatcccaaggatctagggccatcaagaatcataccgttcacatcagagcgtcagtttgtgcagctattacatgaaggacggcctgtagttgtggcctttaccattaagtgcacttatacacagcatcttgacaaagtactggagaaagctgctgctacattttatcctcatataaagtttgttcgggtggaatgcccaaagtatcctgggttttgcctcacgaggcaaaagaccgagtatccatttcttgaagtattttacaacccagaacaggctgctaacccaggtaagattgtggatccgagcatcacgaaatactccgcaaaagtcctacctttcaactatgaccagagcgtgtatggatttcgagagtattttaagaagtatgggttcaagtattccgaagcaaactaactaggtttgtcatggtgaagccctgcagagtcagccagtccaactggcatgatgaggcctagtatttgaatttactttcagcctgtactaacaaacagtgatactgcattcttaagaatcagcaccccctgcatactgggctggctctgccttggcaaatggttggaaaaatggcaaagctgttagctaggtttccagtattctcaatcaagattgtagtagaatttctggatgttgcatgttgttctttgtcgaatctctgaactgcattttcagactcgctattaataaaattctgcggccc

SEQ ID NO: 13002 - protein, 160 aa, Triticum aestivum
  peptide (1)..(160): Ceres Seq. ID no. 15221964
  misc_feature (1)..(158): NCBI GI NO: 15242070 NR Description: hypothetical protein [Arabidopsis thaliana]
MAGASFFDRMVSQLRSTSKYYTGYPKDLGPSRIIPFTSERQFVQLLHEGRPVVVAFTIKCTYTQHLDKVLEKAAATFYPHIKFVRVECPKYPGFCLTRQKTEYPFLEVFYNPEQAANPGKIVDPSITKYSAKVLPFNYDQSVYGFREYFKKYGFKYSEAN

SEQ ID NO: 13003 - protein, 151 aa, Triticum aestivum
  peptide (1)..(151): Ceres Seq. ID no. 15221965
  misc_feature (1)..(149): NCBI GI NO: 15242070 NR Description: hypothetical protein [Arabidopsis thaliana]
MVSQLRSTSKYYTGYPKDLGPSRIIPFTSERQFVQLLHEGRPVVVAFTIKCTYTQHLDKVLEKAAATFYPHIKFVRVECPKYPGFCLTRQKTEYPFLEVFYNPEQAANPGKIVDPSITKYSAKVLPFNYDQSVYGFREYFKKYGFKYSEAN

SEQ ID NO: 13004 - DNA, 1078 bp, Triticum aestivum
  misc_feature (1)..(1078): Ceres Seq. ID no. 12615764
attattccttcccctgtcgcctcgatcgaagccgacgagctcagccggcgccggagcagggacggggacgcccgtcgcaggccgcctcgccgcccgagtcgccgccgtccggggcccttctcgcctggaggcaaagatggagcctggaaggaaacctctgagtctgctggacctatgcatccggagcgccgtcgacaacctcaggaccctcaacagcgtcgacatcgtgcctgacgagctgctcaagagaatcctgccccactgcaccttggagcagctgaggcacatcgagagttgcacacatgcggaccttaccgacgttacagatgtgctgtggaagagattcttccagcgcgagttcggtgaggaaaatatgaaccttgccatcaagagaatgaaggagaacagggtgcgttacaaatggaagaaactctttgaggcaagaacagaaaagcaaaagcaagttgaagcaagaatgtcggctgggctgaaaaacaaatatcaagcagcaaacgctgcgaaacagagcaaacaaattaaagtttgtacgaagatcccaccgaacagcaaaagaagtttttggggaggaagtggatccagcagcctagccaactccagctacaagagccctatattgaaaaaggcaaggatggaggttgacagtcgggcgaaaatgcaagctgctatccaaaggaacactgttgcaaggtcatcacagccagcaaggctgacctttcctagcgaacagacatcgaggacgacgacaattcatcgacctaattcaacgataaccatcaccaaaccagttggtccgaacaggcccattcaaaagcagaacaccagacccaaattttagaggccactgccatgacatcatgcttgtgaccgtggagttcgccatgattgcgcggaaatcgtagttcctgtggacattcaacaagtctttgtgagacagggaagagtcttgtttgtagttgccccagctgagcacttgtatctttaggggagcaaacaatatctgcaccaaacattttttcaaaattagattcaatcaaatcattgaaatgcatgagcttcg

SEQ ID NO: 13005 - protein, 284 aa, Triticum aestivum
  peptide (1)..(284): Ceres Seq. ID no. 12615765
  misc_feature (50)..(267): NCBI GI NO: 18406058 NR Description: expressed protein; protein id: At2g42780
  misc_feature (50)..(176): NCBI GI NO: 25370823 NR Description: hypothetical protein At2g42780
LFLPLSPRSKPTSSAGAGAGTGTPVAGRLAARVAAVRGPSRLEAKMEPGRKPLSLLDLCIRSAVDNLRTLNSVDIVPDELLKRILPHCTLEQLRHIESCTHADLTDVTDVLWKRFFQREFGEENMNLAIKRMKENRVRYKWKKLFEARTEKQKQVEARMSAGLKNKYQAANAAKQSKQIKVCTKIPPNSKRSFWGGSGSSSLANSSYKSPILKKARMEVDSRAKMQAAIQRNTVARSSQPARLTFPSEQTSRTTTIHRPNSTITITKPVGPNRPIQKQNTRPKF

SEQ ID NO: 13006 - protein, 239 aa, Triticum aestivum
  peptide (1)..(239): Ceres Seq. ID no. 12615766
  misc_feature (5)..(222): NCBI GI NO: 18406058 NR Description: expressed protein; protein id: At2g42780
  misc_feature (5)..(131): NCBI GI NO: 25370823 NR Description: hypothetical protein At2g42780
MEPGRKPLSLLDLCIRSAVDNLRTLNSVDIVPDELLKRILPHCTLEQLRHIESCTHADLTDVTDVLWKRFFQREFGEENMNLAIKRMKENRVRYKWKKLFEARTEKQKQVEARMSAGLKNKYQAANAAKQSKQIKVCTKIPPNSKRSFWGGSGSSSLANSSYKSPILKKARMEVDSRAKMQAAIQRNTVARSSQPARLTFPSEQTSRTTTIHRPNSTITITKPVGPNRPIQKQNTRPKF

SEQ ID NO: 13007 - protein, 160 aa, Triticum aestivum
  peptide (1)..(160): Ceres Seq. ID no. 12615767
  misc_feature (1)..(143): NCBI GI NO: 18406058 NR Description: expressed protein; protein id: At2g42780
  misc_feature (1)..(52): NCBI GI NO: 25370823 NR Description: hypothetical protein At2g42780
MNLAIKRMKENRVRYKWKKLFEARTEKQKQVEARMSAGLKNKYQAANAAKQSKQIKVCTKIPPNSKRSFWGGSGSSSLANSSYKSPILKKARMEVDSRAKMQAAIQRNTVARSSQPARLTFPSEQTSRTTTIHRPNSTITITKPVGPNRPIQKQNTRPKF

SEQ ID NO: 13008 - DNA, 1214 bp, Triticum aestivum
  misc_feature (1)..(1214): Ceres Seq. ID no. 13596762
agagagagagaggtagccaagaacgccatggcctccgctgcttgctagctagccagccagtagtatataaggagcggcaccgcctgtgcgacccggccccgtatcccaagtcagtcgtctcatgctccggtccacgcacccgctcagccccagcagcagcagctcggccccggcgtccagctccggcgagacgatggtggggggcgcgccgagcggggcgaagctgctgcagatcctgaacgtgcgcgtggtgggcaccggcgagcgcgtggtggtgctgtcgcacggcttcggcacggaccagtcggcgtggagccgcgtgctgccgtacctcatccgtgagcaccgcgtggtgctctacgacctcgtctgcgccggcagcgtcaacccggaccacttcgacttccgccgctacaacaacctggacgcctacgtggacgacctcctctccatcctcgacgcgctccgcatcccgcgctgcgccttcgtcggccactccgtctccgccatgatcggcatcctcgcctccatccgccgccccgacctcttcgccaagctcgtcctcatcggcgcctcgcctaggttcttgaacgacagcgactaccacggcgggttcgagctggaggagatccagcaggtgttccaggcgatgtcggccaactacgaggcgtgggccaaggggtacgcgccgctggcggtgggcgcggacgtgccggcggcggtgcaggagttcagccggacgctgttcaacatgcggccggacatctcgctccacgtctgccagagcgtgttcaagacggacctccgcggcgtgctgggcatggtgcaggcgccgtgcgtggtggtgcagaccacccgcgacgtctccgtgccggccaacgtggcggcgtacctcagggcccacctcggcgggcgcaccaccatcgagcccctgccgacggagggccacctcccccacctcagcgcccccagcctcctcgcccaggtgctccgccgcgcgctcgcccggttctagcacgagaaaaaagtgagagagaagaaattactgcagctgcctgctggtttcaccgacccgcgcgtacgtacggggtctaccccgtatttcttctctgtatttttaccgcatccgcatgaatttgtacttgcctcatagactcggaagaaaatgccaggagtgtgtcctgtagcacgtatgagcactcgaaatatttctc

SEQ ID NO: 13009 - protein, 297 aa, Triticum aestivum
  peptide (1)..(297): Ceres Seq. ID no. 13596763
  misc_feature (75)..(291): Pfam Name: Pfam Description:  alpha/beta hydrolase fold
  misc_feature (35)..(296): NCBI GI NO: 21593927 NR Description: unknown [Arabidopsis thaliana]
  misc_feature (35)..(296): NCBI GI NO: 18396732 NR Description: esterase/lipase/thioesterase family
  misc_feature (40)..(291): NCBI GI NO: 15235567 NR Description: hydrolase, alpha/beta fold family
  misc_feature (155)..(292): NCBI GI NO: 40736991 NR Description: putative hydrolases
  misc_feature (40)..(156): NCBI GI NO: 40736991 NR Description: putative hydrolases
  misc_feature (40)..(291): NCBI GI NO: 24216360 NR Description: Predicted hydrolases or acyltransferases
  misc_feature (35)..(294): NCBI GI NO: 15230110 NR Description: hydrolase, alpha/beta fold family
  misc_feature (41)..(295): NCBI GI NO: 22298700 NR Description: ORF_ID:tlr1157~hypothetical protein
  misc_feature (39)..(295): NCBI GI NO: 34912326 NR Description: P0451D05.26
  misc_feature (40)..(290): NCBI GI NO: 16331466 NR Description: hypothetical protein [Synechocystis sp. PCC 6803]
MLRSTHPLSPSSSSSAPASSSGETMVGGAPSGAKLLQILNVRVVGTGERVVVLSHGFGTDQSAWSRVLPYLIREHRVVLYDLVCAGSVNPDHFDFRRYNNLDAYVDDLLSILDALRIPRCAFVGHSVSAMIGILASIRRPDLFAKLVLIGASPRFLNDSDYHGGFELEEIQQVFQAMSANYEAWAKGYAPLAVGADVPAAVQEFSRTLFNMRPDISLHVCQSVFKTDLRGVLGMVQAPCVVVQTTRDVSVPANVAAYLRAHLGGRTTIEPLPTEGHLPHLSAPSLLAQVLRRALARF

SEQ ID NO: 13010 - protein, 273 aa, Triticum aestivum
  peptide (1)..(273): Ceres Seq. ID no. 13596764
  misc_feature (51)..(267): Pfam Name: Pfam Description:  alpha/beta hydrolase fold
  misc_feature (11)..(272): NCBI GI NO: 21593927 NR Description: unknown [Arabidopsis thaliana]
  misc_feature (11)..(272): NCBI GI NO: 18396732 NR Description: esterase/lipase/thioesterase family
  misc_feature (16)..(267): NCBI GI NO: 15235567 NR Description: hydrolase, alpha/beta fold family
  misc_feature (131)..(268): NCBI GI NO: 40736991 NR Description: putative hydrolases
  misc_feature (16)..(132): NCBI GI NO: 40736991 NR Description: putative hydrolases
  misc_feature (16)..(267): NCBI GI NO: 24216360 NR Description: Predicted hydrolases or acyltransferases
  misc_feature (11)..(270): NCBI GI NO: 15230110 NR Description: hydrolase, alpha/beta fold family
  misc_feature (17)..(271): NCBI GI NO: 22298700 NR Description: ORF_ID:tlr1157~hypothetical protein
  misc_feature (15)..(271): NCBI GI NO: 34912326 NR Description: P0451D05.26
  misc_feature (16)..(266): NCBI GI NO: 16331466 NR Description: hypothetical protein [Synechocystis sp. PCC 6803]
MVGGAPSGAKLLQILNVRVVGTGERVVVLSHGFGTDQSAWSRVLPYLIREHRVVLYDLVCAGSVNPDHFDFRRYNNLDAYVDDLLSILDALRIPRCAFVGHSVSAMIGILASIRRPDLFAKLVLIGASPRFLNDSDYHGGFELEEIQQVFQAMSANYEAWAKGYAPLAVGADVPAAVQEFSRTLFNMRPDISLHVCQSVFKTDLRGVLGMVQAPCVVVQTTRDVSVPANVAAYLRAHLGGRTTIEPLPTEGHLPHLSAPSLLAQVLRRALARF

SEQ ID NO: 13011 - protein, 168 aa, Triticum aestivum
  peptide (1)..(168): Ceres Seq. ID no. 13596765
  misc_feature (1)..(162): Pfam Name: Pfam Description:  alpha/beta hydrolase fold
  misc_feature (1)..(167): NCBI GI NO: 21593927 NR Description: unknown [Arabidopsis thaliana]
  misc_feature (1)..(167): NCBI GI NO: 18396732 NR Description: esterase/lipase/thioesterase family
  misc_feature (1)..(162): NCBI GI NO: 15235567 NR Description: hydrolase, alpha/beta fold family
  misc_feature (26)..(163): NCBI GI NO: 40736991 NR Description: putative hydrolases
  misc_feature (1)..(27): NCBI GI NO: 40736991 NR Description: putative hydrolases
  misc_feature (1)..(162): NCBI GI NO: 24216360 NR Description: Predicted hydrolases or acyltransferases
  misc_feature (1)..(165): NCBI GI NO: 15230110 NR Description: hydrolase, alpha/beta fold family
  misc_feature (1)..(166): NCBI GI NO: 22298700 NR Description: ORF_ID:tlr1157~hypothetical protein
  misc_feature (1)..(166): NCBI GI NO: 34912326 NR Description: P0451D05.26
  misc_feature (1)..(161): NCBI GI NO: 16331466 NR Description: hypothetical protein [Synechocystis sp. PCC 6803]
MIGILASIRRPDLFAKLVLIGASPRFLNDSDYHGGFELEEIQQVFQAMSANYEAWAKGYAPLAVGADVPAAVQEFSRTLFNMRPDISLHVCQSVFKTDLRGVLGMVQAPCVVVQTTRDVSVPANVAAYLRAHLGGRTTIEPLPTEGHLPHLSAPSLLAQVLRRALARF

SEQ ID NO: 13012 - DNA, 1055 bp, Triticum aestivum
  misc_feature (1)..(1055): Ceres Seq. ID no. 12585294
  misc_feature (1039)..(1039): n is a, c, t, g, unknown, or other
atcccatcccagtcagccaaacgcccaacaccacctcgtgacttcgtccgcagaccttccctcgcgcttcgactcccactccgatctccggccatggccgcggcgcgccccggatcccctgcccccagacggctgcccccctccacgctcctcctcctggccgccgtcctcctcgcggcctcgccgccggcgcgcgccctccggttcgacctcgagtccggccacaccaagtgcatctccgacgagatcaaggtcgactctatggccgtcggcaagtacagcgtggtcgcccccgaccccagctaccccgacgcacagctccccgagtcgcaccgcgtctccctcagggtgacgtcgccgtacgggaacagcatgcactactccgagaacgtgcagtcggggcacttcgccttcacggcggtggaggccggggactacctggcctgcttctgggcgcctgaccacaagccacccgtcaccgtcaccttcgagttcgactggaagagcggcgtcacggccaaggactggtccaacgtcgccaagaagggcaaggtcgatatgatggaactagagctgaagaagctagaggataccatcaaatctattcacgaggaaatgttttatctacgtgaaagggaggagcaaatgcagaacatcaacaggcagacgaactcgaggatggggtggctgagtttcctctcacttggcatctgcttatccgtggcagggctgcagctgtggcatctgaagacctttttcgagagaaagaagttgctgtagtttcccccatgatcacaaacaaatcgttgcgaattagggtatattgtttctgccagctattaacctatgtttccgagcgaatactcgaaccatcagtaagaaagaaaccgtcgatcatcatacttgtgaaatgcctttctgtgccctagcttctctccaatcaaatacagttgtaaaatgttctttttttcttgaacaggggtgaaatgtttctgttgatggtttcaaaaaaaaaaaaaaaagaaaaaagaatgaattnacaaatgctgagaagc

SEQ ID NO: 13013 - protein, 259 aa, Triticum aestivum
  peptide (1)..(259): Ceres Seq. ID no. 12585295
  misc_feature (50)..(259): Pfam Name: Pfam Description:  emp24/gp25L/p24 family
  misc_feature (32)..(259): NCBI GI NO: 33146897 NR Description: putative transmembrane protein
  misc_feature (32)..(212): NCBI GI NO: 34913282 NR Description: P0519E12.19
  misc_feature (50)..(259): NCBI GI NO: 18921314 NR Description: putative transmembrane protein [Oryza sativa]
  misc_feature (43)..(259): NCBI GI NO: 18396016 NR Description: expressed protein; protein id: At1g26690
  misc_feature (43)..(259): NCBI GI NO: 21618241 NR Description: unknown [Arabidopsis thaliana]
  misc_feature (48)..(259): NCBI GI NO: 15223027 NR Description: unknown protein; protein id: At1g14010.1
  misc_feature (48)..(259): NCBI GI NO: 8778403 NR Description: F16A14.23 [Arabidopsis thaliana]
  misc_feature (49)..(259): NCBI GI NO: 22330523 NR Description: unknown protein; protein id: At1g69460
  misc_feature (50)..(259): NCBI GI NO: 12597802 NR Description: unknown protein [Arabidopsis thaliana]
  misc_feature (48)..(259): NCBI GI NO: 15227591 NR Description: putative Golgi-associated membrane traffickingprotein
IPSQSAKRPTPPRDFVRRPSLALRLPLRSPAMAAARPGSPAPRRLPPSTLLLLAAVLLAASPPARALRFDLESGHTKCISDEIKVDSMAVGKYSVVAPDPSYPDAQLPESHRVSLRVTSPYGNSMHYSENVQSGHFAFTAVEAGDYLACFWAPDHKPPVTVTFEFDWKSGVTAKDWSNVAKKGKVDMMELELKKLEDTIKSIHEEMFYLREREEQMQNINRQTNSRMGWLSFLSLGICLSVAGLQLWHLKTFFERKKLL

SEQ ID NO: 13014 - protein, 228 aa, Triticum aestivum
  peptide (1)..(228): Ceres Seq. ID no. 12585296
  misc_feature (19)..(228): Pfam Name: Pfam Description:  emp24/gp25L/p24 family
  misc_feature (1)..(228): NCBI GI NO: 33146897 NR Description: putative transmembrane protein
  misc_feature (1)..(181): NCBI GI NO: 34913282 NR Description: P0519E12.19
  misc_feature (19)..(228): NCBI GI NO: 18921314 NR Description: putative transmembrane protein [Oryza sativa]
  misc_feature (12)..(228): NCBI GI NO: 18396016 NR Description: expressed protein; protein id: At1g26690
  misc_feature (12)..(228): NCBI GI NO: 21618241 NR Description: unknown [Arabidopsis thaliana]
  misc_feature (17)..(228): NCBI GI NO: 15223027 NR Description: unknown protein; protein id: At1g14010.1
  misc_feature (17)..(228): NCBI GI NO: 8778403 NR Description: F16A14.23 [Arabidopsis thaliana]
  misc_feature (18)..(228): NCBI GI NO: 22330523 NR Description: unknown protein; protein id: At1g69460
  misc_feature (19)..(228): NCBI GI NO: 12597802 NR Description: unknown protein [Arabidopsis thaliana]
  misc_feature (17)..(228): NCBI GI NO: 15227591 NR Description: putative Golgi-associated membrane traffickingprotein
MAAARPGSPAPRRLPPSTLLLLAAVLLAASPPARALRFDLESGHTKCISDEIKVDSMAVGKYSVVAPDPSYPDAQLPESHRVSLRVTSPYGNSMHYSENVQSGHFAFTAVEAGDYLACFWAPDHKPPVTVTFEFDWKSGVTAKDWSNVAKKGKVDMMELELKKLEDTIKSIHEEMFYLREREEQMQNINRQTNSRMGWLSFLSLGICLSVAGLQLWHLKTFFERKKLL

SEQ ID NO: 13015 - protein, 172 aa, Triticum aestivum
  peptide (1)..(172): Ceres Seq. ID no. 12585297
  misc_feature (1)..(172): Pfam Name: Pfam Description:  emp24/gp25L/p24 family
  misc_feature (1)..(172): NCBI GI NO: 33146897 NR Description: putative transmembrane protein
  misc_feature (1)..(125): NCBI GI NO: 34913282 NR Description: P0519E12.19
  misc_feature (1)..(172): NCBI GI NO: 18921314 NR Description: putative transmembrane protein [Oryza sativa]
  misc_feature (1)..(172): NCBI GI NO: 18396016 NR Description: expressed protein; protein id: At1g26690
  misc_feature (1)..(172): NCBI GI NO: 21618241 NR Description: unknown [Arabidopsis thaliana]
  misc_feature (1)..(172): NCBI GI NO: 15223027 NR Description: unknown protein; protein id: At1g14010.1
  misc_feature (1)..(172): NCBI GI NO: 8778403 NR Description: F16A14.23 [Arabidopsis thaliana]
  misc_feature (1)..(172): NCBI GI NO: 22330523 NR Description: unknown protein; protein id: At1g69460
  misc_feature (1)..(172): NCBI GI NO: 12597802 NR Description: unknown protein [Arabidopsis thaliana]
  misc_feature (1)..(172): NCBI GI NO: 15227591 NR Description: putative Golgi-associated membrane traffickingprotein
MAVGKYSVVAPDPSYPDAQLPESHRVSLRVTSPYGNSMHYSENVQSGHFAFTAVEAGDYLACFWAPDHKPPVTVTFEFDWKSGVTAKDWSNVAKKGKVDMMELELKKLEDTIKSIHEEMFYLREREEQMQNINRQTNSRMGWLSFLSLGICLSVAGLQLWHLKTFFERKKLL

SEQ ID NO: 13016 - DNA, 1304 bp, Triticum aestivum
  misc_feature (1)..(1304): Ceres Seq. ID no. 12615365
ccaaaccagtatcgacaagacgtcaaaaccctagaccggcgacgcgttcccctctctcgccgccggattcccctccgcccgtgcgtctcgcggacgtcttcgcgctcgccggctgctgttctcggttcgcccaccaccagcaatgtcttctcagatgaataaccgcatccagtccgctggaaagcgcgcgcgcacagacggtagccggcgtgaggacgactggatttgccccagctgtaacaacgtcaacttcgcattccgcaccacctgcaacatgcgcaactgcgaccagtccaggcccgcagatcacacggctatgcagactccaccccactactcggtgccggggcggtacatgccgccggggacgcctccgtccatgtacctcaccggggctcctcccccgtatggctccaacctctataatgggcatcccatgccacgctatggcattcctcagctccctccgggctctggatatccgtatggctatggcgggcgagtcccgatggggagcccctatgggccaatgcatatggcggcaccacccccatattctagtggttctatggttggtgcaggtggaatgtacagcatcagcatgcccatggatagatatggcttgggctcacccgctggtcctggggcaatgggcacaagggctggttcctattctgacgaaggctcacagaagaaatctgctggagctggacgtgataatgattggaagtgccctaattgcaacaacattaacttcgcctttcggacagtctgtaacatgagaaaatgcaacacaccaagacctgacacccagggatccaaacctgacagttcaagagctccaaaaccaaagactccagagggtagctggaagtgtgaaaagtgcaataacataaactatcctttccggacaaaatgcaaccgtccaagttgtggggaagaaaagccattgcaggcaaacagtcctgatgatctggctacagatcaggacaatcagtgagtcctagaacagtaatgaggtcaagaaggttcagcgtcgtcgtcaagtttcagtctgaatgtctggggtccatctgtgtccgtagtcgctgctgtcgtttcaagtttcttccccttgggaccatatagttgagtcacagcctcatggtaaacgttgtgaagttggcaactggagtcatggcttttcatatctctacagattttgatcaagatcatccatttgttaataccctcctgaaatttgtttgcttgtcgtggacactggactcaggggaaattgctatttgttataatggattctagct

SEQ ID NO: 13017 - protein, 285 aa, Triticum aestivum
  peptide (1)..(285): Ceres Seq. ID no. 12615366
  misc_feature (53)..(167): Pfam Name: Pfam Description:  Extensin-like region
  misc_feature (1)..(285): NCBI GI NO: 27817857 NR Description: OJ1081_B12.5
  misc_feature (3)..(285): NCBI GI NO: 22330480 NR Description: similar to RRM-containing RNA-binding protein
  misc_feature (45)..(285): NCBI GI NO: 25404955 NR Description: protein F1N21.14 [imported] - Arabidopsis thaliana
  misc_feature (2)..(274): NCBI GI NO: 33146999 NR Description: putative p53 binding protein
  misc_feature (182)..(274): NCBI GI NO: 18698995 NR Description: p53 binding protein [Oryza sativa]
  misc_feature (173)..(268): NCBI GI NO: 15865325 NR Description: putative non-ribosomal nucleolar protein
  misc_feature (188)..(274): NCBI GI NO: 15227939 NR Description: similar to putative zinc finger protein
  misc_feature (11)..(54): NCBI GI NO: 18698995 NR Description: p53 binding protein [Oryza sativa]
  misc_feature (96)..(283): NCBI GI NO: 33146999 NR Description: putative p53 binding protein
MSSQMNNRIQSAGKRARTDGSRREDDWICPSCNNVNFAFRTTCNMRNCDQSRPADHTAMQTPPHYSVPGRYMPPGTPPSMYLTGAPPPYGSNLYNGHPMPRYGIPQLPPGSGYPYGYGGRVPMGSPYGPMHMAAPPPYSSGSMVGAGGMYSISMPMDRYGLGSPAGPGAMGTRAGSYSDEGSQKKSAGAGRDNDWKCPNCNNINFAFRTVCNMRKCNTPRPDTQGSKPDSSRAPKPKTPEGSWKCEKCNNINYPFRTKCNRPSCGEEKPLQANSPDDLATDQDNQ

SEQ ID NO: 13018 - protein, 281 aa, Triticum aestivum
  peptide (1)..(281): Ceres Seq. ID no. 12615367
  misc_feature (49)..(163): Pfam Name: Pfam Description:  Extensin-like region
  misc_feature (1)..(281): NCBI GI NO: 27817857 NR Description: OJ1081_B12.5
  misc_feature (1)..(281): NCBI GI NO: 22330480 NR Description: similar to RRM-containing RNA-binding protein
  misc_feature (41)..(281): NCBI GI NO: 25404955 NR Description: protein F1N21.14 [imported] - Arabidopsis thaliana
  misc_feature (1)..(270): NCBI GI NO: 33146999 NR Description: putative p53 binding protein
  misc_feature (178)..(270): NCBI GI NO: 18698995 NR Description: p53 binding protein [Oryza sativa]
  misc_feature (169)..(264): NCBI GI NO: 15865325 NR Description: putative non-ribosomal nucleolar protein
  misc_feature (184)..(270): NCBI GI NO: 15227939 NR Description: similar to putative zinc finger protein
  misc_feature (7)..(50): NCBI GI NO: 18698995 NR Description: p53 binding protein [Oryza sativa]
  misc_feature (92)..(279): NCBI GI NO: 33146999 NR Description: putative p53 binding protein
MNNRIQSAGKRARTDGSRREDDWICPSCNNVNFAFRTTCNMRNCDQSRPADHTAMQTPPHYSVPGRYMPPGTPPSMYLTGAPPPYGSNLYNGHPMPRYGIPQLPPGSGYPYGYGGRVPMGSPYGPMHMAAPPPYSSGSMVGAGGMYSISMPMDRYGLGSPAGPGAMGTRAGSYSDEGSQKKSAGAGRDNDWKCPNCNNINFAFRTVCNMRKCNTPRPDTQGSKPDSSRAPKPKTPEGSWKCEKCNNINYPFRTKCNRPSCGEEKPLQANSPDDLATDQDNQ

SEQ ID NO: 13019 - protein, 241 aa, Triticum aestivum
  peptide (1)..(241): Ceres Seq. ID no. 12615368
  misc_feature (9)..(123): Pfam Name: Pfam Description:  Extensin-like region
  misc_feature (1)..(241): NCBI GI NO: 27817857 NR Description: OJ1081_B12.5
  misc_feature (1)..(241): NCBI GI NO: 22330480 NR Description: similar to RRM-containing RNA-binding protein
  misc_feature (1)..(241): NCBI GI NO: 25404955 NR Description: protein F1N21.14 [imported] - Arabidopsis thaliana
  misc_feature (1)..(230): NCBI GI NO: 33146999 NR Description: putative p53 binding protein
  misc_feature (138)..(230): NCBI GI NO: 18698995 NR Description: p53 binding protein [Oryza sativa]
  misc_feature (129)..(224): NCBI GI NO: 15865325 NR Description: putative non-ribosomal nucleolar protein
  misc_feature (144)..(230): NCBI GI NO: 15227939 NR Description: similar to putative zinc finger protein
  misc_feature (52)..(239): NCBI GI NO: 33146999 NR Description: putative p53 binding protein
MRNCDQSRPADHTAMQTPPHYSVPGRYMPPGTPPSMYLTGAPPPYGSNLYNGHPMPRYGIPQLPPGSGYPYGYGGRVPMGSPYGPMHMAAPPPYSSGSMVGAGGMYSISMPMDRYGLGSPAGPGAMGTRAGSYSDEGSQKKSAGAGRDNDWKCPNCNNINFAFRTVCNMRKCNTPRPDTQGSKPDSSRAPKPKTPEGSWKCEKCNNINYPFRTKCNRPSCGEEKPLQANSPDDLATDQDNQ

SEQ ID NO: 13020 - DNA, 1828 bp, Triticum aestivum
  misc_feature (1)..(1828): Ceres Seq. ID no. 13596935
cattataccacaccaaaccagcaccagcacacggcataccacaagcagcagcagcagccgccgccgtggacttcgacgctcaagtactcgagctctagcgcttcgctctgtagcggctctcgcacggatcaaagccgatggcgacggcggtccaccagctctccttctccgcgccgagcgcgggcgccaggcggcggcagagccgggcgtccgcgtccgcgtccacgacggaccggcacgaggtgctatcgccgaatcgccggctgccgctgcggaaggtgccgggcgagcacggcccgccgctgctgggcgcgctcaaggaccggctcgagtacttctacgggcccggcgggcgcgacggcttcttcgcggcccgcgtccgcgcgcaccgctccacggtggtgcgcctcaacatgccccccggccccttcgtggccaaggacccccgcgtggtggcgctcctcgacgccgcctccttcccggtcctcttcgacacctcgctcgtcgacaagaccgacctcttcaccggcaccttcatgccctccaccgacctcaccggcggctaccgcgtgctctcctacgtcgaccccgccgagcccaaccacgcgccgctcaagtcgctcctcttccacctcctcacccaccgccgccagcacgtcatccccacgttccgcgaggtctacggcggcctcttcggccgcatggagaacgacctcgcccgcgtcggcaaggccgacttcggcaactacaacgacgacgccgccttcggcttcctctgccaggcgctcctcggccgtgaccccgtcgactcgccgctccgcgacgaagggcccaagctggtagccaagtggcttctgttccagatcagcccgctgctcagcctcggcctggcgggcctgcccaccctcgtggaggacggcctcctccacagcttccgcctcccgccggcgctcattaagaaggactacggccgcctcgccgacttcttccgcgacgccggcaaggcggtgatcgacgagggcgagcggctgggcatcgcgcgggaggaggcggtgcacaacatcctcttcgccatgtgcttcaactccttcggcggcatcaagatcctgttcccgtcgctggtgaagtggctgggccgcgccggcgggcgggtgcacggccggctcgcgacggaggtgcgcgccgtcgtgcgcgccaacggcggggaggtgacgatgcgggcgctggccgagatgccgctggtgaagtcagccgtgtacgaggcgctgcggatcgagccgccggtggcgatgcagtacgggcgcgcgaagcgggacatggtggtggagagccacgactacgggtacgaggtgcgggagggggagctgctgttcgggtaccagcccatggccaccaaggacccgcgcgtgttcccgcgcgccgaggactacgtgcccgacaggttcctgggcgaggacggcgagcggctgctccggtacgtggtgtggtccaacggtcccgagtcggcgacgcccacgctgcaggacaagcagtgcgccggcaaggacttcgtggtgctcatcgcgcgcctcctcgtcgccgagctcttcctccggtacgactccttcgacgtccaggtcgggtcctcgccgctcgggtcgtcggtcaccatcacatcgcttaagaaggccaccttctgaggcatcgccacgtgtactcatttttttccctctgcttttctcgatcgatgccagtattacaccatgcatgcgatacgctagcatggagtgatagaggatttgtgcaacaaaaatttcttttcctagcaaagatgagcccgatttttccc

SEQ ID NO: 13021 - protein, 513 aa, Triticum aestivum
  peptide (1)..(513): Ceres Seq. ID no. 13596936
  misc_feature (342)..(448): Pfam Name: Pfam Description:  Cytochrome P450
  misc_feature (42)..(513): NCBI GI NO: 20160362 NR Description: allene oxide synthase [Solanum tuberosum]
  misc_feature (22)..(513): NCBI GI NO: 7581989 NR Description: allene oxide synthase [Lycopersicon esculentum]
  misc_feature (36)..(513): NCBI GI NO: 29373135 NR Description: allene oxide synthase [Citrus sinensis]
  misc_feature (24)..(513): NCBI GI NO: 21616113 NR Description: allene oxide synthase [Cucumis melo]
  misc_feature (42)..(511): NCBI GI NO: 16973300 NR Description: allene oxide synthase [Nicotiana attenuata]
  misc_feature (1)..(513): NCBI GI NO: 15239032 NR Description: allene oxide synthase / cytochrome P450 74A
  misc_feature (38)..(513): NCBI GI NO: 1352186 NR Description: Allene oxide synthase, chloroplast precursor
  misc_feature (36)..(511): NCBI GI NO: 23956572 NR Description: allene oxide synthase [Solanum tuberosum]
  misc_feature (8)..(511): NCBI GI NO: 7677376 NR Description: allene oxide synthase [Lycopersicon esculentum]
  misc_feature (37)..(512): NCBI GI NO: 25089839 NR Description: Allene oxide synthase
MATAVHQLSFSAPSAGARRRQSRASASASTTDRHEVLSPNRRLPLRKVPGEHGPPLLGALKDRLEYFYGPGGRDGFFAARVRAHRSTVVRLNMPPGPFVAKDPRVVALLDAASFPVLFDTSLVDKTDLFTGTFMPSTDLTGGYRVLSYVDPAEPNHAPLKSLLFHLLTHRRQHVIPTFREVYGGLFGRMENDLARVGKADFGNYNDDAAFGFLCQALLGRDPVDSPLRDEGPKLVAKWLLFQISPLLSLGLAGLPTLVEDGLLHSFRLPPALIKKDYGRLADFFRDAGKAVIDEGERLGIAREEAVHNILFAMCFNSFGGIKILFPSLVKWLGRAGGRVHGRLATEVRAVVRANGGEVTMRALAEMPLVKSAVYEALRIEPPVAMQYGRAKRDMVVESHDYGYEVREGELLFGYQPMATKDPRVFPRAEDYVPDRFLGEDGERLLRYVVWSNGPESATPTLQDKQCAGKDFVVLIARLLVAELFLRYDSFDVQVGSSPLGSSVTITSLKKATF

SEQ ID NO: 13022 - protein, 421 aa, Triticum aestivum
  peptide (1)..(421): Ceres Seq. ID no. 13596937
  misc_feature (250)..(356): Pfam Name: Pfam Description:  Cytochrome P450
  misc_feature (1)..(421): NCBI GI NO: 20160362 NR Description: allene oxide synthase [Solanum tuberosum]
  misc_feature (1)..(421): NCBI GI NO: 7581989 NR Description: allene oxide synthase [Lycopersicon esculentum]
  misc_feature (1)..(421): NCBI GI NO: 29373135 NR Description: allene oxide synthase [Citrus sinensis]
  misc_feature (1)..(421): NCBI GI NO: 21616113 NR Description: allene oxide synthase [Cucumis melo]
  misc_feature (1)..(419): NCBI GI NO: 16973300 NR Description: allene oxide synthase [Nicotiana attenuata]
  misc_feature (1)..(421): NCBI GI NO: 15239032 NR Description: allene oxide synthase / cytochrome P450 74A
  misc_feature (1)..(421): NCBI GI NO: 1352186 NR Description: Allene oxide synthase, chloroplast precursor
  misc_feature (1)..(419): NCBI GI NO: 23956572 NR Description: allene oxide synthase [Solanum tuberosum]
  misc_feature (1)..(419): NCBI GI NO: 7677376 NR Description: allene oxide synthase [Lycopersicon esculentum]
  misc_feature (1)..(420): NCBI GI NO: 25089839 NR Description: Allene oxide synthase
MPPGPFVAKDPRVVALLDAASFPVLFDTSLVDKTDLFTGTFMPSTDLTGGYRVLSYVDPAEPNHAPLKSLLFHLLTHRRQHVIPTFREVYGGLFGRMENDLARVGKADFGNYNDDAAFGFLCQALLGRDPVDSPLRDEGPKLVAKWLLFQISPLLSLGLAGLPTLVEDGLLHSFRLPPALIKKDYGRLADFFRDAGKAVIDEGERLGIAREEAVHNILFAMCFNSFGGIKILFPSLVKWLGRAGGRVHGRLATEVRAVVRANGGEVTMRALAEMPLVKSAVYEALRIEPPVAMQYGRAKRDMVVESHDYGYEVREGELLFGYQPMATKDPRVFPRAEDYVPDRFLGEDGERLLRYVVWSNGPESATPTLQDKQCAGKDFVVLIARLLVAELFLRYDSFDVQVGSSPLGSSVTITSLKKATF

SEQ ID NO: 13023 - protein, 380 aa, Triticum aestivum
  peptide (1)..(380): Ceres Seq. ID no. 13596938
  misc_feature (209)..(315): Pfam Name: Pfam Description:  Cytochrome P450
  misc_feature (1)..(380): NCBI GI NO: 20160362 NR Description: allene oxide synthase [Solanum tuberosum]
  misc_feature (1)..(380): NCBI GI NO: 7581989 NR Description: allene oxide synthase [Lycopersicon esculentum]
  misc_feature (1)..(380): NCBI GI NO: 29373135 NR Description: allene oxide synthase [Citrus sinensis]
  misc_feature (1)..(380): NCBI GI NO: 21616113 NR Description: allene oxide synthase [Cucumis melo]
  misc_feature (1)..(378): NCBI GI NO: 16973300 NR Description: allene oxide synthase [Nicotiana attenuata]
  misc_feature (1)..(380): NCBI GI NO: 15239032 NR Description: allene oxide synthase / cytochrome P450 74A
  misc_feature (1)..(380): NCBI GI NO: 1352186 NR Description: Allene oxide synthase, chloroplast precursor
  misc_feature (1)..(378): NCBI GI NO: 23956572 NR Description: allene oxide synthase [Solanum tuberosum]
  misc_feature (1)..(378): NCBI GI NO: 7677376 NR Description: allene oxide synthase [Lycopersicon esculentum]
  misc_feature (1)..(379): NCBI GI NO: 25089839 NR Description: Allene oxide synthase
MPSTDLTGGYRVLSYVDPAEPNHAPLKSLLFHLLTHRRQHVIPTFREVYGGLFGRMENDLARVGKADFGNYNDDAAFGFLCQALLGRDPVDSPLRDEGPKLVAKWLLFQISPLLSLGLAGLPTLVEDGLLHSFRLPPALIKKDYGRLADFFRDAGKAVIDEGERLGIAREEAVHNILFAMCFNSFGGIKILFPSLVKWLGRAGGRVHGRLATEVRAVVRANGGEVTMRALAEMPLVKSAVYEALRIEPPVAMQYGRAKRDMVVESHDYGYEVREGELLFGYQPMATKDPRVFPRAEDYVPDRFLGEDGERLLRYVVWSNGPESATPTLQDKQCAGKDFVVLIARLLVAELFLRYDSFDVQVGSSPLGSSVTITSLKKATF

SEQ ID NO: 13024 - DNA, 2223 bp, Triticum aestivum
  misc_feature (1)..(2223): Ceres Seq. ID no. 12778278
tcacttctccctccctccctccaataattctcttctctcctctccgcctccgcaccaccatcagaggaaagccagcgggaaggggggaaatccccatgcccccacccctcgccggaccagatccccggcgggccggcgcggagccttaggcggggaccggcctgaccgatgggcggggaggccccggagccgcggcggctcagccgcgcgcttagcttggacggcagcggcgtcccggaggaggcgctgcacctggtgctcggctacgtcgacgacccgcgcgaccgcgaggcggcctcgctggcgtgccgccgctggcaccacatcgacgcgctcacgcggaagcacgtcaccgtgcccttctgctacgccgtgtccccggcgcgcctgctcgcgcgcttcccgcgcctcgagtcgctcggggtcaagggcaagccccgcgccgccatgtacggcctcatccccgacgactggggcgcctacgctcggccctgggtggccgagctcgccgccccgctcgagtgcctcaaggcgctccacctgcggcgcatggtcgtcaccgacgacgacctcgccgccctcgtccgcgcccgcggccacatgctgcaggagctcaagctcgacaagtgctccggattctccaccgacgccctccgcctcgtcgcccgctcctgcagatcactgagaactttgtttctggaagagtgtacaattactgataatggcactgtatggctccatgaccttgctgccaacaatcctgttctggtgaccttgaacttctacttgacttacctcagagtggagccagctgacctcgagcttctcgccaggaattgcaagtcactaatttcattgaagattagcgactgcgacctttcagatttaattggatttttccaaatagctacatcattgcaagaatttgctggagcagaaatcagtgagcaaatgtatggaaatgttaagcttccttcaaagctttgctccttcggacttaccttcatggggacaaatgagatgcacataatctttcctttttctgctgtactcaagaagctggatttgcagtacagtttcctcaccactgaagatcattgccagctcattgcaaaatgtccgaacttactagttcttgcggtaaggaatgtgattggggatagaggactgggggttgtcggtgacacatgcaagaagctacaaaggctcagagttgagcgaggggaagatgatcctggtatgcaagaagaggaaggcggaatttctcaagtaggcctaacagctatagccgtaggttgccgtgaactggaaaatatagctgcctatgtgtctgatatcacaaatggggccctggaatccatcggaacgttctgcaaaaatctccatgactttcgccttgtcctgcttgacagacaagagacgataacagatttgccgctggacaatggtgcccgcgcgctgctgaggggctgcaccaagcttcggaggttcgctctatacctgagaccaggggggctttcagatgtaggcctcggctacattggacagcacagtggaaccatccagtacatgcttctgggtaacgttgggcaaacggatggtggattgatcagtttcgcagccgggtgccggaacctgcggaagcttgaactgaggagctgttgcttcagcgagcgggctctggcgctcgccatacggcaaatgccttccctgaggtatgtgtgggtgcagggctacagggcctctcagaccggccgtgacctcatgctcatggcgcggcccttctggaacatcgagtttacgcctcccagcacggagaccgcgggccggctgatggaagatggggagccctgcgttgataggcaagctcaggtgctggcatactactccctttctgggaagaggtccgactacccgcagtctgttgttcctctgtatcctgcgtgactgtaaatacattaagccggtatggtgtctctctgggacggcccctggctggccctctgcgcttctcgggcaataaggatgtttgtatgtgggtattgtatggatctggtagattttctagctgctgtgtactggaataagcgcattggtatttttgcctggtactcctatctaatcttaggaagatgtatactaaagtaacattgtgcgagtgaactgtgacactattgcgcttgcttcgcaggcataagcttgtctggtttccgcggcctgctc

SEQ ID NO: 13025 - protein, 592 aa, Triticum aestivum
  peptide (1)..(592): Ceres Seq. ID no. 12778279
  misc_feature (22)..(63): Pfam Name: Pfam Description:  F-box domain
  misc_feature (1)..(592): NCBI GI NO: 34908378 NR Description: P0529E05.15
  misc_feature (1)..(592): NCBI GI NO: 34902000 NR Description: unknown protein
  misc_feature (30)..(591): NCBI GI NO: 40218003 NR Description: coronatine-insensitive 1 [Lycopersicon esculentum]
  misc_feature (24)..(586): NCBI GI NO: 18405209 NR Description: coronatine-insensitive 1
  misc_feature (19)..(586): NCBI GI NO: 18412177 NR Description: F-box protein GRR1-like protein 1, AtFBL18
  misc_feature (19)..(586): NCBI GI NO: 12658970 NR Description: GRR1-like protein 1 [Arabidopsis thaliana]
  misc_feature (19)..(586): NCBI GI NO: 15027885 NR Description: putative F-box protein GRR1 protein 1, AtFBL18
  misc_feature (365)..(589): NCBI GI NO: 23395153 NR Description: putative coronatine-insensitive 1 [Glycine max]
  misc_feature (23)..(586): NCBI GI NO: 21740736 NR Description: OSJNBa0072K14.1
  misc_feature (23)..(583): NCBI GI NO: 18412567 NR Description: transport inhibitor response 1
MGGEAPEPRRLSRALSLDGSGVPEEALHLVLGYVDDPRDREAASLACRRWHHIDALTRKHVTVPFCYAVSPARLLARFPRLESLGVKGKPRAAMYGLIPDDWGAYARPWVAELAAPLECLKALHLRRMVVTDDDLAALVRARGHMLQELKLDKCSGFSTDALRLVARSCRSLRTLFLEECTITDNGTVWLHDLAANNPVLVTLNFYLTYLRVEPADLELLARNCKSLISLKISDCDLSDLIGFFQIATSLQEFAGAEISEQMYGNVKLPSKLCSFGLTFMGTNEMHIIFPFSAVLKKLDLQYSFLTTEDHCQLIAKCPNLLVLAVRNVIGDRGLGVVGDTCKKLQRLRVERGEDDPGMQEEEGGISQVGLTAIAVGCRELENIAAYVSDITNGALESIGTFCKNLHDFRLVLLDRQETITDLPLDNGARALLRGCTKLRRFALYLRPGGLSDVGLGYIGQHSGTIQYMLLGNVGQTDGGLISFAAGCRNLRKLELRSCCFSERALALAIRQMPSLRYVWVQGYRASQTGRDLMLMARPFWNIEFTPPSTETAGRLMEDGEPCVDRQAQVLAYYSLSGKRSDYPQSVVPLYPA

SEQ ID NO: 13026 - protein, 499 aa, Triticum aestivum
  peptide (1)..(499): Ceres Seq. ID no. 12778280
  misc_feature (1)..(499): NCBI GI NO: 34908378 NR Description: P0529E05.15
  misc_feature (1)..(499): NCBI GI NO: 34902000 NR Description: unknown protein
  misc_feature (1)..(498): NCBI GI NO: 40218003 NR Description: coronatine-insensitive 1 [Lycopersicon esculentum]
  misc_feature (1)..(493): NCBI GI NO: 18405209 NR Description: coronatine-insensitive 1
  misc_feature (1)..(493): NCBI GI NO: 18412177 NR Description: F-box protein GRR1-like protein 1, AtFBL18
  misc_feature (1)..(493): NCBI GI NO: 12658970 NR Description: GRR1-like protein 1 [Arabidopsis thaliana]
  misc_feature (1)..(493): NCBI GI NO: 15027885 NR Description: putative F-box protein GRR1 protein 1, AtFBL18
  misc_feature (272)..(496): NCBI GI NO: 23395153 NR Description: putative coronatine-insensitive 1 [Glycine max]
  misc_feature (1)..(493): NCBI GI NO: 21740736 NR Description: OSJNBa0072K14.1
  misc_feature (1)..(490): NCBI GI NO: 18412567 NR Description: transport inhibitor response 1
MYGLIPDDWGAYARPWVAELAAPLECLKALHLRRMVVTDDDLAALVRARGHMLQELKLDKCSGFSTDALRLVARSCRSLRTLFLEECTITDNGTVWLHDLAANNPVLVTLNFYLTYLRVEPADLELLARNCKSLISLKISDCDLSDLIGFFQIATSLQEFAGAEISEQMYGNVKLPSKLCSFGLTFMGTNEMHIIFPFSAVLKKLDLQYSFLTTEDHCQLIAKCPNLLVLAVRNVIGDRGLGVVGDTCKKLQRLRVERGEDDPGMQEEEGGISQVGLTAIAVGCRELENIAAYVSDITNGALESIGTFCKNLHDFRLVLLDRQETITDLPLDNGARALLRGCTKLRRFALYLRPGGLSDVGLGYIGQHSGTIQYMLLGNVGQTDGGLISFAAGCRNLRKLELRSCCFSERALALAIRQMPSLRYVWVQGYRASQTGRDLMLMARPFWNIEFTPPSTETAGRLMEDGEPCVDRQAQVLAYYSLSGKRSDYPQSVVPLYPA

SEQ ID NO: 13027 - protein, 465 aa, Triticum aestivum
  peptide (1)..(465): Ceres Seq. ID no. 12778281
  misc_feature (1)..(465): NCBI GI NO: 34908378 NR Description: P0529E05.15
  misc_feature (1)..(465): NCBI GI NO: 34902000 NR Description: unknown protein
  misc_feature (1)..(464): NCBI GI NO: 40218003 NR Description: coronatine-insensitive 1 [Lycopersicon esculentum]
  misc_feature (1)..(459): NCBI GI NO: 18405209 NR Description: coronatine-insensitive 1
  misc_feature (1)..(459): NCBI GI NO: 18412177 NR Description: F-box protein GRR1-like protein 1, AtFBL18
  misc_feature (1)..(459): NCBI GI NO: 12658970 NR Description: GRR1-like protein 1 [Arabidopsis thaliana]
  misc_feature (1)..(459): NCBI GI NO: 15027885 NR Description: putative F-box protein GRR1 protein 1, AtFBL18
  misc_feature (238)..(462): NCBI GI NO: 23395153 NR Description: putative coronatine-insensitive 1 [Glycine max]
  misc_feature (1)..(459): NCBI GI NO: 21740736 NR Description: OSJNBa0072K14.1
  misc_feature (1)..(456): NCBI GI NO: 18412567 NR Description: transport inhibitor response 1
MVVTDDDLAALVRARGHMLQELKLDKCSGFSTDALRLVARSCRSLRTLFLEECTITDNGTVWLHDLAANNPVLVTLNFYLTYLRVEPADLELLARNCKSLISLKISDCDLSDLIGFFQIATSLQEFAGAEISEQMYGNVKLPSKLCSFGLTFMGTNEMHIIFPFSAVLKKLDLQYSFLTTEDHCQLIAKCPNLLVLAVRNVIGDRGLGVVGDTCKKLQRLRVERGEDDPGMQEEEGGISQVGLTAIAVGCRELENIAAYVSDITNGALESIGTFCKNLHDFRLVLLDRQETITDLPLDNGARALLRGCTKLRRFALYLRPGGLSDVGLGYIGQHSGTIQYMLLGNVGQTDGGLISFAAGCRNLRKLELRSCCFSERALALAIRQMPSLRYVWVQGYRASQTGRDLMLMARPFWNIEFTPPSTETAGRLMEDGEPCVDRQAQVLAYYSLSGKRSDYPQSVVPLYPA

SEQ ID NO: 13028 - DNA, 718 bp, Triticum aestivum
  misc_feature (1)..(718): Ceres Seq. ID no. 13662276
agaacatcctaatcgaaaaaagtgttcacatctcatcctgcatctccatctccattattagtcttggttgctgtgtccacaacacaatggctccgcgttcaggtgctcttgctctcaaggcggccgccgttgctgccgttctggccatgctggtagtgccttccttggggcgctgtcatggctctccctcgccagcactgccaccgacaacctccacaccaccacctccggcgccgttgccaccaactctggcgccggcgccaggacagatatcatgcaatgactgttattcgcagtgctacttgtcctgcgacgcctccattcccttgcagtgcagcctatactgcgaccgtgaagattcctgcaactcctgcaagaccggggccatcgaggaatgcaggaccagcaaaaactgcaccgacagctgcgacgagtgcaacgacgctcccaactttaaatgtgccttctcctgcaccacccgaaactgcatcgggtgtcattacggggcgggccagatgtgcaataaagcgtgcagagaggagtgctccgcacccaaatgcgtaccctagaggcctggaaactagctaaagcatgtgcgtcgcatggtcaatgcgtcttcctgtgatgcatctatgtgcacattgtgtatgagatgctatgacatcgaataatatgggaagttgtatgtttttatctggaagaaaaatcgttgagtatc

SEQ ID NO: 13029 - protein, 188 aa, Triticum aestivum
  peptide (1)..(188): Ceres Seq. ID no. 13662277
  misc_feature (64)..(98): NCBI GI NO: 34881078 NR Description: similar to mena protein [Rattus norvegicus]
NILIEKSVHISSCISISIISLGCCVHNTMAPRSGALALKAAAVAAVLAMLVVPSLGRCHGSPSPALPPTTSTPPPPAPLPPTLAPAPGQISCNDCYSQCYLSCDASIPLQCSLYCDREDSCNSCKTGAIEECRTSKNCTDSCDECNDAPNFKCAFSCTTRNCIGCHYGAGQMCNKACREECSAPKCVP

SEQ ID NO: 13030 - protein, 160 aa, Triticum aestivum
  peptide (1)..(160): Ceres Seq. ID no. 13662278
  misc_feature (36)..(70): NCBI GI NO: 34881078 NR Description: similar to mena protein [Rattus norvegicus]
MAPRSGALALKAAAVAAVLAMLVVPSLGRCHGSPSPALPPTTSTPPPPAPLPPTLAPAPGQISCNDCYSQCYLSCDASIPLQCSLYCDREDSCNSCKTGAIEECRTSKNCTDSCDECNDAPNFKCAFSCTTRNCIGCHYGAGQMCNKACREECSAPKCVP

SEQ ID NO: 13031 - protein, 140 aa, Triticum aestivum
  peptide (1)..(140): Ceres Seq. ID no. 13662279
  misc_feature (16)..(50): NCBI GI NO: 34881078 NR Description: similar to mena protein [Rattus norvegicus]
MLVVPSLGRCHGSPSPALPPTTSTPPPPAPLPPTLAPAPGQISCNDCYSQCYLSCDASIPLQCSLYCDREDSCNSCKTGAIEECRTSKNCTDSCDECNDAPNFKCAFSCTTRNCIGCHYGAGQMCNKACREECSAPKCVP

SEQ ID NO: 13032 - DNA, 528 bp, Triticum aestivum
  misc_feature (1)..(528): Ceres Seq. ID no. 13583869
tcgaaaaaatttcaagggacgttgctaaattcgtggttcaaggtcaccaagaacgaacacttcagctatttagacttgaagacgtggccatgggaatatggatccagcaatacaaagacagtggccagcaagtgaactatgccaacgatgagcgcttctacaacgaaggatgcgactctgattacgtcctcgcccactaccagagcccgaggcttatgatgtgcttgtgggagaagctccagaaggaatctcaagcagtgtgctgtgaataactctgaatcagtgttagcacgagccgtgcaaggacgcggtagatcagttagtcttgttgttgttgttgttgttggtggtggtggtggtggtggtatgcgtccagcatttttatgtgggtgggaagtttgtgtgtaacagttgtaacaaccggcgatcatcgttcttttgttccgatcaacgtttttgtttcacggaagagagtgttgatccatgtatatgaatgttgttctcaaatgagactttgagagagattgc

SEQ ID NO: 13033 - protein, 89 aa, Triticum aestivum
  peptide (1)..(89): Ceres Seq. ID no. 13583870
  misc_feature (3)..(89): NCBI GI NO: 6437545 NR Description: unknown protein [Arabidopsis thaliana]
  misc_feature (3)..(89): NCBI GI NO: 18397574 NR Description: galactosyltransferase family
  misc_feature (21)..(84): NCBI GI NO: 34894810 NR Description: P0554D10.8
  misc_feature (3)..(88): NCBI GI NO: 29150362 NR Description: putative galactosyltransferase
  misc_feature (3)..(88): NCBI GI NO: 34393273 NR Description: galactosyltransferase family-like protein
  misc_feature (3)..(88): NCBI GI NO: 15223352 NR Description: galactosyltransferase family
  misc_feature (3)..(88): NCBI GI NO: 25403275 NR Description: protein T24P13.20
  misc_feature (3)..(88): NCBI GI NO: 25406380 NR Description: hypothetical protein F25A4.23
  misc_feature (3)..(88): NCBI GI NO: 22330635 NR Description: galactosyltransferase family
  misc_feature (3)..(88): NCBI GI NO: 25403289 NR Description: protein T7N9.18 [imported] - Arabidopsis thaliana
EKISRDVAKFVVQGHQERTLQLFRLEDVAMGIWIQQYKDSGQQVNYANDERFYNEGCDSDYVLAHYQSPRLMMCLWEKLQKESQAVCCE

SEQ ID NO: 13034 - protein, 60 aa, Triticum aestivum
  peptide (1)..(60): Ceres Seq. ID no. 13583871
  misc_feature (1)..(60): NCBI GI NO: 6437545 NR Description: unknown protein [Arabidopsis thaliana]
  misc_feature (1)..(60): NCBI GI NO: 18397574 NR Description: galactosyltransferase family
  misc_feature (1)..(55): NCBI GI NO: 34894810 NR Description: P0554D10.8
  misc_feature (1)..(59): NCBI GI NO: 29150362 NR Description: putative galactosyltransferase
  misc_feature (1)..(59): NCBI GI NO: 34393273 NR Description: galactosyltransferase family-like protein
  misc_feature (1)..(59): NCBI GI NO: 15223352 NR Description: galactosyltransferase family
  misc_feature (1)..(59): NCBI GI NO: 25403275 NR Description: protein T24P13.20
  misc_feature (1)..(59): NCBI GI NO: 25406380 NR Description: hypothetical protein F25A4.23
  misc_feature (1)..(59): NCBI GI NO: 22330635 NR Description: galactosyltransferase family
  misc_feature (1)..(59): NCBI GI NO: 25403289 NR Description: protein T7N9.18 [imported] - Arabidopsis thaliana
MGIWIQQYKDSGQQVNYANDERFYNEGCDSDYVLAHYQSPRLMMCLWEKLQKESQAVCCE

SEQ ID NO: 13035 - protein, 44 aa, Triticum aestivum
  peptide (1)..(44): Ceres Seq. ID no. 13583872
SKKFQGTLLNSWFKVTKNEHFSYLDLKTWPWEYGSSNTKTVASK

SEQ ID NO: 13036 - DNA, 825 bp, Triticum aestivum
  misc_feature (1)..(825): Ceres Seq. ID no. 12585313
aaagcagaaaagaaagatcatcgagcttccaatccaggtcttcactcatcaccggtgcaatacgtgcgcgagtacaaaaccgcacagacatgtcgacggtggaggaggagctgtccgagtgcgaggtgctgtggccggagacgcgccacggcgctccggggagcgcgtgggggccatcgacggcggctcccagggcctccagggcccgccggcagtgctctgcgccggtggacattcccagggccgcgcacctgtccggcgggcgcgctggcctggacgacgacgaggaggaggaggaggacggcgccatggtgccgccgcacctgatggtgtcgcgcaggtggtcggaggggaaggcggcggcggccttctcgctgcggtccgggcccgggcgcgcgcaccgggacctcaaccacctgcgcaactccgtgctgcggatgaccggcttcatcgaagggtgacggacgaggcggacccgtcatctgtgcatatgtgcgagaaaagtcagtcaccacgcgtcttcccgacggtgttggccggtcaattttgttcggctcatcttccccgtggttgccaatcaaattaattaatttgcatccgttggttgatgcaaatcggccagtagtgagttaggattttttttttggaatggaatagtatacatttttctgaataatctacgactgtactactccctccgtccgaatacttgttatcaaaatgaacaaaaaacgatgtatttagaactaaaatacatttagatacatcctcttttattcattttaatgaaaagtatttccagacaaagggagtatgagattcttc

SEQ ID NO: 13037 - protein, 194 aa, Triticum aestivum
  peptide (1)..(194): Ceres Seq. ID no. 12585314
KQKRKIIELPIQVFTHHRCNTCASTKPHRHVDGGGGAVRVRGAVAGDAPRRSGERVGAIDGGSQGLQGPPAVLCAGGHSQGRAPVRRARWPGRRRGGGGGRRHGAAAPDGVAQVVGGEGGGGLLAAVRARARAPGPQPPAQLRAADDRLHRRVTDEADPSSVHMCEKSQSPRVFPTVLAGQFCSAHLPRGCQSN

SEQ ID NO: 13038 - protein, 152 aa, Triticum aestivum
  peptide (1)..(152): Ceres Seq. ID no. 12585315
  misc_feature (35)..(148): Pfam Name: Pfam Description:  Protein of unknown function, DUF584
  misc_feature (35)..(148): NCBI GI NO: 34910794 NR Description: P0042A10.26
  misc_feature (67)..(151): NCBI GI NO: 18403527 NR Description: expressed protein; protein id: At2g34340
  misc_feature (34)..(151): NCBI GI NO: 26452217 NR Description: unknown protein [Arabidopsis thaliana]
  misc_feature (34)..(151): NCBI GI NO: 18412629 NR Description: putative protein; protein id: At4g04630
  misc_feature (59)..(151): NCBI GI NO: 15220508 NR Description: hypothetical protein; protein id: At1g29640.1
  misc_feature (34)..(151): NCBI GI NO: 25354620 NR Description: hypothetical protein AT4g04630
  misc_feature (57)..(149): NCBI GI NO: 27817998 NR Description: OSJNBb0041J06.3
SRKERSSSFQSRSSLITGAIRARVQNRTDMSTVEEELSECEVLWPETRHGAPGSAWGPSTAAPRASRARRQCSAPVDIPRAAHLSGGRAGLDDDEEEEEDGAMVPPHLMVSRRWSEGKAAAAFSLRSGPGRAHRDLNHLRNSVLRMTGFIEG

SEQ ID NO: 13039 - protein, 123 aa, Triticum aestivum
  peptide (1)..(123): Ceres Seq. ID no. 12585316
  misc_feature (6)..(119): Pfam Name: Pfam Description:  Protein of unknown function, DUF584
  misc_feature (6)..(119): NCBI GI NO: 34910794 NR Description: P0042A10.26
  misc_feature (38)..(122): NCBI GI NO: 18403527 NR Description: expressed protein; protein id: At2g34340
  misc_feature (5)..(122): NCBI GI NO: 26452217 NR Description: unknown protein [Arabidopsis thaliana]
  misc_feature (5)..(122): NCBI GI NO: 18412629 NR Description: putative protein; protein id: At4g04630
  misc_feature (30)..(122): NCBI GI NO: 15220508 NR Description: hypothetical protein; protein id: At1g29640.1
  misc_feature (5)..(122): NCBI GI NO: 25354620 NR Description: hypothetical protein AT4g04630
  misc_feature (28)..(120): NCBI GI NO: 27817998 NR Description: OSJNBb0041J06.3
MSTVEEELSECEVLWPETRHGAPGSAWGPSTAAPRASRARRQCSAPVDIPRAAHLSGGRAGLDDDEEEEEDGAMVPPHLMVSRRWSEGKAAAAFSLRSGPGRAHRDLNHLRNSVLRMTGFIEG

SEQ ID NO: 13040 - DNA, 1080 bp, Triticum aestivum
  misc_feature (1)..(1080): Ceres Seq. ID no. 13596939
atcatagattacttccaagtagataattgaatattaaataagtaaaaattctgcacaatgtagtactgataacatggtgttagttcctatgttttttttgcttaaagcctatattagtcgaatttaattggtttttacagttacacccacagattacagcattcaatgagttcgatttgtggcagaatcaatgttgttcgttgttctgttccatgattcctagcagttttttgtttcatcataggtggtcacattcagattcagatttttataattacattcagattttttttacttaatgatgatatgtgtagccatcctccctggcgctgcaatctgtgagtatgttggtgcattgccgaggactggagagaaaaggtcagggtctgatatgcatatgccagcacttcatgttgagaacaattccgaggcaccatcggcaccggagtactgtatcgatgctggatccgttggaagtttcgcaaggttcataaaccacagctgcaaccctaacctctttgcccagtgtgtcctaaccaatcaccacgacatcaagctagaaaaggtgatgctttttgctgccgacacggtagcacctaacgtcgacaactgcgatgtcaggaactccctcacaattgccgaatatgtcgctgaaattacaacttctacagacagaccaaggagttgagttgtgaggcccccacctacatgacacaccaaactgatatcaatgagaaaaggcgtagtattcccattgactggttgactgaggtgcaatacaagcttgagctactaggtgaaacactattccttgctgtcaacatcattgatagatcaatgcatagaaaaacatgtctcgagttttctcttgaatgaaacctgcaagtttctcaactatttagtgaagcttaccttgaaaagaactataaatactacaggaaggagagcaagacaatgacagttcgttggaatatggatttttagaggatatttatgggttcaaacctctgtaattacatattactttccttgctgatgctattgctcatgttataaaactgtcctacttcgcaaaaaatg

SEQ ID NO: 13041 - protein, 129 aa, Triticum aestivum
  peptide (1)..(129): Ceres Seq. ID no. 15222006
  misc_feature (25)..(100): Pfam Name: Pfam Description:  SET domain
  misc_feature (25)..(100): NCBI GI NO: 34907056 NR Description: putative SUVH4
  misc_feature (25)..(100): NCBI GI NO: 22121716 NR Description: SET domain-containing protein SET118 [Zea mays]
  misc_feature (86)..(120): NCBI GI NO: 3913236 NR Description: G2/mitotic-specific cyclin 2
  misc_feature (24)..(100): NCBI GI NO: 15240758 NR Description: SET-domain transcriptional regulator family
  misc_feature (24)..(100): NCBI GI NO: 27502110 NR Description: SET domain histone methyltransferase SUVH4
  misc_feature (24)..(100): NCBI GI NO: 13517749 NR Description: SUVH4 [Arabidopsis thaliana]
  misc_feature (10)..(100): NCBI GI NO: 15226918 NR Description: SET-domain transcriptional regulator family
  misc_feature (15)..(101): NCBI GI NO: 22121718 NR Description: SET domain-containing protein SET104 [Zea mays]
  misc_feature (7)..(94): NCBI GI NO: 33317792 NR Description: Unknown [Homo sapiens]
MMICVAILPGAAICEYVGALPRTGEKRSGSDMHMPALHVENNSEAPSAPEYCIDAGSVGSFARFINHSCNPNLFAQCVLTNHHDIKLEKVMLFAADTVAPNVDNCDVRNSLTIAEYVAEITTSTDRPRS

SEQ ID NO: 13042 - protein, 128 aa, Triticum aestivum
  peptide (1)..(128): Ceres Seq. ID no. 15222007
  misc_feature (24)..(99): Pfam Name: Pfam Description:  SET domain
  misc_feature (24)..(99): NCBI GI NO: 34907056 NR Description: putative SUVH4
  misc_feature (24)..(99): NCBI GI NO: 22121716 NR Description: SET domain-containing protein SET118 [Zea mays]
  misc_feature (85)..(119): NCBI GI NO: 3913236 NR Description: G2/mitotic-specific cyclin 2
  misc_feature (23)..(99): NCBI GI NO: 15240758 NR Description: SET-domain transcriptional regulator family
  misc_feature (23)..(99): NCBI GI NO: 27502110 NR Description: SET domain histone methyltransferase SUVH4
  misc_feature (23)..(99): NCBI GI NO: 13517749 NR Description: SUVH4 [Arabidopsis thaliana]
  misc_feature (9)..(99): NCBI GI NO: 15226918 NR Description: SET-domain transcriptional regulator family
  misc_feature (14)..(100): NCBI GI NO: 22121718 NR Description: SET domain-containing protein SET104 [Zea mays]
  misc_feature (6)..(93): NCBI GI NO: 33317792 NR Description: Unknown [Homo sapiens]
MICVAILPGAAICEYVGALPRTGEKRSGSDMHMPALHVENNSEAPSAPEYCIDAGSVGSFARFINHSCNPNLFAQCVLTNHHDIKLEKVMLFAADTVAPNVDNCDVRNSLTIAEYVAEITTSTDRPRS

SEQ ID NO: 13043 - protein, 98 aa, Triticum aestivum
  peptide (1)..(98): Ceres Seq. ID no. 15222008
  misc_feature (1)..(69): Pfam Name: Pfam Description:  SET domain
  misc_feature (1)..(69): NCBI GI NO: 34907056 NR Description: putative SUVH4
  misc_feature (1)..(69): NCBI GI NO: 22121716 NR Description: SET domain-containing protein SET118 [Zea mays]
  misc_feature (55)..(89): NCBI GI NO: 3913236 NR Description: G2/mitotic-specific cyclin 2
  misc_feature (1)..(69): NCBI GI NO: 15240758 NR Description: SET-domain transcriptional regulator family
  misc_feature (1)..(69): NCBI GI NO: 27502110 NR Description: SET domain histone methyltransferase SUVH4
  misc_feature (1)..(69): NCBI GI NO: 13517749 NR Description: SUVH4 [Arabidopsis thaliana]
  misc_feature (1)..(69): NCBI GI NO: 15226918 NR Description: SET-domain transcriptional regulator family
  misc_feature (1)..(70): NCBI GI NO: 22121718 NR Description: SET domain-containing protein SET104 [Zea mays]
  misc_feature (1)..(63): NCBI GI NO: 33317792 NR Description: Unknown [Homo sapiens]
MHMPALHVENNSEAPSAPEYCIDAGSVGSFARFINHSCNPNLFAQCVLTNHHDIKLEKVMLFAADTVAPNVDNCDVRNSLTIAEYVAEITTSTDRPRS

SEQ ID NO: 13044 - DNA, 595 bp, Triticum aestivum
  misc_feature (1)..(595): Ceres Seq. ID no. 15225794
cccaagcatgagctcctctcccccgctctcctccacccctcccatggccgcccccagctcctgggcctccccgttccacgaaaagagagcttagcgctgccgagccctccgtcctctccacttcccggctgctttctccgtccgtccggtcgtcaatcttcgtcgagcagagagagggagggaggaggtcgtcagattcgcgcgagatccatggggaagtacgtggagctgctggacatgggggtgcgcatcgccgcgcggttccactcccactgcccgcagacggcccgcatgtactaccacccccccgcctcctcctccgccgcccccggcgccggcgacggcggccggatggtgcccggagaaggcgccgtggccatggccatgatgaagaggcagcagcgggccgccatcgacgccacggagatcatcctctacaccgtcgtctaggccggccggttgctgctgcgctcatccggatttatcgtaccattgaagggagagagagatgctatcttattttattgttacctttgttttattttcgaatcgaggagagggaaatgaaagacgggagtgaatgttcgattgattg

SEQ ID NO: 13045 - protein, 149 aa, Triticum aestivum
  peptide (1)..(149): Ceres Seq. ID no. 15225795
  misc_feature (71)..(149): NCBI GI NO: 33146906 NR Description: unknown protein
  misc_feature (71)..(116): NCBI GI NO: 37534370 NR Description: unknown protein
  misc_feature (71)..(127): NCBI GI NO: 15230306 NR Description: expressed protein [Arabidopsis thaliana]
  misc_feature (73)..(119): NCBI GI NO: 37534372 NR Description: unknown protein
PKHELLSPALLHPSHGRPQLLGLPVPRKESLALPSPPSSPLPGCFLRPSGRQSSSSREREGGGRQIRARSMGKYVELLDMGVRIAARFHSHCPQTARMYYHPPASSSAAPGAGDGGRMVPGEGAVAMAMMKRQQRAAIDATEIILYTVV

SEQ ID NO: 13046 - protein, 79 aa, Triticum aestivum
  peptide (1)..(79): Ceres Seq. ID no. 15225796
  misc_feature (1)..(79): NCBI GI NO: 33146906 NR Description: unknown protein
  misc_feature (1)..(46): NCBI GI NO: 37534370 NR Description: unknown protein
  misc_feature (1)..(57): NCBI GI NO: 15230306 NR Description: expressed protein [Arabidopsis thaliana]
  misc_feature (3)..(49): NCBI GI NO: 37534372 NR Description: unknown protein
MGKYVELLDMGVRIAARFHSHCPQTARMYYHPPASSSAAPGAGDGGRMVPGEGAVAMAMMKRQQRAAIDATEIILYTVV

SEQ ID NO: 13047 - DNA, 1232 bp, Triticum aestivum
  misc_feature (1)..(1232): Ceres Seq. ID no. 15178699
cattccaatcaagaaaggcatcaagccactccagtattcctcctttgcccgtgagtgtgtcctctcagtacgtgggtgtgtgtgagttcatctgtacgtgagtgagagtgagagcagcttgtgtgcagccgctggttttagctaggcttcctctgattagtacaaagtgagagctagctatttgtagtttcgggctaacaattggcatcagagcctcaggttatgccgaagcatatgccgaaggaaggcgtcgccggcgacggctccaagaccgccgggcagagctcggctgaggacacccgtgcggtggacgcgctcgcgctgcgaggcaggccgggaggtgagctgggtgcgccacgctccgtgcgagacgtgggcatgtccagtacctccttccctctcctcacgcggaccaactaccccagttggtccatcatgacaaatgtcatcatggagacgaggcatatgtggaaagccgtggaaaccgacgatgtcgagtacaaggaggaccggcgggcgatggaagcgatcttgcggtccgtcccagaggagatggtgctcacccttggcgccaaggagacggccaaggaagcatgggagaccatcaagactctgcgcatcggcgtggagcgcgtacgggagtcgaaggcccagaccttgcgcctctagtacgaggaaatccggttcaaggccggtgaacaagtcgacgacttcgccttgtggctgcaaggtctcgtcaacgagctcggaacactcggagatcccatcgacaacaagatggtcattctcaagttcctccgcgtcgtccccaggcagtacaagcaactggcctggtccatcgagagtttggtggatctctccaccatgacgatcgaggagctggtagggcggctgaaggttgtcgaggggcgcggcgacgaagccgacaatcgtgttggcggtgaactactgctcaccaaggagtagtgggacgcgcagcttcagcagtgcggctgcgacggctcttccggcagagggggaggagcccccacaggaagcagaggtcgcggaagaggcggaggccgcacccagagcgctggcggcaaccgcggtgcgcaagccaaggcgggcagggcgaggcgctggcaactactatataattgcatgtgatgtttattatgtttatgcatcttgtttacttagaacgacggtagtaaataagatgatcccttacagcaaaaaaaaaaaaaaaa

SEQ ID NO: 13048 - protein, 148 aa, Triticum aestivum
  peptide (1)..(148): Ceres Seq. ID no. 15178700
  misc_feature (10)..(148): NCBI GI NO: 37532690 NR Description: putative retroelement
  misc_feature (18)..(148): NCBI GI NO: 37535062 NR Description: putative lectin receptor kinase
  misc_feature (36)..(148): NCBI GI NO: 38567926 NR Description: OSJNBa0033H08.2
  misc_feature (15)..(148): NCBI GI NO: 37535062 NR Description: putative lectin receptor kinase
  misc_feature (36)..(148): NCBI GI NO: 37534596 NR Description: putative gag-pol polyprotein
  misc_feature (35)..(148): NCBI GI NO: 34915242 NR Description: P0045F02.15
  misc_feature (35)..(148): NCBI GI NO: 38346799 NR Description: OSJNBa0088A01.6
  misc_feature (13)..(148): NCBI GI NO: 37532710 NR Description: putative retroelement
  misc_feature (6)..(148): NCBI GI NO: 34905130 NR Description: P0686C03.48
  misc_feature (6)..(148): NCBI GI NO: 22758275 NR Description: Putative gag-pol polyprotein
MPKHMPKEGVAGDGSKTAGQSSAEDTRAVDALALRGRPGGELGAPRSVRDVGMSSTSFPLLTRTNYPSWSIMTNVIMETRHMWKAVETDDVEYKEDRRAMEAILRSVPEEMVLTLGAKETAKEAWETIKTLRIGVERVRESKAQTLRL

SEQ ID NO: 13049 - protein, 144 aa, Triticum aestivum
  peptide (1)..(144): Ceres Seq. ID no. 15178701
  misc_feature (6)..(144): NCBI GI NO: 37532690 NR Description: putative retroelement
  misc_feature (14)..(144): NCBI GI NO: 37535062 NR Description: putative lectin receptor kinase
  misc_feature (32)..(144): NCBI GI NO: 38567926 NR Description: OSJNBa0033H08.2
  misc_feature (11)..(144): NCBI GI NO: 37535062 NR Description: putative lectin receptor kinase
  misc_feature (32)..(144): NCBI GI NO: 37534596 NR Description: putative gag-pol polyprotein
  misc_feature (31)..(144): NCBI GI NO: 34915242 NR Description: P0045F02.15
  misc_feature (31)..(144): NCBI GI NO: 38346799 NR Description: OSJNBa0088A01.6
  misc_feature (9)..(144): NCBI GI NO: 37532710 NR Description: putative retroelement
  misc_feature (2)..(144): NCBI GI NO: 34905130 NR Description: P0686C03.48
  misc_feature (2)..(144): NCBI GI NO: 22758275 NR Description: Putative gag-pol polyprotein
MPKEGVAGDGSKTAGQSSAEDTRAVDALALRGRPGGELGAPRSVRDVGMSSTSFPLLTRTNYPSWSIMTNVIMETRHMWKAVETDDVEYKEDRRAMEAILRSVPEEMVLTLGAKETAKEAWETIKTLRIGVERVRESKAQTLRL

SEQ ID NO: 13050 - protein, 141 aa, Triticum aestivum
  peptide (1)..(141): Ceres Seq. ID no. 15178702
MSSWRRGICGKPWKPTMSSTRRTGGRWKRSCGPSQRRWCSPLAPRRRPRKHGRPSRLCASAWSAYGSRRPRPCASSTRKSGSRPVNKSTTSPCGCKVSSTSSEHSEIPSTTRWSFSSSSASSPGSTSNWPGPSRVWWISPP

SEQ ID NO: 13051 - DNA, 752 bp, Triticum aestivum
  misc_feature (1)..(752): Ceres Seq. ID no. 12585325
atcttcccctccgacttcgccatggacagcaccgccccgaactcttcttccgccgccgccgtcgccgccgcggccgcggccgcttccgcttccggtaacggcgtacaagggggaacgggtggggaccgtcccgaggacccgtcgaagcagaacctggcgcaggtcacgggctcgatccagaagaccctgggcctgctccaccagctcaacctcaacgtctcctccttcagctccgcgtcccagctccccctcctccagcgcctgaacgcgctcgtggcggagctcgacacgatgcagaagctcgccgacgggtgcaacatccaggtgcccatggaggtcgtcaatttgattgatgacgggaagaaccccgatgagttcaccagggacgtgctcaacagctgcatcgccaagaaccagatcaccaagggcaagaccgatgctttcaagagcctgaggaagcatcttcttgaggagctggaagaagcttttccagatgacgttgaagcgtacagacagatacgtgctacctctgctgctgagtcaaagaggttggctcagtcccaaagtgctttgcctaatggagatgccaaagtgaaacctgagcattgacagaataacccaagtgcaaagagcaagatcttgctttatatttcctatagtttttcttaggaaggctttgtgaaccaacaactgatataaccttgtatgtgctgctccctcatatgagtgatcaatatttatgtatattagtc

SEQ ID NO: 13052 - protein, 202 aa, Triticum aestivum
  peptide (1)..(202): Ceres Seq. ID no. 12585326
  misc_feature (13)..(201): NCBI GI NO: 18396004 NR Description: Expressed protein; protein id: At1g26665
  misc_feature (46)..(201): NCBI GI NO: 15238215 NR Description: putative protein; protein id: At5g41910.1
  misc_feature (13)..(181): NCBI GI NO: 25403266 NR Description: protein T24P13.4 [imported] - Arabidopsis thaliana
  misc_feature (37)..(174): NCBI GI NO: 29145113 NR Description: similar to DNA segment
  misc_feature (59)..(174): NCBI GI NO: 20070410 NR Description: DNA segment
  misc_feature (59)..(174): NCBI GI NO: 34873422 NR Description: similar to DNA segment
  misc_feature (59)..(174): NCBI GI NO: 13097162 NR Description: Similar to CG5057 gene product [Homo sapiens]
  misc_feature (66)..(174): NCBI GI NO: 31216855 NR Description: ENSANGP00000021242 [Anopheles gambiae]
  misc_feature (66)..(177): NCBI GI NO: 9799628 NR Description: Nut2 [Drosophila melanogaster]
  misc_feature (86)..(201): NCBI GI NO: 29841376 NR Description: similar to GenBank Accession Number BC003353 CG5057gene product in Homo sapiens
IFPSDFAMDSTAPNSSSAAAVAAAAAAASASGNGVQGGTGGDRPEDPSKQNLAQVTGSIQKTLGLLHQLNLNVSSFSSASQLPLLQRLNALVAELDTMQKLADGCNIQVPMEVVNLIDDGKNPDEFTRDVLNSCIAKNQITKGKTDAFKSLRKHLLEELEEAFPDDVEAYRQIRATSAAESKRLAQSQSALPNGDAKVKPEH

SEQ ID NO: 13053 - protein, 195 aa, Triticum aestivum
  peptide (1)..(195): Ceres Seq. ID no. 12585327
  misc_feature (6)..(194): NCBI GI NO: 18396004 NR Description: Expressed protein; protein id: At1g26665
  misc_feature (39)..(194): NCBI GI NO: 15238215 NR Description: putative protein; protein id: At5g41910.1
  misc_feature (6)..(174): NCBI GI NO: 25403266 NR Description: protein T24P13.4 [imported] - Arabidopsis thaliana
  misc_feature (30)..(167): NCBI GI NO: 29145113 NR Description: similar to DNA segment
  misc_feature (52)..(167): NCBI GI NO: 20070410 NR Description: DNA segment
  misc_feature (52)..(167): NCBI GI NO: 34873422 NR Description: similar to DNA segment
  misc_feature (52)..(167): NCBI GI NO: 13097162 NR Description: Similar to CG5057 gene product [Homo sapiens]
  misc_feature (59)..(167): NCBI GI NO: 31216855 NR Description: ENSANGP00000021242 [Anopheles gambiae]
  misc_feature (59)..(170): NCBI GI NO: 9799628 NR Description: Nut2 [Drosophila melanogaster]
  misc_feature (79)..(194): NCBI GI NO: 29841376 NR Description: similar to GenBank Accession Number BC003353 CG5057gene product in Homo sapiens
MDSTAPNSSSAAAVAAAAAAASASGNGVQGGTGGDRPEDPSKQNLAQVTGSIQKTLGLLHQLNLNVSSFSSASQLPLLQRLNALVAELDTMQKLADGCNIQVPMEVVNLIDDGKNPDEFTRDVLNSCIAKNQITKGKTDAFKSLRKHLLEELEEAFPDDVEAYRQIRATSAAESKRLAQSQSALPNGDAKVKPEH

SEQ ID NO: 13054 - protein, 105 aa, Triticum aestivum
  peptide (1)..(105): Ceres Seq. ID no. 12585328
  misc_feature (1)..(104): NCBI GI NO: 18396004 NR Description: Expressed protein; protein id: At1g26665
  misc_feature (1)..(104): NCBI GI NO: 15238215 NR Description: putative protein; protein id: At5g41910.1
  misc_feature (1)..(84): NCBI GI NO: 25403266 NR Description: protein T24P13.4 [imported] - Arabidopsis thaliana
  misc_feature (1)..(77): NCBI GI NO: 29145113 NR Description: similar to DNA segment
  misc_feature (1)..(77): NCBI GI NO: 20070410 NR Description: DNA segment
  misc_feature (1)..(77): NCBI GI NO: 34873422 NR Description: similar to DNA segment
  misc_feature (1)..(77): NCBI GI NO: 13097162 NR Description: Similar to CG5057 gene product [Homo sapiens]
  misc_feature (1)..(77): NCBI GI NO: 31216855 NR Description: ENSANGP00000021242 [Anopheles gambiae]
  misc_feature (1)..(80): NCBI GI NO: 9799628 NR Description: Nut2 [Drosophila melanogaster]
  misc_feature (1)..(104): NCBI GI NO: 29841376 NR Description: similar to GenBank Accession Number BC003353 CG5057gene product in Homo sapiens
MQKLADGCNIQVPMEVVNLIDDGKNPDEFTRDVLNSCIAKNQITKGKTDAFKSLRKHLLEELEEAFPDDVEAYRQIRATSAAESKRLAQSQSALPNGDAKVKPEH

SEQ ID NO: 13055 - DNA, 431 bp, Triticum aestivum
  misc_feature (1)..(431): Ceres Seq. ID no. 12585579
agcgtcgcctcgactcaaccagagcacataataagaatcaaacaacgcaacctctgcgcgcgagagatcgacacatccatcggaatcacaagacagagatgagctcgtcggcggccaagaagggggcgtcgctggtggcggcgacgagcatggcggccgtggaggcgctcaaggaccaggcggggctgtgccgctgggactacgcgctccgctcgctctaccaccgcgccgtcccggcgtccctatcctcctcctcccagcacgccgggagcggcagcgcggcggccgtcggcagggctgcgcggcccaggcgatccgaggaggagaagctgcacaaggcgtaccacatcgtctgctggggacccaactgaactgattgtaatagccaaactgattagcactaataagcacattcgtgttctgcttctcct

SEQ ID NO: 13056 - protein, 122 aa, Triticum aestivum
  peptide (1)..(122): Ceres Seq. ID no. 12585580
  misc_feature (35)..(122): NCBI GI NO: 38344799 NR Description: OSJNBa0043L09.19
  misc_feature (35)..(122): NCBI GI NO: 38344803 NR Description: OSJNBa0043L09.23
  misc_feature (33)..(122): NCBI GI NO: 38636812 NR Description: unknown protein
  misc_feature (33)..(122): NCBI GI NO: 38344798 NR Description: OSJNBa0043L09.18
  misc_feature (35)..(122): NCBI GI NO: 38344805 NR Description: OSJNBa0043L09.25
  misc_feature (35)..(122): NCBI GI NO: 38344804 NR Description: OSJNBa0043L09.24
  misc_feature (45)..(122): NCBI GI NO: 82114 NR Description: wound-induced protein - tomato (fragment)
  misc_feature (47)..(122): NCBI GI NO: 15234987 NR Description: probable wound-induced protein
  misc_feature (35)..(122): NCBI GI NO: 30681389 NR Description: wound-induced protein, putative
RRLDSTRAHNKNQTTQPLRARDRHIHRNHKTEMSSSAAKKGASLVAATSMAAVEALKDQAGLCRWDYALRSLYHRAVPASLSSSSQHAGSGSAAAVGRAARPRRSEEEKLHKAYHIVCWGPN

SEQ ID NO: 13057 - protein, 90 aa, Triticum aestivum
  peptide (1)..(90): Ceres Seq. ID no. 12585581
  misc_feature (3)..(90): NCBI GI NO: 38344799 NR Description: OSJNBa0043L09.19
  misc_feature (3)..(90): NCBI GI NO: 38344803 NR Description: OSJNBa0043L09.23
  misc_feature (1)..(90): NCBI GI NO: 38636812 NR Description: unknown protein
  misc_feature (1)..(90): NCBI GI NO: 38344798 NR Description: OSJNBa0043L09.18
  misc_feature (3)..(90): NCBI GI NO: 38344805 NR Description: OSJNBa0043L09.25
  misc_feature (3)..(90): NCBI GI NO: 38344804 NR Description: OSJNBa0043L09.24
  misc_feature (13)..(90): NCBI GI NO: 82114 NR Description: wound-induced protein - tomato (fragment)
  misc_feature (15)..(90): NCBI GI NO: 15234987 NR Description: probable wound-induced protein
  misc_feature (3)..(90): NCBI GI NO: 30681389 NR Description: wound-induced protein, putative
MSSSAAKKGASLVAATSMAAVEALKDQAGLCRWDYALRSLYHRAVPASLSSSSQHAGSGSAAAVGRAARPRRSEEEKLHKAYHIVCWGPN

SEQ ID NO: 13058 - protein, 73 aa, Triticum aestivum
  peptide (1)..(73): Ceres Seq. ID no. 12585582
  misc_feature (1)..(73): NCBI GI NO: 38344799 NR Description: OSJNBa0043L09.19
  misc_feature (1)..(73): NCBI GI NO: 38344803 NR Description: OSJNBa0043L09.23
  misc_feature (1)..(73): NCBI GI NO: 38636812 NR Description: unknown protein
  misc_feature (1)..(73): NCBI GI NO: 38344798 NR Description: OSJNBa0043L09.18
  misc_feature (1)..(73): NCBI GI NO: 38344805 NR Description: OSJNBa0043L09.25
  misc_feature (1)..(73): NCBI GI NO: 38344804 NR Description: OSJNBa0043L09.24
  misc_feature (1)..(73): NCBI GI NO: 82114 NR Description: wound-induced protein - tomato (fragment)
  misc_feature (1)..(73): NCBI GI NO: 15234987 NR Description: probable wound-induced protein
  misc_feature (1)..(73): NCBI GI NO: 30681389 NR Description: wound-induced protein, putative
MAAVEALKDQAGLCRWDYALRSLYHRAVPASLSSSSQHAGSGSAAAVGRAARPRRSEEEKLHKAYHIVCWGPN

SEQ ID NO: 13059 - DNA, 1065 bp, Triticum aestivum
  misc_feature (1)..(1065): Ceres Seq. ID no. 13596609
ctagaacatcctaatcgaaaagatttgttcccgtttcatttggtgtctttgctcagcagcgtgtctctgttgagctctagctgtactgcatcgttatccaatactggcgatacttgtggtgggttttgggttttggatgagcacccacaatgacgagtgccggcggtcactcacaatccctgtcatgggtcttggaggagtcatttttctcatgtcgctggcgggatttgtgggtgcttggaagaacatttcttgcttgctttggacatatctaataatgctgttcgtggtcctggtggcaatcatggtcttcacagtgcttgcgtttatcattacaaatactggaactggtcatgctgttcctgggtccagatataaagagtatcgtcttcaggactacagttcttggttcgtcaaacagctcaatgacactgataaatggactcatctgagaagttgccttgtgaagtcggatgattgcaatagcttgtcaaaaagatataagactctaaaacaatacaagctcgctgagctgactcccattgagtctggctgttgccgcccaccagcggagtgtggatatccagctttgaatgcttccaattttgatctgagctaccatccggtgagcacaaacgtcgactgcaaactgtacaaaaatgatcggttcctcaggtgctatgactgtaattcttgcaaagctggtgttgcgcaatacatgaagacagagtggcgagtggttgccatcttcaatgtgatattgtttatcattttgtcattcgtgtactttgttggctgctgcgcacgtcgacatgctggaggtagtgattctaaagttcctcgaagatgactcttactttgaagtgaatcctctctatgattcacgtgtcacagcgagagttagctttaccgtcccttgtaaaacattgttcattcaagttcagctgatgaaatggagtgtcaaggcttctgttctgtgggcgatttctttgtgccagtagcattttggacatctatgaaaatgaacgtcccacaatcttctgaaatacagcctcatgatcttgt

SEQ ID NO: 13060 - protein, 237 aa, Triticum aestivum
  peptide (1)..(237): Ceres Seq. ID no. 13596610
  misc_feature (1)..(213): Pfam Name: Pfam Description:  Tetraspanin family
  misc_feature (1)..(237): NCBI GI NO: 37535820 NR Description: putative senescence-associated protein
  misc_feature (1)..(233): NCBI GI NO: 30696823 NR Description: senescence-associated protein family
  misc_feature (45)..(213): NCBI GI NO: 25404415 NR Description: hypothetical protein F9N12.12
  misc_feature (1)..(226): NCBI GI NO: 29367553 NR Description: senescence-associated protein-like protein
  misc_feature (1)..(226): NCBI GI NO: 3551954 NR Description: senescence-associated protein 5
  misc_feature (1)..(232): NCBI GI NO: 20197174 NR Description: hypothetical protein [Arabidopsis thaliana]
  misc_feature (1)..(226): NCBI GI NO: 15234374 NR Description: senescence-associated protein, putative
  misc_feature (1)..(226): NCBI GI NO: 15234743 NR Description: senescence-associated protein family
  misc_feature (1)..(226): NCBI GI NO: 21537169 NR Description: senescence-associated protein-like protein
  misc_feature (1)..(235): NCBI GI NO: 15231187 NR Description: senescence-associated protein family
MSTHNDECRRSLTIPVMGLGGVIFLMSLAGFVGAWKNISCLLWTYLIMLFVVLVAIMVFTVLAFIITNTGTGHAVPGSRYKEYRLQDYSSWFVKQLNDTDKWTHLRSCLVKSDDCNSLSKRYKTLKQYKLAELTPIESGCCRPPAECGYPALNASNFDLSYHPVSTNVDCKLYKNDRFLRCYDCNSCKAGVAQYMKTEWRVVAIFNVILFIILSFVYFVGCCARRHAGGSDSKVPRR

SEQ ID NO: 13061 - protein, 221 aa, Triticum aestivum
  peptide (1)..(221): Ceres Seq. ID no. 13596611
  misc_feature (1)..(197): Pfam Name: Pfam Description:  Tetraspanin family
  misc_feature (1)..(221): NCBI GI NO: 37535820 NR Description: putative senescence-associated protein
  misc_feature (1)..(217): NCBI GI NO: 30696823 NR Description: senescence-associated protein family
  misc_feature (29)..(197): NCBI GI NO: 25404415 NR Description: hypothetical protein F9N12.12
  misc_feature (1)..(210): NCBI GI NO: 29367553 NR Description: senescence-associated protein-like protein
  misc_feature (1)..(210): NCBI GI NO: 3551954 NR Description: senescence-associated protein 5
  misc_feature (1)..(216): NCBI GI NO: 20197174 NR Description: hypothetical protein [Arabidopsis thaliana]
  misc_feature (1)..(210): NCBI GI NO: 15234374 NR Description: senescence-associated protein, putative
  misc_feature (1)..(210): NCBI GI NO: 15234743 NR Description: senescence-associated protein family
  misc_feature (1)..(210): NCBI GI NO: 21537169 NR Description: senescence-associated protein-like protein
  misc_feature (1)..(219): NCBI GI NO: 15231187 NR Description: senescence-associated protein family
MGLGGVIFLMSLAGFVGAWKNISCLLWTYLIMLFVVLVAIMVFTVLAFIITNTGTGHAVPGSRYKEYRLQDYSSWFVKQLNDTDKWTHLRSCLVKSDDCNSLSKRYKTLKQYKLAELTPIESGCCRPPAECGYPALNASNFDLSYHPVSTNVDCKLYKNDRFLRCYDCNSCKAGVAQYMKTEWRVVAIFNVILFIILSFVYFVGCCARRHAGGSDSKVPRR

SEQ ID NO: 13062 - protein, 212 aa, Triticum aestivum
  peptide (1)..(212): Ceres Seq. ID no. 13596612
  misc_feature (1)..(188): Pfam Name: Pfam Description:  Tetraspanin family
  misc_feature (1)..(212): NCBI GI NO: 37535820 NR Description: putative senescence-associated protein
  misc_feature (1)..(208): NCBI GI NO: 30696823 NR Description: senescence-associated protein family
  misc_feature (20)..(188): NCBI GI NO: 25404415 NR Description: hypothetical protein F9N12.12
  misc_feature (1)..(201): NCBI GI NO: 29367553 NR Description: senescence-associated protein-like protein
  misc_feature (1)..(201): NCBI GI NO: 3551954 NR Description: senescence-associated protein 5
  misc_feature (1)..(207): NCBI GI NO: 20197174 NR Description: hypothetical protein [Arabidopsis thaliana]
  misc_feature (1)..(201): NCBI GI NO: 15234374 NR Description: senescence-associated protein, putative
  misc_feature (1)..(201): NCBI GI NO: 15234743 NR Description: senescence-associated protein family
  misc_feature (1)..(201): NCBI GI NO: 21537169 NR Description: senescence-associated protein-like protein
  misc_feature (1)..(210): NCBI GI NO: 15231187 NR Description: senescence-associated protein family
MSLAGFVGAWKNISCLLWTYLIMLFVVLVAIMVFTVLAFIITNTGTGHAVPGSRYKEYRLQDYSSWFVKQLNDTDKWTHLRSCLVKSDDCNSLSKRYKTLKQYKLAELTPIESGCCRPPAECGYPALNASNFDLSYHPVSTNVDCKLYKNDRFLRCYDCNSCKAGVAQYMKTEWRVVAIFNVILFIILSFVYFVGCCARRHAGGSDSKVPRR

SEQ ID NO: 13063 - DNA, 1035 bp, Triticum aestivum
  misc_feature (1)..(1035): Ceres Seq. ID no. 15179752
gccgcctctccccataccctcgccgtctcctctcccacgaagcgcagctcgtcgaggtaagcaccggtcccccgaacccgccgctgtcccctccccgcttcgatctaagcctgaaggatctgtggttgattgcgtccgcgcagatggcctccgaggcggcgaaggtgccggtgccggagtcggtgaacttcaagaggaagaggggagaggtctgggccgccgcgaagaagcagaaggtcgccgacgagaagaagaaggacgcggagaacaccaaggtcatctacgcccgcgccaaggagtacgccggggagtatgaggctcaggacaaggagctggtgcaacttaagcgtgaggcccggatgaagggtgggttctatgtcagtcctgaggcaaagctgctgtttgtcgtccgtatccgtggtatcaatgctatgcacccaaagaccaagaagatcttgcagcttttgcgtttgaggcagatttttaatggtgtgttccttaaggtcaacaaggccaccattaacatgctgcgtcgggttgagccatatgttgcttacgggtaccctaacctcaagagtgtcagggagctgatctacaagagaggttacggaaagctcaacaagcaaaggatccttctgaccaacaacaaagtcatcgaggagggtttggggaagcacaacatcatttgcattgaggaccttgtgcatgagatcttgaccgtcggcccacacttcaaggaggctaacaacttcctgtggccattcaagctcaaggctccgctcggtggcctgaagaagaagaggaaccactacgtcgagggtggtgatgctggcaaccgcgagaactacatcaaccagctcgttagaaggatgaactaggttgaatgagcatgataatagcctgtgttggaaggataaacttgtttcacattaggaagcggatgatgaatatgcatgcgttttttgtatcgagaactagacatgtttggatgaaatcccacatttcctctagaaatactaagttttttagcttgtt

SEQ ID NO: 13064 - protein, 291 aa, Triticum aestivum
  peptide (1)..(291): Ceres Seq. ID no. 15179753
  misc_feature (131)..(183): Pfam Name: Pfam Description:  Ribosomal protein L30p/L7e
  misc_feature (48)..(291): NCBI GI NO: 38346542 NR Description: OSJNBa0035M09.3
  misc_feature (48)..(291): NCBI GI NO: 38637548 NR Description: putative 60S ribosomal protein L7
  misc_feature (55)..(291): NCBI GI NO: 445613 NR Description: ribosomal protein L7
  misc_feature (48)..(291): NCBI GI NO: 15231288 NR Description: 60S ribosomal protein L7 (RPL7D)
  misc_feature (53)..(291): NCBI GI NO: 15226212 NR Description: 60S ribosomal protein L7 (RPL7B)
  misc_feature (53)..(291): NCBI GI NO: 30689617 NR Description: 60S ribosomal protein L7 (RPL7C)
  misc_feature (53)..(291): NCBI GI NO: 30689623 NR Description: 60S ribosomal protein L7 (RPL7C)
  misc_feature (53)..(291): NCBI GI NO: 27311547 NR Description: Unknown protein [Arabidopsis thaliana]
  misc_feature (53)..(290): NCBI GI NO: 28630259 NR Description: ribosomal protein L7 [Branchiostoma lanceolatum]
  misc_feature (43)..(291): NCBI GI NO: 27660180 NR Description: similar to ribosomal protein L7, cytosolic
RLSPYPRRLLSHEAQLVEVSTGPPNPPLSPPRFDLSLKDLWLIASAQMASEAAKVPVPESVNFKRKRGEVWAAAKKQKVADEKKKDAENTKVIYARAKEYAGEYEAQDKELVQLKREARMKGGFYVSPEAKLLFVVRIRGINAMHPKTKKILQLLRLRQIFNGVFLKVNKATINMLRRVEPYVAYGYPNLKSVRELIYKRGYGKLNKQRILLTNNKVIEEGLGKHNIICIEDLVHEILTVGPHFKEANNFLWPFKLKAPLGGLKKKRNHYVEGGDAGNRENYINQLVRRMN

SEQ ID NO: 13065 - protein, 244 aa, Triticum aestivum
  peptide (1)..(244): Ceres Seq. ID no. 15179754
  misc_feature (84)..(136): Pfam Name: Pfam Description:  Ribosomal protein L30p/L7e
  misc_feature (1)..(244): NCBI GI NO: 38346542 NR Description: OSJNBa0035M09.3
  misc_feature (1)..(244): NCBI GI NO: 38637548 NR Description: putative 60S ribosomal protein L7
  misc_feature (8)..(244): NCBI GI NO: 445613 NR Description: ribosomal protein L7
  misc_feature (1)..(244): NCBI GI NO: 15231288 NR Description: 60S ribosomal protein L7 (RPL7D)
  misc_feature (6)..(244): NCBI GI NO: 15226212 NR Description: 60S ribosomal protein L7 (RPL7B)
  misc_feature (6)..(244): NCBI GI NO: 30689617 NR Description: 60S ribosomal protein L7 (RPL7C)
  misc_feature (6)..(244): NCBI GI NO: 30689623 NR Description: 60S ribosomal protein L7 (RPL7C)
  misc_feature (6)..(244): NCBI GI NO: 27311547 NR Description: Unknown protein [Arabidopsis thaliana]
  misc_feature (6)..(243): NCBI GI NO: 28630259 NR Description: ribosomal protein L7 [Branchiostoma lanceolatum]
  misc_feature (1)..(244): NCBI GI NO: 27660180 NR Description: similar to ribosomal protein L7, cytosolic
MASEAAKVPVPESVNFKRKRGEVWAAAKKQKVADEKKKDAENTKVIYARAKEYAGEYEAQDKELVQLKREARMKGGFYVSPEAKLLFVVRIRGINAMHPKTKKILQLLRLRQIFNGVFLKVNKATINMLRRVEPYVAYGYPNLKSVRELIYKRGYGKLNKQRILLTNNKVIEEGLGKHNIICIEDLVHEILTVGPHFKEANNFLWPFKLKAPLGGLKKKRNHYVEGGDAGNRENYINQLVRRMN

SEQ ID NO: 13066 - protein, 172 aa, Triticum aestivum
  peptide (1)..(172): Ceres Seq. ID no. 15179755
  misc_feature (12)..(64): Pfam Name: Pfam Description:  Ribosomal protein L30p/L7e
  misc_feature (1)..(172): NCBI GI NO: 38346542 NR Description: OSJNBa0035M09.3
  misc_feature (1)..(172): NCBI GI NO: 38637548 NR Description: putative 60S ribosomal protein L7
  misc_feature (1)..(172): NCBI GI NO: 445613 NR Description: ribosomal protein L7
  misc_feature (1)..(172): NCBI GI NO: 15231288 NR Description: 60S ribosomal protein L7 (RPL7D)
  misc_feature (1)..(172): NCBI GI NO: 15226212 NR Description: 60S ribosomal protein L7 (RPL7B)
  misc_feature (1)..(172): NCBI GI NO: 30689617 NR Description: 60S ribosomal protein L7 (RPL7C)
  misc_feature (1)..(172): NCBI GI NO: 30689623 NR Description: 60S ribosomal protein L7 (RPL7C)
  misc_feature (1)..(172): NCBI GI NO: 27311547 NR Description: Unknown protein [Arabidopsis thaliana]
  misc_feature (1)..(171): NCBI GI NO: 28630259 NR Description: ribosomal protein L7 [Branchiostoma lanceolatum]
  misc_feature (1)..(172): NCBI GI NO: 27660180 NR Description: similar to ribosomal protein L7, cytosolic
MKGGFYVSPEAKLLFVVRIRGINAMHPKTKKILQLLRLRQIFNGVFLKVNKATINMLRRVEPYVAYGYPNLKSVRELIYKRGYGKLNKQRILLTNNKVIEEGLGKHNIICIEDLVHEILTVGPHFKEANNFLWPFKLKAPLGGLKKKRNHYVEGGDAGNRENYINQLVRRMN

SEQ ID NO: 13067 - DNA, 798 bp, Triticum aestivum
  misc_feature (1)..(798): Ceres Seq. ID no. 12584967
aggctacggtaaccggcccaaagaccatgggataattcttcttcttcttcttcccctgggcagttgggctcctagggtttgaacgagcacacgagccaccagcccaccaccaccaccactatcacccaccatgaaacggtcgccaccacgcgatgacgcggcggcggcgggcagcagcggaggaggagggttcaacaaggggaaggggaggtggggcgggaagaagcggaacgagcagcggctgggaggcagcggcggggcgctctccctcgcggccttcgccaacgccaagtccaggaccaccggctacaacccggcactcatcaagaagcagaaggagttctacaggaatgctaaattgattagcaagtacaagaagtcgaagaagcaccaaaatcagtcaaactatcctccacaatttccaacccttgaggaaggaggtgctgatgcatcggatgtgccaaaaccacatgataagaggaagaagcgcacttcacaaagcttgaatgtggagtacgagaagaaacgtgtagaggacgagaaggcaaagaaggagcgggatgcgatgatacaggccaagaaggaggagcgagagaagtctgaagcaaagagaaaggagcttagggagaagatgttcaagaggacacgatccgggcagcctgtgatgaaatacaggattgagcatctcttggagactgcactagaaagctcaaacaagtgagttatgatatgttctaagactaatgccacactaattaaaacaaatcagtccagtgcagtgataagtttgtattagtg

SEQ ID NO: 13068 - protein, 196 aa, Triticum aestivum
  peptide (1)..(196): Ceres Seq. ID no. 12584968
  misc_feature (85)..(167): Pfam Name: Pfam Description:  Hsp90 protein
  misc_feature (22)..(194): NCBI GI NO: 15236259 NR Description: unknown protein; protein id: At4g03180
  misc_feature (77)..(194): NCBI GI NO: 19115190 NR Description: very hypothetical protein
MKRSPPRDDAAAAGSSGGGGFNKGKGRWGGKKRNEQRLGGSGGALSLAAFANAKSRTTGYNPALIKKQKEFYRNAKLISKYKKSKKHQNQSNYPPQFPTLEEGGADASDVPKPHDKRKKRTSQSLNVEYEKKRVEDEKAKKERDAMIQAKKEEREKSEAKRKELREKMFKRTRSGQPVMKYRIEHLLETALESSNK

SEQ ID NO: 13069 - DNA, 1209 bp, Triticum aestivum
  misc_feature (1)..(1209): Ceres Seq. ID no. 13596648
agcgccttccccatttccacaaccgcccgtcctcctcctcctccccctcccacgctacagcagagcagcagcagcagccccgtcgatctactccgcgctcctctcccccccagacccggccgctcctcgccgccatggcgcctcgcgtgccctcctccctcctcctcgtcggcgccgcgctgctcctgggcctggcggccggcgcggcgcgggcgtccaacgaggagggggacgcgctgtacgcgctgcggatgcggctgtcggaccccaacggcgtgctccagagctgggatcccaccctcgtcaacccctgcacctggttccacgtcacctgcgacaccgccagccgcgtcgtgcgcctggatttaggcaactccaacgtctccggctccatcggccccgagctcagccgccttgtgaatcttcagtacctggagctgtacaggaacaacctcaacggcgagatcccaaaagagttgggcaagctgaagaatttgatcagcttggatctgtatgccaataagctcaccggaagaatccccaagtcgctttccaagctcagctcgctgagattcatgcgtttgaacaacaacaaacttgctggatcaattccacgggagctggccaaactctccaaccttaaagtcattgatttgtctaacaatgacttatgtgggacgatccctgtcgatggtccattctcaagcttccctcttagaagcttcgagaacaacagcagactgaacggcccggagctgcaaggattggtttcctatgactttggatgctagaaagcgctgatgcacacgacaatgcacgtggaaggaaggcaaaaaattatagtagtacaacaaatagtaggaagcttagcactacaacatgtatggcttgcgatacatgcagcagaagatgaagaaggtatgtgagcatagggtctgcgttcggtactcagaccccagaaggaaaataatgggatgtgagaagtcttagcttgatcgattgttattgccgtattgtaaattgtaataagctgcttagtaccgcagctaagctgaccgcttgggtccattgagtaagcctttgccagttcggaactaaatcccagctgatgaagaatgtatctcaagttttatctacaaacgatccacatctctttgttatgtcaaaaaaaaaaaaaaaaaacctatagtgagtcgtattccaatacgg

SEQ ID NO: 13070 - protein, 262 aa, Triticum aestivum
  peptide (1)..(262): Ceres Seq. ID no. 13596649
  misc_feature (212)..(244): Pfam Name: Pfam Description:  Leucine Rich Repeat
  misc_feature (45)..(262): NCBI GI NO: 34896972 NR Description: putative leucine-rich repeat protein
  misc_feature (58)..(262): NCBI GI NO: 34903344 NR Description: unnamed protein product
  misc_feature (51)..(262): NCBI GI NO: 30385250 NR Description: leucine-rich repeat protein
  misc_feature (55)..(262): NCBI GI NO: 34146800 NR Description: At3g43740 [Arabidopsis thaliana]
  misc_feature (55)..(262): NCBI GI NO: 15242153 NR Description: leucine rich repeat protein (LRP), putative
  misc_feature (55)..(262): NCBI GI NO: 29468120 NR Description: leucine-rich repeat protein [Oryza sativa]
  misc_feature (48)..(262): NCBI GI NO: 7489030 NR Description: leucine-rich repeat protein LRP - tomato
  misc_feature (55)..(262): NCBI GI NO: 27497122 NR Description: floral organ regulator 1
  misc_feature (56)..(250): NCBI GI NO: 40253600 NR Description: putative somatic embryogenesis receptor kinase 1
  misc_feature (56)..(250): NCBI GI NO: 38679443 NR Description: benzothiadiazole-induced somatic embryogenesisreceptor kinase 1
RLPHFHNRPSSSSSPSHATAEQQQQPRRSTPRSSPPQTRPLLAAMAPRVPSSLLLVGAALLLGLAAGAARASNEEGDALYALRMRLSDPNGVLQSWDPTLVNPCTWFHVTCDTASRVVRLDLGNSNVSGSIGPELSRLVNLQYLELYRNNLNGEIPKELGKLKNLISLDLYANKLTGRIPKSLSKLSSLRFMRLNNNKLAGSIPRELAKLSNLKVIDLSNNDLCGTIPVDGPFSSFPLRSFENNSRLNGPELQGLVSYDFGC

SEQ ID NO: 13071 - protein, 218 aa, Triticum aestivum
  peptide (1)..(218): Ceres Seq. ID no. 13596650
  misc_feature (168)..(200): Pfam Name: Pfam Description:  Leucine Rich Repeat
  misc_feature (1)..(218): NCBI GI NO: 34896972 NR Description: putative leucine-rich repeat protein
  misc_feature (14)..(218): NCBI GI NO: 34903344 NR Description: unnamed protein product
  misc_feature (7)..(218): NCBI GI NO: 30385250 NR Description: leucine-rich repeat protein
  misc_feature (11)..(218): NCBI GI NO: 34146800 NR Description: At3g43740 [Arabidopsis thaliana]
  misc_feature (11)..(218): NCBI GI NO: 15242153 NR Description: leucine rich repeat protein (LRP), putative
  misc_feature (11)..(218): NCBI GI NO: 29468120 NR Description: leucine-rich repeat protein [Oryza sativa]
  misc_feature (4)..(218): NCBI GI NO: 7489030 NR Description: leucine-rich repeat protein LRP - tomato
  misc_feature (11)..(218): NCBI GI NO: 27497122 NR Description: floral organ regulator 1
  misc_feature (12)..(206): NCBI GI NO: 40253600 NR Description: putative somatic embryogenesis receptor kinase 1
  misc_feature (12)..(206): NCBI GI NO: 38679443 NR Description: benzothiadiazole-induced somatic embryogenesisreceptor kinase 1
MAPRVPSSLLLVGAALLLGLAAGAARASNEEGDALYALRMRLSDPNGVLQSWDPTLVNPCTWFHVTCDTASRVVRLDLGNSNVSGSIGPELSRLVNLQYLELYRNNLNGEIPKELGKLKNLISLDLYANKLTGRIPKSLSKLSSLRFMRLNNNKLAGSIPRELAKLSNLKVIDLSNNDLCGTIPVDGPFSSFPLRSFENNSRLNGPELQGLVSYDFGC

SEQ ID NO: 13072 - protein, 179 aa, Triticum aestivum
  peptide (1)..(179): Ceres Seq. ID no. 13596651
  misc_feature (129)..(161): Pfam Name: Pfam Description:  Leucine Rich Repeat
  misc_feature (1)..(179): NCBI GI NO: 34896972 NR Description: putative leucine-rich repeat protein
  misc_feature (1)..(179): NCBI GI NO: 34903344 NR Description: unnamed protein product
  misc_feature (1)..(179): NCBI GI NO: 30385250 NR Description: leucine-rich repeat protein
  misc_feature (1)..(179): NCBI GI NO: 34146800 NR Description: At3g43740 [Arabidopsis thaliana]
  misc_feature (1)..(179): NCBI GI NO: 15242153 NR Description: leucine rich repeat protein (LRP), putative
  misc_feature (1)..(179): NCBI GI NO: 29468120 NR Description: leucine-rich repeat protein [Oryza sativa]
  misc_feature (1)..(179): NCBI GI NO: 7489030 NR Description: leucine-rich repeat protein LRP - tomato
  misc_feature (1)..(179): NCBI GI NO: 27497122 NR Description: floral organ regulator 1
  misc_feature (1)..(167): NCBI GI NO: 40253600 NR Description: putative somatic embryogenesis receptor kinase 1
  misc_feature (1)..(167): NCBI GI NO: 38679443 NR Description: benzothiadiazole-induced somatic embryogenesisreceptor kinase 1
MRLSDPNGVLQSWDPTLVNPCTWFHVTCDTASRVVRLDLGNSNVSGSIGPELSRLVNLQYLELYRNNLNGEIPKELGKLKNLISLDLYANKLTGRIPKSLSKLSSLRFMRLNNNKLAGSIPRELAKLSNLKVIDLSNNDLCGTIPVDGPFSSFPLRSFENNSRLNGPELQGLVSYDFGC

SEQ ID NO: 13073 - DNA, 847 bp, Triticum aestivum
  misc_feature (1)..(847): Ceres Seq. ID no. 13583591
aatcgaaaacccctgactccgccgagcgagcatcacctttccgccgctgctcgccgcacgccgccccgccgaccgagaccctcaggcccgccccactctagcccgcccgcccgcatggctgccgatcgccggcccggcgtctgagggagcgggcggctgcgctcgggggccagtccggcggcgcgatggagctgtccgggagccccggcacgtggagcggcctctcgctgcggctcggccagttcctcttcgccgccgcgtccgtctgcgtcatgtcctccgcgatcggcttcgccaactacaccgccttctgctacttgattgcatcaatgggactacaagcactctggagcttgggacttgcgtgtcttgatggctatgctttgagaatgaaaaaggaactcaacagtgctgttctcgtgagcttatttgttgttggagattgggtaacgtcgatcctgtcgttcgccgcttcatgctcagcaggaagcgtcgttgttctcttcgacaaggatgcgtacttctgcagcagggacccgcatctcccctgtgggacatttgagcttgcgaccgcgtttgcattcctttcctgggcgcttagtgccacatctgcccttgtgatgttttggctcctcgcttcatcttgattagatatgtaggagctctgtctgtacctagtgttgtttggtcctgtctggttatataccgactgatgtgtcaagcagactacataggaatagactgctaattccagagaatagatgggcaatggtcgcaagttccatggagtcttaaattttagagccatgcttcagtgtttcgggccaaagataacttggttcctggc

SEQ ID NO: 13074 - protein, 153 aa, Triticum aestivum
  peptide (1)..(153): Ceres Seq. ID no. 13583592
  misc_feature (5)..(138): Pfam Name: DUF588 Pfam Description: Domain of unknown function
  misc_feature (2)..(150): NCBI GI NO: 15241672 NR Description: hypothetical protein [Arabidopsis thaliana]
  misc_feature (2)..(152): NCBI GI NO: 18409932 NR Description: expressed protein [Arabidopsis thaliana]
  misc_feature (2)..(152): NCBI GI NO: 18401722 NR Description: expressed protein [Arabidopsis thaliana]
  misc_feature (1)..(153): NCBI GI NO: 30686969 NR Description: expressed protein [Arabidopsis thaliana]
  misc_feature (1)..(152): NCBI GI NO: 11357817 NR Description: hypothetical protein F5K20
  misc_feature (7)..(136): NCBI GI NO: 26006486 NR Description: Unknown protein
  misc_feature (2)..(152): NCBI GI NO: 25408537 NR Description: hypothetical protein At2g37200
  misc_feature (2)..(152): NCBI GI NO: 30687069 NR Description: expressed protein [Arabidopsis thaliana]
  misc_feature (1)..(152): NCBI GI NO: 22330130 NR Description: hypothetical protein [Arabidopsis thaliana]
  misc_feature (1)..(99): NCBI GI NO: 7939530 NR Description: gb|AAD20689
MELSGSPGTWSGLSLRLGQFLFAAASVCVMSSAIGFANYTAFCYLIASMGLQALWSLGLACLDGYALRMKKELNSAVLVSLFVVGDWVTSILSFAASCSAGSVVVLFDKDAYFCSRDPHLPCGTFELATAFAFLSWALSATSALVMFWLLASS

SEQ ID NO: 13075 - protein, 124 aa, Triticum aestivum
  peptide (1)..(124): Ceres Seq. ID no. 13583593
  misc_feature (1)..(109): Pfam Name: DUF588 Pfam Description: Domain of unknown function
  misc_feature (1)..(121): NCBI GI NO: 15241672 NR Description: hypothetical protein [Arabidopsis thaliana]
  misc_feature (1)..(123): NCBI GI NO: 18409932 NR Description: expressed protein [Arabidopsis thaliana]
  misc_feature (1)..(123): NCBI GI NO: 18401722 NR Description: expressed protein [Arabidopsis thaliana]
  misc_feature (1)..(124): NCBI GI NO: 30686969 NR Description: expressed protein [Arabidopsis thaliana]
  misc_feature (1)..(123): NCBI GI NO: 11357817 NR Description: hypothetical protein F5K20
  misc_feature (1)..(107): NCBI GI NO: 26006486 NR Description: Unknown protein
  misc_feature (1)..(123): NCBI GI NO: 25408537 NR Description: hypothetical protein At2g37200
  misc_feature (1)..(123): NCBI GI NO: 30687069 NR Description: expressed protein [Arabidopsis thaliana]
  misc_feature (1)..(123): NCBI GI NO: 22330130 NR Description: hypothetical protein [Arabidopsis thaliana]
  misc_feature (1)..(70): NCBI GI NO: 7939530 NR Description: gb|AAD20689
MSSAIGFANYTAFCYLIASMGLQALWSLGLACLDGYALRMKKELNSAVLVSLFVVGDWVTSILSFAASCSAGSVVVLFDKDAYFCSRDPHLPCGTFELATAFAFLSWALSATSALVMFWLLASS

SEQ ID NO: 13076 - protein, 105 aa, Triticum aestivum
  peptide (1)..(105): Ceres Seq. ID no. 13583594
  misc_feature (1)..(90): Pfam Name: DUF588 Pfam Description: Domain of unknown function
  misc_feature (1)..(102): NCBI GI NO: 15241672 NR Description: hypothetical protein [Arabidopsis thaliana]
  misc_feature (1)..(104): NCBI GI NO: 18409932 NR Description: expressed protein [Arabidopsis thaliana]
  misc_feature (1)..(104): NCBI GI NO: 18401722 NR Description: expressed protein [Arabidopsis thaliana]
  misc_feature (1)..(105): NCBI GI NO: 30686969 NR Description: expressed protein [Arabidopsis thaliana]
  misc_feature (1)..(104): NCBI GI NO: 11357817 NR Description: hypothetical protein F5K20
  misc_feature (1)..(88): NCBI GI NO: 26006486 NR Description: Unknown protein
  misc_feature (1)..(104): NCBI GI NO: 25408537 NR Description: hypothetical protein At2g37200
  misc_feature (1)..(104): NCBI GI NO: 30687069 NR Description: expressed protein [Arabidopsis thaliana]
  misc_feature (1)..(104): NCBI GI NO: 22330130 NR Description: hypothetical protein [Arabidopsis thaliana]
  misc_feature (1)..(51): NCBI GI NO: 7939530 NR Description: gb|AAD20689
MGLQALWSLGLACLDGYALRMKKELNSAVLVSLFVVGDWVTSILSFAASCSAGSVVVLFDKDAYFCSRDPHLPCGTFELATAFAFLSWALSATSALVMFWLLASS

SEQ ID NO: 13077 - DNA, 1193 bp, Triticum aestivum
  misc_feature (1)..(1193): Ceres Seq. ID no. 13598420
accttcccgtcgtctccctccccaacgccgcggcgaactgacccaccacccccaaaccctcgccgccgatggagcagccgccgtcctcgccgccgccccccgcggcggccacggccacggctgcgcctacacccgctcccgctccctcttccgctcccattatcctctcggactcgcctcccgcggccgcggcgggggagcccgcgctgaccgccgcacagaaggcgctccgctccaagccggcgcgcgcccccgaggaccccgacaagaagaataagaagctcaaggatgtggagatcagttttccaattgtttatgggaccatttcgttttggcttggcaaaaaagcaagcgagtacaactctcacaaatggaccgtgtacatccgttctgcaacaaatgaggatctgagtgtcatagttaagcgtgtggtgtttcagcttcacccaagtttcactaatccaacaagagttgtagagcaaccgccttttgagttgtccgaatctggatggggggagtttgagattgcaataaccctttattttcacagtgatgtctgcgagaagcgcttggacttgtttcatcagcttaagttgtatccggaagaggacgctggacctcaatcaacaaaaaaaccagttgtagtggagacatacgatgaagttgtcttccctgagcccactgaagccttcttcttgcgagtgcaaaatcaccctgctgctactgtgcccaggctacctcctggtataacattgtcttctccaggtcctatggaacttatgccacatgataagaagcgttttgacaccaaggatcattctctgagccagtggttctcaaacttctctgaagcagatgaactattaaaactggctgctgctcgtcaacaggtgcaggctcacattgctaagctgagaaggcagctaagcatgatagagggaatgccccagcaatccagagttatctctggtcctggtcaacagtttgggcacggctaatggaacggtagctgctgtaaggaagatgctgaaacctgataacaactcgctaacagaatgtgatgaatgtgtcttcattgacgtcttaggctcgcaattgatgtttagtgctggccagtgtgcataaagcgcaacctatggattgtaccgcctttgtgcattttgaaatcaacgggagcatggtgtacctgcctc

SEQ ID NO: 13078 - protein, 309 aa, Triticum aestivum
  peptide (1)..(309): Ceres Seq. ID no. 13598421
  misc_feature (78)..(181): Pfam Name: Pfam Description:  YEATS family
  misc_feature (34)..(294): NCBI GI NO: 15242448 NR Description: expressed protein [Arabidopsis thaliana]
  misc_feature (47)..(233): NCBI GI NO: 15227942 NR Description: hypothetical protein [Arabidopsis thaliana]
  misc_feature (65)..(205): NCBI GI NO: 5729838 NR Description: glioma-amplified sequence-41
  misc_feature (65)..(205): NCBI GI NO: 9755857 NR Description: NuBI-1 protein [Homo sapiens]
  misc_feature (65)..(205): NCBI GI NO: 13386064 NR Description: glioma-amplified sequence-41 [Mus musculus]
  misc_feature (65)..(205): NCBI GI NO: 34864887 NR Description: similar to glioma-amplified sequence-41
  misc_feature (65)..(205): NCBI GI NO: 18419436 NR Description: GAS41 [Gallus gallus]
  misc_feature (71)..(206): NCBI GI NO: 19920856 NR Description: CG9207-PA [Drosophila melanogaster]
  misc_feature (69)..(221): NCBI GI NO: 6324222 NR Description: Yeast homolog of the human leukemogenic proteinAF9
  misc_feature (70)..(209): NCBI GI NO: 40745868 NR Description: hypothetical protein AN1859.2
MEQPPSSPPPPAAATATAAPTPAPAPSSAPIILSDSPPAAAAGEPALTAAQKALRSKPARAPEDPDKKNKKLKDVEISFPIVYGTISFWLGKKASEYNSHKWTVYIRSATNEDLSVIVKRVVFQLHPSFTNPTRVVEQPPFELSESGWGEFEIAITLYFHSDVCEKRLDLFHQLKLYPEEDAGPQSTKKPVVVETYDEVVFPEPTEAFFLRVQNHPAATVPRLPPGITLSSPGPMELMPHDKKRFDTKDHSLSQWFSNFSEADELLKLAAARQQVQAHIAKLRRQLSMIEGMPQQSRVISGPGQQFGHG

SEQ ID NO: 13079 - DNA, 1083 bp, Triticum aestivum
  misc_feature (1)..(1083): Ceres Seq. ID no. 12593058
acaaagccagctcacctcacaccctatcacactcgacactcgtcagtggtcatagttcatcactgcacagctctcccactcggccactctcactcccacgccgacactcgccataatgcgccgcctccacctcgccgccgccgtcctcgccgtcttcctccccctcgccgtctccgcggccgggggcaaagcagcggcagctaaggcgcccgttgccccgccggccccgccgaacatcacggcggccatggcgaagggcgggtgcaaggcgttcgcggccctggtggcggcctcgccggacgcgcactccacgttccagtcggccggggacggcggcgtgacggccttctgccccagcgacgacgccgtgaggtccttcatgcccaggtacaagaacctcagcgccgacggcaaggcgtcgctgctgctgttccacgccgtgcccgtgtactacgcgccgcggagcctcaagtccaacaacggcgtcatgaacacgctcgccaccgacggctccgccaacaacttcaacttcacggtgcagaacgagggcgagcaggtgaccatcaagacggacgcctccgaccacgccgcgcgggtcaagtccaccgtctacgacaaggaccccatcgccatctacgccgtggacacggtgctcgagccggtggagctcttcgagccggcggagtccccggcgccggcgccggctcccgcccctgtcgccgacgcgcccaaggcccccaagaagcaggcgcgccaccggcctgtagcggacgcgcccggaccggccgccgaggacgcggcgcccgccgaccagaggaagaactctaagaagagcgcggcgtccgccgccccgtgtctgccatgggccgcagtcctgcctgtcgtcgtggccgtggccgccgctctggcttagccgcttgtcctccttcgcggtggacctgcacgggaggtagtggtgtgtcggtggattgcgttgcgtgtgtcctttgtgtctgtcggtcagtgcgtgtgctcgtgcagtgaaatttctatctttactctttcttgccacattaatgttgtttagtataataatttgatgtg

SEQ ID NO: 13080 - protein, 265 aa, Triticum aestivum
  peptide (1)..(265): Ceres Seq. ID no. 12593059
  misc_feature (41)..(182): Pfam Name: Pfam Description:  Fasciclin domain
  misc_feature (29)..(265): NCBI GI NO: 15240570 NR Description: fasciclin-like arabinogalactan-protein
  misc_feature (1)..(265): NCBI GI NO: 38424037 NR Description: putative fasciclin-like arabinogalactan-protein
  misc_feature (29)..(260): NCBI GI NO: 13377778 NR Description: fasciclin-like arabinogalactan-protein 2
  misc_feature (29)..(260): NCBI GI NO: 21593810 NR Description: putative pollen surface protein
  misc_feature (29)..(244): NCBI GI NO: 15235459 NR Description: fasciclin-like arabinogalactan-protein
  misc_feature (26)..(205): NCBI GI NO: 29836527 NR Description: putative pollen surface protein
  misc_feature (26)..(205): NCBI GI NO: 29836529 NR Description: putative pollen surface protein
  misc_feature (26)..(204): NCBI GI NO: 29836525 NR Description: putative pollen surface protein
  misc_feature (26)..(205): NCBI GI NO: 29836531 NR Description: putative pollen surface protein
  misc_feature (26)..(205): NCBI GI NO: 29836533 NR Description: putative pollen surface protein
MRRLHLAAAVLAVFLPLAVSAAGGKAAAAKAPVAPPAPPNITAAMAKGGCKAFAALVAASPDAHSTFQSAGDGGVTAFCPSDDAVRSFMPRYKNLSADGKASLLLFHAVPVYYAPRSLKSNNGVMNTLATDGSANNFNFTVQNEGEQVTIKTDASDHAARVKSTVYDKDPIAIYAVDTVLEPVELFEPAESPAPAPAPAPVADAPKAPKKQARHRPVADAPGPAAEDAAPADQRKNSKKSAASAAPCLPWAAVLPVVVAVAAALA

SEQ ID NO: 13081 - protein, 221 aa, Triticum aestivum
  peptide (1)..(221): Ceres Seq. ID no. 12593060
  misc_feature (1)..(138): Pfam Name: Pfam Description:  Fasciclin domain
  misc_feature (1)..(221): NCBI GI NO: 15240570 NR Description: fasciclin-like arabinogalactan-protein
  misc_feature (1)..(221): NCBI GI NO: 38424037 NR Description: putative fasciclin-like arabinogalactan-protein
  misc_feature (1)..(216): NCBI GI NO: 13377778 NR Description: fasciclin-like arabinogalactan-protein 2
  misc_feature (1)..(216): NCBI GI NO: 21593810 NR Description: putative pollen surface protein
  misc_feature (1)..(200): NCBI GI NO: 15235459 NR Description: fasciclin-like arabinogalactan-protein
  misc_feature (1)..(161): NCBI GI NO: 29836527 NR Description: putative pollen surface protein
  misc_feature (1)..(161): NCBI GI NO: 29836529 NR Description: putative pollen surface protein
  misc_feature (1)..(160): NCBI GI NO: 29836525 NR Description: putative pollen surface protein
  misc_feature (1)..(161): NCBI GI NO: 29836531 NR Description: putative pollen surface protein
  misc_feature (1)..(161): NCBI GI NO: 29836533 NR Description: putative pollen surface protein
MAKGGCKAFAALVAASPDAHSTFQSAGDGGVTAFCPSDDAVRSFMPRYKNLSADGKASLLLFHAVPVYYAPRSLKSNNGVMNTLATDGSANNFNFTVQNEGEQVTIKTDASDHAARVKSTVYDKDPIAIYAVDTVLEPVELFEPAESPAPAPAPAPVADAPKAPKKQARHRPVADAPGPAAEDAAPADQRKNSKKSAASAAPCLPWAAVLPVVVAVAAALA

SEQ ID NO: 13082 - protein, 177 aa, Triticum aestivum
  peptide (1)..(177): Ceres Seq. ID no. 12593061
  misc_feature (1)..(94): Pfam Name: Pfam Description:  Fasciclin domain
  misc_feature (1)..(177): NCBI GI NO: 15240570 NR Description: fasciclin-like arabinogalactan-protein
  misc_feature (1)..(177): NCBI GI NO: 38424037 NR Description: putative fasciclin-like arabinogalactan-protein
  misc_feature (1)..(172): NCBI GI NO: 13377778 NR Description: fasciclin-like arabinogalactan-protein 2
  misc_feature (1)..(172): NCBI GI NO: 21593810 NR Description: putative pollen surface protein
  misc_feature (1)..(156): NCBI GI NO: 15235459 NR Description: fasciclin-like arabinogalactan-protein
  misc_feature (1)..(117): NCBI GI NO: 29836527 NR Description: putative pollen surface protein
  misc_feature (1)..(117): NCBI GI NO: 29836529 NR Description: putative pollen surface protein
  misc_feature (1)..(116): NCBI GI NO: 29836525 NR Description: putative pollen surface protein
  misc_feature (1)..(117): NCBI GI NO: 29836531 NR Description: putative pollen surface protein
  misc_feature (1)..(117): NCBI GI NO: 29836533 NR Description: putative pollen surface protein
MPRYKNLSADGKASLLLFHAVPVYYAPRSLKSNNGVMNTLATDGSANNFNFTVQNEGEQVTIKTDASDHAARVKSTVYDKDPIAIYAVDTVLEPVELFEPAESPAPAPAPAPVADAPKAPKKQARHRPVADAPGPAAEDAAPADQRKNSKKSAASAAPCLPWAAVLPVVVAVAAALA

SEQ ID NO: 13083 - DNA, 1091 bp, Triticum aestivum
  misc_feature (1)..(1091): Ceres Seq. ID no. 13654980
ctgttgtaccgaaacggaggagggcgtctctctgctccgtcgccgatctcgcctccgccgcgaatcccccgaaaccgcgagcagattcgcgccggactcgcgacgatttttgatgagataagcccccggccacctcggggttcgcgatgctgcggaaggcggccgtcgggttcctcgcctgcctcgtgctctacctcgccttctcctcctacccccgtagccagagggctgcatatgttcagttaccagcagttactcacagggtatacctggacgtggaaattgatggccaaaatataggtagaattgtcattggtctttatggggaagttgtgccaaagacagttgaaaattttagagccctttgtacaggtgaaaagggtgatgggcccaagggtaaacctcttcactataaaggaacaccatttcatcgaatcatcccaggtttcatgattcagggtggtgacatagttagaggtgatgggaaagcacgcgaatctatatatggaggcaccttcccagatgagaatttcagtgtgaaacatacacatccaggtgttgttgctatggcaaattctggaactgattccaacggatcccagttctacataaccacaatcaagacaggctggttggatggggagcatgtggtctttggcagggtgattcagggaatggattatgtctacgccattgaagggggcgcaggcacttacaacggcaagccgaggaagaaggtgctgatcactgactctggtgagatacccaaggagaaatggggcgaggaagcagactgagtcatagcctagtgctagaaaggggttgatgcctttccacccacccaggttcaaggcatagtgattgcaatttgggttcgttgtaccaattataccgtaggggcctcccttatagtctttctgtcaaaatgaaaacggggcgactgaaattcagtaggctgcttggcctactctgttgcctacggattttgacaccgcgcgctttcgcgaccggttttcttcgcacaccagctgtgcttcgggcagagttctgaatattgtacattgtagccagcgtatcgcatgccaaaaccc

SEQ ID NO: 13084 - protein, 216 aa, Triticum aestivum
  peptide (1)..(216): Ceres Seq. ID no. 13654981
  misc_feature (1)..(214): NCBI GI NO: 15236227 NR Description: cyclophilin - like protein [Arabidopsis thaliana]
  misc_feature (2)..(207): NCBI GI NO: 15227674 NR Description: cyclophilin [Arabidopsis thaliana]
  misc_feature (2)..(207): NCBI GI NO: 11270326 NR Description: peptidylprolyl isomerase (EC 5.2.1.8) CYP5
  misc_feature (2)..(207): NCBI GI NO: 21554007 NR Description: cyclophilin [Arabidopsis thaliana]
  misc_feature (12)..(207): NCBI GI NO: 32351008 NR Description: cyclophilin [Triticum aestivum]
  misc_feature (33)..(207): NCBI GI NO: 15237739 NR Description: cyclophilin ROC7 [Arabidopsis thaliana]
  misc_feature (33)..(206): NCBI GI NO: 18410386 NR Description: cyclophilin-related protein [Arabidopsis thaliana]
  misc_feature (34)..(206): NCBI GI NO: 5731960 NR Description: cyclophilin B [Dictyostelium discoideum]
  misc_feature (39)..(206): NCBI GI NO: 17566266 NR Description: CYcloPhilin family CYP-7 (18.4 kD) (cyp-7)
  misc_feature (39)..(206): NCBI GI NO: 39582839 NR Description: Hypothetical protein CBG18577
MLRKAAVGFLACLVLYLAFSSYPRSQRAAYVQLPAVTHRVYLDVEIDGQNIGRIVIGLYGEVVPKTVENFRALCTGEKGDGPKGKPLHYKGTPFHRIIPGFMIQGGDIVRGDGKARESIYGGTFPDENFSVKHTHPGVVAMANSGTDSNGSQFYITTIKTGWLDGEHVVFGRVIQGMDYVYAIEGGAGTYNGKPRKKVLITDSGEIPKEKWGEEAD

SEQ ID NO: 13085 - protein, 115 aa, Triticum aestivum
  peptide (1)..(115): Ceres Seq. ID no. 13654982
  misc_feature (1)..(113): NCBI GI NO: 15236227 NR Description: cyclophilin - like protein [Arabidopsis thaliana]
  misc_feature (1)..(106): NCBI GI NO: 15227674 NR Description: cyclophilin [Arabidopsis thaliana]
  misc_feature (1)..(106): NCBI GI NO: 11270326 NR Description: peptidylprolyl isomerase (EC 5.2.1.8) CYP5
  misc_feature (1)..(106): NCBI GI NO: 21554007 NR Description: cyclophilin [Arabidopsis thaliana]
  misc_feature (1)..(106): NCBI GI NO: 32351008 NR Description: cyclophilin [Triticum aestivum]
  misc_feature (1)..(106): NCBI GI NO: 15237739 NR Description: cyclophilin ROC7 [Arabidopsis thaliana]
  misc_feature (1)..(105): NCBI GI NO: 18410386 NR Description: cyclophilin-related protein [Arabidopsis thaliana]
  misc_feature (1)..(105): NCBI GI NO: 5731960 NR Description: cyclophilin B [Dictyostelium discoideum]
  misc_feature (1)..(105): NCBI GI NO: 17566266 NR Description: CYcloPhilin family CYP-7 (18.4 kD) (cyp-7)
  misc_feature (1)..(105): NCBI GI NO: 39582839 NR Description: Hypothetical protein CBG18577
MIQGGDIVRGDGKARESIYGGTFPDENFSVKHTHPGVVAMANSGTDSNGSQFYITTIKTGWLDGEHVVFGRVIQGMDYVYAIEGGAGTYNGKPRKKVLITDSGEIPKEKWGEEAD

SEQ ID NO: 13086 - DNA, 855 bp, Triticum aestivum
  misc_feature (1)..(855): Ceres Seq. ID no. 13596975
cattacctagaacatcctaatccaaaactctctccccgctgccctctcgcaaaaaccctagctaaccccctcctccgtagtagcagcgccgatgggaggatcgcggcgcaagttcaagcgaacccgcaccaaggtgcgtgtcgggttgccgcgcaagaagccgcgcgagttcaagccggccttcgacctgcccgaggcgctcgccgccgccgccgccgcagaggccggcggccacgtgccgagctgggatgcggaaggcagcgtcgtgaagaactactccgctttcggggtcgtggccaaccccaacctgctcggcgcccactcccgcggcacgcgaggcctcgtccagagcgcctcgctgcaggcgcccgacgtcgacgccttgcgggcccccgtcgacgagttcggccccgtcgacaccggcagtgacctcgagtgcgacgatctaaaatctgcacttgggaagaaaaggagggatggcaaatctgcacctttggagccactgactaaaattcaacgactatgtattggcagattaatagagaagtatggtgacaactacaaggccatgttcatggataccaaactgaactcaatgcagcactcagtgggtacattgaaaaagctctgtgaaagatatcatgttggtggcaagaccatcctctatccgatgtagggtcgtatgaatctagatttcactttcagtctgtatcctgtttctcccactaaatgggacatgcaaattttgcctgtgaacaatgtaacttctgatgactacaatatgagaatgagtttgttttatgttggaagttccaactcaagaaaaaaaaaaaaaaaaaagcttatcgataccgt

SEQ ID NO: 13087 - protein, 194 aa, Triticum aestivum
  peptide (1)..(194): Ceres Seq. ID no. 15222009
  misc_feature (1)..(185): NCBI GI NO: 18379024 NR Description: expressed protein [Arabidopsis thaliana]
  misc_feature (1)..(117): NCBI GI NO: 25372996 NR Description: hypothetical protein F22D16
MGGSRRKFKRTRTKVRVGLPRKKPREFKPAFDLPEALAAAAAAEAGGHVPSWDAEGSVVKNYSAFGVVANPNLLGAHSRGTRGLVQSASLQAPDVDALRAPVDEFGPVDTGSDLECDDLKSALGKKRRDGKSAPLEPLTKIQRLCIGRLIEKYGDNYKAMFMDTKLNSMQHSVGTLKKLCERYHVGGKTILYPM

SEQ ID NO: 13088 - protein, 142 aa, Triticum aestivum
  peptide (1)..(142): Ceres Seq. ID no. 15222010
  misc_feature (26)..(142): Pfam Name: Pfam Description:  Cupin
HYLEHPNPKLSPRCPLAKTLANPLLRSSSADGRIAAQVQANPHQGACRVAAQEAARVQAGLRPARGARRRRRRRGRRPRAELGCGRQRREELLRFRGRGQPQPARRPLPRHARPRPERLAAGARRRRLAGPRRRVRPRRHRQ

SEQ ID NO: 13089 - DNA, 562 bp, Triticum aestivum
  misc_feature (1)..(562): Ceres Seq. ID no. 13583887
atcctaatcgaaaatatcttgtcagctttaacattttctggtgtattccttgccgagaaaataaacacgttcttaggacaaaactggaagagcttctcaagccagaattactttgatccccaaggcctcttcatctcggtcatgtggtccggtcccttgctcctgattacgatacttattctggtgaacacccttgtgacgctctgcatgctcatggtaaggtggaaaagggccgagctcaagcaccgtgctcgtgaggcccgtagcaagcaggagtgatgatgctgccctgctcttgaaccgtggatctattgtgcagtaggggattaagctgctgatttaacggagaagtttgattggaacagtaaagtggaaggttaattagcccttgattttgattgatggtcccacttatggtctctggtactgaagcacacggttttacacatgtattagctgctgttcgtcaaatttaagggatatgtttgtgtagggagctctgaatgttatttggatggctgcaggagtcaagtgccgtcgtatatgcattgctttgtcatct

SEQ ID NO: 13090 - protein, 92 aa, Triticum aestivum
  peptide (1)..(92): Ceres Seq. ID no. 13583888
  misc_feature (6)..(92): NCBI GI NO: 38637052 NR Description: unknown protein
  misc_feature (7)..(92): NCBI GI NO: 18399227 NR Description: expressed protein [Arabidopsis thaliana]
  misc_feature (7)..(92): NCBI GI NO: 21554376 NR Description: unknown [Arabidopsis thaliana]
  misc_feature (15)..(88): NCBI GI NO: 24653051 NR Description: CG30051-PB [Drosophila melanogaster]
  misc_feature (15)..(92): NCBI GI NO: 11359939 NR Description: hypothetical protein DKFZp434C1714
  misc_feature (15)..(92): NCBI GI NO: 16359094 NR Description: Unknown (protein for IMAGE:4686355) [Homo sapiens]
  misc_feature (15)..(92): NCBI GI NO: 21595411 NR Description: Hypothetical protein DKFZp434C1714 [Homo sapiens]
  misc_feature (15)..(92): NCBI GI NO: 25286705 NR Description: cDNA sequence BC024093 [Mus musculus]
  misc_feature (15)..(92): NCBI GI NO: 34864175 NR Description: similar to cDNA sequence BC024093
ILIENILSALTFSGVFLAEKINTFLGQNWKSFSSQNYFDPQGLFISVMWSGPLLLITILILVNTLVTLCMLMVRWKRAELKHRAREARSKQE

SEQ ID NO: 13091 - protein, 45 aa, Triticum aestivum
  peptide (1)..(45): Ceres Seq. ID no. 13583889
  misc_feature (1)..(45): NCBI GI NO: 38637052 NR Description: unknown protein
  misc_feature (1)..(45): NCBI GI NO: 18399227 NR Description: expressed protein [Arabidopsis thaliana]
  misc_feature (1)..(45): NCBI GI NO: 21554376 NR Description: unknown [Arabidopsis thaliana]
  misc_feature (1)..(41): NCBI GI NO: 24653051 NR Description: CG30051-PB [Drosophila melanogaster]
  misc_feature (1)..(45): NCBI GI NO: 11359939 NR Description: hypothetical protein DKFZp434C1714
  misc_feature (1)..(45): NCBI GI NO: 16359094 NR Description: Unknown (protein for IMAGE:4686355) [Homo sapiens]
  misc_feature (1)..(45): NCBI GI NO: 21595411 NR Description: Hypothetical protein DKFZp434C1714 [Homo sapiens]
  misc_feature (1)..(45): NCBI GI NO: 25286705 NR Description: cDNA sequence BC024093 [Mus musculus]
  misc_feature (1)..(45): NCBI GI NO: 34864175 NR Description: similar to cDNA sequence BC024093
MWSGPLLLITILILVNTLVTLCMLMVRWKRAELKHRAREARSKQE

SEQ ID NO: 13092 - DNA, 1227 bp, Triticum aestivum
  misc_feature (1)..(1227): Ceres Seq. ID no. 12625368
aacacgctcagactcagctagctaacatacaggcaggccatcaggaggagccacgaggaagaaacaaccagcgcatatatccccctcgccccctccctcccgccggcagagctgagctgagctgagccaccgttcgaccaactcgcctctagaacacagagccccccgccgcccggatcccttcttcatccccctctccgctctttgtatcgctcaccaccgccatggctaagcagcagaagaacgcgcacgtcccgaagttcggcaactgggacaacgacggcaacgtcccctacacgctctacttcgacaacgcgcgcaagggcaagggcggcaagcccatcaaccccaacgaccccgtcgagaaccccgaggccttctcctcctctgtcgtcgcgccgtcgccgaaccgctccttcgaccagggcaggccggctctccctcctgcctccccgcctcccgctcaccaccacgagcgccggcccagcgacgcgccggcggtcgccccgccgctgtccccgtaccaccgcaacgccggtggcgagccgccgagaagaggccctggcggcggacgggcaggcggaggcgggtatagcgtggagcagtcgccggggccgtccccgctgcacccgtacggacagtcgagggccgagtactccgatggcagcggctacggcctcgtggccaactccgtggaccggtcccgtgccaggggcgcctcgcggggcaacgaaacgccgacgagggggtcagcggtgcccaagttcggcgactgggactccaacccggcgtcggcggacggctacacgcacatcttcaacaaggtgagggaggagaagagcacccaggccaaggcaccggggttcggcaaggacaacgtcgcctatggcaacggccgcaggcagcacgacgacggctacgtctcctcgagtcgctggtgctttgggtggtgcaagtaggggtggttcgacagatgatgatggggaaaagtaagcgaggatctttgggaatgtaaattgtgtgaaattaagaaggtttttgccattgattcaacttcgaacttctgtaatcccattttttgggacattatttggcattgggcactcagcagagttcatattcttttgattgtgaaatatactcctactatttctttctgatgtggaatgtagagttcagccatggttgttgttaaaaaaaaaaaaaaaaaagcttatcgataccgtc

SEQ ID NO: 13093 - protein, 244 aa, Triticum aestivum
  peptide (1)..(244): Ceres Seq. ID no. 12625369
  misc_feature (169)..(241): Pfam Name: Pfam Description:  Nitrate-induced NOI protein
  misc_feature (8)..(244): NCBI GI NO: 34897468 NR Description: putative nitrate-induced protein
  misc_feature (10)..(212): NCBI GI NO: 32489059 NR Description: OSJNBb0089B03.3
  misc_feature (65)..(242): NCBI GI NO: 30687738 NR Description: expressed protein [Arabidopsis thaliana]
  misc_feature (8)..(213): NCBI GI NO: 29839570 NR Description: NOI-like protein
  misc_feature (65)..(213): NCBI GI NO: 9294163 NR Description: contains similarity to nitrate-induced NOIprotein~gene_id:MJL12
  misc_feature (8)..(64): NCBI GI NO: 30687738 NR Description: expressed protein [Arabidopsis thaliana]
  misc_feature (1)..(64): NCBI GI NO: 9294163 NR Description: contains similarity to nitrate-induced NOIprotein~gene_id:MJL12
MAKQQKNAHVPKFGNWDNDGNVPYTLYFDNARKGKGGKPINPNDPVENPEAFSSSVVAPSPNRSFDQGRPALPPASPPPAHHHERRPSDAPAVAPPLSPYHRNAGGEPPRRGPGGGRAGGGGYSVEQSPGPSPLHPYGQSRAEYSDGSGYGLVANSVDRSRARGASRGNETPTRGSAVPKFGDWDSNPASADGYTHIFNKVREEKSTQAKAPGFGKDNVAYGNGRRQHDDGYVSSSRWCFGWCK

SEQ ID NO: 13094 - DNA, 1315 bp, Triticum aestivum
  misc_feature (1)..(1315): Ceres Seq. ID no. 14314080
actgagacaaagacaacttcatcttgcttactgcatcctctttcttcaagagagcacaaccaccaaggagagcaagaccaggatcagcaaagaaacatccaagaaatccaacggctgacgagtcatggaggctgccgagttcagtgcagcaactggctgccagcatacaggagccaccaaggcagtacttgctcagagagcaagaaccgcttggtgggaacctggctggtaccgagatgccggagcccattccaacaatcgatctcggcttgctgtccgcatccaacgatgcggaggaggccgccaagctgcggtcagcgctgcagacctggggattcttcaaggtttctgaccatggaatggagacctctctcatggattctgtgatgaacgcatcaagggattttttccgcctgccgctcgaagagaagagaaagtacagtaacataataggcgggaaacatttccagatggaagggtatggaactgaccaggtgaaaactcaagatcaaaggctggactggtccgatcggctgcatcttaaagtggagccagaggatgagagaaaccttgcccattggcccatacatccaaaatctttcagggatgacctgcatgagtacacatcgaagagcaagagaatcaaagacgacatccttcgggcagtggccaagctattggagctcgatgaagattgcctagttaaccagtttagcaacagggctctcacttatgctagattcaattactatcctccatgtccaagacctgatcctgtcttgggcatcaaacctcattctgatgtctatgctcttacagttcttctaatggacaaggatgtcgctgggctgcagtttgtcagagatggaacgtggtacaatgttccatctgcgtctaactacaccttactgatcaacgttggtgttacaatggagataatgaccaacgggatcttcaagggaccagtacatagggttgtgactaattctgagaaagagaggatgtcagtggccgtgttctatggtctggatcctgaaagagagattggaccgatagctcagatgttgactgaggaccaaccggcgcgatacagggaaatgaaggtcaaggatttcctagtcgcgcaccttgagcatttctctcgaggagaaagagttgtcgattcgttaaggatatgatcaaggtgagtttggtttggtgccgcaatacccatggaataaagaatttgtgacttgccgattcgttaaggatataaaacaaggtgactttacttctataaggcgatgaatctggtgaaaataaagaatttgatccc

SEQ ID NO: 13095 - protein, 313 aa, Triticum aestivum
  peptide (1)..(313): Ceres Seq. ID no. 14314081
  misc_feature (163)..(264): Pfam Name: II Pfam Description: 2OG-Fe
  misc_feature (1)..(313): NCBI GI NO: 24413984 NR Description: ethylene-forming-enzyme-like dioxygenase-like
  misc_feature (1)..(313): NCBI GI NO: 24413982 NR Description: ethylene-forming-enzyme-like dioxygenase-like
  misc_feature (1)..(313): NCBI GI NO: 33115140 NR Description: iron/ascorbate-dependent oxidoreductase
  misc_feature (1)..(287): NCBI GI NO: 34898470 NR Description: ESTs D47168
  misc_feature (1)..(313): NCBI GI NO: 34898468 NR Description: Similar to Prunus armeniaca ethylene-forming-enzyme-like dioxygenase
  misc_feature (1)..(221): NCBI GI NO: 24413981 NR Description: contains EST C72504
  misc_feature (234)..(313): NCBI GI NO: 24413981 NR Description: contains EST C72504
  misc_feature (1)..(313): NCBI GI NO: 34898472 NR Description: Similar to Prunus armeniaca ethylene-forming-enzyme-like dioxygenase
  misc_feature (106)..(313): NCBI GI NO: 24413983 NR Description: ethylene-forming-enzyme-like dioxygenase-like
  misc_feature (1)..(81): NCBI GI NO: 24413983 NR Description: ethylene-forming-enzyme-like dioxygenase-like
MPEPIPTIDLGLLSASNDAEEAAKLRSALQTWGFFKVSDHGMETSLMDSVMNASRDFFRLPLEEKRKYSNIIGGKHFQMEGYGTDQVKTQDQRLDWSDRLHLKVEPEDERNLAHWPIHPKSFRDDLHEYTSKSKRIKDDILRAVAKLLELDEDCLVNQFSNRALTYARFNYYPPCPRPDPVLGIKPHSDVYALTVLLMDKDVAGLQFVRDGTWYNVPSASNYTLLINVGVTMEIMTNGIFKGPVHRVVTNSEKERMSVAVFYGLDPEREIGPIAQMLTEDQPARYREMKVKDFLVAHLEHFSRGERVVDSLRI

SEQ ID NO: 13096 - protein, 272 aa, Triticum aestivum
  peptide (1)..(272): Ceres Seq. ID no. 14314082
  misc_feature (122)..(223): Pfam Name: II Pfam Description: 2OG-Fe
  misc_feature (1)..(272): NCBI GI NO: 24413984 NR Description: ethylene-forming-enzyme-like dioxygenase-like
  misc_feature (1)..(272): NCBI GI NO: 24413982 NR Description: ethylene-forming-enzyme-like dioxygenase-like
  misc_feature (1)..(272): NCBI GI NO: 33115140 NR Description: iron/ascorbate-dependent oxidoreductase
  misc_feature (1)..(246): NCBI GI NO: 34898470 NR Description: ESTs D47168
  misc_feature (1)..(272): NCBI GI NO: 34898468 NR Description: Similar to Prunus armeniaca ethylene-forming-enzyme-like dioxygenase
  misc_feature (1)..(180): NCBI GI NO: 24413981 NR Description: contains EST C72504
  misc_feature (193)..(272): NCBI GI NO: 24413981 NR Description: contains EST C72504
  misc_feature (1)..(272): NCBI GI NO: 34898472 NR Description: Similar to Prunus armeniaca ethylene-forming-enzyme-like dioxygenase
  misc_feature (65)..(272): NCBI GI NO: 24413983 NR Description: ethylene-forming-enzyme-like dioxygenase-like
  misc_feature (1)..(40): NCBI GI NO: 24413983 NR Description: ethylene-forming-enzyme-like dioxygenase-like
METSLMDSVMNASRDFFRLPLEEKRKYSNIIGGKHFQMEGYGTDQVKTQDQRLDWSDRLHLKVEPEDERNLAHWPIHPKSFRDDLHEYTSKSKRIKDDILRAVAKLLELDEDCLVNQFSNRALTYARFNYYPPCPRPDPVLGIKPHSDVYALTVLLMDKDVAGLQFVRDGTWYNVPSASNYTLLINVGVTMEIMTNGIFKGPVHRVVTNSEKERMSVAVFYGLDPEREIGPIAQMLTEDQPARYREMKVKDFLVAHLEHFSRGERVVDSLRI

SEQ ID NO: 13097 - protein, 267 aa, Triticum aestivum
  peptide (1)..(267): Ceres Seq. ID no. 14314083
  misc_feature (117)..(218): Pfam Name: II Pfam Description: 2OG-Fe
  misc_feature (1)..(267): NCBI GI NO: 24413984 NR Description: ethylene-forming-enzyme-like dioxygenase-like
  misc_feature (1)..(267): NCBI GI NO: 24413982 NR Description: ethylene-forming-enzyme-like dioxygenase-like
  misc_feature (1)..(267): NCBI GI NO: 33115140 NR Description: iron/ascorbate-dependent oxidoreductase
  misc_feature (1)..(241): NCBI GI NO: 34898470 NR Description: ESTs D47168
  misc_feature (1)..(267): NCBI GI NO: 34898468 NR Description: Similar to Prunus armeniaca ethylene-forming-enzyme-like dioxygenase
  misc_feature (1)..(175): NCBI GI NO: 24413981 NR Description: contains EST C72504
  misc_feature (188)..(267): NCBI GI NO: 24413981 NR Description: contains EST C72504
  misc_feature (1)..(267): NCBI GI NO: 34898472 NR Description: Similar to Prunus armeniaca ethylene-forming-enzyme-like dioxygenase
  misc_feature (60)..(267): NCBI GI NO: 24413983 NR Description: ethylene-forming-enzyme-like dioxygenase-like
  misc_feature (1)..(35): NCBI GI NO: 24413983 NR Description: ethylene-forming-enzyme-like dioxygenase-like
MDSVMNASRDFFRLPLEEKRKYSNIIGGKHFQMEGYGTDQVKTQDQRLDWSDRLHLKVEPEDERNLAHWPIHPKSFRDDLHEYTSKSKRIKDDILRAVAKLLELDEDCLVNQFSNRALTYARFNYYPPCPRPDPVLGIKPHSDVYALTVLLMDKDVAGLQFVRDGTWYNVPSASNYTLLINVGVTMEIMTNGIFKGPVHRVVTNSEKERMSVAVFYGLDPEREIGPIAQMLTEDQPARYREMKVKDFLVAHLEHFSRGERVVDSLRI

SEQ ID NO: 13098 - DNA, 1244 bp, Triticum aestivum
  misc_feature (1)..(1244): Ceres Seq. ID no. 14314104
acgttagcgagaggtaaaaatccgactgcccaggggacgaaccggaacaagggttccgggcccgtctcttcttcgtttcgtttccatccacagctcgtcctccccccaaaccttaccccatgtccgacggcggcggcgagcccggggccggcggctcggcgccggtgtgcaacttcgttcagaagccgccgaagaatattcggaagcgtcccgccgcctccgtcggctctgatgacgaagaaggtagcggcggcgacgattccggggccatcgcggcggcgcgatctaagaagccgccgcctactaccagcaagctcttcttctcctccgccgacaactcacacgagccccgccgtttccagttcgagtcgtcccggactattcagtcctctaccgacaaccgcgccactgcgacgcttgagacggagacggcgtacgaccgtgatgcgcgcgccatccgcgagcgacagctcaagcaggctgaggaatccctcaagaagaacccctctgcctcctcctcctccggggagctctacaaggggatccacggctacacggatcacaaggccggcttccggcgggagcacacggtttccggagagaaggccggcggcgctcacggccccctgcgggcgtcagcgcacatacgcctctccacgcggttcgactaccaacccgacatctgcaaggattataaggagaccggctattgtggctatggcgattcctgcaagttcatgcacgacagaggtgactacaagtccggatggcagctcgagagggagtgggacgaggccgagaaagcccgcaaacggcgcatagcgatgcgtgagttgggtggtagtgatggcgaggcagaggaggaagacagcgacgacgaggaggcactgccctttgcctgcttcatatgcagggagccctttgttgacccggtggtcacaaagtgtaagcattatttctgcgagcattgcgcattaaagcatcactcgaagaacaagaagtgctttgtctgcaataaaccgacgcttggcatcttcaatgcagcgcaggagatccggaagaagattgcccaggacaagaagcagcaggacctttgatgactgctgcacaatgtagcttgtatcatggaggattacttctcttctgtaattgtattgtttgaaaatgagggggaaatgtccaggaatcagttttgtttctttagctctgtactagctcctacttaccattagccattttgccgc

SEQ ID NO: 13099 - protein, 325 aa, Triticum aestivum; identical to SEQ ID NO: 7331
  peptide (1)..(325): Ceres Seq. ID no. 14314105
  misc_feature (261)..(298): Pfam Name: RING finger Pfam Description: Zinc finger, C3HC4 type
  misc_feature (1)..(324): NCBI GI NO: 15223384 NR Description: expressed protein [Arabidopsis thaliana]
  misc_feature (1)..(324): NCBI GI NO: 26451788 NR Description: unknown protein [Arabidopsis thaliana]
  misc_feature (13)..(324): NCBI GI NO: 15240037 NR Description: expressed protein [Arabidopsis thaliana]
  misc_feature (13)..(324): NCBI GI NO: 22531136 NR Description: putative protein [Arabidopsis thaliana]
  misc_feature (1)..(287): NCBI GI NO: 25406720 NR Description: probable zinc finger protein
  misc_feature (8)..(324): NCBI GI NO: 27715515 NR Description: similar to RIKEN cDNA 2810428C21
  misc_feature (71)..(312): NCBI GI NO: 27374394 NR Description: CG4973-PA [Drosophila willistoni]
  misc_feature (93)..(316): NCBI GI NO: 27374308 NR Description: CG4973-PA [Drosophila pseudoobscura]
  misc_feature (16)..(323): NCBI GI NO: 21313494 NR Description: RIKEN cDNA 2310020H19 [Mus musculus]
  misc_feature (11)..(323): NCBI GI NO: 34935361 NR Description: similar to RIKEN cDNA 2310020H19

SEQ ID NO: 13100 - protein, 273 aa, Triticum aestivum; identical to SEQ ID NO: 7332
  peptide (1)..(273): Ceres Seq. ID no. 14314106
  misc_feature (35)..(229): Pfam Name: Pfam Description:  Formin Homology 2 Domain
  misc_feature (69)..(273): NCBI GI NO: 2136504 NR Description: gastric mucin (clone PGM-2A) - pig (fragment)
  misc_feature (6)..(273): NCBI GI NO: 5420387 NR Description: proteophosphoglycan [Leishmania major]

SEQ ID NO: 13101 - protein, 196 aa, Triticum aestivum; identical to SEQ ID NO: 7333
  peptide (1)..(196): Ceres Seq. ID no. 14314107
  misc_feature (1)..(152): Pfam Name: Pfam Description:  Formin Homology 2 Domain
  misc_feature (1)..(196): NCBI GI NO: 2136504 NR Description: gastric mucin (clone PGM-2A) - pig (fragment)
  misc_feature (1)..(196): NCBI GI NO: 5420387 NR Description: proteophosphoglycan [Leishmania major]

SEQ ID NO: 13102 - DNA, 938 bp, Triticum aestivum
  misc_feature (1)..(938): Ceres Seq. ID no. 12587429
agacaaatggagaaaaacagacggagaacgaaacaatggctgccgaaggaagtctgaagctgctcggcttgacggtgagcccgttcgtcatccgtgtacgcatggcgctgcagctgaaaggcatcggctacgagtacatagagcaggacctgttcaccaagggcgagctcctccgcaagtccaacccggtgtacatgaaggtcccggtgctcatccacgacggcaaacccatctgcgagtcgctggccatcgtgctgtacgtcgacgaggtctgggcggccacgggcccctcgatcctccccgccgacccctacgatcgcgccgccgctcgcatctgggccgcctacgccgacagcaagctcttgccggcctgggtaggcatcatgtgggcggcgacggaggaggagagagcggaaaaggtcgaggacacgctagcggctatcggccaattggaggaggcgttcggcaagtgctcgaagggaaaggccttcttcgccggcgattccgtcgggtacctcgacctcgtcgtcggctcgcagttgctctggttcgaagcgctgcagaagatgttcggcgtcgtggtcgttgaggtgggtagggctccgctcttggccgcgtgggtgaagcagtttggggagactgatacggccaaggaggtggtgccggacgttgacacggcggtggagtacctgacgaagcttcagtctcgtcgggctggttccacggttgcccagttgctgtcgtgacaaaagtagagtggaatttgtcgacccagctagcaagtacagcgaattttctctttaggccagctttatagtcatgtcttgtaaggatgcaaagaatggactggtttccctcctgacaccacgtagctacttctccaaagaggataacaaatcgtttgtaagaaatcataagtatattctttttttttgcgc

SEQ ID NO: 13103 - protein, 247 aa, Triticum aestivum
  peptide (1)..(247): Ceres Seq. ID no. 12587430
  misc_feature (99)..(214): Pfam Name: Pfam Description:  Glutathione S-transferase, C-terminal domain
  misc_feature (12)..(244): NCBI GI NO: 22022398 NR Description: glutathione-S-transferase Cla47
  misc_feature (15)..(243): NCBI GI NO: 37536354 NR Description: putative glutathione S-transferase
  misc_feature (14)..(235): NCBI GI NO: 11385503 NR Description: glutathione S-transferase GST 26 [Zea mays]
  misc_feature (12)..(238): NCBI GI NO: 11385517 NR Description: glutathione S-transferase GST 33 [Zea mays]
  misc_feature (15)..(244): NCBI GI NO: 37536352 NR Description: putative glutathione S-transferase
  misc_feature (12)..(239): NCBI GI NO: 20067421 NR Description: glutathione transferase [Triticum aestivum]
  misc_feature (12)..(243): NCBI GI NO: 37536308 NR Description: putative glutathione S-transferase
  misc_feature (12)..(243): NCBI GI NO: 37536280 NR Description: putative glutathione S-transferase
  misc_feature (11)..(244): NCBI GI NO: 11177837 NR Description: putative glutathione S-transferase OsGSTU2
  misc_feature (10)..(236): NCBI GI NO: 2982262 NR Description: probable glutathione S-transferase [Picea mariana]
TNGEKQTENETMAAEGSLKLLGLTVSPFVIRVRMALQLKGIGYEYIEQDLFTKGELLRKSNPVYMKVPVLIHDGKPICESLAIVLYVDEVWAATGPSILPADPYDRAAARIWAAYADSKLLPAWVGIMWAATEEERAEKVEDTLAAIGQLEEAFGKCSKGKAFFAGDSVGYLDLVVGSQLLWFEALQKMFGVVVVEVGRAPLLAAWVKQFGETDTAKEVVPDVDTAVEYLTKLQSRRAGSTVAQLLS

SEQ ID NO: 13104 - protein, 236 aa, Triticum aestivum
  peptide (1)..(236): Ceres Seq. ID no. 12587431
  misc_feature (88)..(203): Pfam Name: Pfam Description:  Glutathione S-transferase, C-terminal domain
  misc_feature (1)..(233): NCBI GI NO: 22022398 NR Description: glutathione-S-transferase Cla47
  misc_feature (4)..(232): NCBI GI NO: 37536354 NR Description: putative glutathione S-transferase
  misc_feature (3)..(224): NCBI GI NO: 11385503 NR Description: glutathione S-transferase GST 26 [Zea mays]
  misc_feature (1)..(227): NCBI GI NO: 11385517 NR Description: glutathione S-transferase GST 33 [Zea mays]
  misc_feature (4)..(233): NCBI GI NO: 37536352 NR Description: putative glutathione S-transferase
  misc_feature (1)..(228): NCBI GI NO: 20067421 NR Description: glutathione transferase [Triticum aestivum]
  misc_feature (1)..(232): NCBI GI NO: 37536308 NR Description: putative glutathione S-transferase
  misc_feature (1)..(232): NCBI GI NO: 37536280 NR Description: putative glutathione S-transferase
  misc_feature (1)..(233): NCBI GI NO: 11177837 NR Description: putative glutathione S-transferase OsGSTU2
  misc_feature (1)..(225): NCBI GI NO: 2982262 NR Description: probable glutathione S-transferase [Picea mariana]
MAAEGSLKLLGLTVSPFVIRVRMALQLKGIGYEYIEQDLFTKGELLRKSNPVYMKVPVLIHDGKPICESLAIVLYVDEVWAATGPSILPADPYDRAAARIWAAYADSKLLPAWVGIMWAATEEERAEKVEDTLAAIGQLEEAFGKCSKGKAFFAGDSVGYLDLVVGSQLLWFEALQKMFGVVVVEVGRAPLLAAWVKQFGETDTAKEVVPDVDTAVEYLTKLQSRRAGSTVAQLLS

SEQ ID NO: 13105 - protein, 214 aa, Triticum aestivum
  peptide (1)..(214): Ceres Seq. ID no. 12587432
  misc_feature (66)..(181): Pfam Name: Pfam Description:  Glutathione S-transferase, C-terminal domain
  misc_feature (1)..(211): NCBI GI NO: 22022398 NR Description: glutathione-S-transferase Cla47
  misc_feature (1)..(210): NCBI GI NO: 37536354 NR Description: putative glutathione S-transferase
  misc_feature (1)..(202): NCBI GI NO: 11385503 NR Description: glutathione S-transferase GST 26 [Zea mays]
  misc_feature (1)..(205): NCBI GI NO: 11385517 NR Description: glutathione S-transferase GST 33 [Zea mays]
  misc_feature (1)..(211): NCBI GI NO: 37536352 NR Description: putative glutathione S-transferase
  misc_feature (1)..(206): NCBI GI NO: 20067421 NR Description: glutathione transferase [Triticum aestivum]
  misc_feature (1)..(210): NCBI GI NO: 37536308 NR Description: putative glutathione S-transferase
  misc_feature (1)..(210): NCBI GI NO: 37536280 NR Description: putative glutathione S-transferase
  misc_feature (1)..(211): NCBI GI NO: 11177837 NR Description: putative glutathione S-transferase OsGSTU2
  misc_feature (1)..(203): NCBI GI NO: 2982262 NR Description: probable glutathione S-transferase [Picea mariana]
MALQLKGIGYEYIEQDLFTKGELLRKSNPVYMKVPVLIHDGKPICESLAIVLYVDEVWAATGPSILPADPYDRAAARIWAAYADSKLLPAWVGIMWAATEEERAEKVEDTLAAIGQLEEAFGKCSKGKAFFAGDSVGYLDLVVGSQLLWFEALQKMFGVVVVEVGRAPLLAAWVKQFGETDTAKEVVPDVDTAVEYLTKLQSRRAGSTVAQLLS

SEQ ID NO: 13106 - DNA, 1550 bp, Triticum aestivum
  misc_feature (1)..(1550): Ceres Seq. ID no. 13654989
aagaagggaaagaatgacaccgctacccaaagcagccagccaagccaaagccaaccccagtcctagccactagccacaacgaacgaactcagacccagccagcctcgtggctccggttggactggccagtaccgttgccggacgctcctgatggggaactgcgccggcgtgcaggggaacgccgagatcaacccgaccttcagtgctcccaacacctcaggtaacaattccaagagcagcaacagcagcaatgcgactgatacaagcacttttggcaagagttcttcgtcgtcggtgccgccgactcctcggaccgagaaggagatcttgcagtcgtccaacctccgcaagttcaccttcagtgaactgagaagctccacaaggaacttccggactgacagcctgctcggggaggggggctttggctccgtcttcaaggggtggatcgacgagcgcacgtttacgccggtcaagcccggcaccgggatgatcgtcgccgtgaagaagctcaagctggacagtttccaggggcacaaagaatggctggctgaggtcaattacctggggcagctatcacaccccaatcttgtgaagctcatcgggtattgcttggaggacgagcagcggcttctcgtctacgaattcatgccgaagggtagcttggagcaccatcttttcaggagagctccacatttccagcccctctcatggagtttacggatgaaggttgctcttgaggctgccaggggacttgctttcctgcatagcgatgaagctaaagttatataccgtgatttcaagacctccaatgttcttcttgactcggaatataatgcaaaactctctgattttggcttggcaaaagatggcccgagtggcgataaaagtcatgtttctactagggtcatggggactcaaggatatgctgcccctgaatatctcgcaacaggccacttgaccacgaagagcgatgtctacacctatggtgttgttcttctagagttgctgaccgggcaacgagctctggacaagaaccgcccgcctggacagcataacctggtggagtgggcaagaccttacatcaacagcaagaggagggtcatccatgtcctggacccacgattggggtcgcaatattcgctccctgcggcgcagaaggcagcggcgcttgcgatgcagtgcctgtcaatggacgcccggtgcaggccggacatggatcaggtcgtgaccgcgctggaaaagcttccggaggtgaagaaaacatacaagtagggagggttgctgggttccatgtgtactcctttacctctctggagcatcgcctactccttgtaagcaacacttcagggagtagaaacagtgaagagaagccggacttgaggggaagactagcctttgaatctgtcaagagaatgtagaatatatatcgtcatgtgtacagctagctgttagactgttgttactttgctgtcagcctgacgcctgttttatatatttgcagtacaccggctttgtaaaacaagttgggaaacagttgtgtcttggtcttg

SEQ ID NO: 13107 - protein, 373 aa, Triticum aestivum
  peptide (1)..(373): Ceres Seq. ID no. 13654990
  misc_feature (1)..(371): NCBI GI NO: 14719339 NR Description: putative protein kinase [Oryza sativa]
  misc_feature (1)..(371): NCBI GI NO: 34906046 NR Description: putative serine/threonine-specific protein kinase
  misc_feature (1)..(367): NCBI GI NO: 34897424 NR Description: putative protein kinase
  misc_feature (32)..(365): NCBI GI NO: 15227001 NR Description: protein kinase (APK1b) [Arabidopsis thaliana]
  misc_feature (26)..(365): NCBI GI NO: 15222437 NR Description: protein kinase (APK1a) [Arabidopsis thaliana]
  misc_feature (26)..(267): NCBI GI NO: 8778537 NR Description: F22G5.5 [Arabidopsis thaliana]
  misc_feature (267)..(365): NCBI GI NO: 8778537 NR Description: F22G5.5 [Arabidopsis thaliana]
  misc_feature (44)..(373): NCBI GI NO: 15241749 NR Description: protein kinase, putative [Arabidopsis thaliana]
  misc_feature (44)..(373): NCBI GI NO: 166809 NR Description: protein kinase
  misc_feature (1)..(369): NCBI GI NO: 15227042 NR Description: protein kinase (APK2b) [Arabidopsis thaliana]
MGNCAGVQGNAEINPTFSAPNTSGNNSKSSNSSNATDTSTFGKSSSSSVPPTPRTEKEILQSSNLRKFTFSELRSSTRNFRTDSLLGEGGFGSVFKGWIDERTFTPVKPGTGMIVAVKKLKLDSFQGHKEWLAEVNYLGQLSHPNLVKLIGYCLEDEQRLLVYEFMPKGSLEHHLFRRAPHFQPLSWSLRMKVALEAARGLAFLHSDEAKVIYRDFKTSNVLLDSEYNAKLSDFGLAKDGPSGDKSHVSTRVMGTQGYAAPEYLATGHLTTKSDVYTYGVVLLELLTGQRALDKNRPPGQHNLVEWARPYINSKRRVIHVLDPRLGSQYSLPAAQKAAALAMQCLSMDARCRPDMDQVVTALEKLPEVKKTYK

SEQ ID NO: 13108 - protein, 261 aa, Triticum aestivum
  peptide (1)..(261): Ceres Seq. ID no. 13654991
  misc_feature (1)..(259): NCBI GI NO: 14719339 NR Description: putative protein kinase [Oryza sativa]
  misc_feature (1)..(259): NCBI GI NO: 34906046 NR Description: putative serine/threonine-specific protein kinase
  misc_feature (1)..(255): NCBI GI NO: 34897424 NR Description: putative protein kinase
  misc_feature (1)..(253): NCBI GI NO: 15227001 NR Description: protein kinase (APK1b) [Arabidopsis thaliana]
  misc_feature (1)..(253): NCBI GI NO: 15222437 NR Description: protein kinase (APK1a) [Arabidopsis thaliana]
  misc_feature (1)..(155): NCBI GI NO: 8778537 NR Description: F22G5.5 [Arabidopsis thaliana]
  misc_feature (155)..(253): NCBI GI NO: 8778537 NR Description: F22G5.5 [Arabidopsis thaliana]
  misc_feature (1)..(261): NCBI GI NO: 15241749 NR Description: protein kinase, putative [Arabidopsis thaliana]
  misc_feature (1)..(261): NCBI GI NO: 166809 NR Description: protein kinase
  misc_feature (1)..(257): NCBI GI NO: 15227042 NR Description: protein kinase (APK2b) [Arabidopsis thaliana]
MIVAVKKLKLDSFQGHKEWLAEVNYLGQLSHPNLVKLIGYCLEDEQRLLVYEFMPKGSLEHHLFRRAPHFQPLSWSLRMKVALEAARGLAFLHSDEAKVIYRDFKTSNVLLDSEYNAKLSDFGLAKDGPSGDKSHVSTRVMGTQGYAAPEYLATGHLTTKSDVYTYGVVLLELLTGQRALDKNRPPGQHNLVEWARPYINSKRRVIHVLDPRLGSQYSLPAAQKAAALAMQCLSMDARCRPDMDQVVTALEKLPEVKKTYK

SEQ ID NO: 13109 - protein, 208 aa, Triticum aestivum
  peptide (1)..(208): Ceres Seq. ID no. 13654992
  misc_feature (1)..(206): NCBI GI NO: 14719339 NR Description: putative protein kinase [Oryza sativa]
  misc_feature (1)..(206): NCBI GI NO: 34906046 NR Description: putative serine/threonine-specific protein kinase
  misc_feature (1)..(202): NCBI GI NO: 34897424 NR Description: putative protein kinase
  misc_feature (1)..(200): NCBI GI NO: 15227001 NR Description: protein kinase (APK1b) [Arabidopsis thaliana]
  misc_feature (1)..(200): NCBI GI NO: 15222437 NR Description: protein kinase (APK1a) [Arabidopsis thaliana]
  misc_feature (1)..(102): NCBI GI NO: 8778537 NR Description: F22G5.5 [Arabidopsis thaliana]
  misc_feature (102)..(200): NCBI GI NO: 8778537 NR Description: F22G5.5 [Arabidopsis thaliana]
  misc_feature (1)..(208): NCBI GI NO: 15241749 NR Description: protein kinase, putative [Arabidopsis thaliana]
  misc_feature (1)..(208): NCBI GI NO: 166809 NR Description: protein kinase
  misc_feature (1)..(204): NCBI GI NO: 15227042 NR Description: protein kinase (APK2b) [Arabidopsis thaliana]
MPKGSLEHHLFRRAPHFQPLSWSLRMKVALEAARGLAFLHSDEAKVIYRDFKTSNVLLDSEYNAKLSDFGLAKDGPSGDKSHVSTRVMGTQGYAAPEYLATGHLTTKSDVYTYGVVLLELLTGQRALDKNRPPGQHNLVEWARPYINSKRRVIHVLDPRLGSQYSLPAAQKAAALAMQCLSMDARCRPDMDQVVTALEKLPEVKKTYK

SEQ ID NO: 13110 - DNA, 1342 bp, Triticum aestivum
  misc_feature (1)..(1342): Ceres Seq. ID no. 14302333
gacccccaacaacctccctcccccctcgtgcgcctctactaaaccgagtagtcggcaaggaggggcagcaggggagggagatctgactgacgaggcagggatgatggagagccagccgctgcaggccccgacggccgagccccacggcgccggagccgcggacgaccaggccggagccggagctccccccgccgtcgttcccgggaaggagttcacgcggacctgcaagggcctcgtcgtcgtgctcatcggcggctacgtgctgctgcaactcctcccatcctccctcaactacctcgccatcatccccgccaagacaattccctttgtatggaccgtcttcaccgccggttacatcgagcaagtcctcccaggggctattggcagttcccttggtcttctcttctgcgggaaggatattgagccagtctggggccgcaaggagttcttgaagttcattatcttgatcaactccatctgcggcatccttgcgttctgcattgctgttgcactgtactatgtcaccgggaaagagagcttccttgtaacgccactttctggcttccatggcgcccttgctggctttctggttggcctgaagcagctcttgccaaaccttgagctccccatgtgctttttctggaaaataaaggctaagtggatgccattctttgtcatgtgcttctcaactatcatggccttcattgtgccggattccatcaacttcctgccgactttgttgtctgggatgtacgtcagctggctttacctgagatacttccagaagaacccactgacaggacttaagggcgacccaagtgatgacttctccttccccagcttgttcccagatgccatgcggccagtcacagacccagttgctaatctgttcgaccggatgttgtgtgcgaggtctaagccttcagaaattgccctcccagttaccgatcctaccaaggcatcgagaagaagggagcgtggcgagagggttctcgaggaaaggatggccgcggatcatgcggctgacgccgaagccccagctcactctgcggaagattaagaattttcccctgtgctacgtcgtcatagtggccacggtcgccttgtaactcctcggatttgtgttctggggagcatattcatttttacagtggaccgatgatatgataatactttactgcccctcttttgtttccttgttttgagaatattggttggttaaattgtgttgtagttcctgattacagtgaggaaagaagaaaaagggtggcatccccttgcccccgatgttgtaatgtagaaaaagaatgacttgtcagtaacaatgtgaagtattttttcc

SEQ ID NO: 13111 - protein, 352 aa, Triticum aestivum
  peptide (1)..(352): Ceres Seq. ID no. 14302334
  misc_feature (35)..(352): NCBI GI NO: 21741573 NR Description: OSJNBa0094O15.3
  misc_feature (62)..(352): NCBI GI NO: 34395257 NR Description: putative placental protein 6
  misc_feature (71)..(343): NCBI GI NO: 6648207 NR Description: unknown protein [Arabidopsis thaliana]
  misc_feature (71)..(343): NCBI GI NO: 18398108 NR Description: expressed protein [Arabidopsis thaliana]
  misc_feature (78)..(335): NCBI GI NO: 5902022 NR Description: PL6 protein [Homo sapiens]
  misc_feature (78)..(352): NCBI GI NO: 19920824 NR Description: CG9536-PA [Drosophila melanogaster]
  misc_feature (76)..(335): NCBI GI NO: 9790165 NR Description: PL6 protein; PL-6; placental protein 6
  misc_feature (76)..(335): NCBI GI NO: 34865897 NR Description: similar to PL6 protein [Rattus norvegicus]
  misc_feature (64)..(295): NCBI GI NO: 31197821 NR Description: ENSANGP00000018642 [Anopheles gambiae]
  misc_feature (98)..(304): NCBI GI NO: 32413290 NR Description: hypothetical protein [Neurospora crassa]
TPNNLPPPSCASTKPSSRQGGAAGEGDLTDEAGMMESQPLQAPTAEPHGAGAADDQAGAGAPPAVVPGKEFTRTCKGLVVVLIGGYVLLQLLPSSLNYLAIIPAKTIPFVWTVFTAGYIEQVLPGAIGSSLGLLFCGKDIEPVWGRKEFLKFIILINSICGILAFCIAVALYYVTGKESFLVTPLSGFHGALAGFLVGLKQLLPNLELPMCFFWKIKAKWMPFFVMCFSTIMAFIVPDSINFLPTLLSGMYVSWLYLRYFQKNPLTGLKGDPSDDFSFPSLFPDAMRPVTDPVANLFDRMLCARSKPSEIALPVTDPTKASRRRERGERVLEERMAADHAADAEAPAHSAED

SEQ ID NO: 13112 - protein, 319 aa, Triticum aestivum
  peptide (1)..(319): Ceres Seq. ID no. 14302335
  misc_feature (2)..(319): NCBI GI NO: 21741573 NR Description: OSJNBa0094O15.3
  misc_feature (29)..(319): NCBI GI NO: 34395257 NR Description: putative placental protein 6
  misc_feature (38)..(310): NCBI GI NO: 6648207 NR Description: unknown protein [Arabidopsis thaliana]
  misc_feature (38)..(310): NCBI GI NO: 18398108 NR Description: expressed protein [Arabidopsis thaliana]
  misc_feature (45)..(302): NCBI GI NO: 5902022 NR Description: PL6 protein [Homo sapiens]
  misc_feature (45)..(319): NCBI GI NO: 19920824 NR Description: CG9536-PA [Drosophila melanogaster]
  misc_feature (43)..(302): NCBI GI NO: 9790165 NR Description: PL6 protein; PL-6; placental protein 6
  misc_feature (43)..(302): NCBI GI NO: 34865897 NR Description: similar to PL6 protein [Rattus norvegicus]
  misc_feature (31)..(262): NCBI GI NO: 31197821 NR Description: ENSANGP00000018642 [Anopheles gambiae]
  misc_feature (65)..(271): NCBI GI NO: 32413290 NR Description: hypothetical protein [Neurospora crassa]
MMESQPLQAPTAEPHGAGAADDQAGAGAPPAVVPGKEFTRTCKGLVVVLIGGYVLLQLLPSSLNYLAIIPAKTIPFVWTVFTAGYIEQVLPGAIGSSLGLLFCGKDIEPVWGRKEFLKFIILINSICGILAFCIAVALYYVTGKESFLVTPLSGFHGALAGFLVGLKQLLPNLELPMCFFWKIKAKWMPFFVMCFSTIMAFIVPDSINFLPTLLSGMYVSWLYLRYFQKNPLTGLKGDPSDDFSFPSLFPDAMRPVTDPVANLFDRMLCARSKPSEIALPVTDPTKASRRRERGERVLEERMAADHAADAEAPAHSAED

SEQ ID NO: 13113 - protein, 318 aa, Triticum aestivum
  peptide (1)..(318): Ceres Seq. ID no. 14302336
  misc_feature (1)..(318): NCBI GI NO: 21741573 NR Description: OSJNBa0094O15.3
  misc_feature (28)..(318): NCBI GI NO: 34395257 NR Description: putative placental protein 6
  misc_feature (37)..(309): NCBI GI NO: 6648207 NR Description: unknown protein [Arabidopsis thaliana]
  misc_feature (37)..(309): NCBI GI NO: 18398108 NR Description: expressed protein [Arabidopsis thaliana]
  misc_feature (44)..(301): NCBI GI NO: 5902022 NR Description: PL6 protein [Homo sapiens]
  misc_feature (44)..(318): NCBI GI NO: 19920824 NR Description: CG9536-PA [Drosophila melanogaster]
  misc_feature (42)..(301): NCBI GI NO: 9790165 NR Description: PL6 protein; PL-6; placental protein 6
  misc_feature (42)..(301): NCBI GI NO: 34865897 NR Description: similar to PL6 protein [Rattus norvegicus]
  misc_feature (30)..(261): NCBI GI NO: 31197821 NR Description: ENSANGP00000018642 [Anopheles gambiae]
  misc_feature (64)..(270): NCBI GI NO: 32413290 NR Description: hypothetical protein [Neurospora crassa]
MESQPLQAPTAEPHGAGAADDQAGAGAPPAVVPGKEFTRTCKGLVVVLIGGYVLLQLLPSSLNYLAIIPAKTIPFVWTVFTAGYIEQVLPGAIGSSLGLLFCGKDIEPVWGRKEFLKFIILINSICGILAFCIAVALYYVTGKESFLVTPLSGFHGALAGFLVGLKQLLPNLELPMCFFWKIKAKWMPFFVMCFSTIMAFIVPDSINFLPTLLSGMYVSWLYLRYFQKNPLTGLKGDPSDDFSFPSLFPDAMRPVTDPVANLFDRMLCARSKPSEIALPVTDPTKASRRRERGERVLEERMAADHAADAEAPAHSAED

SEQ ID NO: 13114 - DNA, 1382 bp, Triticum aestivum
  misc_feature (1)..(1382): Ceres Seq. ID no. 13596976
aaagatccccaaacccatcaaacctttgcgtgccccccgctccactcccctctcccctcccctcactgcgtgcgcactgcggccacagcgcgctccggatcggcggatctcgtcgggcggcggccgccacgatgatgagcagcgtctcccctccggcgccgtcgctcccctccgggggtggaagcttcttcagagggtacacgaagctctgcaagggcctcgccgtcatattgcttctcgtgcacctcttggtccagctgttcccatcggccgtcaactatctcgcgcttatccctgcaaggacaatccctttcgcctggaacttgataactgctggctatgtcgagcaaaccattccaggggtgattatcagcatcattggtcttcttttatttgggaaattattagagcctttatggggcacaaaggagttatcaaagttcgtttttattgtcaacttctcaacttcaatgtgtgtcttcgtaactgctattgctgtgtactacgtaacacaacaagagagctacctctacactcctctttctggtttctatggggttctgtcaggattgctggtgggcatcaagcaacttatgccagagttggagcttaatcttttcgtgctgaagattaagggaaagtggatcccatcacttattgcactgatctccgttgttgtaagcttcttcatgaaggacttggtatcttacctcccagttatactgtttggcatttatatgagttggatttacctgcgttacttccaaaagaggctagagacaggcctgaaaggggatccaagcgaggagttctctttctcaagtttcttccctgcaattctgagaccagttctggatccaatagccacaatattccataggcttctttgtggaagatctgatagggcagaccggggtcagacattggaaacgtcatcattgccgggttcagattctactgaggcaaacaggaggagggaaaggggtcaaagggcactggagcaaagattggctgagaagctggccgcggtcaagagtacagagagcacgtctctcgacgcatccgacaaagtttgagccttctacaaagacgacctgccaaatgttgtgaattcccggtgctgcgttacccaagtgacgttgtctggaggacaagggagcatcgttggttcggccgcgagcttctaggggaggtggtgatgcgagaatgtgtgattttactgatttagggaaccatatgccgaactgtgcaatgatagcatcatgtttgttagcacaatttagccgcgcactgactgctgagagtttttcgcttttcatttttgaggcccagccagaggctttccttgagcatgaatgagttgccgcattggtttgtttgtc

SEQ ID NO: 13115 - protein, 357 aa, Triticum aestivum
  peptide (1)..(357): Ceres Seq. ID no. 13596977
  misc_feature (44)..(357): NCBI GI NO: 34395257 NR Description: putative placental protein 6
  misc_feature (55)..(357): NCBI GI NO: 18398108 NR Description: expressed protein [Arabidopsis thaliana]
  misc_feature (59)..(357): NCBI GI NO: 6648207 NR Description: unknown protein [Arabidopsis thaliana]
  misc_feature (66)..(354): NCBI GI NO: 21741573 NR Description: OSJNBa0094O15.3
  misc_feature (60)..(356): NCBI GI NO: 9790165 NR Description: PL6 protein; PL-6; placental protein 6
  misc_feature (60)..(356): NCBI GI NO: 34865897 NR Description: similar to PL6 protein [Rattus norvegicus]
  misc_feature (60)..(336): NCBI GI NO: 5902022 NR Description: PL6 protein [Homo sapiens]
  misc_feature (83)..(336): NCBI GI NO: 19920824 NR Description: CG9536-PA [Drosophila melanogaster]
  misc_feature (106)..(198): NCBI GI NO: 2340093 NR Description: PL6 protein
  misc_feature (263)..(336): NCBI GI NO: 2340093 NR Description: PL6 protein
RSPNPSNLCVPPAPLPSPLPSLRAHCGHSALRIGGSRRAAAATMMSSVSPPAPSLPSGGGSFFRGYTKLCKGLAVILLLVHLLVQLFPSAVNYLALIPARTIPFAWNLITAGYVEQTIPGVIISIIGLLLFGKLLEPLWGTKELSKFVFIVNFSTSMCVFVTAIAVYYVTQQESYLYTPLSGFYGVLSGLLVGIKQLMPELELNLFVLKIKGKWIPSLIALISVVVSFFMKDLVSYLPVILFGIYMSWIYLRYFQKRLETGLKGDPSEEFSFSSFFPAILRPVLDPIATIFHRLLCGRSDRADRGQTLETSSLPGSDSTEANRRRERGQRALEQRLAEKLAAVKSTESTSLDASDKV

SEQ ID NO: 13116 - protein, 314 aa, Triticum aestivum
  peptide (1)..(314): Ceres Seq. ID no. 13596978
  misc_feature (1)..(314): NCBI GI NO: 34395257 NR Description: putative placental protein 6
  misc_feature (12)..(314): NCBI GI NO: 18398108 NR Description: expressed protein [Arabidopsis thaliana]
  misc_feature (16)..(314): NCBI GI NO: 6648207 NR Description: unknown protein [Arabidopsis thaliana]
  misc_feature (23)..(311): NCBI GI NO: 21741573 NR Description: OSJNBa0094O15.3
  misc_feature (17)..(313): NCBI GI NO: 9790165 NR Description: PL6 protein; PL-6; placental protein 6
  misc_feature (17)..(313): NCBI GI NO: 34865897 NR Description: similar to PL6 protein [Rattus norvegicus]
  misc_feature (17)..(293): NCBI GI NO: 5902022 NR Description: PL6 protein [Homo sapiens]
  misc_feature (40)..(293): NCBI GI NO: 19920824 NR Description: CG9536-PA [Drosophila melanogaster]
  misc_feature (63)..(155): NCBI GI NO: 2340093 NR Description: PL6 protein
  misc_feature (220)..(293): NCBI GI NO: 2340093 NR Description: PL6 protein
MMSSVSPPAPSLPSGGGSFFRGYTKLCKGLAVILLLVHLLVQLFPSAVNYLALIPARTIPFAWNLITAGYVEQTIPGVIISIIGLLLFGKLLEPLWGTKELSKFVFIVNFSTSMCVFVTAIAVYYVTQQESYLYTPLSGFYGVLSGLLVGIKQLMPELELNLFVLKIKGKWIPSLIALISVVVSFFMKDLVSYLPVILFGIYMSWIYLRYFQKRLETGLKGDPSEEFSFSSFFPAILRPVLDPIATIFHRLLCGRSDRADRGQTLETSSLPGSDSTEANRRRERGQRALEQRLAEKLAAVKSTESTSLDASDKV

SEQ ID NO: 13117 - protein, 313 aa, Triticum aestivum
  peptide (1)..(313): Ceres Seq. ID no. 13596979
  misc_feature (1)..(313): NCBI GI NO: 34395257 NR Description: putative placental protein 6
  misc_feature (11)..(313): NCBI GI NO: 18398108 NR Description: expressed protein [Arabidopsis thaliana]
  misc_feature (15)..(313): NCBI GI NO: 6648207 NR Description: unknown protein [Arabidopsis thaliana]
  misc_feature (22)..(310): NCBI GI NO: 21741573 NR Description: OSJNBa0094O15.3
  misc_feature (16)..(312): NCBI GI NO: 9790165 NR Description: PL6 protein; PL-6; placental protein 6
  misc_feature (16)..(312): NCBI GI NO: 34865897 NR Description: similar to PL6 protein [Rattus norvegicus]
  misc_feature (16)..(292): NCBI GI NO: 5902022 NR Description: PL6 protein [Homo sapiens]
  misc_feature (39)..(292): NCBI GI NO: 19920824 NR Description: CG9536-PA [Drosophila melanogaster]
  misc_feature (62)..(154): NCBI GI NO: 2340093 NR Description: PL6 protein
  misc_feature (219)..(292): NCBI GI NO: 2340093 NR Description: PL6 protein
MSSVSPPAPSLPSGGGSFFRGYTKLCKGLAVILLLVHLLVQLFPSAVNYLALIPARTIPFAWNLITAGYVEQTIPGVIISIIGLLLFGKLLEPLWGTKELSKFVFIVNFSTSMCVFVTAIAVYYVTQQESYLYTPLSGFYGVLSGLLVGIKQLMPELELNLFVLKIKGKWIPSLIALISVVVSFFMKDLVSYLPVILFGIYMSWIYLRYFQKRLETGLKGDPSEEFSFSSFFPAILRPVLDPIATIFHRLLCGRSDRADRGQTLETSSLPGSDSTEANRRRERGQRALEQRLAEKLAAVKSTESTSLDASDKV

SEQ ID NO: 13118 - DNA, 1137 bp, Triticum aestivum
  misc_feature (1)..(1137): Ceres Seq. ID no. 13662219
aaccatcaccaccgagctacctccagcctccagccatcactcagctcaaagacacaatcaggcaatcagcggcggcgagaacacacacagagtcacagatgaccttcagcgtctcgccggcgacgggggcgagccaggagtacatgatccggttcgacggccacttcgaggacccgagctccgcggccgcgagcgccgagccacccctgccgttcgccggcagggctttctcgccacagcaggagcagagcgccatggtcgccgcgctgctgcacgtcgtctccgggtacaccacgccggcgcctgacctcttcttcccggcgcgcaaggaggcgtgcacggcgtgcgggatggacgggtgcctcgggtgcgagttcttcggcgcggaggccgggcgcgcggtcgcggcatcggacgcgccgagagcgccggcggccggcgggccgcagaggaggcggaggaacaagaagaaccagtaccgcggcgtcaggcagcggccgtggggcaagtgggcggcggagatccgcgacccgcgccgcgccgtgcgggtgtggctcgggaccttcgacacggccgaggacgccgccagggcctacgaccgcgccgccgtcgagttccgcggcccgcgcgccaagctcaacttctccttccccgagcagcagcagcagcagctaggcggcagcggcaatgccgcggccaagtcagacgcgtgctcgccctcgccttcgccccgcagcgcggacgaggacgaaacaggggacctgctctgggacggcttggtggacttgatgaagctggacgagagcgacctctgcttactgctcccggtcgacaacacggataaatttcacatagaggggaagagacgatcaggatcaggggtacccctctgctactagtgttagactattagcgagtaccagatagacaatcagcagtcctaatcctgctcactacgtggttagcacacgtcctagcttcggttgtaattctgcataaataggcacccgatcaatggaaaagttgtgttcaaccatactcatctgccatgttgtatgtagacaaatccaatttggggcttatttgttggaactataatggtttctattaatagaaaccaggggaaaccccttttgc

SEQ ID NO: 13119 - protein, 298 aa, Triticum aestivum
  peptide (1)..(298): Ceres Seq. ID no. 13662220
  misc_feature (156)..(216): Pfam Name: Pfam Description:  AP2 domain
  misc_feature (128)..(280): NCBI GI NO: 15235365 NR Description: AP2 domain transcription factor, putative
  misc_feature (85)..(243): NCBI GI NO: 38347164 NR Description: OSJNBa0039C07.10
  misc_feature (83)..(218): NCBI GI NO: 15240610 NR Description: putative protein; protein id: At5g50080.1
  misc_feature (143)..(214): NCBI GI NO: 28274830 NR Description: ethylene response factor 2
  misc_feature (143)..(214): NCBI GI NO: 40557189 NR Description: ethylene-binding protein [Lycopersicon esculentum]
  misc_feature (114)..(246): NCBI GI NO: 34908616 NR Description: P0677H08.8
  misc_feature (136)..(242): NCBI GI NO: 34894554 NR Description: B1011A07.25
  misc_feature (83)..(218): NCBI GI NO: 34221731 NR Description: putative AP2 domain transcription factor
  misc_feature (126)..(235): NCBI GI NO: 30683059 NR Description: AP2 domain protein RAP2.2 [Arabidopsis thaliana]
  misc_feature (81)..(214): NCBI GI NO: 33519168 NR Description: AP2 domain-containing protein AP29
PSPPSYLQPPAITQLKDTIRQSAAARTHTESQMTFSVSPATGASQEYMIRFDGHFEDPSSAAASAEPPLPFAGRAFSPQQEQSAMVAALLHVVSGYTTPAPDLFFPARKEACTACGMDGCLGCEFFGAEAGRAVAASDAPRAPAAGGPQRRRRNKKNQYRGVRQRPWGKWAAEIRDPRRAVRVWLGTFDTAEDAARAYDRAAVEFRGPRAKLNFSFPEQQQQQLGGSGNAAAKSDACSPSPSPRSADEDETGDLLWDGLVDLMKLDESDLCLLLPVDNTDKFHIEGKRRSGSGVPLCY

SEQ ID NO: 13120 - protein, 266 aa, Triticum aestivum
  peptide (1)..(266): Ceres Seq. ID no. 13662221
  misc_feature (124)..(184): Pfam Name: Pfam Description:  AP2 domain
  misc_feature (96)..(248): NCBI GI NO: 15235365 NR Description: AP2 domain transcription factor, putative
  misc_feature (53)..(211): NCBI GI NO: 38347164 NR Description: OSJNBa0039C07.10
  misc_feature (51)..(186): NCBI GI NO: 15240610 NR Description: putative protein; protein id: At5g50080.1
  misc_feature (111)..(182): NCBI GI NO: 28274830 NR Description: ethylene response factor 2
  misc_feature (111)..(182): NCBI GI NO: 40557189 NR Description: ethylene-binding protein [Lycopersicon esculentum]
  misc_feature (82)..(214): NCBI GI NO: 34908616 NR Description: P0677H08.8
  misc_feature (104)..(210): NCBI GI NO: 34894554 NR Description: B1011A07.25
  misc_feature (51)..(186): NCBI GI NO: 34221731 NR Description: putative AP2 domain transcription factor
  misc_feature (94)..(203): NCBI GI NO: 30683059 NR Description: AP2 domain protein RAP2.2 [Arabidopsis thaliana]
  misc_feature (49)..(182): NCBI GI NO: 33519168 NR Description: AP2 domain-containing protein AP29
MTFSVSPATGASQEYMIRFDGHFEDPSSAAASAEPPLPFAGRAFSPQQEQSAMVAALLHVVSGYTTPAPDLFFPARKEACTACGMDGCLGCEFFGAEAGRAVAASDAPRAPAAGGPQRRRRNKKNQYRGVRQRPWGKWAAEIRDPRRAVRVWLGTFDTAEDAARAYDRAAVEFRGPRAKLNFSFPEQQQQQLGGSGNAAAKSDACSPSPSPRSADEDETGDLLWDGLVDLMKLDESDLCLLLPVDNTDKFHIEGKRRSGSGVPLCY

SEQ ID NO: 13121 - protein, 251 aa, Triticum aestivum
  peptide (1)..(251): Ceres Seq. ID no. 13662222
  misc_feature (109)..(169): Pfam Name: Pfam Description:  AP2 domain
  misc_feature (81)..(233): NCBI GI NO: 15235365 NR Description: AP2 domain transcription factor, putative
  misc_feature (38)..(196): NCBI GI NO: 38347164 NR Description: OSJNBa0039C07.10
  misc_feature (36)..(171): NCBI GI NO: 15240610 NR Description: putative protein; protein id: At5g50080.1
  misc_feature (96)..(167): NCBI GI NO: 28274830 NR Description: ethylene response factor 2
  misc_feature (96)..(167): NCBI GI NO: 40557189 NR Description: ethylene-binding protein [Lycopersicon esculentum]
  misc_feature (67)..(199): NCBI GI NO: 34908616 NR Description: P0677H08.8
  misc_feature (89)..(195): NCBI GI NO: 34894554 NR Description: B1011A07.25
  misc_feature (36)..(171): NCBI GI NO: 34221731 NR Description: putative AP2 domain transcription factor
  misc_feature (79)..(188): NCBI GI NO: 30683059 NR Description: AP2 domain protein RAP2.2 [Arabidopsis thaliana]
  misc_feature (34)..(167): NCBI GI NO: 33519168 NR Description: AP2 domain-containing protein AP29
MIRFDGHFEDPSSAAASAEPPLPFAGRAFSPQQEQSAMVAALLHVVSGYTTPAPDLFFPARKEACTACGMDGCLGCEFFGAEAGRAVAASDAPRAPAAGGPQRRRRNKKNQYRGVRQRPWGKWAAEIRDPRRAVRVWLGTFDTAEDAARAYDRAAVEFRGPRAKLNFSFPEQQQQQLGGSGNAAAKSDACSPSPSPRSADEDETGDLLWDGLVDLMKLDESDLCLLLPVDNTDKFHIEGKRRSGSGVPLCY

SEQ ID NO: 13122 - DNA, 989 bp, Triticum aestivum
  misc_feature (1)..(989): Ceres Seq. ID no. 12615635
acacttgcaaattgagtaaaacttaagagcacatacgtacacagcagagcaatagtatacgagcaacaaatagcaaggaagagatagatccaagacgaagatcggaaacgatggccggccaaggaaatgatgatgtcaaggtactgggcacggcggcgagcatgttcgcgatccgcgtgcgcatggcgctgcacgtcaagggcgtgagctacgagtacctggagcaggacctgttccacaagggcgacctcctcctcgcctccaacccggtgcgcaaggccgtccccgtgctcatccacgccggcaggcccgtctgcgagtcgctcgccatcgtcgagtacgtcgacgaggtctgggccgatgcctcgctcctccctgccgacccctacgaccgcgccgtcgcccgcttctgggccgcctatgtcgacgacaaggctgtccccacgtggataggcatcatgagggcggccacggaggaggacagggcggagagcctggcagctgcgctcgaggcggtcgcgcccttggaggacgccttcgcccaatgctctggcgggaaggccttcttcgccggagactctatcgggtacctcgatctcgcgctcgggtgcaacctcttctggatcgaggcgctgcgccacatgttcggtgtcacggtcatcgacgccggcaggactccgcgcctggccgcctgggctgagaggttcgtggagacggaggctgcaaagaaggcggcaccgcccatggaaagcatgttggaggaggccgggaaactgcgggctatgtgggctgctgcggctgctgcaaagtaattagtggctactcctacctcgcaggagcttcttattttttcggtcgtcacttttgtttggaggttttgcagtcgtcagtcgtcacctttttttttacatcagcgtcagtggtcactgttacctaaaggattataaatttcatttgttctaagtttttttttttgagcattagtacag

SEQ ID NO: 13123 - protein, 233 aa, Triticum aestivum
  peptide (1)..(233): Ceres Seq. ID no. 12615636
  misc_feature (88)..(203): Pfam Name: Pfam Description:  Glutathione S-transferase, C-terminal domain
  misc_feature (1)..(233): NCBI GI NO: 22022398 NR Description: glutathione-S-transferase Cla47
  misc_feature (1)..(232): NCBI GI NO: 37536354 NR Description: putative glutathione S-transferase
  misc_feature (1)..(232): NCBI GI NO: 37536352 NR Description: putative glutathione S-transferase
  misc_feature (1)..(229): NCBI GI NO: 11385503 NR Description: glutathione S-transferase GST 26 [Zea mays]
  misc_feature (5)..(231): NCBI GI NO: 11385517 NR Description: glutathione S-transferase GST 33 [Zea mays]
  misc_feature (1)..(232): NCBI GI NO: 37536280 NR Description: putative glutathione S-transferase
  misc_feature (1)..(232): NCBI GI NO: 33304610 NR Description: tau class GST protein 4
  misc_feature (1)..(232): NCBI GI NO: 37536310 NR Description: putative glutathione S-transferase
  misc_feature (1)..(232): NCBI GI NO: 37536308 NR Description: putative glutathione S-transferase
  misc_feature (1)..(230): NCBI GI NO: 37536250 NR Description: putative glutathione S-transferase
MAGQGNDDVKVLGTAASMFAIRVRMALHVKGVSYEYLEQDLFHKGDLLLASNPVRKAVPVLIHAGRPVCESLAIVEYVDEVWADASLLPADPYDRAVARFWAAYVDDKAVPTWIGIMRAATEEDRAESLAAALEAVAPLEDAFAQCSGGKAFFAGDSIGYLDLALGCNLFWIEALRHMFGVTVIDAGRTPRLAAWAERFVETEAAKKAAPPMESMLEEAGKLRAMWAAAAAAK

SEQ ID NO: 13124 - protein, 216 aa, Triticum aestivum
  peptide (1)..(216): Ceres Seq. ID no. 12615637
  misc_feature (71)..(186): Pfam Name: Pfam Description:  Glutathione S-transferase, C-terminal domain
  misc_feature (1)..(216): NCBI GI NO: 22022398 NR Description: glutathione-S-transferase Cla47
  misc_feature (1)..(215): NCBI GI NO: 37536354 NR Description: putative glutathione S-transferase
  misc_feature (1)..(215): NCBI GI NO: 37536352 NR Description: putative glutathione S-transferase
  misc_feature (1)..(212): NCBI GI NO: 11385503 NR Description: glutathione S-transferase GST 26 [Zea mays]
  misc_feature (1)..(214): NCBI GI NO: 11385517 NR Description: glutathione S-transferase GST 33 [Zea mays]
  misc_feature (1)..(215): NCBI GI NO: 37536280 NR Description: putative glutathione S-transferase
  misc_feature (1)..(215): NCBI GI NO: 33304610 NR Description: tau class GST protein 4
  misc_feature (1)..(215): NCBI GI NO: 37536310 NR Description: putative glutathione S-transferase
  misc_feature (1)..(215): NCBI GI NO: 37536308 NR Description: putative glutathione S-transferase
  misc_feature (1)..(213): NCBI GI NO: 37536250 NR Description: putative glutathione S-transferase
MFAIRVRMALHVKGVSYEYLEQDLFHKGDLLLASNPVRKAVPVLIHAGRPVCESLAIVEYVDEVWADASLLPADPYDRAVARFWAAYVDDKAVPTWIGIMRAATEEDRAESLAAALEAVAPLEDAFAQCSGGKAFFAGDSIGYLDLALGCNLFWIEALRHMFGVTVIDAGRTPRLAAWAERFVETEAAKKAAPPMESMLEEAGKLRAMWAAAAAAK

SEQ ID NO: 13125 - protein, 209 aa, Triticum aestivum
  peptide (1)..(209): Ceres Seq. ID no. 12615638
  misc_feature (64)..(179): Pfam Name: Pfam Description:  Glutathione S-transferase, C-terminal domain
  misc_feature (1)..(209): NCBI GI NO: 22022398 NR Description: glutathione-S-transferase Cla47
  misc_feature (1)..(208): NCBI GI NO: 37536354 NR Description: putative glutathione S-transferase
  misc_feature (1)..(208): NCBI GI NO: 37536352 NR Description: putative glutathione S-transferase
  misc_feature (1)..(205): NCBI GI NO: 11385503 NR Description: glutathione S-transferase GST 26 [Zea mays]
  misc_feature (1)..(207): NCBI GI NO: 11385517 NR Description: glutathione S-transferase GST 33 [Zea mays]
  misc_feature (1)..(208): NCBI GI NO: 37536280 NR Description: putative glutathione S-transferase
  misc_feature (1)..(208): NCBI GI NO: 33304610 NR Description: tau class GST protein 4
  misc_feature (1)..(208): NCBI GI NO: 37536310 NR Description: putative glutathione S-transferase
  misc_feature (1)..(208): NCBI GI NO: 37536308 NR Description: putative glutathione S-transferase
  misc_feature (1)..(206): NCBI GI NO: 37536250 NR Description: putative glutathione S-transferase
MALHVKGVSYEYLEQDLFHKGDLLLASNPVRKAVPVLIHAGRPVCESLAIVEYVDEVWADASLLPADPYDRAVARFWAAYVDDKAVPTWIGIMRAATEEDRAESLAAALEAVAPLEDAFAQCSGGKAFFAGDSIGYLDLALGCNLFWIEALRHMFGVTVIDAGRTPRLAAWAERFVETEAAKKAAPPMESMLEEAGKLRAMWAAAAAAK

SEQ ID NO: 13126 - DNA, 735 bp, Triticum aestivum
  misc_feature (1)..(735): Ceres Seq. ID no. 12585079
gatacacagagcgagaggccgaggaagcgatagctctagcgataaggcactgacagatcaatggctgccacggcgtactccgtggccctcctcggcggagcgcgcctccccgccgccaccggcaacgccgccccccgctcctccgccttcctcccgcggcgcaacctccacccgctccgcctccaagatgcgcccaggccgtccctgctccgcgtgaaggccgcctccgacgacacgtcggcgagcggcgacgagatcatcgaggacctcaaggggaagtgggaggcgattgaggacaagccgaccttcctcctctacagcggcggcgccgtcgtcgcgctctggctcaccaccgtcgtcgtcggcgccatcaactccgtgccgttgctccccaagctcctggagctggttgggctcggctacaccgggtggttcgtgtaccgctacctcctcttcaaggaaagcaggaaagagttggccaccgacatcgaaagcttgaagaagaagattgccggaacagaataaactcaagttctctggaacgttttcgatggctcttttgtctgtccatgtaatggaagaacacctacttgcttagagtaccatccactgcatttgtgcgttacatacatatctgtatgaaaaaagaaatgcgctttggttggtgtgcggtgacaatagtgaaattgtatcagtttctggaagtcttctattgttttatatatcaatgtgttc

SEQ ID NO: 13127 - protein, 154 aa, Triticum aestivum
  peptide (1)..(154): Ceres Seq. ID no. 12585080
  misc_feature (1)..(154): NCBI GI NO: 18411555 NR Description: expressed protein; protein id: At4g01150
  misc_feature (1)..(154): NCBI GI NO: 687677 NR Description: unknown
  misc_feature (17)..(154): NCBI GI NO: 38175474 NR Description: unknown protein
  misc_feature (56)..(154): NCBI GI NO: 7485852 NR Description: hypothetical protein F20D10
  misc_feature (56)..(154): NCBI GI NO: 18420175 NR Description: expressed protein; protein id: At4g38100
  misc_feature (1)..(153): NCBI GI NO: 18407178 NR Description: expressed protein; protein id: At2g46820
  misc_feature (55)..(153): NCBI GI NO: 34393236 NR Description: unknown protein
  misc_feature (16)..(150): NCBI GI NO: 37536446 NR Description: hypothetical protein
  misc_feature (1)..(153): NCBI GI NO: 21555057 NR Description: unknown [Arabidopsis thaliana]
  misc_feature (35)..(151): NCBI GI NO: 18403896 NR Description: expressed protein; protein id: At1g52220
MAATAYSVALLGGARLPAATGNAAPRSSAFLPRRNLHPLRLQDAPRPSLLRVKAASDDTSASGDEIIEDLKGKWEAIEDKPTFLLYSGGAVVALWLTTVVVGAINSVPLLPKLLELVGLGYTGWFVYRYLLFKESRKELATDIESLKKKIAGTE

SEQ ID NO: 13128 - DNA, 936 bp, Triticum aestivum
  misc_feature (1)..(936): Ceres Seq. ID no. 13654993
tgtttacctgttgcaatgcattacaacacaatgatgattgggcacatttcatttgttgttcaatgtgatctaatacctgcttgggcaacaaaagggtggttgcgtactctattgagggactatcccaccctaccgttccatgcaagcatcaacaagtcatttggaaaagtaaatgaaaaaagctggacgctttggcgttgggttcattgacccaaataccgttaatgaaaagatatgggaacgtcatggaaaagaaacatagtaaaacttgctaaagtttttggtggatcaaaataccgaaccagaaatactgttttcttacatctacgggtgagtgttactatatatattgtaatacaaattctatttatgcttactagatgttagtaagtgtagttgatgagttatatatgcacatgcctgcttaattatacaaacgtgtgcgcatgcatgcagttgtcattggatcttgctagtcattgaacttgacgagggaaaagctacattattggactcaataaaggaaacaaaataaatatactacttgaacgttattgggatgctcgacagtgcatgaggcaggcgcaggggactaatttatgtggctacgtagtttgcgagaacattcgcatgaagacgtccgaaaggaagctagcggacaaaaactttcagttgctccagatgcgcgatcagctcctagaagatgaccgcatgaaagcacttcaagaggaaatagtggaatttttcctcgagcaggtcatagatcccaatggagaatactattacccgctgtaatgcctgcattgtaatggtctgcaaattgtaggagaaattttatgtaccaagttgcatgtgaatgcatgcatggtcgaattcgatgatgtgatatatatatatatatatttgatcggttctatgagaaattttttttttttt

SEQ ID NO: 13129 - protein, 73 aa, Triticum aestivum
  peptide (1)..(73): Ceres Seq. ID no. 13654994
  misc_feature (1)..(69): NCBI GI NO: 20513853 NR Description: HV711N16.8 [Hordeum vulgare]
  misc_feature (1)..(71): NCBI GI NO: 34902530 NR Description: P0581F09.24
  misc_feature (1)..(71): NCBI GI NO: 29824486 NR Description: hypothetical protein
  misc_feature (1)..(71): NCBI GI NO: 37531346 NR Description: hypothetical protein
  misc_feature (1)..(71): NCBI GI NO: 34910244 NR Description: OSJNBa0089K24.8
  misc_feature (1)..(71): NCBI GI NO: 29150412 NR Description: hypothetical protein
  misc_feature (1)..(71): NCBI GI NO: 14091828 NR Description: Unknown protein [Oryza sativa]
  misc_feature (1)..(71): NCBI GI NO: 34914712 NR Description: P0560B06.20
  misc_feature (1)..(71): NCBI GI NO: 22093654 NR Description: similar to hydroxyproline-rich glycoprotein
  misc_feature (1)..(73): NCBI GI NO: 38346424 NR Description: OSJNBa0019J05.9
MRQAQGTNLCGYVVCENIRMKTSERKLADKNFQLLQMRDQLLEDDRMKALQEEIVEFFLEQVIDPNGEYYYPL

SEQ ID NO: 13130 - protein, 69 aa, Triticum aestivum
  peptide (1)..(69): Ceres Seq. ID no. 13654995
  misc_feature (21)..(56): NCBI GI NO: 15219138 NR Description: GTP-binding protein -related
CLPVAMHYNTMMIGHISFVVQCDLIPAWATKGWLRTLLRDYPTLPFHASINKSFGKVNEKSWTLWRWVH

SEQ ID NO: 13131 - protein, 64 aa, Triticum aestivum
  peptide (1)..(64): Ceres Seq. ID no. 13654996
  misc_feature (16)..(51): NCBI GI NO: 15219138 NR Description: GTP-binding protein -related
MHYNTMMIGHISFVVQCDLIPAWATKGWLRTLLRDYPTLPFHASINKSFGKVNEKSWTLWRWVH

SEQ ID NO: 13132 - DNA, 932 bp, Triticum aestivum
  misc_feature (1)..(932): Ceres Seq. ID no. 14303722
gcaaccctagctgtagtgcagcgtatcccacttcccacctaacccctacccctatccctccgaaccccgcaccaagatggcggcgccgacgaccttctccggcgaggtgtgggcggagctgcgcctggcggacgcgcgcgacgtgccgcacatccacagcctcatccaccagatggcggagttcgagctcctcaccgacctcttcgccgccacccacgagctcctggcctccacgctcttccccacgccccagccggcccccttcacctccttcaccgccctcatcctcgacctctctccgtcccccgccccggcctccgccgacaccgtcggctcccgccgcctcgacctctcggcgtccccgctcgccgacccggaggcggccgccttcccgtccccgcgcggcggcgggcgcgtcacggccgggttcgtcatctgctttcccaactactccaccttcctcgccaagcccgggctgtacgtggaggacatcttcgtgcgcgcgccctggcgccgccgcgggctcggccggatgatgctgtccgccgtcgccggcagggccgcggagatcggaatgggccgcgtggagtggtgcgtgctcgactggaaccagaacgccatcgacttctacgaggggatgggcgccgaggtgttcaagcagtggcgcatctgccggctcaccggtcccgccctcgacaagtacaagggcaccggcagccaggaggaggaggacgccggcgggaaggcccagtaggcctgtaggagaggagagatcggggctccggtgactggtaataataaaggtggtagattttgcctccacttggtgatgtattcttccttgctagtactgatagtgatttagtgcattggtatgttcttcatggagatgcattatggacctgttcttgccttccttggaaggagtattg

SEQ ID NO: 13133 - protein, 225 aa, Triticum aestivum
  peptide (1)..(225): Ceres Seq. ID no. 14303723
  misc_feature (114)..(191): Pfam Name: GNAT Pfam Description: Acetyltransferase
  misc_feature (1)..(209): NCBI GI NO: 15225009 NR Description: GCN5-related N-acetyltransferase (GNAT) family
  misc_feature (1)..(206): NCBI GI NO: 18404927 NR Description: GCN5-related N-acetyltransferase (GNAT) family
  misc_feature (11)..(206): NCBI GI NO: 15451162 NR Description: Unknown protein [Arabidopsis thaliana]
  misc_feature (112)..(208): NCBI GI NO: 22976703 NR Description: hypothetical protein [Ralstonia metallidurans]
  misc_feature (117)..(208): NCBI GI NO: 22982569 NR Description: hypothetical protein [Burkholderia fungorum]
  misc_feature (13)..(55): NCBI GI NO: 22982569 NR Description: hypothetical protein [Burkholderia fungorum]
  misc_feature (1)..(218): NCBI GI NO: 19908259 NR Description: N-hydroxycinnamoyl-CoA: tyramine N-hydroxycinnamoyltransferase THT7-1
  misc_feature (6)..(209): NCBI GI NO: 5852154 NR Description: tyramine hydroxycinnamoyltransferase
  misc_feature (6)..(209): NCBI GI NO: 17369608 NR Description: Tyramine N-feruloyltransferase 4/11
  misc_feature (6)..(209): NCBI GI NO: 17380562 NR Description: Tyramine N-feruloyltransferase 10/30
MAAPTTFSGEVWAELRLADARDVPHIHSLIHQMAEFELLTDLFAATHELLASTLFPTPQPAPFTSFTALILDLSPSPAPASADTVGSRRLDLSASPLADPEAAAFPSPRGGGRVTAGFVICFPNYSTFLAKPGLYVEDIFVRAPWRRRGLGRMMLSAVAGRAAEIGMGRVEWCVLDWNQNAIDFYEGMGAEVFKQWRICRLTGPALDKYKGTGSQEEEDAGGKAQ

SEQ ID NO: 13134 - protein, 193 aa, Triticum aestivum
  peptide (1)..(193): Ceres Seq. ID no. 14303724
  misc_feature (82)..(159): Pfam Name: GNAT Pfam Description: Acetyltransferase
  misc_feature (1)..(177): NCBI GI NO: 15225009 NR Description: GCN5-related N-acetyltransferase (GNAT) family
  misc_feature (1)..(174): NCBI GI NO: 18404927 NR Description: GCN5-related N-acetyltransferase (GNAT) family
  misc_feature (1)..(174): NCBI GI NO: 15451162 NR Description: Unknown protein [Arabidopsis thaliana]
  misc_feature (80)..(176): NCBI GI NO: 22976703 NR Description: hypothetical protein [Ralstonia metallidurans]
  misc_feature (85)..(176): NCBI GI NO: 22982569 NR Description: hypothetical protein [Burkholderia fungorum]
  misc_feature (1)..(23): NCBI GI NO: 22982569 NR Description: hypothetical protein [Burkholderia fungorum]
  misc_feature (1)..(186): NCBI GI NO: 19908259 NR Description: N-hydroxycinnamoyl-CoA: tyramine N-hydroxycinnamoyltransferase THT7-1
  misc_feature (1)..(177): NCBI GI NO: 5852154 NR Description: tyramine hydroxycinnamoyltransferase
  misc_feature (1)..(177): NCBI GI NO: 17369608 NR Description: Tyramine N-feruloyltransferase 4/11
  misc_feature (1)..(177): NCBI GI NO: 17380562 NR Description: Tyramine N-feruloyltransferase 10/30
MAEFELLTDLFAATHELLASTLFPTPQPAPFTSFTALILDLSPSPAPASADTVGSRRLDLSASPLADPEAAAFPSPRGGGRVTAGFVICFPNYSTFLAKPGLYVEDIFVRAPWRRRGLGRMMLSAVAGRAAEIGMGRVEWCVLDWNQNAIDFYEGMGAEVFKQWRICRLTGPALDKYKGTGSQEEEDAGGKAQ

SEQ ID NO: 13135 - protein, 177 aa, Triticum aestivum
  peptide (1)..(177): Ceres Seq. ID no. 14303725
  misc_feature (1)..(177): Pfam Name: Pfam Description:  Extensin-like region
  misc_feature (1)..(177): NCBI GI NO: 23017082 NR Description: hypothetical protein [Thermobifida fusca]
  misc_feature (2)..(177): NCBI GI NO: 13592175 NR Description: ppg3 [Leishmania major]
  misc_feature (15)..(177): NCBI GI NO: 20138131 NR Description: Vegetative cell wall protein gp1 precursor
  misc_feature (3)..(177): NCBI GI NO: 13592175 NR Description: ppg3 [Leishmania major]
  misc_feature (2)..(177): NCBI GI NO: 23017082 NR Description: hypothetical protein [Thermobifida fusca]
  misc_feature (3)..(177): NCBI GI NO: 18376167 NR Description: hypothetical protein [Neurospora crassa]
  misc_feature (3)..(177): NCBI GI NO: 32414973 NR Description: predicted protein [Neurospora crassa]
  misc_feature (2)..(177): NCBI GI NO: 13592175 NR Description: ppg3 [Leishmania major]
  misc_feature (2)..(177): NCBI GI NO: 13592175 NR Description: ppg3 [Leishmania major]
  misc_feature (2)..(177): NCBI GI NO: 13592175 NR Description: ppg3 [Leishmania major]
NPSCSAAYPTSHLTPTPIPPNPAPRWRRRRPSPARCGRSCAWRTRATCRTSTASSTRWRSSSSSPTSSPPPTSSWPPRSSPRPSRPPSPPSPPSSSTSLRPPPRPPPTPSAPAASTSRRPRSPTRRRPPSRPRAAAGASRPGSSSAFPTTPPSSPSPGCTWRTSSCARPGAAAGSAG

SEQ ID NO: 13136 - DNA, 925 bp, Triticum aestivum
  misc_feature (1)..(925): Ceres Seq. ID no. 13583898
caccatcccaaattcgtccgtccattcgtcgaaaggggattacggctccacgccagcgcgccccggcaccgccgatccagccgcgccgctgccgccggccccctcgatcggaggcctcggaaggagagcaggcgcgccaggaggggggagatccgggacgccccggcgtaatcctgccgtgcaaggctcttcctgccgagacgaatcgtacgtgcctgccgccgcgccggcgaaccatgtcgtcgtccgcgttgagggccgcggggcagagggcgggggccgcggcccgtaagcaggcgctcaccctgacggaggccgcggcggccagggtgcgccacctcctcgacctcaggcagcggccctacctgcgccttggcgtcaaggcgcgcggctgcaacggcctgtcctacacgctcaattacgccgaaaaagggaagttcgatgagcttgttgaagagaagggtgtgaaagtgctgattgaccccaaggccctgatgcatgtgatcggcaccaagatggacttcgtcgacgatccactgaggtcagagtttgtgttcataaacccgaactcgaaaggggagtgtggatgcggtgaatctttcatgactacgggcagcaaaggatctacgtcatgatgcgtcatgcgatgatgtaaatagagcgaagcatgtgcagtggtggctctagttactgatataattttgtcttggaaagcaacggccattgtaagcttgttgcgcttgcatccaggtagtgaacactgcagtggatttaatcacgtgatggatgaaccagcttgttaccggtactcttacattcatcttggccccgtgttgttgatacgttcactaattcttgtttgggaacataccgagtgcatgataatcaaaataaacacagcaacatttcttcttttgctgttttg

SEQ ID NO: 13137 - protein, 210 aa, Triticum aestivum
  peptide (1)..(210): Ceres Seq. ID no. 13583899
  misc_feature (100)..(201): Pfam Name: Pfam Description:  HesB-like domain
  misc_feature (80)..(208): NCBI GI NO: 21592728 NR Description: putative HesB-like protein [Arabidopsis thaliana]
  misc_feature (80)..(208): NCBI GI NO: 15227287 NR Description: HesB protein -related [Arabidopsis thaliana]
  misc_feature (142)..(180): NCBI GI NO: 34894088 NR Description: P0005A05.9
  misc_feature (180)..(210): NCBI GI NO: 34894088 NR Description: P0005A05.9
  misc_feature (96)..(203): NCBI GI NO: 15227614 NR Description: expressed protein [Arabidopsis thaliana]
  misc_feature (96)..(203): NCBI GI NO: 21805702 NR Description: hypothetical protein [Arabidopsis thaliana]
  misc_feature (96)..(202): NCBI GI NO: 16798390 NR Description: iron-sulfur cluster assembly protein IscA
  misc_feature (100)..(200): NCBI GI NO: 23013039 NR Description: hypothetical protein
  misc_feature (4)..(201): NCBI GI NO: 11359495 NR Description: hypothetical protein B24M22.180
  misc_feature (77)..(200): NCBI GI NO: 24642263 NR Description: CG8198-PA [Drosophila melanogaster]
PSQIRPSIRRKGITAPRQRAPAPPIQPRRCRRPPRSEASEGEQARQEGGDPGRPGVILPCKALPAETNRTCLPPRRRTMSSSALRAAGQRAGAAARKQALTLTEAAAARVRHLLDLRQRPYLRLGVKARGCNGLSYTLNYAEKGKFDELVEEKGVKVLIDPKALMHVIGTKMDFVDDPLRSEFVFINPNSKGECGCGESFMTTGSKGSTS

SEQ ID NO: 13138 - protein, 132 aa, Triticum aestivum
  peptide (1)..(132): Ceres Seq. ID no. 13583900
  misc_feature (22)..(123): Pfam Name: Pfam Description:  HesB-like domain
  misc_feature (2)..(130): NCBI GI NO: 21592728 NR Description: putative HesB-like protein [Arabidopsis thaliana]
  misc_feature (2)..(130): NCBI GI NO: 15227287 NR Description: HesB protein -related [Arabidopsis thaliana]
  misc_feature (64)..(102): NCBI GI NO: 34894088 NR Description: P0005A05.9
  misc_feature (102)..(132): NCBI GI NO: 34894088 NR Description: P0005A05.9
  misc_feature (18)..(125): NCBI GI NO: 15227614 NR Description: expressed protein [Arabidopsis thaliana]
  misc_feature (18)..(125): NCBI GI NO: 21805702 NR Description: hypothetical protein [Arabidopsis thaliana]
  misc_feature (18)..(124): NCBI GI NO: 16798390 NR Description: iron-sulfur cluster assembly protein IscA
  misc_feature (22)..(122): NCBI GI NO: 23013039 NR Description: hypothetical protein
  misc_feature (1)..(123): NCBI GI NO: 11359495 NR Description: hypothetical protein B24M22.180
  misc_feature (1)..(122): NCBI GI NO: 24642263 NR Description: CG8198-PA [Drosophila melanogaster]
MSSSALRAAGQRAGAAARKQALTLTEAAAARVRHLLDLRQRPYLRLGVKARGCNGLSYTLNYAEKGKFDELVEEKGVKVLIDPKALMHVIGTKMDFVDDPLRSEFVFINPNSKGECGCGESFMTTGSKGSTS

SEQ ID NO: 13139 - DNA, 1134 bp, Triticum aestivum
  misc_feature (1)..(1134): Ceres Seq. ID no. 14302204
accccaaacaccaaccaaaatccacccccaaactaggtcatccatgtctggcggcgggcaagcagcggtctcgttcctgacgaagctcgcaaaggtggctgccgggttgggcttgacggcatctgccgtctccacgtccctctacacggtggacggcggccaacgcgcggtcatcttcgaccgcttccagggcgttctcccggcggtcgtctcggagggcacccacttcctcgtcccctggctccagaagcccttcctcttcgacatccgcacgcgcccgcacagcttctcctccacctccggaaccaaggatctccagatggtcagcctcacgctccgcgtcctcgcccgccccgacgtggaacgccttcctgaaatcttcaccaacctcggcctcgactacgacgacaaggtgctcccctccatcggcaacgaggtgctcaaggccgtcgtcgcccagttcaacgcagaccagctcctcaccgaccgtccccacgtctctgccctcgtccgtgaagccctcgtccgccgcgccggcgagttcaacatcgtgctcgatgacgtcgccatcacccacctcgcctacgggcacgacttcgcccaggccgttgagaagaagcaggtcgcgcagcaggaggctgagcgctccaggttcctcgttgcgcgtgcagagcaggagaggcgtgctgctatcgttcgcgcggagggagagagcgagtccgcacggctcatctcagatgccaccgctcttgtaggcaatggcctgatcgagctcaggaggatcgaggctgccaaggagatagctggggtgattgcgcgctcacccaatgtttcctacatcccttctggcaacaacggccagatgctgcttgggctcagcactgcccggtgaatgaattgccacttatcttccagttggtcacagtactttcgtcacttcagatgcccaattatccttcacttgattacaatacttgaataacttcagatgcttcgacatagtagttatgattttatcgtagaatggagacttctattatggaggagtcattgaacaaatgttgtattttggttgccaacctatgctatatttgtgcttatgatgcgttcttgaattacatgaacctttttatc

SEQ ID NO: 13140 - protein, 296 aa, Triticum aestivum
  peptide (1)..(296): Ceres Seq. ID no. 14302205
  misc_feature (47)..(238): Pfam Name: Pfam Description:  SPFH domain / Band 7 family
  misc_feature (15)..(296): NCBI GI NO: 7716460 NR Description: prohibitin [Zea mays]
  misc_feature (18)..(293): NCBI GI NO: 7716458 NR Description: prohibitin [Zea mays]
  misc_feature (17)..(296): NCBI GI NO: 7489185 NR Description: prohibitin - common tobacco
  misc_feature (18)..(295): NCBI GI NO: 38567717 NR Description: B1358B12.15
  misc_feature (17)..(293): NCBI GI NO: 15237488 NR Description: prohibitin (gb|AAC49691.1) [Arabidopsis thaliana]
  misc_feature (17)..(296): NCBI GI NO: 21592895 NR Description: prohibitin, putative [Arabidopsis thaliana]
  misc_feature (17)..(296): NCBI GI NO: 15232129 NR Description: prohibitin -related [Arabidopsis thaliana]
  misc_feature (17)..(296): NCBI GI NO: 27765032 NR Description: At3g27280 [Arabidopsis thaliana]
  misc_feature (22)..(292): NCBI GI NO: 40746306 NR Description: conserved hypothetical protein
  misc_feature (23)..(290): NCBI GI NO: 32421789 NR Description: hypothetical protein [Neurospora crassa]
PQTPTKIHPQTRSSMSGGGQAAVSFLTKLAKVAAGLGLTASAVSTSLYTVDGGQRAVIFDRFQGVLPAVVSEGTHFLVPWLQKPFLFDIRTRPHSFSSTSGTKDLQMVSLTLRVLARPDVERLPEIFTNLGLDYDDKVLPSIGNEVLKAVVAQFNADQLLTDRPHVSALVREALVRRAGEFNIVLDDVAITHLAYGHDFAQAVEKKQVAQQEAERSRFLVARAEQERRAAIVRAEGESESARLISDATALVGNGLIELRRIEAAKEIAGVIARSPNVSYIPSGNNGQMLLGLSTAR

SEQ ID NO: 13141 - protein, 282 aa, Triticum aestivum
  peptide (1)..(282): Ceres Seq. ID no. 14302206
  misc_feature (33)..(224): Pfam Name: Pfam Description:  SPFH domain / Band 7 family
  misc_feature (1)..(282): NCBI GI NO: 7716460 NR Description: prohibitin [Zea mays]
  misc_feature (4)..(279): NCBI GI NO: 7716458 NR Description: prohibitin [Zea mays]
  misc_feature (3)..(282): NCBI GI NO: 7489185 NR Description: prohibitin - common tobacco
  misc_feature (4)..(281): NCBI GI NO: 38567717 NR Description: B1358B12.15
  misc_feature (3)..(279): NCBI GI NO: 15237488 NR Description: prohibitin (gb|AAC49691.1) [Arabidopsis thaliana]
  misc_feature (3)..(282): NCBI GI NO: 21592895 NR Description: prohibitin, putative [Arabidopsis thaliana]
  misc_feature (3)..(282): NCBI GI NO: 15232129 NR Description: prohibitin -related [Arabidopsis thaliana]
  misc_feature (3)..(282): NCBI GI NO: 27765032 NR Description: At3g27280 [Arabidopsis thaliana]
  misc_feature (8)..(278): NCBI GI NO: 40746306 NR Description: conserved hypothetical protein
  misc_feature (9)..(276): NCBI GI NO: 32421789 NR Description: hypothetical protein [Neurospora crassa]
MSGGGQAAVSFLTKLAKVAAGLGLTASAVSTSLYTVDGGQRAVIFDRFQGVLPAVVSEGTHFLVPWLQKPFLFDIRTRPHSFSSTSGTKDLQMVSLTLRVLARPDVERLPEIFTNLGLDYDDKVLPSIGNEVLKAVVAQFNADQLLTDRPHVSALVREALVRRAGEFNIVLDDVAITHLAYGHDFAQAVEKKQVAQQEAERSRFLVARAEQERRAAIVRAEGESESARLISDATALVGNGLIELRRIEAAKEIAGVIARSPNVSYIPSGNNGQMLLGLSTAR

SEQ ID NO: 13142 - protein, 190 aa, Triticum aestivum
  peptide (1)..(190): Ceres Seq. ID no. 14302207
  misc_feature (1)..(132): Pfam Name: Pfam Description:  SPFH domain / Band 7 family
  misc_feature (1)..(190): NCBI GI NO: 7716460 NR Description: prohibitin [Zea mays]
  misc_feature (1)..(187): NCBI GI NO: 7716458 NR Description: prohibitin [Zea mays]
  misc_feature (1)..(190): NCBI GI NO: 7489185 NR Description: prohibitin - common tobacco
  misc_feature (1)..(189): NCBI GI NO: 38567717 NR Description: B1358B12.15
  misc_feature (1)..(187): NCBI GI NO: 15237488 NR Description: prohibitin (gb|AAC49691.1) [Arabidopsis thaliana]
  misc_feature (1)..(190): NCBI GI NO: 21592895 NR Description: prohibitin, putative [Arabidopsis thaliana]
  misc_feature (1)..(190): NCBI GI NO: 15232129 NR Description: prohibitin -related [Arabidopsis thaliana]
  misc_feature (1)..(190): NCBI GI NO: 27765032 NR Description: At3g27280 [Arabidopsis thaliana]
  misc_feature (1)..(186): NCBI GI NO: 40746306 NR Description: conserved hypothetical protein
  misc_feature (1)..(184): NCBI GI NO: 32421789 NR Description: hypothetical protein [Neurospora crassa]
MVSLTLRVLARPDVERLPEIFTNLGLDYDDKVLPSIGNEVLKAVVAQFNADQLLTDRPHVSALVREALVRRAGEFNIVLDDVAITHLAYGHDFAQAVEKKQVAQQEAERSRFLVARAEQERRAAIVRAEGESESARLISDATALVGNGLIELRRIEAAKEIAGVIARSPNVSYIPSGNNGQMLLGLSTAR

SEQ ID NO: 13143 - DNA, 854 bp, Triticum aestivum
  misc_feature (1)..(854): Ceres Seq. ID no. 12625545
accaaaaagtaggaacccctaagaaaaaaggttaccaaaacataggaaagcaagaacacactgagcaaaggaaaacaatagggttctctcactcacgaacagaaaggaggaggcggcggcggcggcggcggctgggagatctcgcatcggcggcggcgcgcgtgaaggtttctttccttgctgttagggcatcacaaggaaaatggcaagcagagcaggtggcgatggcaaagaacccataaatgagcaagtagttgcaaatacctatgccaacatgcgcactgaaatgaaccagctctacaccaagatcacggagctggaaatggaagtcagtgagcacgcccttgtgattggcgcaatagagcccctggaccccacaaggcgttgctacaggatgattggcggagtcttggttgagaggaccatcagggaagtcttgcccgccgtgcaccgcaacaaggagggccttgaagaggtcgtcgctcgcatgaaggaggctctggagaggaagaagcaagagatcaccgagtttgagctcaagtacaagatcaggatcaggaagggcgacaacagcgccaacgaagaaggcagcatgaaggaagcctctgcccagggtgttcttgttggccttgcgggccagtagagcagaatggcagggcaaggagacttgcacagttctttatcgaagccagattgcttgttaccggatgccaacctgacagtgattgtgtgtttctgggtgcagtttatcatgctacacctatgcagtactgttgaatcctcgcgtgtaaaactagagattatggtagatcaggactctgttcgtaaactgcagattttgcgctggttgtgcc

SEQ ID NO: 13144 - protein, 146 aa, Triticum aestivum
  peptide (1)..(146): Ceres Seq. ID no. 12625546
  misc_feature (15)..(120): Pfam Name: Pfam Description:  KE2 family protein
  misc_feature (1)..(144): NCBI GI NO: 15228766 NR Description: prefoldin-like protein; protein id: At3g22480
  misc_feature (3)..(141): NCBI GI NO: 28189659 NR Description: similar to prefoldin subunit 2 [Bos taurus]
  misc_feature (3)..(141): NCBI GI NO: 12408675 NR Description: prefoldin 2 [Homo sapiens]
  misc_feature (7)..(141): NCBI GI NO: 5690431 NR Description: prefoldin subunit 2 [Homo sapiens]
  misc_feature (41)..(141): NCBI GI NO: 7106852 NR Description: HSPC231 [Homo sapiens]
  misc_feature (10)..(141): NCBI GI NO: 24662461 NR Description: CG6302-PA [Drosophila melanogaster]
  misc_feature (11)..(138): NCBI GI NO: 39595088 NR Description: Hypothetical protein CBG03668
MASRAGGDGKEPINEQVVANTYANMRTEMNQLYTKITELEMEVSEHALVIGAIEPLDPTRRCYRMIGGVLVERTIREVLPAVHRNKEGLEEVVARMKEALERKKQEITEFELKYKIRIRKGDNSANEEGSMKEASAQGVLVGLAGQ

SEQ ID NO: 13145 - protein, 122 aa, Triticum aestivum
  peptide (1)..(122): Ceres Seq. ID no. 12625547
  misc_feature (1)..(96): Pfam Name: Pfam Description:  KE2 family protein
  misc_feature (1)..(120): NCBI GI NO: 15228766 NR Description: prefoldin-like protein; protein id: At3g22480
  misc_feature (1)..(117): NCBI GI NO: 28189659 NR Description: similar to prefoldin subunit 2 [Bos taurus]
  misc_feature (1)..(117): NCBI GI NO: 12408675 NR Description: prefoldin 2 [Homo sapiens]
  misc_feature (1)..(117): NCBI GI NO: 5690431 NR Description: prefoldin subunit 2 [Homo sapiens]
  misc_feature (17)..(117): NCBI GI NO: 7106852 NR Description: HSPC231 [Homo sapiens]
  misc_feature (1)..(117): NCBI GI NO: 24662461 NR Description: CG6302-PA [Drosophila melanogaster]
  misc_feature (1)..(114): NCBI GI NO: 39595088 NR Description: Hypothetical protein CBG03668
MRTEMNQLYTKITELEMEVSEHALVIGAIEPLDPTRRCYRMIGGVLVERTIREVLPAVHRNKEGLEEVVARMKEALERKKQEITEFELKYKIRIRKGDNSANEEGSMKEASAQGVLVGLAGQ

SEQ ID NO: 13146 - protein, 118 aa, Triticum aestivum
  peptide (1)..(118): Ceres Seq. ID no. 12625548
  misc_feature (1)..(92): Pfam Name: Pfam Description:  KE2 family protein
  misc_feature (1)..(116): NCBI GI NO: 15228766 NR Description: prefoldin-like protein; protein id: At3g22480
  misc_feature (1)..(113): NCBI GI NO: 28189659 NR Description: similar to prefoldin subunit 2 [Bos taurus]
  misc_feature (1)..(113): NCBI GI NO: 12408675 NR Description: prefoldin 2 [Homo sapiens]
  misc_feature (1)..(113): NCBI GI NO: 5690431 NR Description: prefoldin subunit 2 [Homo sapiens]
  misc_feature (13)..(113): NCBI GI NO: 7106852 NR Description: HSPC231 [Homo sapiens]
  misc_feature (1)..(113): NCBI GI NO: 24662461 NR Description: CG6302-PA [Drosophila melanogaster]
  misc_feature (1)..(110): NCBI GI NO: 39595088 NR Description: Hypothetical protein CBG03668
MNQLYTKITELEMEVSEHALVIGAIEPLDPTRRCYRMIGGVLVERTIREVLPAVHRNKEGLEEVVARMKEALERKKQEITEFELKYKIRIRKGDNSANEEGSMKEASAQGVLVGLAGQ

SEQ ID NO: 13147 - DNA, 1921 bp, Triticum aestivum
  misc_feature (1)..(1921): Ceres Seq. ID no. 15170095
aaaaaaaagatccgaaacccctgacctgcgcgcctgtccatcccagcatggccgccgcctcgtcctcctcctgcggcggcgccggctgcggggcccgctgctcctcctccacctcgtcatccgtagaggatgctccggaggggattctgggccgtctctccatatccggtgccgccgcctcctgcggcaagtgcggcggcggcgccgtgttgccggaggcgtcggtctgtgcggagagtgcttgcgggcccagctgttcgggaagttcaagctcgccgtcacaagcaacgccatggttcggccaaccgactccgtcctcgtcgccttctccggcggccccgcctctagggttgctctgcaatttatacatgagatgcggtccaaggcaatcgaaagctgggacgccagcaattcgcaagccctaccggtcttcaatgtcggggtggcgttcgttgacgagagtgttttgttgtcgaagcccgaatgcgaagttgagcaggcaactgaagatattaagtcaattgtgtcgagtttgttgccgggagataacgcaatgcacattgcctctcttgatgacgtgttctccccggaatcaaaagacggtgaaggcaggctgagggagctagttggaatgattactgatgatactgggagggaggatcttcttcagtgcttgcgcatgctttcgttgcagaagattgcactggaaaatgggtacacaaagatcatgctgggatcatgtgcttctacaatagcatgtcatgtgctatctgcaacagtaaagggccaaggttattccttaccagctgatatccaatatgttgatacacggtgggaagtgcctgtcgttcttccacttcgtgattgcctggcccaagagcttagcctgctctgtgaatttgatagtttaaagacacagcaacttcttgataggccttgcagtggcatcaatggcttagtcgcatcttttgttgcacgactaagggaggagaatccttctcgtgagcatactattgtaagaactgcacaaaaacttaagccattcccttttaacaagttctcagcaaatggctatcatgatttcctgccgtcgcggctgcgtcccaagttccaggatgttgatagcgatgagtctgctttctctgaggttctctgcctgatatgtcgaagtccattcagtgaatcagaactccagaatgttgaaagcacaaggcacacgtctcagaagaaaattgatctgtatactgcttattgctgtcaaagctgtcatttccagattctaccaggaggtagagacctgtatgaccatttcttttcactactaccaaggttctggactgagagagtagatactgcatctgccagccatagctcgctaagagatcaaatagaagactatcttcttgaagacgatgatgatgggaactgacacttgttcattgagtgaatcccaaacttacttgccagaagcctgcagagattccttcctagttgggcctcacaaatcatgacataaaccaaacttgcttgggataacagtgttcgcatctagtaaggcactggtttattcagacttctgccatattcttagaattaccctccattatattttttatttaattttctggtgtacctgtaagtcctccctcaagttaaaacatgtctgaaacttgtagtgataaaggaaaccatcacttgccagcagttttgcactgatctcaaacagctgactttgggtagctgcaggctcccaacttccatgtgattacagtattctgattggtctcacctactgtaccaactatttgcctgcaagattgtaatcagatgaatttacaaaatgggtttacaacaactattgtgctgtataaacttttgtactcgcttgattataatctattacactgttgcatttgtttcg

SEQ ID NO: 13148 - protein, 475 aa, Triticum aestivum
  peptide (1)..(475): Ceres Seq. ID no. 15170096
  misc_feature (39)..(473): NCBI GI NO: 21553405 NR Description: unknown [Arabidopsis thaliana]
  misc_feature (39)..(473): NCBI GI NO: 18419746 NR Description: expressed protein [Arabidopsis thaliana]
  misc_feature (39)..(301): NCBI GI NO: 7486391 NR Description: hypothetical protein F4B14
  misc_feature (303)..(442): NCBI GI NO: 7486391 NR Description: hypothetical protein F4B14
  misc_feature (205)..(349): NCBI GI NO: 39645134 NR Description: Unknown (protein for IMAGE:3877613) [Homo sapiens]
  misc_feature (70)..(153): NCBI GI NO: 39645134 NR Description: Unknown (protein for IMAGE:3877613) [Homo sapiens]
  misc_feature (77)..(345): NCBI GI NO: 31213451 NR Description: ENSANGP00000021847 [Anopheles gambiae]
KKRSETPDLRACPSQHGRRLVLLLRRRRLRGPLLLLHLVIRRGCSGGDSGPSLHIRCRRLLRQVRRRRRVAGGVGLCGECLRAQLFGKFKLAVTSNAMVRPTDSVLVAFSGGPASRVALQFIHEMRSKAIESWDASNSQALPVFNVGVAFVDESVLLSKPECEVEQATEDIKSIVSSLLPGDNAMHIASLDDVFSPESKDGEGRLRELVGMITDDTGREDLLQCLRMLSLQKIALENGYTKIMLGSCASTIACHVLSATVKGQGYSLPADIQYVDTRWEVPVVLPLRDCLAQELSLLCEFDSLKTQQLLDRPCSGINGLVASFVARLREENPSREHTIVRTAQKLKPFPFNKFSANGYHDFLPSRLRPKFQDVDSDESAFSEVLCLICRSPFSESELQNVESTRHTSQKKIDLYTAYCCQSCHFQILPGGRDLYDHFFSLLPRFWTERVDTASASHSSLRDQIEDYLLEDDDDGN

SEQ ID NO: 13149 - protein, 378 aa, Triticum aestivum
  peptide (1)..(378): Ceres Seq. ID no. 15170097
  misc_feature (1)..(376): NCBI GI NO: 21553405 NR Description: unknown [Arabidopsis thaliana]
  misc_feature (1)..(376): NCBI GI NO: 18419746 NR Description: expressed protein [Arabidopsis thaliana]
  misc_feature (1)..(204): NCBI GI NO: 7486391 NR Description: hypothetical protein F4B14
  misc_feature (206)..(345): NCBI GI NO: 7486391 NR Description: hypothetical protein F4B14
  misc_feature (108)..(252): NCBI GI NO: 39645134 NR Description: Unknown (protein for IMAGE:3877613) [Homo sapiens]
  misc_feature (1)..(56): NCBI GI NO: 39645134 NR Description: Unknown (protein for IMAGE:3877613) [Homo sapiens]
  misc_feature (1)..(248): NCBI GI NO: 31213451 NR Description: ENSANGP00000021847 [Anopheles gambiae]
MVRPTDSVLVAFSGGPASRVALQFIHEMRSKAIESWDASNSQALPVFNVGVAFVDESVLLSKPECEVEQATEDIKSIVSSLLPGDNAMHIASLDDVFSPESKDGEGRLRELVGMITDDTGREDLLQCLRMLSLQKIALENGYTKIMLGSCASTIACHVLSATVKGQGYSLPADIQYVDTRWEVPVVLPLRDCLAQELSLLCEFDSLKTQQLLDRPCSGINGLVASFVARLREENPSREHTIVRTAQKLKPFPFNKFSANGYHDFLPSRLRPKFQDVDSDESAFSEVLCLICRSPFSESELQNVESTRHTSQKKIDLYTAYCCQSCHFQILPGGRDLYDHFFSLLPRFWTERVDTASASHSSLRDQIEDYLLEDDDDGN

SEQ ID NO: 13150 - protein, 351 aa, Triticum aestivum
  peptide (1)..(351): Ceres Seq. ID no. 15170098
  misc_feature (1)..(349): NCBI GI NO: 21553405 NR Description: unknown [Arabidopsis thaliana]
  misc_feature (1)..(349): NCBI GI NO: 18419746 NR Description: expressed protein [Arabidopsis thaliana]
  misc_feature (1)..(177): NCBI GI NO: 7486391 NR Description: hypothetical protein F4B14
  misc_feature (179)..(318): NCBI GI NO: 7486391 NR Description: hypothetical protein F4B14
  misc_feature (81)..(225): NCBI GI NO: 39645134 NR Description: Unknown (protein for IMAGE:3877613) [Homo sapiens]
  misc_feature (1)..(29): NCBI GI NO: 39645134 NR Description: Unknown (protein for IMAGE:3877613) [Homo sapiens]
  misc_feature (1)..(221): NCBI GI NO: 31213451 NR Description: ENSANGP00000021847 [Anopheles gambiae]
MRSKAIESWDASNSQALPVFNVGVAFVDESVLLSKPECEVEQATEDIKSIVSSLLPGDNAMHIASLDDVFSPESKDGEGRLRELVGMITDDTGREDLLQCLRMLSLQKIALENGYTKIMLGSCASTIACHVLSATVKGQGYSLPADIQYVDTRWEVPVVLPLRDCLAQELSLLCEFDSLKTQQLLDRPCSGINGLVASFVARLREENPSREHTIVRTAQKLKPFPFNKFSANGYHDFLPSRLRPKFQDVDSDESAFSEVLCLICRSPFSESELQNVESTRHTSQKKIDLYTAYCCQSCHFQILPGGRDLYDHFFSLLPRFWTERVDTASASHSSLRDQIEDYLLEDDDDGN

SEQ ID NO: 13151 - DNA, 807 bp, Triticum aestivum
  misc_feature (1)..(807): Ceres Seq. ID no. 12585638
attaacaccgccaagaacacgaacgccaacacgacgaggatcgatcgacacggcaacgcgagggcgcacgccgatcggtcgagctgattacgatcgattcgagcttcggccatgcggaggtcggactgggaggaccggtgccggcggcacccggagcaccggctgtccaagggcgtgtgcccgagctgcctccgcgaccgcctcgcccgcctctccgccaactcctcggccaccaccaccctgacgcgcgcctcaaactcggccagcacctccccctactcctccaccgactcccctccgctccaccgcgccgccctctccgccgacgccacctccgtccacgtcgtcggcgccggggcgggctcctccttcgtcaacgtctccgccttctcgcagccgctcatgccgacggcctcgaagaaaccagcagaatccaagggaaaggagggcgaggcgaagaagaagaagagcagcagcaagaagaagatcgggaggttcttgtcgaggctggtcgggacggagaagcggcggaaaacaggggaagcaggcgatggcggcgagctcttccattccagcaccatgaaggagaagtcgtcgaccaagtgggttttcttttgatcagaccggccggcaccggccaccaaccatacgaacaaaccatgcttggcctttctcggttctcgatcgatcgggtattgtttttctttattttctctgttattttttacaagtactcttcttgagcttgatttgatatttttctcaagcgccgtgtatatacacgagatcaagtagctgaccgtaagg

SEQ ID NO: 13152 - protein, 168 aa, Triticum aestivum
  peptide (1)..(168): Ceres Seq. ID no. 12585639
  misc_feature (1)..(168): NCBI GI NO: 34902434 NR Description: Unknown protein
MRRSDWEDRCRRHPEHRLSKGVCPSCLRDRLARLSANSSATTTLTRASNSASTSPYSSTDSPPLHRAALSADATSVHVVGAGAGSSFVNVSAFSQPLMPTASKKPAESKGKEGEAKKKKSSSKKKIGRFLSRLVGTEKRRKTGEAGDGGELFHSSTMKEKSSTKWVFF

SEQ ID NO: 13153 - DNA, 741 bp, Triticum aestivum
  misc_feature (1)..(741): Ceres Seq. ID no. 13596897
cttcctccgcttccgcctcgtcccgtctccctccctcccctccctcggcggccgccgccgcccccatcgcggcgagtcccctcgcccgcagccgacctaagctgctgccgccgcgtgcgcccggggtcaccgaggaggcggcgccatgaggttggagaagtgctggttctgctcctccaccgtctaccccggccacggcatccagttcgtccgcaacgacgccaagatctttcggttctgccgatcaaaatgccacaagaacttcaagatgaagaggaaccctcgcaaggttaagtggaccaaggcgtacaggcgcctgcgtggaaaggacatgacacaggatgccacgtttgagttcgagaggaagaggaacaggccggagcgctacgaccgtaacgtcactgagcagactctgaaggccatcccgcttatcacgaagatcagacatgaacggcagaagaaacacattacagagagacagaaggctggtaagagcatggtgcgaaagagcgacgccaaggagctggatcaggatattggcatggttcccaagaaggagaccgagaactatgtagccaagcagaaggttctagtttctcagctgaagaccgaagagaatcttatggaagagtaatggaaccaaacagttttgtgtgtgcgcgcatktvatcmttttcwatawagtggagtactttgtgtttcatcagattgtagacgacagtgaacatttgttttgtactt

SEQ ID NO: 13154 - protein, 162 aa, Triticum aestivum
  peptide (1)..(162): Ceres Seq. ID no. 15221997
  misc_feature (1)..(75): Pfam Name: Pfam Description:  Ribosomal protein L24e
  misc_feature (1)..(162): NCBI GI NO: 27817966 NR Description: putative 60S ribosomal protein L30
  misc_feature (1)..(162): NCBI GI NO: 15225363 NR Description: 60S ribosomal protein L24, putative
  misc_feature (1)..(65): NCBI GI NO: 34914662 NR Description: putative ribosomal protein
  misc_feature (1)..(134): NCBI GI NO: 28828084 NR Description: similar to Mus musculus (Mouse)
  misc_feature (1)..(162): NCBI GI NO: 38083793 NR Description: similar to ribosomal protein L24-like
  misc_feature (1)..(162): NCBI GI NO: 27769143 NR Description: Similar to chromosome 15 open reading frame 15
  misc_feature (1)..(162): NCBI GI NO: 16740902 NR Description: 60S ribosomal protein L30 isolog [Homo sapiens]
  misc_feature (1)..(162): NCBI GI NO: 10047102 NR Description: ribosomal protein L24-like
  misc_feature (1)..(162): NCBI GI NO: 34864348 NR Description: similar to ribosomal protein L24-like
  misc_feature (1)..(162): NCBI GI NO: 30354249 NR Description: Similar to chromosome 15 open reading frame 15
MRLEKCWFCSSTVYPGHGIQFVRNDAKIFRFCRSKCHKNFKMKRNPRKVKWTKAYRRLRGKDMTQDATFEFERKRNRPERYDRNVTEQTLKAIPLITKIRHERQKKHITERQKAGKSMVRKSDAKELDQDIGMVPKKETENYVAKQKVLVSQLKTEENLMEE

SEQ ID NO: 13155 - protein, 121 aa, Triticum aestivum
  peptide (1)..(121): Ceres Seq. ID no. 15221998
  misc_feature (1)..(121): NCBI GI NO: 27817966 NR Description: putative 60S ribosomal protein L30
  misc_feature (1)..(121): NCBI GI NO: 15225363 NR Description: 60S ribosomal protein L24, putative
  misc_feature (1)..(24): NCBI GI NO: 34914662 NR Description: putative ribosomal protein
  misc_feature (1)..(93): NCBI GI NO: 28828084 NR Description: similar to Mus musculus (Mouse)
  misc_feature (1)..(121): NCBI GI NO: 38083793 NR Description: similar to ribosomal protein L24-like
  misc_feature (1)..(121): NCBI GI NO: 27769143 NR Description: Similar to chromosome 15 open reading frame 15
  misc_feature (1)..(121): NCBI GI NO: 16740902 NR Description: 60S ribosomal protein L30 isolog [Homo sapiens]
  misc_feature (1)..(121): NCBI GI NO: 10047102 NR Description: ribosomal protein L24-like
  misc_feature (1)..(121): NCBI GI NO: 34864348 NR Description: similar to ribosomal protein L24-like
  misc_feature (1)..(121): NCBI GI NO: 30354249 NR Description: Similar to chromosome 15 open reading frame 15
MKRNPRKVKWTKAYRRLRGKDMTQDATFEFERKRNRPERYDRNVTEQTLKAIPLITKIRHERQKKHITERQKAGKSMVRKSDAKELDQDIGMVPKKETENYVAKQKVLVSQLKTEENLMEE

SEQ ID NO: 13156 - protein, 100 aa, Triticum aestivum
  peptide (1)..(100): Ceres Seq. ID no. 15221999
  misc_feature (1)..(100): NCBI GI NO: 27817966 NR Description: putative 60S ribosomal protein L30
  misc_feature (1)..(100): NCBI GI NO: 15225363 NR Description: 60S ribosomal protein L24, putative
  misc_feature (1)..(72): NCBI GI NO: 28828084 NR Description: similar to Mus musculus (Mouse)
  misc_feature (1)..(100): NCBI GI NO: 38083793 NR Description: similar to ribosomal protein L24-like
  misc_feature (1)..(100): NCBI GI NO: 27769143 NR Description: Similar to chromosome 15 open reading frame 15
  misc_feature (1)..(100): NCBI GI NO: 16740902 NR Description: 60S ribosomal protein L30 isolog [Homo sapiens]
  misc_feature (1)..(100): NCBI GI NO: 10047102 NR Description: ribosomal protein L24-like
  misc_feature (1)..(100): NCBI GI NO: 34864348 NR Description: similar to ribosomal protein L24-like
  misc_feature (1)..(100): NCBI GI NO: 30354249 NR Description: Similar to chromosome 15 open reading frame 15
  misc_feature (1)..(72): NCBI GI NO: 13529146 NR Description: 60S ribosomal protein L30 isolog [Homo sapiens]
MTQDATFEFERKRNRPERYDRNVTEQTLKAIPLITKIRHERQKKHITERQKAGKSMVRKSDAKELDQDIGMVPKKETENYVAKQKVLVSQLKTEENLMEE

SEQ ID NO: 13157 - DNA, 773 bp, Triticum aestivum
  misc_feature (1)..(773): Ceres Seq. ID no. 13598422
acgacgaggctccccacaattccctcctcctgcgaacgcatcgtatcccaagaaaccaagaaacagagcaagaaatatcatagagggagcagagtacagagagagaaagagggataagcgcttgcttgctgggagagccatggatgagatcatgaacaagatgggctcctactggctggggcagagggccaacaaagagatgtcgtcggccggtgacgacatcgagtcgctctcaaccagtgtcggggacggagcaaaatggctggtaaacaagctcaagggtaagatgcagaagccgctggcggagctgctccaggagcacgaccttccggcggggctgttcccgcgggaggccaccaactacgagttcgagccggagacgcggcggctgacggtgcacatcccggcggtctgcgaggtcggctacagggacggctccgagctgcgtttcgacaccacggtgaccggcacgctggacaagggcagcctgacgggggtggagggcctcaaagccaaggtgctcgtctgggccagggtcaccgccgtcaaggccgacgccgcaaaggtctacttcgccgtaggcatcaagaagtcgcgcagccgcgaggcatacgaggtcgtcagaggcgccatcaccgtcgacgagttctagattctagtcgcgcgctcgccgagatgattattctaccgaaataattgatcatgtgctcacactacctgctgtaagaggaggatgcttgtaaatggggattcataattcagtttcgcagctc

SEQ ID NO: 13158 - protein, 216 aa, Triticum aestivum
  peptide (1)..(216): Ceres Seq. ID no. 13598423
  misc_feature (78)..(216): Pfam Name: Pfam Description:  Protein of unknown function, DUF538
  misc_feature (47)..(216): NCBI GI NO: 15240103 NR Description: hypothetical protein [Arabidopsis thaliana]
  misc_feature (47)..(216): NCBI GI NO: 15241019 NR Description: expressed protein [Arabidopsis thaliana]
  misc_feature (47)..(216): NCBI GI NO: 18398279 NR Description: expressed protein [Arabidopsis thaliana]
  misc_feature (47)..(216): NCBI GI NO: 28466909 NR Description: At5g01610 [Arabidopsis thaliana]
  misc_feature (47)..(216): NCBI GI NO: 40642817 NR Description: cp protein [Celosia cristata]
  misc_feature (47)..(216): NCBI GI NO: 34914210 NR Description: OSJNBb0049O23.18
  misc_feature (45)..(216): NCBI GI NO: 18395537 NR Description: expressed protein [Arabidopsis thaliana]
  misc_feature (45)..(216): NCBI GI NO: 21553803 NR Description: unknown [Arabidopsis thaliana]
  misc_feature (102)..(213): NCBI GI NO: 6041854 NR Description: unknown protein [Arabidopsis thaliana]
  misc_feature (102)..(213): NCBI GI NO: 18397959 NR Description: expressed protein [Arabidopsis thaliana]
RRGSPQFPPPANASYPKKPRNRARNIIEGAEYRERKRDKRLLAGRAMDEIMNKMGSYWLGQRANKEMSSAGDDIESLSTSVGDGAKWLVNKLKGKMQKPLAELLQEHDLPAGLFPREATNYEFEPETRRLTVHIPAVCEVGYRDGSELRFDTTVTGTLDKGSLTGVEGLKAKVLVWARVTAVKADAAKVYFAVGIKKSRSREAYEVVRGAITVDEF

SEQ ID NO: 13159 - protein, 170 aa, Triticum aestivum
  peptide (1)..(170): Ceres Seq. ID no. 13598424
  misc_feature (32)..(170): Pfam Name: Pfam Description:  Protein of unknown function, DUF538
  misc_feature (1)..(170): NCBI GI NO: 15240103 NR Description: hypothetical protein [Arabidopsis thaliana]
  misc_feature (1)..(170): NCBI GI NO: 15241019 NR Description: expressed protein [Arabidopsis thaliana]
  misc_feature (1)..(170): NCBI GI NO: 18398279 NR Description: expressed protein [Arabidopsis thaliana]
  misc_feature (1)..(170): NCBI GI NO: 28466909 NR Description: At5g01610 [Arabidopsis thaliana]
  misc_feature (1)..(170): NCBI GI NO: 40642817 NR Description: cp protein [Celosia cristata]
  misc_feature (1)..(170): NCBI GI NO: 34914210 NR Description: OSJNBb0049O23.18
  misc_feature (1)..(170): NCBI GI NO: 18395537 NR Description: expressed protein [Arabidopsis thaliana]
  misc_feature (1)..(170): NCBI GI NO: 21553803 NR Description: unknown [Arabidopsis thaliana]
  misc_feature (56)..(167): NCBI GI NO: 6041854 NR Description: unknown protein [Arabidopsis thaliana]
  misc_feature (56)..(167): NCBI GI NO: 18397959 NR Description: expressed protein [Arabidopsis thaliana]
MDEIMNKMGSYWLGQRANKEMSSAGDDIESLSTSVGDGAKWLVNKLKGKMQKPLAELLQEHDLPAGLFPREATNYEFEPETRRLTVHIPAVCEVGYRDGSELRFDTTVTGTLDKGSLTGVEGLKAKVLVWARVTAVKADAAKVYFAVGIKKSRSREAYEVVRGAITVDEF

SEQ ID NO: 13160 - protein, 166 aa, Triticum aestivum
  peptide (1)..(166): Ceres Seq. ID no. 13598425
  misc_feature (28)..(166): Pfam Name: Pfam Description:  Protein of unknown function, DUF538
  misc_feature (1)..(166): NCBI GI NO: 15240103 NR Description: hypothetical protein [Arabidopsis thaliana]
  misc_feature (1)..(166): NCBI GI NO: 15241019 NR Description: expressed protein [Arabidopsis thaliana]
  misc_feature (1)..(166): NCBI GI NO: 18398279 NR Description: expressed protein [Arabidopsis thaliana]
  misc_feature (1)..(166): NCBI GI NO: 28466909 NR Description: At5g01610 [Arabidopsis thaliana]
  misc_feature (1)..(166): NCBI GI NO: 40642817 NR Description: cp protein [Celosia cristata]
  misc_feature (1)..(166): NCBI GI NO: 34914210 NR Description: OSJNBb0049O23.18
  misc_feature (1)..(166): NCBI GI NO: 18395537 NR Description: expressed protein [Arabidopsis thaliana]
  misc_feature (1)..(166): NCBI GI NO: 21553803 NR Description: unknown [Arabidopsis thaliana]
  misc_feature (52)..(163): NCBI GI NO: 6041854 NR Description: unknown protein [Arabidopsis thaliana]
  misc_feature (52)..(163): NCBI GI NO: 18397959 NR Description: expressed protein [Arabidopsis thaliana]
MNKMGSYWLGQRANKEMSSAGDDIESLSTSVGDGAKWLVNKLKGKMQKPLAELLQEHDLPAGLFPREATNYEFEPETRRLTVHIPAVCEVGYRDGSELRFDTTVTGTLDKGSLTGVEGLKAKVLVWARVTAVKADAAKVYFAVGIKKSRSREAYEVVRGAITVDEF

SEQ ID NO: 13161 - DNA, 883 bp, Triticum aestivum
  misc_feature (1)..(883): Ceres Seq. ID no. 12585640
cctttcccagtcaccgatccaaaccatcgcgagaaaaaaaaaagatccccgatccagcaacgagcgcgcaccggtgaagatcgtggtgggaggatgtcgtcggactactcgtcgtcgtgggcgcgcgcgctcgtgcatatctcgccctacaccttctccgccatcggcatcgccgtctccatcggtgtctctgtcctcggcgcagcatgggggatcttcatcacggggagcagcctcatcggggccgccatcaaggcgcccaggatcacctccaagaacctcatcagtgtcatcttctgtgaggccgttgcaatttatggtgtaatcgtggcgatcatcctccaaacaaagcttgaaagtgtgccaacatcccgaatgcatgatccagagtctatgcgagctggttatgcaatctttgcctcaggtcttattgtcggctttgctaatcttgtttgcggggtatgcgtgggaataatcggaagcagctgtgcactgtctgatgcccagaattcaacactctttgtaaagatcctggtgattgagatctttggcagtgctttgggcctctttggagtgatcgtgggcataatcatgtcagctcaagcaacatggccaacaaaagtctaattccatccatctgggaatctctgtaaattattttgggtgaagccctttggaatgtcaacatgtgttcaactgtttcttatctattcttttttcttttgcacgtttttggtaaatcacgtattttggtgcttgatgcatctgatcgtagagatactgttcctactgtaaagactccatatgcctgccaggtatcatcttgtaggtgctattgcttttgcagaacgtggactgcctgttgaataaaagtattgaactt

SEQ ID NO: 13162 - protein, 208 aa, Triticum aestivum
  peptide (1)..(208): Ceres Seq. ID no. 12585641
  misc_feature (136)..(201): Pfam Name: Pfam Description:  ATP synthase subunit C
  misc_feature (32)..(207): NCBI GI NO: 34912550 NR Description: putative H+-transporting ATPase
  misc_feature (30)..(207): NCBI GI NO: 15236838 NR Description: H+-transporting ATPase - like protein
  misc_feature (36)..(207): NCBI GI NO: 15224764 NR Description: putative vacuolar ATP synthase proteolipid subunit
  misc_feature (37)..(207): NCBI GI NO: 29423617 NR Description: vacuolar membrane ATPase subunit c''
  misc_feature (32)..(207): NCBI GI NO: 38640797 NR Description: V-ATPase subunit c'' proteolipid
  misc_feature (36)..(197): NCBI GI NO: 29840984 NR Description: similar to NM_033617 ATPase
  misc_feature (39)..(203): NCBI GI NO: 6321815 NR Description: vacuolar ATPase V0 domain subunit c''; Ppa1p
  misc_feature (44)..(202): NCBI GI NO: 32419907 NR Description: hypothetical protein [Neurospora crassa]
  misc_feature (44)..(203): NCBI GI NO: 40742993 NR Description: hypothetical protein AN7603.2
  misc_feature (44)..(201): NCBI GI NO: 37589073 NR Description: Unknown (protein for MGC:63832) [Danio rerio]
PFPVTDPNHREKKKRSPIQQRARTGEDRGGRMSSDYSSSWARALVHISPYTFSAIGIAVSIGVSVLGAAWGIFITGSSLIGAAIKAPRITSKNLISVIFCEAVAIYGVIVAIILQTKLESVPTSRMHDPESMRAGYAIFASGLIVGFANLVCGVCVGIIGSSCALSDAQNSTLFVKILVIEIFGSALGLFGVIVGIIMSAQATWPTKV

SEQ ID NO: 13163 - protein, 177 aa, Triticum aestivum
  peptide (1)..(177): Ceres Seq. ID no. 12585642
  misc_feature (105)..(170): Pfam Name: Pfam Description:  ATP synthase subunit C
  misc_feature (1)..(176): NCBI GI NO: 34912550 NR Description: putative H+-transporting ATPase
  misc_feature (1)..(176): NCBI GI NO: 15236838 NR Description: H+-transporting ATPase - like protein
  misc_feature (5)..(176): NCBI GI NO: 15224764 NR Description: putative vacuolar ATP synthase proteolipid subunit
  misc_feature (6)..(176): NCBI GI NO: 29423617 NR Description: vacuolar membrane ATPase subunit c''
  misc_feature (1)..(176): NCBI GI NO: 38640797 NR Description: V-ATPase subunit c'' proteolipid
  misc_feature (5)..(166): NCBI GI NO: 29840984 NR Description: similar to NM_033617 ATPase
  misc_feature (8)..(172): NCBI GI NO: 6321815 NR Description: vacuolar ATPase V0 domain subunit c''; Ppa1p
  misc_feature (13)..(171): NCBI GI NO: 32419907 NR Description: hypothetical protein [Neurospora crassa]
  misc_feature (13)..(172): NCBI GI NO: 40742993 NR Description: hypothetical protein AN7603.2
  misc_feature (13)..(170): NCBI GI NO: 37589073 NR Description: Unknown (protein for MGC:63832) [Danio rerio]
MSSDYSSSWARALVHISPYTFSAIGIAVSIGVSVLGAAWGIFITGSSLIGAAIKAPRITSKNLISVIFCEAVAIYGVIVAIILQTKLESVPTSRMHDPESMRAGYAIFASGLIVGFANLVCGVCVGIIGSSCALSDAQNSTLFVKILVIEIFGSALGLFGVIVGIIMSAQATWPTKV

SEQ ID NO: 13164 - protein, 107 aa, Triticum aestivum
  peptide (1)..(107): Ceres Seq. ID no. 12585643
LSQSPIQTIARKKKDPRSSNERAPVKIVVGGCRRTTRRRGRARSCISRPTPSPPSASPSPSVSLSSAQHGGSSSRGAASSGPPSRRPGSPPRTSSVSSSVRPLQFMV

SEQ ID NO: 13165 - DNA, 854 bp, Triticum aestivum
  misc_feature (1)..(854): Ceres Seq. ID no. 12593564
gctcatccccacagtcctgtccccgtccactccgccgccgccgccgcgaattccgccggcgtccgcccccgcgcgcgtgctctgcgcccacgcggactccagcgcctccggatcggagcccctgaacatggcggccgccgcgctcagggttcagctcgaggcgctcctcgagaacatgttcgccacgggtatggtggacgagcagttccggcagctgcagtcgctgcaggaggggggcagcgcgtcgggcttcgtcgccgaggtcgccaccctcttcatcgacgacgccgaccggatcatcgccgacatcgggagcctgctggaccagcccgtggtggatttcgacaaggtggacgcccacgtgcaccagctcaaggggagcagctcgagtgttggtgctcagaaagtgaagctcgcctgcatgcacttccgccagttctatgaggcaaaaagcaaagaagggtgcctcatggcgttggctcttgttaggagtgagttctgtgatgtgcgcaacaagttccagaccatgatgcagctggagcagcagatcgaggcctgcagtcccaagtagagtagcagtcactgaagcaaaaggagcttagctccatgtgacccccgtgtatgtatctcttatgcttgtaggcagtgtaacgggtgtcgggggctctggaaggcgtgtgtgcggaaccggaccgaccgattcccacgtcggagctccggactcgtgaccctttgaaacgcaacttgcttgccctgcgtcaatgtacgtgtcaacgctatgcttgtttgtgtcgtgtccgcccccaggctgcgtgtaaactcttaccttgttgttgtatgttgttggggtcccg

SEQ ID NO: 13166 - protein, 189 aa, Triticum aestivum
  peptide (1)..(189): Ceres Seq. ID no. 12593565
  misc_feature (43)..(185): NCBI GI NO: 5689238 NR Description: histidine-containing phosphotransfer protein
  misc_feature (43)..(189): NCBI GI NO: 33637784 NR Description: two-component phosphorelay mediator HP1
  misc_feature (43)..(189): NCBI GI NO: 33637786 NR Description: two-component phosphorelay mediator HP2
  misc_feature (51)..(188): NCBI GI NO: 22036126 NR Description: his-containing phosphotransfer protein [Zea mays]
  misc_feature (51)..(188): NCBI GI NO: 6009622 NR Description: histidine-containing phosphotransfer protein
  misc_feature (52)..(185): NCBI GI NO: 15233079 NR Description: two-component phosphorelay mediator, putative
  misc_feature (43)..(185): NCBI GI NO: 13774348 NR Description: histidine-containing phosphotransfer protein
  misc_feature (43)..(183): NCBI GI NO: 18379097 NR Description: putative AHP2; protein id: At1g03430
  misc_feature (46)..(183): NCBI GI NO: 15228686 NR Description: ATHP2, putative; protein id: At3g29350
  misc_feature (43)..(183): NCBI GI NO: 21593802 NR Description: putative AHP2 [Arabidopsis thaliana]
LIPTVLSPSTPPPPPRIPPASAPARVLCAHADSSASGSEPLNMAAAALRVQLEALLENMFATGMVDEQFRQLQSLQEGGSASGFVAEVATLFIDDADRIIADIGSLLDQPVVDFDKVDAHVHQLKGSSSSVGAQKVKLACMHFRQFYEAKSKEGCLMALALVRSEFCDVRNKFQTMMQLEQQIEACSPK

SEQ ID NO: 13167 - protein, 147 aa, Triticum aestivum
  peptide (1)..(147): Ceres Seq. ID no. 12593566
AHPHSPVPVHSAAAAANSAGVRPRARALRPRGLQRLRIGAPEHGGRRAQGSARGAPREHVRHGYGGRAVPAAAVAAGGGQRVGLRRRGRHPLHRRRRPDHRRHREPAGPARGGFRQGGRPRAPAQGEQLECWCSESEARLHALPPVL

SEQ ID NO: 13168 - protein, 147 aa, Triticum aestivum
  peptide (1)..(147): Ceres Seq. ID no. 12593567
  misc_feature (1)..(143): NCBI GI NO: 5689238 NR Description: histidine-containing phosphotransfer protein
  misc_feature (1)..(147): NCBI GI NO: 33637784 NR Description: two-component phosphorelay mediator HP1
  misc_feature (1)..(147): NCBI GI NO: 33637786 NR Description: two-component phosphorelay mediator HP2
  misc_feature (9)..(146): NCBI GI NO: 22036126 NR Description: his-containing phosphotransfer protein [Zea mays]
  misc_feature (9)..(146): NCBI GI NO: 6009622 NR Description: histidine-containing phosphotransfer protein
  misc_feature (10)..(143): NCBI GI NO: 15233079 NR Description: two-component phosphorelay mediator, putative
  misc_feature (1)..(143): NCBI GI NO: 13774348 NR Description: histidine-containing phosphotransfer protein
  misc_feature (1)..(141): NCBI GI NO: 18379097 NR Description: putative AHP2; protein id: At1g03430
  misc_feature (4)..(141): NCBI GI NO: 15228686 NR Description: ATHP2, putative; protein id: At3g29350
  misc_feature (1)..(141): NCBI GI NO: 21593802 NR Description: putative AHP2 [Arabidopsis thaliana]
MAAAALRVQLEALLENMFATGMVDEQFRQLQSLQEGGSASGFVAEVATLFIDDADRIIADIGSLLDQPVVDFDKVDAHVHQLKGSSSSVGAQKVKLACMHFRQFYEAKSKEGCLMALALVRSEFCDVRNKFQTMMQLEQQIEACSPK

SEQ ID NO: 13169 - DNA, 2114 bp, Triticum aestivum
  misc_feature (1)..(2114): Ceres Seq. ID no. 14314100
gcctggttcaccaccaccgctgcttagcccggaagattcctcctaccctccctcgtctcgtgcgtcgtgtccaaaccccaaaccctcacgcgaagtcacgcacccccggcgacggcgatggatctccgccgcccgccgcgctcgacgtccggcggcgtcgagcccaagatccgccaggtcggcttcgtcacccctggcgtttcggccccgtccgagccgcccgccgccgccgccgcggcggtatcactgcctggcgcggccgccgggtcgcctccggcgtcggacctctccccgggctcgctctcccccgtcatgatccctcctccgcggcacgtggatcacctctcccccgactccccctctcccccggcgtccgacgtcctcctcctcgcgtcctcggcgcctcagccttcctccatgcgcttcgccgctgcatccgagttcggagaggaggattcgaggtccctggccccttccgcgggggagctagaaacaaacaagggagatttggctgaaataaggaatgaagatgctccagcgtccattccgcaaaagcagaaaccttctaaagcagagaggcgtgctattcaggaggctcagcgtgctgcgaaagctgctgcgaaggaggcaggtttatcaggaaagtcaacaggcgctgcttctggggctaatcctgcaacatccaagcaagccaagccagctaaaatttctcagaagaaagatgtgccccatgctccaagtacagttgcttctgagaagaaggttactgaacgccaaccagagagagatagaaaaaaagatgttcctcatccgagaatgcagtttgatgatgtgcatcgggtggagaaagcaaaaaaacgtgcaattgtcaaccaatcagaggctcgaaacagagttgaattgtttaggcatctgccacagtacgtccatggcactcaacttcctgacctcgagtcaaaattctttcagctggaaccaattcatccttctgtgtacaaggtcggtctccaatatttgtctggtgaggtatctggtggcaatggtcgttgcatagcaatgcttcttgcgttcagagaggcaataaaagattactccacaccgccaaataaaactctcagcagagaccttactgcaaaagtcagtagttatgtgtcattttttatcgagtgccgtccactatcaattagcatgggcaatgctatcaggttcctgaaaaacaggattgccaagctaccaattacattgtcggagtcagaagccaaggccagtcttcagtctgatattgatcgttttattaatgagaagatagttgttgcagatcaggttattgtcagtcatgccatcacaaaagtcagagacgatgatgtcttgctaacatatgggtcatcatcagttgttgaaatgattttggagcatgctcatgaacttggtaggaagttccgtgttatagtgatggattctcgtcccaagctcgaggggcaaggattactgcgtagattagtggcaaagggcattaactgcacatatactcatataaatgcagtttcatacatcatgcatgaagttacaagagtcttcttgggtgcatcctcaatattatcaaatggaacagtttattcccgagttggcacagcatccgtggctatggtggcacatgcatttggaattcctgttttggtttgctgcgaggcatacaaatttcatgagagggtgcaacttgattctatatgcgctaatgagcttggtgatccagatgtgatttcgaaaattcctgggagggcagacttgggcgatcttaagaactgggctgacaacgagaatctccaactgttaaatctcacgtatgatgcaaccccttctgattatgtgtcgatgatcataacggattatggaatgcttccacctacaagtgtgccggtcatcgtgagagagtaccgcaaggagcagctgtgggtatagatctacttgcagtgtgatcgcagttttggcaactgttgctgcctaggtgcagcatgagtggacatatacaacttgtatgtttttgagatgtgggctgtcaaacctctttgccgacttaccgttttgtctactcaaaatggtcgtctagttttgtc

SEQ ID NO: 13170 - protein, 613 aa, Triticum aestivum
  peptide (1)..(613): Ceres Seq. ID no. 14314101
  misc_feature (198)..(598): Pfam Name: Pfam Description:  Initiation factor 2 subunit family
  misc_feature (1)..(613): NCBI GI NO: 15240967 NR Description: expressed protein [Arabidopsis thaliana]
  misc_feature (135)..(593): NCBI GI NO: 15222019 NR Description: hypothetical protein [Arabidopsis thaliana]
  misc_feature (314)..(611): NCBI GI NO: 15224811 NR Description: translation initiation factor eIF-2B delta subunit-related
  misc_feature (110)..(610): NCBI GI NO: 471329 NR Description: translation initiation factor eIF-2B-delta
  misc_feature (110)..(610): NCBI GI NO: 2506382 NR Description: TRANSLATION INITIATION FACTOR EIF-2B DELTA SUBUNIT
  misc_feature (95)..(610): NCBI GI NO: 16758830 NR Description: eukaryotic translation initiation factor 2B
  misc_feature (78)..(610): NCBI GI NO: 529428 NR Description: guanine nucleotide exchange factor
  misc_feature (78)..(610): NCBI GI NO: 1083344 NR Description: guanine nucleotide exchange factor eIF-2B deltachain
  misc_feature (95)..(610): NCBI GI NO: 6753736 NR Description: eukaryotic translation initiation factor 2B
  misc_feature (95)..(610): NCBI GI NO: 18255869 NR Description: Eukaryotic translation initiation factor 2B
MDLRRPPRSTSGGVEPKIRQVGFVTPGVSAPSEPPAAAAAAVSLPGAAAGSPPASDLSPGSLSPVMIPPPRHVDHLSPDSPSPPASDVLLLASSAPQPSSMRFAAASEFGEEDSRSLAPSAGELETNKGDLAEIRNEDAPASIPQKQKPSKAERRAIQEAQRAAKAAAKEAGLSGKSTGAASGANPATSKQAKPAKISQKKDVPHAPSTVASEKKVTERQPERDRKKDVPHPRMQFDDVHRVEKAKKRAIVNQSEARNRVELFRHLPQYVHGTQLPDLESKFFQLEPIHPSVYKVGLQYLSGEVSGGNGRCIAMLLAFREAIKDYSTPPNKTLSRDLTAKVSSYVSFFIECRPLSISMGNAIRFLKNRIAKLPITLSESEAKASLQSDIDRFINEKIVVADQVIVSHAITKVRDDDVLLTYGSSSVVEMILEHAHELGRKFRVIVMDSRPKLEGQGLLRRLVAKGINCTYTHINAVSYIMHEVTRVFLGASSILSNGTVYSRVGTASVAMVAHAFGIPVLVCCEAYKFHERVQLDSICANELGDPDVISKIPGRADLGDLKNWADNENLQLLNLTYDATPSDYVSMIITDYGMLPPTSVPVIVREYRKEQLWV

SEQ ID NO: 13171 - protein, 548 aa, Triticum aestivum
  peptide (1)..(548): Ceres Seq. ID no. 14314102
  misc_feature (133)..(533): Pfam Name: Pfam Description:  Initiation factor 2 subunit family
  misc_feature (1)..(548): NCBI GI NO: 15240967 NR Description: expressed protein [Arabidopsis thaliana]
  misc_feature (70)..(528): NCBI GI NO: 15222019 NR Description: hypothetical protein [Arabidopsis thaliana]
  misc_feature (249)..(546): NCBI GI NO: 15224811 NR Description: translation initiation factor eIF-2B delta subunit-related
  misc_feature (45)..(545): NCBI GI NO: 471329 NR Description: translation initiation factor eIF-2B-delta
  misc_feature (45)..(545): NCBI GI NO: 2506382 NR Description: TRANSLATION INITIATION FACTOR EIF-2B DELTA SUBUNIT
  misc_feature (30)..(545): NCBI GI NO: 16758830 NR Description: eukaryotic translation initiation factor 2B
  misc_feature (13)..(545): NCBI GI NO: 529428 NR Description: guanine nucleotide exchange factor
  misc_feature (13)..(545): NCBI GI NO: 1083344 NR Description: guanine nucleotide exchange factor eIF-2B deltachain
  misc_feature (30)..(545): NCBI GI NO: 6753736 NR Description: eukaryotic translation initiation factor 2B
  misc_feature (30)..(545): NCBI GI NO: 18255869 NR Description: Eukaryotic translation initiation factor 2B
MIPPPRHVDHLSPDSPSPPASDVLLLASSAPQPSSMRFAAASEFGEEDSRSLAPSAGELETNKGDLAEIRNEDAPASIPQKQKPSKAERRAIQEAQRAAKAAAKEAGLSGKSTGAASGANPATSKQAKPAKISQKKDVPHAPSTVASEKKVTERQPERDRKKDVPHPRMQFDDVHRVEKAKKRAIVNQSEARNRVELFRHLPQYVHGTQLPDLESKFFQLEPIHPSVYKVGLQYLSGEVSGGNGRCIAMLLAFREAIKDYSTPPNKTLSRDLTAKVSSYVSFFIECRPLSISMGNAIRFLKNRIAKLPITLSESEAKASLQSDIDRFINEKIVVADQVIVSHAITKVRDDDVLLTYGSSSVVEMILEHAHELGRKFRVIVMDSRPKLEGQGLLRRLVAKGINCTYTHINAVSYIMHEVTRVFLGASSILSNGTVYSRVGTASVAMVAHAFGIPVLVCCEAYKFHERVQLDSICANELGDPDVISKIPGRADLGDLKNWADNENLQLLNLTYDATPSDYVSMIITDYGMLPPTSVPVIVREYRKEQLWV

SEQ ID NO: 13172 - protein, 513 aa, Triticum aestivum
  peptide (1)..(513): Ceres Seq. ID no. 14314103
  misc_feature (98)..(498): Pfam Name: Pfam Description:  Initiation factor 2 subunit family
  misc_feature (1)..(513): NCBI GI NO: 15240967 NR Description: expressed protein [Arabidopsis thaliana]
  misc_feature (35)..(493): NCBI GI NO: 15222019 NR Description: hypothetical protein [Arabidopsis thaliana]
  misc_feature (214)..(511): NCBI GI NO: 15224811 NR Description: translation initiation factor eIF-2B delta subunit-related
  misc_feature (10)..(510): NCBI GI NO: 471329 NR Description: translation initiation factor eIF-2B-delta
  misc_feature (10)..(510): NCBI GI NO: 2506382 NR Description: TRANSLATION INITIATION FACTOR EIF-2B DELTA SUBUNIT
  misc_feature (1)..(510): NCBI GI NO: 16758830 NR Description: eukaryotic translation initiation factor 2B
  misc_feature (1)..(510): NCBI GI NO: 529428 NR Description: guanine nucleotide exchange factor
  misc_feature (1)..(510): NCBI GI NO: 1083344 NR Description: guanine nucleotide exchange factor eIF-2B deltachain
  misc_feature (1)..(510): NCBI GI NO: 6753736 NR Description: eukaryotic translation initiation factor 2B
  misc_feature (1)..(510): NCBI GI NO: 18255869 NR Description: Eukaryotic translation initiation factor 2B
MRFAAASEFGEEDSRSLAPSAGELETNKGDLAEIRNEDAPASIPQKQKPSKAERRAIQEAQRAAKAAAKEAGLSGKSTGAASGANPATSKQAKPAKISQKKDVPHAPSTVASEKKVTERQPERDRKKDVPHPRMQFDDVHRVEKAKKRAIVNQSEARNRVELFRHLPQYVHGTQLPDLESKFFQLEPIHPSVYKVGLQYLSGEVSGGNGRCIAMLLAFREAIKDYSTPPNKTLSRDLTAKVSSYVSFFIECRPLSISMGNAIRFLKNRIAKLPITLSESEAKASLQSDIDRFINEKIVVADQVIVSHAITKVRDDDVLLTYGSSSVVEMILEHAHELGRKFRVIVMDSRPKLEGQGLLRRLVAKGINCTYTHINAVSYIMHEVTRVFLGASSILSNGTVYSRVGTASVAMVAHAFGIPVLVCCEAYKFHERVQLDSICANELGDPDVISKIPGRADLGDLKNWADNENLQLLNLTYDATPSDYVSMIITDYGMLPPTSVPVIVREYRKEQLWV

SEQ ID NO: 13173 - DNA, 724 bp, Triticum aestivum
  misc_feature (1)..(724): Ceres Seq. ID no. 12625405
caccgcgcatttggctatcgcatttctcaggtgaggctcaggttccggagtagcgaagcttcaagtgcgcatctgggtaccggcatggctggagagcaggcgttccaccggggaggcgtgcacggaggcggcagcgccatcgggccggactacatgcgggccatccgcggcgacgacgactactacggcgggcacggccagggccacagccagccggcggccgtcaccctcgcgaagggggtggccgcggcggcggcggcggggtcgatgctgctcctgtcggccctgacgctgacgggcacggtgctggcgctgatcgtggcgacgccgctgctggtgctcttcagccccgtgctggtgcccgcggccatcgccgccacgatgctgacgaccgggttcgtctcgtcgggggcgttcggcgcggcggcggtgggggtgctggcgtggatgtacaagtacctgtcgcacggggcgtcctcgccgccgggggccgacacggtggaccacgcgggcgcgaagctggactccaaggcgcacgaggtgaagaactgggcgcagcatcgcctcgaccaggcacgaacgccgtagacgtgtcgtcatttgccctcctatgcgtcaccagtgtgtgtggatcgacgcctctatatgtacggacgtgcccgcgagcggtgctacttaccaccgatgaataataagctgcatatctcctctggaagagggagtt

SEQ ID NO: 13174 - protein, 195 aa, Triticum aestivum
  peptide (1)..(195): Ceres Seq. ID no. 12625406
  misc_feature (75)..(185): Pfam Name: Pfam Description:  Oleosin
  misc_feature (50)..(193): NCBI GI NO: 3334280 NR Description: OLEOSIN 16 KD (OSE701)
  misc_feature (29)..(193): NCBI GI NO: 1362168 NR Description: oleosin 2 - barley
  misc_feature (36)..(193): NCBI GI NO: 3334281 NR Description: Oleosin 16 kDa
  misc_feature (50)..(193): NCBI GI NO: 38346165 NR Description: OSJNBa0079A21.12
  misc_feature (34)..(193): NCBI GI NO: 3334474 NR Description: OLEOSIN ZM-I
  misc_feature (57)..(193): NCBI GI NO: 82705 NR Description: lipid body-associated major protein L3 - maize
  misc_feature (50)..(193): NCBI GI NO: 7442012 NR Description: oleosin isoform R16 - rice
  misc_feature (71)..(194): NCBI GI NO: 8515912 NR Description: oleosin [Elaeis guineensis]
  misc_feature (45)..(187): NCBI GI NO: 129082 NR Description: Oleosin Bn-III (BnIII)
  misc_feature (61)..(195): NCBI GI NO: 2119749 NR Description: oleosin - almond
HRAFGYRISQVRLRFRSSEASSAHLGTGMAGEQAFHRGGVHGGGSAIGPDYMRAIRGDDDYYGGHGQGHSQPAAVTLAKGVAAAAAAGSMLLLSALTLTGTVLALIVATPLLVLFSPVLVPAAIAATMLTTGFVSSGAFGAAAVGVLAWMYKYLSHGASSPPGADTVDHAGAKLDSKAHEVKNWAQHRLDQARTP

SEQ ID NO: 13175 - protein, 167 aa, Triticum aestivum
  peptide (1)..(167): Ceres Seq. ID no. 12625407
  misc_feature (47)..(157): Pfam Name: Pfam Description:  Oleosin
  misc_feature (22)..(165): NCBI GI NO: 3334280 NR Description: OLEOSIN 16 KD (OSE701)
  misc_feature (1)..(165): NCBI GI NO: 1362168 NR Description: oleosin 2 - barley
  misc_feature (8)..(165): NCBI GI NO: 3334281 NR Description: Oleosin 16 kDa
  misc_feature (22)..(165): NCBI GI NO: 38346165 NR Description: OSJNBa0079A21.12
  misc_feature (6)..(165): NCBI GI NO: 3334474 NR Description: OLEOSIN ZM-I
  misc_feature (29)..(165): NCBI GI NO: 82705 NR Description: lipid body-associated major protein L3 - maize
  misc_feature (22)..(165): NCBI GI NO: 7442012 NR Description: oleosin isoform R16 - rice
  misc_feature (43)..(166): NCBI GI NO: 8515912 NR Description: oleosin [Elaeis guineensis]
  misc_feature (17)..(159): NCBI GI NO: 129082 NR Description: Oleosin Bn-III (BnIII)
  misc_feature (33)..(167): NCBI GI NO: 2119749 NR Description: oleosin - almond
MAGEQAFHRGGVHGGGSAIGPDYMRAIRGDDDYYGGHGQGHSQPAAVTLAKGVAAAAAAGSMLLLSALTLTGTVLALIVATPLLVLFSPVLVPAAIAATMLTTGFVSSGAFGAAAVGVLAWMYKYLSHGASSPPGADTVDHAGAKLDSKAHEVKNWAQHRLDQARTP

SEQ ID NO: 13176 - protein, 144 aa, Triticum aestivum
  peptide (1)..(144): Ceres Seq. ID no. 12625408
  misc_feature (24)..(134): Pfam Name: Pfam Description:  Oleosin
  misc_feature (1)..(142): NCBI GI NO: 3334280 NR Description: OLEOSIN 16 KD (OSE701)
  misc_feature (1)..(142): NCBI GI NO: 1362168 NR Description: oleosin 2 - barley
  misc_feature (1)..(142): NCBI GI NO: 3334281 NR Description: Oleosin 16 kDa
  misc_feature (1)..(142): NCBI GI NO: 38346165 NR Description: OSJNBa0079A21.12
  misc_feature (1)..(142): NCBI GI NO: 3334474 NR Description: OLEOSIN ZM-I
  misc_feature (6)..(142): NCBI GI NO: 82705 NR Description: lipid body-associated major protein L3 - maize
  misc_feature (1)..(142): NCBI GI NO: 7442012 NR Description: oleosin isoform R16 - rice
  misc_feature (20)..(143): NCBI GI NO: 8515912 NR Description: oleosin [Elaeis guineensis]
  misc_feature (1)..(136): NCBI GI NO: 129082 NR Description: Oleosin Bn-III (BnIII)
  misc_feature (10)..(144): NCBI GI NO: 2119749 NR Description: oleosin - almond
MRAIRGDDDYYGGHGQGHSQPAAVTLAKGVAAAAAAGSMLLLSALTLTGTVLALIVATPLLVLFSPVLVPAAIAATMLTTGFVSSGAFGAAAVGVLAWMYKYLSHGASSPPGADTVDHAGAKLDSKAHEVKNWAQHRLDQARTP

SEQ ID NO: 13177 - DNA, 1084 bp, Triticum aestivum
  misc_feature (1)..(1084): Ceres Seq. ID no. 13654964
ctaatcgaaaaacgattacgaagcgtgcccaactccatctgcttccttttcctcttccccccgtccccgacgacccccggccgaaaccctagcgaggcgcgatgttcgggtaccggaaggcgccggacctcgacctcgaggcgggcggctcggcggcgctctacccggggatgacggaggacgtggagctgcgctgggccttcatccgcaagatctacgtcatcctctcggtccagctcgccatgaccgccgccgtcgcggggttcgtcgtcaaggtccccgccgtctccgagttcttcgtctcctccaacgctggcctgggcctctacatcttcctcctcgtcctgcccctcatcgtgctctgccccctgcgctactaccaccagaagcaccccgtcaacctcatcctgctcggcgtcttcaccgtctccatcagcttcgccgtcggcatgacgtgcgccttcaccagcggaaaaatcatcttggaagctgcaattctgacagcagtggtggtgatcagcttgactgcctacactttctgggctgcaaagagaggccatgatttcaacttcctgggcccgttcctgtttggagctcttatggtgctgctggtgttctcacttatccagatctttttcccactgggcaagatctccaccatgatatatggggccgtggcgtcgatcatcttctgtggctacatcatcttcgacacggacaacatcatcaagcgccacacgtatgacgagtacatctgggctgccgtgtccctctacctcgacatcatcaacctgttcctgaatctgatgcaaattctgcgggcagctgatagctgagcgcaccttgcccaacatcgcatgatttaagtccactagcttgtgcatatcagaaaattcatgaatgcccgcagatacctgtaggcatgtacaatcgttatcagtaaattctgccgtcctagactccatcacatgtcttgtttcctagcttcctggagtatgcaatgtgtgattgaaccaagctgcacgatgaaaatatactcactggtgctttgtgattgcaaggcacgtgaatttaattccctgcc

SEQ ID NO: 13178 - protein, 244 aa, Triticum aestivum
  peptide (1)..(244): Ceres Seq. ID no. 15219707
  misc_feature (29)..(243): Pfam Name: Pfam Description:  Uncharacterised protein family UPF0005
  misc_feature (1)..(243): NCBI GI NO: 34393841 NR Description: putative z-protein
  misc_feature (11)..(244): NCBI GI NO: 15229411 NR Description: hypothetical protein [Arabidopsis thaliana]
  misc_feature (4)..(243): NCBI GI NO: 15218701 NR Description: hypothetical protein [Arabidopsis thaliana]
  misc_feature (20)..(244): NCBI GI NO: 14626300 NR Description: putative receptor-associated protein
  misc_feature (4)..(241): NCBI GI NO: 15235466 NR Description: hypothetical protein [Arabidopsis thaliana]
  misc_feature (9)..(244): NCBI GI NO: 18414455 NR Description: expressed protein [Arabidopsis thaliana]
  misc_feature (24)..(244): NCBI GI NO: 34393840 NR Description: putative z-protein
  misc_feature (9)..(204): NCBI GI NO: 15810201 NR Description: AT4g15470/dl3775w [Arabidopsis thaliana]
  misc_feature (9)..(87): NCBI GI NO: 7485070 NR Description: hypothetical protein - Arabidopsis thaliana
  misc_feature (124)..(195): NCBI GI NO: 7485070 NR Description: hypothetical protein - Arabidopsis thaliana
MFGYRKAPDLDLEAGGSAALYPGMTEDVELRWAFIRKIYVILSVQLAMTAAVAGFVVKVPAVSEFFVSSNAGLGLYIFLLVLPLIVLCPLRYYHQKHPVNLILLGVFTVSISFAVGMTCAFTSGKIILEAAILTAVVVISLTAYTFWAAKRGHDFNFLGPFLFGALMVLLVFSLIQIFFPLGKISTMIYGAVASIIFCGYIIFDTDNIIKRHTYDEYIWAAVSLYLDIINLFLNLMQILRAADS

SEQ ID NO: 13179 - protein, 221 aa, Triticum aestivum
  peptide (1)..(221): Ceres Seq. ID no. 15219708
  misc_feature (6)..(220): Pfam Name: Pfam Description:  Uncharacterised protein family UPF0005
  misc_feature (1)..(220): NCBI GI NO: 34393841 NR Description: putative z-protein
  misc_feature (1)..(221): NCBI GI NO: 15229411 NR Description: hypothetical protein [Arabidopsis thaliana]
  misc_feature (1)..(220): NCBI GI NO: 15218701 NR Description: hypothetical protein [Arabidopsis thaliana]
  misc_feature (1)..(221): NCBI GI NO: 14626300 NR Description: putative receptor-associated protein
  misc_feature (1)..(218): NCBI GI NO: 15235466 NR Description: hypothetical protein [Arabidopsis thaliana]
  misc_feature (1)..(221): NCBI GI NO: 18414455 NR Description: expressed protein [Arabidopsis thaliana]
  misc_feature (1)..(221): NCBI GI NO: 34393840 NR Description: putative z-protein
  misc_feature (1)..(181): NCBI GI NO: 15810201 NR Description: AT4g15470/dl3775w [Arabidopsis thaliana]
  misc_feature (1)..(64): NCBI GI NO: 7485070 NR Description: hypothetical protein - Arabidopsis thaliana
  misc_feature (101)..(172): NCBI GI NO: 7485070 NR Description: hypothetical protein - Arabidopsis thaliana
MTEDVELRWAFIRKIYVILSVQLAMTAAVAGFVVKVPAVSEFFVSSNAGLGLYIFLLVLPLIVLCPLRYYHQKHPVNLILLGVFTVSISFAVGMTCAFTSGKIILEAAILTAVVVISLTAYTFWAAKRGHDFNFLGPFLFGALMVLLVFSLIQIFFPLGKISTMIYGAVASIIFCGYIIFDTDNIIKRHTYDEYIWAAVSLYLDIINLFLNLMQILRAADS

SEQ ID NO: 13180 - protein, 197 aa, Triticum aestivum
  peptide (1)..(197): Ceres Seq. ID no. 15219709
  misc_feature (1)..(196): Pfam Name: Pfam Description:  Uncharacterised protein family UPF0005
  misc_feature (1)..(196): NCBI GI NO: 34393841 NR Description: putative z-protein
  misc_feature (1)..(197): NCBI GI NO: 15229411 NR Description: hypothetical protein [Arabidopsis thaliana]
  misc_feature (1)..(196): NCBI GI NO: 15218701 NR Description: hypothetical protein [Arabidopsis thaliana]
  misc_feature (1)..(197): NCBI GI NO: 14626300 NR Description: putative receptor-associated protein
  misc_feature (1)..(194): NCBI GI NO: 15235466 NR Description: hypothetical protein [Arabidopsis thaliana]
  misc_feature (1)..(197): NCBI GI NO: 18414455 NR Description: expressed protein [Arabidopsis thaliana]
  misc_feature (1)..(197): NCBI GI NO: 34393840 NR Description: putative z-protein
  misc_feature (1)..(157): NCBI GI NO: 15810201 NR Description: AT4g15470/dl3775w [Arabidopsis thaliana]
  misc_feature (1)..(40): NCBI GI NO: 7485070 NR Description: hypothetical protein - Arabidopsis thaliana
  misc_feature (77)..(148): NCBI GI NO: 7485070 NR Description: hypothetical protein - Arabidopsis thaliana
MTAAVAGFVVKVPAVSEFFVSSNAGLGLYIFLLVLPLIVLCPLRYYHQKHPVNLILLGVFTVSISFAVGMTCAFTSGKIILEAAILTAVVVISLTAYTFWAAKRGHDFNFLGPFLFGALMVLLVFSLIQIFFPLGKISTMIYGAVASIIFCGYIIFDTDNIIKRHTYDEYIWAAVSLYLDIINLFLNLMQILRAADS

SEQ ID NO: 13181 - DNA, 1510 bp, Triticum aestivum
  misc_feature (1)..(1510): Ceres Seq. ID no. 14302279
acccaaactgctgctctttctccccggcccttgggacttgggagtgcgtgagagtgagggactcagcaaaaccctaattttcaccccaattcgccccttccaaaccctaaccctaatacgctcgatgttgtaatcccgccgcgtttgccatggctctagaggggcccgcggagcgacgggacgagggccagcagggagggatggcgaacgggaatggcgtggctccgccgccgtcgcgcatggccggccggccgttgggggcggctgcgtactctgacaggcggctgcgcctcaatccgaacacggagcacaagccgcaggactacaccgacgtgcgcggcgagtacgcgccagccgtgtacagcgccctggagcggcacctcccgcctagcctcctcgatgccgaccgtgatgtcaagctacacttcatgcgggacatactcgcgcgctattggccccatggcgagcgaaacaaggttcataggcacaaagaatacaggcagaagatagtccacctctataagccacttcatcaagaattatacagcatgcacccttcggctttcttcttaccaacattccttgaagcagtaagaaccaatacagaagaaagcattgcaagtataatgactgaaccaattcctggtgttttttcatttgctatgttacagcccaacttttgtgacatgctattggaggaggtagagaactttgaaaagtgggttcatgcaatgaaatttaagataatgaggccaaatacaatgaataaatatggtgctgtccttgatgattttggcctggaagctatgctgaatcagttcatggaggagttcatagctccaatttctaaagttttttaccctgaggttggtggaggaacattggactctcatcatgcttttgttgttgaatatgggaaagacagagatgttgaactaggtttccatgttgatgattctgaggtcacattaaatgtttgccttggcaagcaattctcaggcggtgaattatactttcgtggcattcgttgcgagaatcatgtgaactcagaaacacagcatgaggaaatgtatgattactctcatgttcctggacgagctgtacttcaccgtggccgtcatagacatggtgctagaccgacatcatcagggctcagaatgaatctgcttttgtggtgcagaagctccgtgttcagggagatgaagaaataccagatggatttttctagctggtgcggtgagtgccagcgtgaaaagacagagaggcagattcagtgcgtcaaagcgaccaagttggcatttcttaggggtgctggaggggcaatgatttaagtcatatttactgcatgtattttatgcaatcctgtattatattaaacatcctttgatcatttggaaacatctagtataattgttgtcaaatttccagctcgtatgtttgtcagtgtcattgcatcttatgtaaatctgaactttccttctgcattgccacataagccatggtttttact

SEQ ID NO: 13182 - protein, 393 aa, Triticum aestivum
  peptide (1)..(393): Ceres Seq. ID no. 14302280
  misc_feature (246)..(344): Pfam Name: II Pfam Description: 2OG-Fe
  misc_feature (1)..(393): NCBI GI NO: 34914494 NR Description: B1080D07.28
  misc_feature (7)..(381): NCBI GI NO: 18401806 NR Description: oxidoreductase, 2OG-Fe(II) oxygenase family
  misc_feature (18)..(236): NCBI GI NO: 15219973 NR Description: oxidoreductase, 2OG-Fe(II) oxygenase family
  misc_feature (235)..(388): NCBI GI NO: 15219973 NR Description: oxidoreductase, 2OG-Fe(II) oxygenase family
  misc_feature (12)..(236): NCBI GI NO: 25518648 NR Description: hypothetical protein F19G10.9
  misc_feature (235)..(388): NCBI GI NO: 25518648 NR Description: hypothetical protein F19G10.9
  misc_feature (45)..(381): NCBI GI NO: 15239932 NR Description: expressed protein [Arabidopsis thaliana]
  misc_feature (23)..(390): NCBI GI NO: 15221946 NR Description: expressed protein [Arabidopsis thaliana]
  misc_feature (25)..(257): NCBI GI NO: 34906198 NR Description: OJ1174_D05.17
  misc_feature (173)..(382): NCBI GI NO: 15221938 NR Description: expressed protein [Arabidopsis thaliana]
MALEGPAERRDEGQQGGMANGNGVAPPPSRMAGRPLGAAAYSDRRLRLNPNTEHKPQDYTDVRGEYAPAVYSALERHLPPSLLDADRDVKLHFMRDILARYWPHGERNKVHRHKEYRQKIVHLYKPLHQELYSMHPSAFFLPTFLEAVRTNTEESIASIMTEPIPGVFSFAMLQPNFCDMLLEEVENFEKWVHAMKFKIMRPNTMNKYGAVLDDFGLEAMLNQFMEEFIAPISKVFYPEVGGGTLDSHHAFVVEYGKDRDVELGFHVDDSEVTLNVCLGKQFSGGELYFRGIRCENHVNSETQHEEMYDYSHVPGRAVLHRGRHRHGARPTSSGLRMNLLLWCRSSVFREMKKYQMDFSSWCGECQREKTERQIQCVKATKLAFLRGAGGAMI

SEQ ID NO: 13183 - protein, 376 aa, Triticum aestivum
  peptide (1)..(376): Ceres Seq. ID no. 14302281
  misc_feature (229)..(327): Pfam Name: II Pfam Description: 2OG-Fe
  misc_feature (1)..(376): NCBI GI NO: 34914494 NR Description: B1080D07.28
  misc_feature (1)..(364): NCBI GI NO: 18401806 NR Description: oxidoreductase, 2OG-Fe(II) oxygenase family
  misc_feature (1)..(219): NCBI GI NO: 15219973 NR Description: oxidoreductase, 2OG-Fe(II) oxygenase family
  misc_feature (218)..(371): NCBI GI NO: 15219973 NR Description: oxidoreductase, 2OG-Fe(II) oxygenase family
  misc_feature (1)..(219): NCBI GI NO: 25518648 NR Description: hypothetical protein F19G10.9
  misc_feature (218)..(371): NCBI GI NO: 25518648 NR Description: hypothetical protein F19G10.9
  misc_feature (28)..(364): NCBI GI NO: 15239932 NR Description: expressed protein [Arabidopsis thaliana]
  misc_feature (6)..(373): NCBI GI NO: 15221946 NR Description: expressed protein [Arabidopsis thaliana]
  misc_feature (8)..(240): NCBI GI NO: 34906198 NR Description: OJ1174_D05.17
  misc_feature (156)..(365): NCBI GI NO: 15221938 NR Description: expressed protein [Arabidopsis thaliana]
MANGNGVAPPPSRMAGRPLGAAAYSDRRLRLNPNTEHKPQDYTDVRGEYAPAVYSALERHLPPSLLDADRDVKLHFMRDILARYWPHGERNKVHRHKEYRQKIVHLYKPLHQELYSMHPSAFFLPTFLEAVRTNTEESIASIMTEPIPGVFSFAMLQPNFCDMLLEEVENFEKWVHAMKFKIMRPNTMNKYGAVLDDFGLEAMLNQFMEEFIAPISKVFYPEVGGGTLDSHHAFVVEYGKDRDVELGFHVDDSEVTLNVCLGKQFSGGELYFRGIRCENHVNSETQHEEMYDYSHVPGRAVLHRGRHRHGARPTSSGLRMNLLLWCRSSVFREMKKYQMDFSSWCGECQREKTERQIQCVKATKLAFLRGAGGAMI

SEQ ID NO: 13184 - protein, 363 aa, Triticum aestivum
  peptide (1)..(363): Ceres Seq. ID no. 14302282
  misc_feature (216)..(314): Pfam Name: II Pfam Description: 2OG-Fe
  misc_feature (1)..(363): NCBI GI NO: 34914494 NR Description: B1080D07.28
  misc_feature (1)..(351): NCBI GI NO: 18401806 NR Description: oxidoreductase, 2OG-Fe(II) oxygenase family
  misc_feature (1)..(206): NCBI GI NO: 15219973 NR Description: oxidoreductase, 2OG-Fe(II) oxygenase family
  misc_feature (205)..(358): NCBI GI NO: 15219973 NR Description: oxidoreductase, 2OG-Fe(II) oxygenase family
  misc_feature (1)..(206): NCBI GI NO: 25518648 NR Description: hypothetical protein F19G10.9
  misc_feature (205)..(358): NCBI GI NO: 25518648 NR Description: hypothetical protein F19G10.9
  misc_feature (15)..(351): NCBI GI NO: 15239932 NR Description: expressed protein [Arabidopsis thaliana]
  misc_feature (1)..(360): NCBI GI NO: 15221946 NR Description: expressed protein [Arabidopsis thaliana]
  misc_feature (1)..(227): NCBI GI NO: 34906198 NR Description: OJ1174_D05.17
  misc_feature (143)..(352): NCBI GI NO: 15221938 NR Description: expressed protein [Arabidopsis thaliana]
MAGRPLGAAAYSDRRLRLNPNTEHKPQDYTDVRGEYAPAVYSALERHLPPSLLDADRDVKLHFMRDILARYWPHGERNKVHRHKEYRQKIVHLYKPLHQELYSMHPSAFFLPTFLEAVRTNTEESIASIMTEPIPGVFSFAMLQPNFCDMLLEEVENFEKWVHAMKFKIMRPNTMNKYGAVLDDFGLEAMLNQFMEEFIAPISKVFYPEVGGGTLDSHHAFVVEYGKDRDVELGFHVDDSEVTLNVCLGKQFSGGELYFRGIRCENHVNSETQHEEMYDYSHVPGRAVLHRGRHRHGARPTSSGLRMNLLLWCRSSVFREMKKYQMDFSSWCGECQREKTERQIQCVKATKLAFLRGAGGAMI

SEQ ID NO: 13185 - DNA, 1216 bp, Triticum aestivum
  misc_feature (1)..(1216): Ceres Seq. ID no. 13596660
ctctgcctccctatcccgcctcgggccgctgcctctgcctcatcgtcctcctcgcgctcgcactccttcgccgctgccggacgggtttccctccgccgtcgccgccgccgcgcttccttcaccgactgccgctgctcctcctcctcctccccagaaatggaggccggcgctggcacggctctgtaccccgcgcaccgatgcaaaaccatatacctggtgaggcatgcccagggtattcacaatgtggaaggcgagaaggattttgcagcatacaagtcacatgcgctgcttgatgctcaacttacccctttgggctggagccaagttgataccctgcgagatcatgtgacaaaatgtggactagcaaaaaagattgagttggttattgtttcccctctactcaggactatacaaactgcagtgggggtctttggtggtgggaactatattgatggagcaagtgcatcaccattgatggtagagggtgctggaaacagtgaacgtcagccgatttcaagtttgaactgcccaccgtttctcgcagttgaggcttgcagagagcacctgggtgttcatccctgtgacaagaggagcagcataacaaaataccgtactctctttcctgccattgatttttccttgatcgagaatgatgaagatgttctctgggaacccgatgtcagagaaacaaatgagtctgttgctctcaggggcatgaagttctttgactggttatggacgagagaagagaaagagatagctattgtcagccatagtggtttcttgtatcacaccttgaacatgtatggtaaagagtgtcatccaacaatagcagaggaactgggaaagcacttcgccaactgtgagctccggtcgatggtcttggtcgacagaagtaaccttggatcggatgcctctaaatacaacttcgctgggaagataccgaccgggcttgatatgcccagcgatgtcgcagacgagaagcaggctgaagaagctagcaagaactgaggctgtcgagcatgtggatgtctttgattcttttgtcaaaccttggttctggctgacaatgaactgagaatagatactaagcgacatctaaggataggacttgccgtctgttgttccggtgtatgatgggcacgattggttatgtttatctgatttgttgtttgaacagatacccaaattcatgggaaataaggacttatacact

SEQ ID NO: 13186 - protein, 336 aa, Triticum aestivum
  peptide (1)..(336): Ceres Seq. ID no. 15221943
  misc_feature (68)..(307): Pfam Name: Pfam Description:  Phosphoglycerate mutase family
  misc_feature (59)..(325): NCBI GI NO: 38344765 NR Description: OSJNBa0068L06.8
  misc_feature (53)..(336): NCBI GI NO: 21700765 NR Description: unknown [Glycine max]
  misc_feature (53)..(336): NCBI GI NO: 21700767 NR Description: unknown [Glycine max]
  misc_feature (53)..(327): NCBI GI NO: 15237708 NR Description: ZW10-related protein [Arabidopsis thaliana]
  misc_feature (45)..(328): NCBI GI NO: 25372930 NR Description: hypothetical protein ZW10
  misc_feature (45)..(328): NCBI GI NO: 25372931 NR Description: hypothetical protein F19C14.10
  misc_feature (53)..(328): NCBI GI NO: 15217922 NR Description: expressed protein [Arabidopsis thaliana]
  misc_feature (45)..(189): NCBI GI NO: 30696245 NR Description: expressed protein [Arabidopsis thaliana]
  misc_feature (190)..(328): NCBI GI NO: 30696245 NR Description: expressed protein [Arabidopsis thaliana]
  misc_feature (58)..(322): NCBI GI NO: 15227803 NR Description: expressed protein [Arabidopsis thaliana]
LCLPIPPRAAASASSSSSRSHSFAAAGRVSLRRRRRRASFTDCRCSSSSSPEMEAGAGTALYPAHRCKTIYLVRHAQGIHNVEGEKDFAAYKSHALLDAQLTPLGWSQVDTLRDHVTKCGLAKKIELVIVSPLLRTIQTAVGVFGGGNYIDGASASPLMVEGAGNSERQPISSLNCPPFLAVEACREHLGVHPCDKRSSITKYRTLFPAIDFSLIENDEDVLWEPDVRETNESVALRGMKFFDWLWTREEKEIAIVSHSGFLYHTLNMYGKECHPTIAEELGKHFANCELRSMVLVDRSNLGSDASKYNFAGKIPTGLDMPSDVADEKQAEEASKN

SEQ ID NO: 13187 - protein, 284 aa, Triticum aestivum
  peptide (1)..(284): Ceres Seq. ID no. 15221944
  misc_feature (16)..(255): Pfam Name: Pfam Description:  Phosphoglycerate mutase family
  misc_feature (7)..(273): NCBI GI NO: 38344765 NR Description: OSJNBa0068L06.8
  misc_feature (1)..(284): NCBI GI NO: 21700765 NR Description: unknown [Glycine max]
  misc_feature (1)..(284): NCBI GI NO: 21700767 NR Description: unknown [Glycine max]
  misc_feature (1)..(275): NCBI GI NO: 15237708 NR Description: ZW10-related protein [Arabidopsis thaliana]
  misc_feature (1)..(276): NCBI GI NO: 25372930 NR Description: hypothetical protein ZW10
  misc_feature (1)..(276): NCBI GI NO: 25372931 NR Description: hypothetical protein F19C14.10
  misc_feature (1)..(276): NCBI GI NO: 15217922 NR Description: expressed protein [Arabidopsis thaliana]
  misc_feature (1)..(137): NCBI GI NO: 30696245 NR Description: expressed protein [Arabidopsis thaliana]
  misc_feature (138)..(276): NCBI GI NO: 30696245 NR Description: expressed protein [Arabidopsis thaliana]
  misc_feature (6)..(270): NCBI GI NO: 15227803 NR Description: expressed protein [Arabidopsis thaliana]
MEAGAGTALYPAHRCKTIYLVRHAQGIHNVEGEKDFAAYKSHALLDAQLTPLGWSQVDTLRDHVTKCGLAKKIELVIVSPLLRTIQTAVGVFGGGNYIDGASASPLMVEGAGNSERQPISSLNCPPFLAVEACREHLGVHPCDKRSSITKYRTLFPAIDFSLIENDEDVLWEPDVRETNESVALRGMKFFDWLWTREEKEIAIVSHSGFLYHTLNMYGKECHPTIAEELGKHFANCELRSMVLVDRSNLGSDASKYNFAGKIPTGLDMPSDVADEKQAEEASKN

SEQ ID NO: 13188 - protein, 178 aa, Triticum aestivum
  peptide (1)..(178): Ceres Seq. ID no. 15221945
  misc_feature (1)..(149): Pfam Name: Pfam Description:  Phosphoglycerate mutase family
  misc_feature (1)..(167): NCBI GI NO: 38344765 NR Description: OSJNBa0068L06.8
  misc_feature (1)..(178): NCBI GI NO: 21700765 NR Description: unknown [Glycine max]
  misc_feature (1)..(178): NCBI GI NO: 21700767 NR Description: unknown [Glycine max]
  misc_feature (1)..(169): NCBI GI NO: 15237708 NR Description: ZW10-related protein [Arabidopsis thaliana]
  misc_feature (1)..(170): NCBI GI NO: 25372930 NR Description: hypothetical protein ZW10
  misc_feature (1)..(170): NCBI GI NO: 25372931 NR Description: hypothetical protein F19C14.10
  misc_feature (1)..(170): NCBI GI NO: 15217922 NR Description: expressed protein [Arabidopsis thaliana]
  misc_feature (1)..(31): NCBI GI NO: 30696245 NR Description: expressed protein [Arabidopsis thaliana]
  misc_feature (32)..(170): NCBI GI NO: 30696245 NR Description: expressed protein [Arabidopsis thaliana]
  misc_feature (1)..(164): NCBI GI NO: 15227803 NR Description: expressed protein [Arabidopsis thaliana]
MVEGAGNSERQPISSLNCPPFLAVEACREHLGVHPCDKRSSITKYRTLFPAIDFSLIENDEDVLWEPDVRETNESVALRGMKFFDWLWTREEKEIAIVSHSGFLYHTLNMYGKECHPTIAEELGKHFANCELRSMVLVDRSNLGSDASKYNFAGKIPTGLDMPSDVADEKQAEEASKN

SEQ ID NO: 13189 - DNA, 1602 bp, Triticum aestivum
  misc_feature (1)..(1602): Ceres Seq. ID no. 14314108
accaaacaatggcggcgtgcaacggcctgttcgtgtaccacatcctcggcctggcctccctggtggccgtcttctacttctccctcctcggcgaggtggacctccgcttccccggcctcctcccgtcctccggcgcgtcccagcactcccacgacgcgtccctgccgttcgtggagcggcgcggcgcgcagctcttcctggagggccgcccgttctacatcaacgggtggaactcgtactggctcatggaccaggcggtggagccggccagccgccaccgtgtgtccgacatgttccgcgccgccaccgggatggggctcacggtgtgccgcacctgggccttcaacgacggcgcctacaacgcgctccagctctccccgggacacttcgacgagcgcgtcttcagggcgctggacctggtggtcgtggaggcccggcggcacggcgtgcggctcgtcctcagcctggccaacaacctggaggcgtacggcgggaagacgcagtacgtgcggtgggcgtgggacgaaggcgtcggcctcaccgcctccaacgactccttcttcttcgaccccgccatccgtgactacttcaaagtctacctcaaggcattgttgacgaggacgaaccacttgacgggggtgcagtacaaggacgaccctaccatcttggcgtgggagctgatgaacgagcccagatgcatctccgatccgtctggtaacactctgcagcgctggatcgaggagatggcggggtacgtgaaatcgatcgaccgtcggcatctgctgaccgtcggcacggaggggttctacggccccacgagccctccggagaagctgagcgtgaatccggggcactggttcaacaactacggcctcgacttcatccgcaactccaagatctccgacatcgacttcgcctccgtccacctttacccggacacctggctgctgcacgcggatctggaagagaagctcaagttcgtgacgcagtgggtgagctcccacttcgaggacggcgacacggagctcggcggcaagcccgtggtgctgacggagttcgggctgtcgcatttggtcaagggcttcgagcagtcgcagcgcgacgccttctacaagtcggtgtacgacatcgtccacgcgtcggccaagaggggcggcgccggcgccggcgcgatagtgtggcagctcgccgccgaggacatggaggagtaccacgacggcttcgccatcgtgcccagcgagacgccgtcgatgcagaagctgctgacggagcagtcgtgccggctggccgcgctgaggcacggggaggaggaggccaagaggatcctcaaggcggtgtgcggctgacccgtgatctgtcttgcgaggtgtggcttttttgcgtgctcatgtcatgtactgttactgtgtgtccgtaggaaatcgacacgaaatggaccgaagggatccatgaaaggtggcgtgctcggcgccgacgtcggcagatctgcctctgtattttccttgctgtgttgttgtactcgtacgtgcccttgacctttggtgtttaagtcattgtcgagtggcagcggaggctagttatattctatagtcctcgaatagc

SEQ ID NO: 13190 - protein, 447 aa, Triticum aestivum
  peptide (1)..(447): Ceres Seq. ID no. 14314109
  misc_feature (61)..(398): Pfam Name: glycosyl hydrolase family 5 Pfam Description: Cellulase
  misc_feature (3)..(446): NCBI GI NO: 34909462 NR Description: putative (1-4)-beta-mannan endohydrolase
  misc_feature (3)..(433): NCBI GI NO: 30681096 NR Description: glycosyl hydrolase family 5/cellulase
  misc_feature (48)..(446): NCBI GI NO: 15235255 NR Description: glycosyl hydrolase family 5/cellulase
  misc_feature (178)..(433): NCBI GI NO: 25354515 NR Description: (1-4)-beta-mannan endohydrolase
  misc_feature (3)..(149): NCBI GI NO: 25354515 NR Description: (1-4)-beta-mannan endohydrolase
  misc_feature (45)..(431): NCBI GI NO: 10178872 NR Description: (1-4)-beta-mannan endohydrolase [Coffea arabica]
  misc_feature (56)..(433): NCBI GI NO: 10129675 NR Description: (1-4)-beta-mannan endohydrolase [Coffea arabica]
  misc_feature (57)..(429): NCBI GI NO: 15241093 NR Description: glycosyl hydrolase family 5/cellulase
  misc_feature (56)..(440): NCBI GI NO: 34912090 NR Description: putative mannan endo-1,4-beta-mannosidase
  misc_feature (56)..(432): NCBI GI NO: 15239973 NR Description: glycosyl hydrolase family 5/cellulase
QTMAACNGLFVYHILGLASLVAVFYFSLLGEVDLRFPGLLPSSGASQHSHDASLPFVERRGAQLFLEGRPFYINGWNSYWLMDQAVEPASRHRVSDMFRAATGMGLTVCRTWAFNDGAYNALQLSPGHFDERVFRALDLVVVEARRHGVRLVLSLANNLEAYGGKTQYVRWAWDEGVGLTASNDSFFFDPAIRDYFKVYLKALLTRTNHLTGVQYKDDPTILAWELMNEPRCISDPSGNTLQRWIEEMAGYVKSIDRRHLLTVGTEGFYGPTSPPEKLSVNPGHWFNNYGLDFIRNSKISDIDFASVHLYPDTWLLHADLEEKLKFVTQWVSSHFEDGDTELGGKPVVLTEFGLSHLVKGFEQSQRDAFYKSVYDIVHASAKRGGAGAGAIVWQLAAEDMEEYHDGFAIVPSETPSMQKLLTEQSCRLAALRHGEEEAKRILKAVCG

SEQ ID NO: 13191 - protein, 445 aa, Triticum aestivum
  peptide (1)..(445): Ceres Seq. ID no. 14314110
  misc_feature (59)..(396): Pfam Name: glycosyl hydrolase family 5 Pfam Description: Cellulase
  misc_feature (1)..(444): NCBI GI NO: 34909462 NR Description: putative (1-4)-beta-mannan endohydrolase
  misc_feature (1)..(431): NCBI GI NO: 30681096 NR Description: glycosyl hydrolase family 5/cellulase
  misc_feature (46)..(444): NCBI GI NO: 15235255 NR Description: glycosyl hydrolase family 5/cellulase
  misc_feature (176)..(431): NCBI GI NO: 25354515 NR Description: (1-4)-beta-mannan endohydrolase
  misc_feature (1)..(147): NCBI GI NO: 25354515 NR Description: (1-4)-beta-mannan endohydrolase
  misc_feature (43)..(429): NCBI GI NO: 10178872 NR Description: (1-4)-beta-mannan endohydrolase [Coffea arabica]
  misc_feature (54)..(431): NCBI GI NO: 10129675 NR Description: (1-4)-beta-mannan endohydrolase [Coffea arabica]
  misc_feature (55)..(427): NCBI GI NO: 15241093 NR Description: glycosyl hydrolase family 5/cellulase
  misc_feature (54)..(438): NCBI GI NO: 34912090 NR Description: putative mannan endo-1,4-beta-mannosidase
  misc_feature (54)..(430): NCBI GI NO: 15239973 NR Description: glycosyl hydrolase family 5/cellulase
MAACNGLFVYHILGLASLVAVFYFSLLGEVDLRFPGLLPSSGASQHSHDASLPFVERRGAQLFLEGRPFYINGWNSYWLMDQAVEPASRHRVSDMFRAATGMGLTVCRTWAFNDGAYNALQLSPGHFDERVFRALDLVVVEARRHGVRLVLSLANNLEAYGGKTQYVRWAWDEGVGLTASNDSFFFDPAIRDYFKVYLKALLTRTNHLTGVQYKDDPTILAWELMNEPRCISDPSGNTLQRWIEEMAGYVKSIDRRHLLTVGTEGFYGPTSPPEKLSVNPGHWFNNYGLDFIRNSKISDIDFASVHLYPDTWLLHADLEEKLKFVTQWVSSHFEDGDTELGGKPVVLTEFGLSHLVKGFEQSQRDAFYKSVYDIVHASAKRGGAGAGAIVWQLAAEDMEEYHDGFAIVPSETPSMQKLLTEQSCRLAALRHGEEEAKRILKAVCG

SEQ ID NO: 13192 - protein, 366 aa, Triticum aestivum
  peptide (1)..(366): Ceres Seq. ID no. 14314111
  misc_feature (1)..(317): Pfam Name: glycosyl hydrolase family 5 Pfam Description: Cellulase
  misc_feature (1)..(365): NCBI GI NO: 34909462 NR Description: putative (1-4)-beta-mannan endohydrolase
  misc_feature (1)..(352): NCBI GI NO: 30681096 NR Description: glycosyl hydrolase family 5/cellulase
  misc_feature (1)..(365): NCBI GI NO: 15235255 NR Description: glycosyl hydrolase family 5/cellulase
  misc_feature (97)..(352): NCBI GI NO: 25354515 NR Description: (1-4)-beta-mannan endohydrolase
  misc_feature (1)..(68): NCBI GI NO: 25354515 NR Description: (1-4)-beta-mannan endohydrolase
  misc_feature (1)..(350): NCBI GI NO: 10178872 NR Description: (1-4)-beta-mannan endohydrolase [Coffea arabica]
  misc_feature (1)..(352): NCBI GI NO: 10129675 NR Description: (1-4)-beta-mannan endohydrolase [Coffea arabica]
  misc_feature (1)..(348): NCBI GI NO: 15241093 NR Description: glycosyl hydrolase family 5/cellulase
  misc_feature (1)..(359): NCBI GI NO: 34912090 NR Description: putative mannan endo-1,4-beta-mannosidase
  misc_feature (1)..(351): NCBI GI NO: 15239973 NR Description: glycosyl hydrolase family 5/cellulase
MDQAVEPASRHRVSDMFRAATGMGLTVCRTWAFNDGAYNALQLSPGHFDERVFRALDLVVVEARRHGVRLVLSLANNLEAYGGKTQYVRWAWDEGVGLTASNDSFFFDPAIRDYFKVYLKALLTRTNHLTGVQYKDDPTILAWELMNEPRCISDPSGNTLQRWIEEMAGYVKSIDRRHLLTVGTEGFYGPTSPPEKLSVNPGHWFNNYGLDFIRNSKISDIDFASVHLYPDTWLLHADLEEKLKFVTQWVSSHFEDGDTELGGKPVVLTEFGLSHLVKGFEQSQRDAFYKSVYDIVHASAKRGGAGAGAIVWQLAAEDMEEYHDGFAIVPSETPSMQKLLTEQSCRLAALRHGEEEAKRILKAVCG

SEQ ID NO: 13193 - DNA, 753 bp, Triticum aestivum
  misc_feature (1)..(753): Ceres Seq. ID no. 12587416
cctagaacatcctaaatcgaaaaaaaagggataacttgaccgacttcgccattgacaacaatctatccgcgattcaaacaagaaacagcagcagcgacaccagcaatcgactccgcgagaacccagcaagggggaggatgaaatccttcaagaaggaattcaccctggaggagagggcgaatgagtcggccgccatgatcgccaagtaccccggcaggatccccgtgattgttgaaaggttttcaaggagtaatcttccagaaatggagaagaggaagtacctggttccttgtgacatgccagttgggcagttcattttcatcctgcgctccaggttacatctgtctccagggacggcgcttttcgtgtttgtgcgcgacaccttgccccagaccgctaacctgatgggtagcgtgtatgattcgtacaaagataagcaggatggcttcctctacatgtgttacagcagcgagaagacatttgggtgacatctgcctgactgcaatttggcgtagtgcacccaatcccagtgtacatatgtgacatcaatctcttgttaaatgttaagtgtagcagcctctgccgatctctagtttattttacttgcacgtttcacatctgtattgctcccggaaaaaaggaaaaaaaactgtattgttgtatcaccgaagtaaacttatgcccctgtgcatgatgctgcttgcgaagtcctttggcaaggatggacgtatatatgaatagaagtgttgatgt

SEQ ID NO: 13194 - protein, 116 aa, Triticum aestivum
  peptide (1)..(116): Ceres Seq. ID no. 12587417
  misc_feature (12)..(116): Pfam Name: Pfam Description:  Microtubule associated protein 1A/1B
  misc_feature (1)..(116): NCBI GI NO: 18400815 NR Description: expressed protein; protein id: At3g15580
  misc_feature (1)..(116): NCBI GI NO: 18397569 NR Description: expressed protein; protein id: At3g06420
  misc_feature (1)..(116): NCBI GI NO: 6437547 NR Description: hypothetical protein [Arabidopsis thaliana]
  misc_feature (1)..(116): NCBI GI NO: 21592920 NR Description: putative microtubule-associated protein
  misc_feature (1)..(116): NCBI GI NO: 15224577 NR Description: putative microtubule-associated protein
  misc_feature (3)..(116): NCBI GI NO: 33146967 NR Description: putative microtubule associated protein
  misc_feature (3)..(116): NCBI GI NO: 15220686 NR Description: symbiosis-related protein, putative
  misc_feature (4)..(116): NCBI GI NO: 32401365 NR Description: autophagy [Triticum aestivum]
  misc_feature (3)..(116): NCBI GI NO: 38344173 NR Description: OSJNBa0053K19.12
  misc_feature (1)..(116): NCBI GI NO: 23394382 NR Description: microtubial binding protein
MKSFKKEFTLEERANESAAMIAKYPGRIPVIVERFSRSNLPEMEKRKYLVPCDMPVGQFIFILRSRLHLSPGTALFVFVRDTLPQTANLMGSVYDSYKDKQDGFLYMCYSSEKTFG

SEQ ID NO: 13195 - protein, 97 aa, Triticum aestivum
  peptide (1)..(97): Ceres Seq. ID no. 12587418
  misc_feature (1)..(97): Pfam Name: Pfam Description:  Microtubule associated protein 1A/1B
  misc_feature (1)..(97): NCBI GI NO: 18400815 NR Description: expressed protein; protein id: At3g15580
  misc_feature (1)..(97): NCBI GI NO: 18397569 NR Description: expressed protein; protein id: At3g06420
  misc_feature (1)..(97): NCBI GI NO: 6437547 NR Description: hypothetical protein [Arabidopsis thaliana]
  misc_feature (1)..(97): NCBI GI NO: 21592920 NR Description: putative microtubule-associated protein
  misc_feature (1)..(97): NCBI GI NO: 15224577 NR Description: putative microtubule-associated protein
  misc_feature (1)..(97): NCBI GI NO: 33146967 NR Description: putative microtubule associated protein
  misc_feature (1)..(97): NCBI GI NO: 15220686 NR Description: symbiosis-related protein, putative
  misc_feature (1)..(97): NCBI GI NO: 32401365 NR Description: autophagy [Triticum aestivum]
  misc_feature (1)..(97): NCBI GI NO: 38344173 NR Description: OSJNBa0053K19.12
  misc_feature (1)..(97): NCBI GI NO: 23394382 NR Description: microtubial binding protein
MIAKYPGRIPVIVERFSRSNLPEMEKRKYLVPCDMPVGQFIFILRSRLHLSPGTALFVFVRDTLPQTANLMGSVYDSYKDKQDGFLYMCYSSEKTFG

SEQ ID NO: 13196 - protein, 74 aa, Triticum aestivum
  peptide (1)..(74): Ceres Seq. ID no. 12587419
  misc_feature (1)..(74): Pfam Name: Pfam Description:  Microtubule associated protein 1A/1B
  misc_feature (1)..(74): NCBI GI NO: 18400815 NR Description: expressed protein; protein id: At3g15580
  misc_feature (1)..(74): NCBI GI NO: 18397569 NR Description: expressed protein; protein id: At3g06420
  misc_feature (1)..(74): NCBI GI NO: 6437547 NR Description: hypothetical protein [Arabidopsis thaliana]
  misc_feature (1)..(74): NCBI GI NO: 21592920 NR Description: putative microtubule-associated protein
  misc_feature (1)..(74): NCBI GI NO: 15224577 NR Description: putative microtubule-associated protein
  misc_feature (1)..(74): NCBI GI NO: 33146967 NR Description: putative microtubule associated protein
  misc_feature (1)..(74): NCBI GI NO: 15220686 NR Description: symbiosis-related protein, putative
  misc_feature (1)..(74): NCBI GI NO: 32401365 NR Description: autophagy [Triticum aestivum]
  misc_feature (1)..(74): NCBI GI NO: 38344173 NR Description: OSJNBa0053K19.12
  misc_feature (1)..(74): NCBI GI NO: 23394382 NR Description: microtubial binding protein
MEKRKYLVPCDMPVGQFIFILRSRLHLSPGTALFVFVRDTLPQTANLMGSVYDSYKDKQDGFLYMCYSSEKTFG

SEQ ID NO: 13197 - DNA, 1318 bp, Triticum aestivum
  misc_feature (1)..(1318): Ceres Seq. ID no. 14314112
aaggacagagaagccaggcggcagcaacccctttcctccaatctccgtccattcgagacgtctgcggggccgggcaaggcatggtcgccatgctgcccgccgcgaggggggacgccgccccagccgccagcgccggcgccgccgacaagctcgtccacgggcctgtcaccgacggcaagtgcaagaagaaggccccgaggatgatccacaaggccgagagggagaagcacaagcgcgacctgctcaacgatctcttcagcgagcttgacgaaatgctagaagcagacaggcagaccaatgggaaggcatgtatattgactgacaccactcgaatccttcgagacctgctttcgcaattagaatctctccgaaaggagaatagcaccctgcagaatgaatcccattatgttacgatggagaggaatgagctgcaggatgagaacggtgtgctccgcaatgaaattctggagctacaaaatgagctggcgacgcttcccgcaggcaacccaggttggggccatgctactgctggatcgcctcaccctgcgggcacagttttcccgtcacagcaaccaatgcagccgaccaccatcgcaagcgcagtattccccttgcagcagcctctgcaacagacaacaatcctggagcacccttatgcaccaccaccaccaccacgggaacttaagctcttcccagatgctgcgtctgatatcgaaggccttgaaccatcagaagatcaggaggccgccaaccatattgcgcgaccgctggcgaggtacccaacacagtcagcgttgtggcctgtaagcctgggtctcccgaggatggaagacgaacagtgtagcagtggcacaaccggcagtagcaaggaaggtagtagctctgcctctagtagagattgagtagatcagctccaaccagtcaggaagtttctctttgagcgtagcgaatatacacagatgagcatgtggcatgtaaataccagactccatcttggatctgggaatgttatgttagatgagaagatgacactccaatgggaatcagaatagcagcatttctcatcctttgtgttgcaccgtatcatatatatgaactgatctagatttgatatttgcaaagaaaaactacagcaataagcaatggattatatttatcggtgggggtaaccagaagcggaactgaagaggaaattgcaggcgactctcttcaaccatgtagagggttgcgtagagggtttcctttccttgcattggggccaatctcttcaaccgtgtacttccctgatccaaacccaaagagaaaatatatgagtttc

SEQ ID NO: 13198 - protein, 299 aa, Triticum aestivum
  peptide (1)..(299): Ceres Seq. ID no. 14314113
  misc_feature (66)..(116): Pfam Name: Pfam Description:  Helix-loop-helix DNA-binding domain
  misc_feature (30)..(279): NCBI GI NO: 18071393 NR Description: putative amelogenin precursor [Oryza sativa]
  misc_feature (30)..(290): NCBI GI NO: 34391901 NR Description: putative transcription factor bHLH
  misc_feature (22)..(290): NCBI GI NO: 33146544 NR Description: amelogenin precursor-like protein
  misc_feature (136)..(290): NCBI GI NO: 34913194 NR Description: contains EST C74688
  misc_feature (22)..(135): NCBI GI NO: 34913194 NR Description: contains EST C74688
  misc_feature (57)..(266): NCBI GI NO: 15228207 NR Description: bHLH protein family [Arabidopsis thaliana]
  misc_feature (66)..(263): NCBI GI NO: 15230975 NR Description: bHLH protein family [Arabidopsis thaliana]
  misc_feature (66)..(263): NCBI GI NO: 11994197 NR Description: emb|CAA18500
  misc_feature (33)..(221): NCBI GI NO: 15239706 NR Description: bHLH protein [Arabidopsis thaliana]
  misc_feature (33)..(221): NCBI GI NO: 21592325 NR Description: bHLH transcription factor, putative
GQRSQAAATPFLQSPSIRDVCGAGQGMVAMLPAARGDAAPAASAGAADKLVHGPVTDGKCKKKAPRMIHKAEREKHKRDLLNDLFSELDEMLEADRQTNGKACILTDTTRILRDLLSQLESLRKENSTLQNESHYVTMERNELQDENGVLRNEILELQNELATLPAGNPGWGHATAGSPHPAGTVFPSQQPMQPTTIASAVFPLQQPLQQTTILEHPYAPPPPPRELKLFPDAASDIEGLEPSEDQEAANHIARPLARYPTQSALWPVSLGLPRMEDEQCSSGTTGSSKEGSSSASSRD

SEQ ID NO: 13199 - protein, 273 aa, Triticum aestivum
  peptide (1)..(273): Ceres Seq. ID no. 14314114
  misc_feature (40)..(90): Pfam Name: Pfam Description:  Helix-loop-helix DNA-binding domain
  misc_feature (4)..(253): NCBI GI NO: 18071393 NR Description: putative amelogenin precursor [Oryza sativa]
  misc_feature (4)..(264): NCBI GI NO: 34391901 NR Description: putative transcription factor bHLH
  misc_feature (1)..(264): NCBI GI NO: 33146544 NR Description: amelogenin precursor-like protein
  misc_feature (110)..(264): NCBI GI NO: 34913194 NR Description: contains EST C74688
  misc_feature (1)..(109): NCBI GI NO: 34913194 NR Description: contains EST C74688
  misc_feature (31)..(240): NCBI GI NO: 15228207 NR Description: bHLH protein family [Arabidopsis thaliana]
  misc_feature (40)..(237): NCBI GI NO: 15230975 NR Description: bHLH protein family [Arabidopsis thaliana]
  misc_feature (40)..(237): NCBI GI NO: 11994197 NR Description: emb|CAA18500
  misc_feature (7)..(195): NCBI GI NO: 15239706 NR Description: bHLH protein [Arabidopsis thaliana]
  misc_feature (7)..(195): NCBI GI NO: 21592325 NR Description: bHLH transcription factor, putative
MVAMLPAARGDAAPAASAGAADKLVHGPVTDGKCKKKAPRMIHKAEREKHKRDLLNDLFSELDEMLEADRQTNGKACILTDTTRILRDLLSQLESLRKENSTLQNESHYVTMERNELQDENGVLRNEILELQNELATLPAGNPGWGHATAGSPHPAGTVFPSQQPMQPTTIASAVFPLQQPLQQTTILEHPYAPPPPPRELKLFPDAASDIEGLEPSEDQEAANHIARPLARYPTQSALWPVSLGLPRMEDEQCSSGTTGSSKEGSSSASSRD

SEQ ID NO: 13200 - protein, 270 aa, Triticum aestivum
  peptide (1)..(270): Ceres Seq. ID no. 14314115
  misc_feature (37)..(87): Pfam Name: Pfam Description:  Helix-loop-helix DNA-binding domain
  misc_feature (1)..(250): NCBI GI NO: 18071393 NR Description: putative amelogenin precursor [Oryza sativa]
  misc_feature (1)..(261): NCBI GI NO: 34391901 NR Description: putative transcription factor bHLH
  misc_feature (1)..(261): NCBI GI NO: 33146544 NR Description: amelogenin precursor-like protein
  misc_feature (107)..(261): NCBI GI NO: 34913194 NR Description: contains EST C74688
  misc_feature (1)..(106): NCBI GI NO: 34913194 NR Description: contains EST C74688
  misc_feature (28)..(237): NCBI GI NO: 15228207 NR Description: bHLH protein family [Arabidopsis thaliana]
  misc_feature (37)..(234): NCBI GI NO: 15230975 NR Description: bHLH protein family [Arabidopsis thaliana]
  misc_feature (37)..(234): NCBI GI NO: 11994197 NR Description: emb|CAA18500
  misc_feature (4)..(192): NCBI GI NO: 15239706 NR Description: bHLH protein [Arabidopsis thaliana]
  misc_feature (4)..(192): NCBI GI NO: 21592325 NR Description: bHLH transcription factor, putative
MLPAARGDAAPAASAGAADKLVHGPVTDGKCKKKAPRMIHKAEREKHKRDLLNDLFSELDEMLEADRQTNGKACILTDTTRILRDLLSQLESLRKENSTLQNESHYVTMERNELQDENGVLRNEILELQNELATLPAGNPGWGHATAGSPHPAGTVFPSQQPMQPTTIASAVFPLQQPLQQTTILEHPYAPPPPPRELKLFPDAASDIEGLEPSEDQEAANHIARPLARYPTQSALWPVSLGLPRMEDEQCSSGTTGSSKEGSSSASSRD

SEQ ID NO: 13201 - DNA, 1687 bp, Triticum aestivum
  misc_feature (1)..(1687): Ceres Seq. ID no. 15178681
aatcgaataatccgtcgactgttctggagagtgagcaggatcggattgttattctattgttgtccgcggcggccatggcgttcttcgaggagacggagtcgtactacgtcccctacctccgcgcccacctgcaccaattcgcagcgtcggtctccgcggcgagctgcgaggagggggcgggcgacgacgaggagtgccgcgacgaggcggccgcgctcaggctcaagatggtggccgtcgccgccatcctcatcgccggcgcggtcggcgtcgccatcccgctcgtcggccggaggcggcgcggcgggggcggcggcggcgagggcgggtcctccggcggcgggatgttcgtgctcgccaaggcgttcgcggcgggggtcatcctcgccacggggttcgtgcacatgatgcacgacgccgaggagaagttcgccgacccgtgcctcccggccatgccgtggcgccggttccccttcccgggcttcatcgccatgctcgccgcgctgggcacgctcgtcatggagttcgtcggcacccgcttctacgagcgcaggcacggcgaggaggccgctgcagccgcggccacagccgcgcgtgacgacaccacggcgctgctcgaggacggctccctgtcagggatggctgccgccgcgatgagcggcgacgatgagaagcaggacgccatgcacatcgtgggcatgcgcgcgcacgcggcggcgcaccagcacagccatgcgcatggccatgacgcgtgcgatggtggagccgtgtacgacgcccatgcacacgcccacgcccagggccatggccatgaccatgggcatgggagcgaggagaggccgtcccaagctcatcatgtggttgtctcgcagattctggagacggggattgtatctcattcggtgatcatcgggctatccttgggcgtttcgcaaagcccatgtaccattaaacctcttgttgccgccctctccttccaccagttcttcgagggttttgccttgggtggctgcatttctgaggcgcagttcaagaatttctctgcactcctgatggctttcttctttgctatcacaacacctgctgggatcaccgtgggggcggggatcgcgtcattctacaatgccaacagccccagggcattggtggtggaaggcattctggattcaatgtcatctggtatactggtctatatggcattagtggatctcattgctgctgatttcctgagccggaggatgagctgcaatccgaggctgcaagtgtgctcatacgttgccttgtttgtcggggctattgccatgtcatcactggctatctgggcttagtgccagtgaggattattgaagcttgggacgggctgcttggtgatcaatgcactacgacttgttgcctagctaccattaactgagtaagatgggaggcttttcctttcgctgtccattcttttgtttgttcttccatggtgctgggccgtgtaacgtcctcttttggtcatagaaaaggaagtccctctttgggtacattgtggtggtacagaattgggacaagttagttagggaataaagagtttaggagtcccaccagtctttgcagatgtacagttcatcctcggtgttagataagaggccttgtctgttctcaagtataatcttgcacgtacatcaatgtggatctcctgaaagcc

SEQ ID NO: 13202 - protein, 441 aa, Triticum aestivum
  peptide (1)..(441): Ceres Seq. ID no. 15178682
  misc_feature (232)..(310): Pfam Name: Pfam Description:  Cation efflux family
  misc_feature (31)..(219): NCBI GI NO: 40888856 NR Description: TPA: putative ZIP-like protein
  misc_feature (291)..(441): NCBI GI NO: 40888856 NR Description: TPA: putative ZIP-like protein
  misc_feature (47)..(441): NCBI GI NO: 18406954 NR Description: metal transporter, putative (IRT3)
  misc_feature (47)..(441): NCBI GI NO: 37079196 NR Description: Fe
  misc_feature (59)..(441): NCBI GI NO: 14582255 NR Description: ZIP-like zinc transporter [Thlaspi caerulescens]
  misc_feature (35)..(249): NCBI GI NO: 30526082 NR Description: putative ZIP-like zinc transporter
  misc_feature (259)..(441): NCBI GI NO: 30526082 NR Description: putative ZIP-like zinc transporter
  misc_feature (59)..(441): NCBI GI NO: 7381054 NR Description: Zn and Cd transporter ZNT1 [Thlaspi caerulescens]
  misc_feature (47)..(441): NCBI GI NO: 21553732 NR Description: putative iron-regulated transporter
  misc_feature (47)..(249): NCBI GI NO: 40888862 NR Description: TPA: putative ZIP-like protein
SNNPSTVLESEQDRIVILLLSAAAMAFFEETESYYVPYLRAHLHQFAASVSAASCEEGAGDDEECRDEAAALRLKMVAVAAILIAGAVGVAIPLVGRRRRGGGGGGEGGSSGGGMFVLAKAFAAGVILATGFVHMMHDAEEKFADPCLPAMPWRRFPFPGFIAMLAALGTLVMEFVGTRFYERRHGEEAAAAAATAARDDTTALLEDGSLSGMAAAAMSGDDEKQDAMHIVGMRAHAAAHQHSHAHGHDACDGGAVYDAHAHAHAQGHGHDHGHGSEERPSQAHHVVVSQILETGIVSHSVIIGLSLGVSQSPCTIKPLVAALSFHQFFEGFALGGCISEAQFKNFSALLMAFFFAITTPAGITVGAGIASFYNANSPRALVVEGILDSMSSGILVYMALVDLIAADFLSRRMSCNPRLQVCSYVALFVGAIAMSSLAIWA

SEQ ID NO: 13203 - protein, 417 aa, Triticum aestivum
  peptide (1)..(417): Ceres Seq. ID no. 15178683
  misc_feature (208)..(286): Pfam Name: Pfam Description:  Cation efflux family
  misc_feature (7)..(195): NCBI GI NO: 40888856 NR Description: TPA: putative ZIP-like protein
  misc_feature (267)..(417): NCBI GI NO: 40888856 NR Description: TPA: putative ZIP-like protein
  misc_feature (23)..(417): NCBI GI NO: 18406954 NR Description: metal transporter, putative (IRT3)
  misc_feature (23)..(417): NCBI GI NO: 37079196 NR Description: Fe
  misc_feature (35)..(417): NCBI GI NO: 14582255 NR Description: ZIP-like zinc transporter [Thlaspi caerulescens]
  misc_feature (11)..(225): NCBI GI NO: 30526082 NR Description: putative ZIP-like zinc transporter
  misc_feature (235)..(417): NCBI GI NO: 30526082 NR Description: putative ZIP-like zinc transporter
  misc_feature (35)..(417): NCBI GI NO: 7381054 NR Description: Zn and Cd transporter ZNT1 [Thlaspi caerulescens]
  misc_feature (23)..(417): NCBI GI NO: 21553732 NR Description: putative iron-regulated transporter
  misc_feature (23)..(225): NCBI GI NO: 40888862 NR Description: TPA: putative ZIP-like protein
MAFFEETESYYVPYLRAHLHQFAASVSAASCEEGAGDDEECRDEAAALRLKMVAVAAILIAGAVGVAIPLVGRRRRGGGGGGEGGSSGGGMFVLAKAFAAGVILATGFVHMMHDAEEKFADPCLPAMPWRRFPFPGFIAMLAALGTLVMEFVGTRFYERRHGEEAAAAAATAARDDTTALLEDGSLSGMAAAAMSGDDEKQDAMHIVGMRAHAAAHQHSHAHGHDACDGGAVYDAHAHAHAQGHGHDHGHGSEERPSQAHHVVVSQILETGIVSHSVIIGLSLGVSQSPCTIKPLVAALSFHQFFEGFALGGCISEAQFKNFSALLMAFFFAITTPAGITVGAGIASFYNANSPRALVVEGILDSMSSGILVYMALVDLIAADFLSRRMSCNPRLQVCSYVALFVGAIAMSSLAIWA

SEQ ID NO: 13204 - protein, 366 aa, Triticum aestivum
  peptide (1)..(366): Ceres Seq. ID no. 15178684
  misc_feature (157)..(235): Pfam Name: Pfam Description:  Cation efflux family
  misc_feature (1)..(144): NCBI GI NO: 40888856 NR Description: TPA: putative ZIP-like protein
  misc_feature (216)..(366): NCBI GI NO: 40888856 NR Description: TPA: putative ZIP-like protein
  misc_feature (1)..(366): NCBI GI NO: 18406954 NR Description: metal transporter, putative (IRT3)
  misc_feature (1)..(366): NCBI GI NO: 37079196 NR Description: Fe
  misc_feature (1)..(366): NCBI GI NO: 14582255 NR Description: ZIP-like zinc transporter [Thlaspi caerulescens]
  misc_feature (1)..(174): NCBI GI NO: 30526082 NR Description: putative ZIP-like zinc transporter
  misc_feature (184)..(366): NCBI GI NO: 30526082 NR Description: putative ZIP-like zinc transporter
  misc_feature (1)..(366): NCBI GI NO: 7381054 NR Description: Zn and Cd transporter ZNT1 [Thlaspi caerulescens]
  misc_feature (1)..(366): NCBI GI NO: 21553732 NR Description: putative iron-regulated transporter
  misc_feature (1)..(174): NCBI GI NO: 40888862 NR Description: TPA: putative ZIP-like protein
MVAVAAILIAGAVGVAIPLVGRRRRGGGGGGEGGSSGGGMFVLAKAFAAGVILATGFVHMMHDAEEKFADPCLPAMPWRRFPFPGFIAMLAALGTLVMEFVGTRFYERRHGEEAAAAAATAARDDTTALLEDGSLSGMAAAAMSGDDEKQDAMHIVGMRAHAAAHQHSHAHGHDACDGGAVYDAHAHAHAQGHGHDHGHGSEERPSQAHHVVVSQILETGIVSHSVIIGLSLGVSQSPCTIKPLVAALSFHQFFEGFALGGCISEAQFKNFSALLMAFFFAITTPAGITVGAGIASFYNANSPRALVVEGILDSMSSGILVYMALVDLIAADFLSRRMSCNPRLQVCSYVALFVGAIAMSSLAIWA

SEQ ID NO: 13205 - DNA, 1415 bp, Triticum aestivum
  misc_feature (1)..(1415): Ceres Seq. ID no. 13655218
aaaacctccaccgcgactgcgcgatcgatcgtcatctcatctcggcgtaccactactccctcaaacttgcccccttctcgatatcctgccttctcgtttacgtgctcggcgtgtgtgctagctagaggtgctgaacgaccgacatcggccggctgccatggggcgtggcgacggacacgacgacgcgctgcggcggtggctgcgggaagcgggcgggtggctggtggtcgacggggccctgggcacggagctggaggcgcacggcgcggacctgcaggacgagctctggagcgcccggtgcctcgtctccgctccccacctcatccgcaaggtccatctggactacctcgacgcaggcgccaacatcataaccacggcctcctaccaggccacgctgcaggggttccagtcgcgaggcgtgtcgagggagcagggcgaggcgctgctccggcggagcgtgcagatcgcgcaggaggcgcgcgccatcttcgtggaaggccggtcgaaaggcccctacgccgcgcgcgatgagtacgacggcgtggcgtccagagcgcaccggcccgtgctcgtggcggcctccgtcgggagctacggggcgtacctcgcggacggctccgagtacaccggggactatggcagatccgtcaccaaggaagcgctcaagaacttccacaggaggcggctccaggtgctggcggacgcagggccggatctcatcgccttcgagaccatcccaaacaagctggaagcacaggcttacgctgagctgttggaggagaacgacatcaggattcccgcctggttctccttcacctccaaggacggggccaacgcggcgagcggtgaccccatcaccgagtgcgccgccgtcgccgactcctgcaggagggtggccgccgtcgggataaactgcacggctcccaggctaatccatggcctcgtcctctccattagcaaggtgacgagcaagccgatcgtggtgtaccccaacaccggggagacgtacgtggccgagaccaaggagtgggtggactcggctgctgctggtggtggtgttgcggggacggacttcgtgtcgtgcgtcggcaagtggaggcaggcaggagcttccctcgtgggagggtgctgcaggacgggcccggcgacggtgagggccatcgcgcgggcgctgcgggaggaggatgctgccgccgacgccgataccgacgatgactaccctgccgtggccgtcctgtagagcctataggccaccctttctacatcgaccgcgatgctggcgtagaggtgtatgtagatcgtcgttctcatggccctgttgtgatgtaaatcgttatcatggctctttttgttatgacgaagcttggttctttgatctttctaattttagtcgtattctccgctgtgttgctgtc

SEQ ID NO: 13206 - protein, 360 aa, Triticum aestivum
  peptide (1)..(360): Ceres Seq. ID no. 13655219
  misc_feature (23)..(341): Pfam Name: Pfam Description:  Homocysteine S-methyltransferase
  misc_feature (1)..(208): NCBI GI NO: 34909958 NR Description: putative homocysteine S-methyltransferase-4
  misc_feature (228)..(360): NCBI GI NO: 34909958 NR Description: putative homocysteine S-methyltransferase-4
  misc_feature (10)..(360): NCBI GI NO: 10732791 NR Description: homocysteine S-methyltransferase-4 [Zea mays]
  misc_feature (3)..(339): NCBI GI NO: 37534456 NR Description: putative homocysteine S-methyltransferase-2
  misc_feature (6)..(341): NCBI GI NO: 10732789 NR Description: homocysteine S-methyltransferase-3 [Zea mays]
  misc_feature (8)..(341): NCBI GI NO: 10732787 NR Description: homocysteine S-methyltransferase-2 [Zea mays]
  misc_feature (14)..(346): NCBI GI NO: 18403505 NR Description: selenocysteine methyltransferase -related
  misc_feature (14)..(346): NCBI GI NO: 21593147 NR Description: putative selenocysteine methyltransferase
  misc_feature (9)..(339): NCBI GI NO: 15229396 NR Description: homocysteine S-methyltransferase AtHMT-2
  misc_feature (9)..(339): NCBI GI NO: 25453566 NR Description: homocysteine S-methyltransferase (EC 2
MGRGDGHDDALRRWLREAGGWLVVDGALGTELEAHGADLQDELWSARCLVSAPHLIRKVHLDYLDAGANIITTASYQATLQGFQSRGVSREQGEALLRRSVQIAQEARAIFVEGRSKGPYAARDEYDGVASRAHRPVLVAASVGSYGAYLADGSEYTGDYGRSVTKEALKNFHRRRLQVLADAGPDLIAFETIPNKLEAQAYAELLEENDIRIPAWFSFTSKDGANAASGDPITECAAVADSCRRVAAVGINCTAPRLIHGLVLSISKVTSKPIVVYPNTGETYVAETKEWVDSAAAGGGVAGTDFVSCVGKWRQAGASLVGGCCRTGPATVRAIARALREEDAAADADTDDDYPAVAVL

SEQ ID NO: 13207 - DNA, 1655 bp, Triticum aestivum
  misc_feature (1)..(1655): Ceres Seq. ID no. 13596984
ctagaacatcctaatcaaaaattgttccttctcccttgcttccatcttcctttgtatgcagccttcatgcatgactgactgtctaactagctcgagcagtagagctagtgcatgacgtgatggctccaacctccctgcagaggccgaggaagccgaggtgcccctcccaccccatgctctctctctcccctgccctcctctccctcctcctcgtccccttcctctacctcctcatccaccgttccgcgtgctccccgcccttcagcaacctcacgaccgccaggcgctcatcctcgagcgtgagcggcttcgccggagaccttcgtgacatcgagttctcgtggaaccacctgccgttcatgtcgtcgaagccaccccccgccaagctcaagatcgccgtgttctcgcggaagtggcccgtggccacggcccctggcggcatggagcggcacgcgcacacgctgcacacggcgctcgccgcgcggggccaccgcgtccacgtgttcacctcacctccgccgcataccgaggccgcgccctcgcccaccgccgatgggcctcagctgcatttccttgacggcacccccggccagtggcggtgcgacgaggcatggaagctgtacgaggccgagggcgacaacgatccgttcgacgtcatccactccgagagcgtggcggtgttccaccggtacgcgcgcggcgtgcccaacctggtcgtgtcgtggcacggaatctccctggaggcgctgcactcgggcatctaccaggacctcgcccgcggcgaggacgagcccatgtcgccggcgttcaaccagagcctgtcgcagtcggtgcaccgggtgctgtccgaggtgcgcttcttccggagctacgcgcaccaggtggccatcagcgactccaccagggagatgctccgcgacgtgtaccagatccccggccgccgcgtgcacgtaatcctgaacggcgtggacgaggcgcagttcactccggacacggagctcggccgcgccttccgggaagagatcgggctccccaagagcgccgacctcgtgctcggcgtgtccgggaggctcgtcaaggacaagggccaccctctgctctacgaggccttctccaagctcgccctccgccacccgaacgtgtacctcctggtcgccggcaaggggccgtgggagtcgaggtacatggacctgggacgcaacgccaaggtgcttggcgcggtgccgcccgggaagctcagggcgttctacaacgcgctggacgtgttcgtggacccgacgctgcggccgcagggcctggacctgacgctcatggaggcgatgcaatgcggcaagccggtggtggccacgcggttcccgagcatcaagggaagcatcgtggtggacgaggagttcggccacatgttcgcgcccaacgtggagtcgctgctagagagtctggaggcggtggtgcaggatggcgcccggcgcgccgcggagcgcggccgcgcgtgcagggagtacgccaggtccatgttcgcggccaccaagatggcactagcgtacgagaggctcttcctttgtgtcaaaaacgagaccttctgcatgtacccctctgaatttgattagttttctcgggagcctgtgcacttgcttagtgatttatggcacactaat

SEQ ID NO: 13208 - protein, 495 aa, Triticum aestivum
  peptide (1)..(495): Ceres Seq. ID no. 13596985
  misc_feature (295)..(460): Pfam Name: Pfam Description:  Glycosyl transferases group 1
  misc_feature (19)..(495): NCBI GI NO: 34911892 NR Description: OSJNBb0032K15.23
  misc_feature (10)..(491): NCBI GI NO: 21593749 NR Description: unknown [Arabidopsis thaliana]
  misc_feature (10)..(491): NCBI GI NO: 18415319 NR Description: glycosyltransferase family 1
  misc_feature (10)..(471): NCBI GI NO: 7487719 NR Description: hypothetical protein T5K18
  misc_feature (10)..(468): NCBI GI NO: 7486088 NR Description: hypothetical protein F24J7
  misc_feature (10)..(468): NCBI GI NO: 25407571 NR Description: hypothetical protein AT4g19460
  misc_feature (57)..(495): NCBI GI NO: 15219398 NR Description: glycosyltransferase family 1
  misc_feature (57)..(485): NCBI GI NO: 5903105 NR Description: Hypothetical protein [Arabidopsis thaliana]
  misc_feature (219)..(488): NCBI GI NO: 15237813 NR Description: glycosyltransferase family 1
  misc_feature (26)..(223): NCBI GI NO: 15237813 NR Description: glycosyltransferase family 1
MAPTSLQRPRKPRCPSHPMLSLSPALLSLLLVPFLYLLIHRSACSPPFSNLTTARRSSSSVSGFAGDLRDIEFSWNHLPFMSSKPPPAKLKIAVFSRKWPVATAPGGMERHAHTLHTALAARGHRVHVFTSPPPHTEAAPSPTADGPQLHFLDGTPGQWRCDEAWKLYEAEGDNDPFDVIHSESVAVFHRYARGVPNLVVSWHGISLEALHSGIYQDLARGEDEPMSPAFNQSLSQSVHRVLSEVRFFRSYAHQVAISDSTREMLRDVYQIPGRRVHVILNGVDEAQFTPDTELGRAFREEIGLPKSADLVLGVSGRLVKDKGHPLLYEAFSKLALRHPNVYLLVAGKGPWESRYMDLGRNAKVLGAVPPGKLRAFYNALDVFVDPTLRPQGLDLTLMEAMQCGKPVVATRFPSIKGSIVVDEEFGHMFAPNVESLLESLEAVVQDGARRAAERGRACREYARSMFAATKMALAYERLFLCVKNETFCMYPSEFD

SEQ ID NO: 13209 - protein, 477 aa, Triticum aestivum
  peptide (1)..(477): Ceres Seq. ID no. 13596986
  misc_feature (277)..(442): Pfam Name: Pfam Description:  Glycosyl transferases group 1
  misc_feature (1)..(477): NCBI GI NO: 34911892 NR Description: OSJNBb0032K15.23
  misc_feature (1)..(473): NCBI GI NO: 21593749 NR Description: unknown [Arabidopsis thaliana]
  misc_feature (1)..(473): NCBI GI NO: 18415319 NR Description: glycosyltransferase family 1
  misc_feature (1)..(453): NCBI GI NO: 7487719 NR Description: hypothetical protein T5K18
  misc_feature (1)..(450): NCBI GI NO: 7486088 NR Description: hypothetical protein F24J7
  misc_feature (1)..(450): NCBI GI NO: 25407571 NR Description: hypothetical protein AT4g19460
  misc_feature (39)..(477): NCBI GI NO: 15219398 NR Description: glycosyltransferase family 1
  misc_feature (39)..(467): NCBI GI NO: 5903105 NR Description: Hypothetical protein [Arabidopsis thaliana]
  misc_feature (201)..(470): NCBI GI NO: 15237813 NR Description: glycosyltransferase family 1
  misc_feature (8)..(205): NCBI GI NO: 15237813 NR Description: glycosyltransferase family 1
MLSLSPALLSLLLVPFLYLLIHRSACSPPFSNLTTARRSSSSVSGFAGDLRDIEFSWNHLPFMSSKPPPAKLKIAVFSRKWPVATAPGGMERHAHTLHTALAARGHRVHVFTSPPPHTEAAPSPTADGPQLHFLDGTPGQWRCDEAWKLYEAEGDNDPFDVIHSESVAVFHRYARGVPNLVVSWHGISLEALHSGIYQDLARGEDEPMSPAFNQSLSQSVHRVLSEVRFFRSYAHQVAISDSTREMLRDVYQIPGRRVHVILNGVDEAQFTPDTELGRAFREEIGLPKSADLVLGVSGRLVKDKGHPLLYEAFSKLALRHPNVYLLVAGKGPWESRYMDLGRNAKVLGAVPPGKLRAFYNALDVFVDPTLRPQGLDLTLMEAMQCGKPVVATRFPSIKGSIVVDEEFGHMFAPNVESLLESLEAVVQDGARRAAERGRACREYARSMFAATKMALAYERLFLCVKNETFCMYPSEFD

SEQ ID NO: 13210 - protein, 415 aa, Triticum aestivum
  peptide (1)..(415): Ceres Seq. ID no. 13596987
  misc_feature (215)..(380): Pfam Name: Pfam Description:  Glycosyl transferases group 1
  misc_feature (1)..(415): NCBI GI NO: 34911892 NR Description: OSJNBb0032K15.23
  misc_feature (1)..(411): NCBI GI NO: 21593749 NR Description: unknown [Arabidopsis thaliana]
  misc_feature (1)..(411): NCBI GI NO: 18415319 NR Description: glycosyltransferase family 1
  misc_feature (1)..(391): NCBI GI NO: 7487719 NR Description: hypothetical protein T5K18
  misc_feature (1)..(388): NCBI GI NO: 7486088 NR Description: hypothetical protein F24J7
  misc_feature (1)..(388): NCBI GI NO: 25407571 NR Description: hypothetical protein AT4g19460
  misc_feature (1)..(415): NCBI GI NO: 15219398 NR Description: glycosyltransferase family 1
  misc_feature (1)..(405): NCBI GI NO: 5903105 NR Description: Hypothetical protein [Arabidopsis thaliana]
  misc_feature (139)..(408): NCBI GI NO: 15237813 NR Description: glycosyltransferase family 1
  misc_feature (1)..(143): NCBI GI NO: 15237813 NR Description: glycosyltransferase family 1
MSSKPPPAKLKIAVFSRKWPVATAPGGMERHAHTLHTALAARGHRVHVFTSPPPHTEAAPSPTADGPQLHFLDGTPGQWRCDEAWKLYEAEGDNDPFDVIHSESVAVFHRYARGVPNLVVSWHGISLEALHSGIYQDLARGEDEPMSPAFNQSLSQSVHRVLSEVRFFRSYAHQVAISDSTREMLRDVYQIPGRRVHVILNGVDEAQFTPDTELGRAFREEIGLPKSADLVLGVSGRLVKDKGHPLLYEAFSKLALRHPNVYLLVAGKGPWESRYMDLGRNAKVLGAVPPGKLRAFYNALDVFVDPTLRPQGLDLTLMEAMQCGKPVVATRFPSIKGSIVVDEEFGHMFAPNVESLLESLEAVVQDGARRAAERGRACREYARSMFAATKMALAYERLFLCVKNETFCMYPSEFD

SEQ ID NO: 13211 - DNA, 801 bp, Triticum aestivum
  misc_feature (1)..(801): Ceres Seq. ID no. 13655330
gtatttcggtttcctcgattgcccccaatccgtggctgcgcgtccgccggtggccgggggttctaatccgagcgattcccaatcccaaccgccgctggaagaccccgcagctccacgacagcgcgggcagacatggcgcccgtactacctgcgccggcggcggcggcggctcctcccaccttctgccgcgtctctctcccggcccgcagcgccttcccctcctcccccgccaaaagccttcgcaggtttgcggccaggagcagcggcggcggcggccgtcccgagcccaaagcaggtgatgacgagagcaaggccgtccttgacgccttcttcctcgggaaggccttggcggaggcgctgacggagagggccgagtcggtggtgggcgaggtattcagcgtcgtcgggcagtggcaggcggagcagcagaagcaggtccaggaattccaggaggaagtagttcagagagcccaaaaggctaaggaaagagctgctgaggaggtcgttgatgataagggaccaaagactctaaagggaccttcaacaacaatcgtgacgcctgcacctatgtctcctccttctcctaatattcccacacaggcagaacagttataagcggcgatgaagagttagtgctgcatgtagactcacttttgtgctccaagaaagtgatgaaattctcctatgagatatgtattgatcaagttgtcctttctttgatagtgaatatccagaatatcaactagaaaaatctatggtacaagttccgagatgagtggaataaaaatctgttagtttgcc

SEQ ID NO: 13212 - protein, 160 aa, Triticum aestivum
  peptide (1)..(160): Ceres Seq. ID no. 13655331
  misc_feature (54)..(159): NCBI GI NO: 21553912 NR Description: unknown [Arabidopsis thaliana]
  misc_feature (54)..(129): NCBI GI NO: 15235625 NR Description: expressed protein [Arabidopsis thaliana]
  misc_feature (59)..(132): NCBI GI NO: 17232006 NR Description: hypothetical protein [Nostoc sp. PCC 7120]
  misc_feature (59)..(120): NCBI GI NO: 23130619 NR Description: hypothetical protein [Nostoc punctiforme]
MAPVLPAPAAAAAPPTFCRVSLPARSAFPSSPAKSLRRFAARSSGGGGRPEPKAGDDESKAVLDAFFLGKALAEALTERAESVVGEVFSVVGQWQAEQQKQVQEFQEEVVQRAQKAKERAAEEVVDDKGPKTLKGPSTTIVTPAPMSPPSPNIPTQAEQL

SEQ ID NO: 13213 - protein, 119 aa, Triticum aestivum
  peptide (1)..(119): Ceres Seq. ID no. 13655332
YFGFLDCPQSVAARPPVAGGSNPSDSQSQPPLEDPAAPRQRGQTWRPYYLRRRRRRLLPPSAASLSRPAAPSPPPPPKAFAGLRPGAAAAAAVPSPKQVMTRARPSLTPSSSGRPWRRR

SEQ ID NO: 13214 - protein, 98 aa, Triticum aestivum
  peptide (1)..(98): Ceres Seq. ID no. 13655333
ISVSSIAPNPWLRVRRWPGVLIRAIPNPNRRWKTPQLHDSAGRHGARTTCAGGGGGSSHLLPRLSPGPQRLPLLPRQKPSQVCGQEQRRRRPSRAQSR

SEQ ID NO: 13215 - DNA, 689 bp, Triticum aestivum
  misc_feature (1)..(689): Ceres Seq. ID no. 12585656
ccctcccacacacctccgcctccacaccacccgtcccgacccctctcctccaaggtaagcccgcggcggcggcgagcgagcgagcggcggcgatgacgacccgcttcaagaagaaccggaagaagcgcggccacgtgtccgccgggcacgggcgtgtgggcaagcaccgcaagcatcccggaggccgcggtaacgccggagacatgcaccaccaccgcatcctcttcgacaagtaccatcccggctacttcggcaaggtcggtatgcgctacttccacaagctcagcaacaggttctacacaccgacggtcaacgtcgagaggctctggtccatggttccgtccgacaaggcggcggaggccggcggcgacaaggcccccgtggtcgacgtctcgcagttcggctacttcaaggtgctcggcaaggggatgctgccggagaagcccatcgtcgtcaaggccaagctcatctccaagatcgccgaaaagaagatcaaggccgccggcggcgcagtcgtgctcgttgcctagggttctgttcccgaccgtgccccgagatctatatctgaactattagttgtttcccgtaccagcaatttgtgttgaagaagacatcgttagtttgttatcctggttcctgtgtggtaaaccaacatcttatgagaattttgcgctatgttatgccagttt

SEQ ID NO: 13216 - protein, 175 aa, Triticum aestivum
  peptide (1)..(175): Ceres Seq. ID no. 12585657
  misc_feature (137)..(169): Pfam Name: Pfam Description:  Ribosomal protein L15
  misc_feature (31)..(175): NCBI GI NO: 30017566 NR Description: putative ribosomal protein L27a
  misc_feature (31)..(175): NCBI GI NO: 23237917 NR Description: putative 60S ribosomal protein L27a
  misc_feature (31)..(175): NCBI GI NO: 3608481 NR Description: ribosomal protein L27a [Petunia x hybrida]
  misc_feature (31)..(175): NCBI GI NO: 15223190 NR Description: 60S ribosomal protein L27A; protein id:At1g70600
  misc_feature (31)..(175): NCBI GI NO: 21553702 NR Description: 60S ribosomal protein L27A [Arabidopsis thaliana]
  misc_feature (31)..(175): NCBI GI NO: 7959355 NR Description: 60S ribosomal protein L27a [Panax ginseng]
  misc_feature (31)..(175): NCBI GI NO: 15220698 NR Description: 60s ribosomal protein l27a
  misc_feature (33)..(175): NCBI GI NO: 22758850 NR Description: ribosomal protein L22 [Argopecten irradians]
  misc_feature (31)..(175): NCBI GI NO: 17509867 NR Description: Ribosomal protein L15 (16.2 kD)
  misc_feature (31)..(175): NCBI GI NO: 23612262 NR Description: 60S ribosomal protein L27a, putative
LPHTSASTPPVPTPLLQGKPAAAASERAAAMTTRFKKNRKKRGHVSAGHGRVGKHRKHPGGRGNAGDMHHHRILFDKYHPGYFGKVGMRYFHKLSNRFYTPTVNVERLWSMVPSDKAAEAGGDKAPVVDVSQFGYFKVLGKGMLPEKPIVVKAKLISKIAEKKIKAAGGAVVLVA

SEQ ID NO: 13217 - protein, 145 aa, Triticum aestivum
  peptide (1)..(145): Ceres Seq. ID no. 12585658
  misc_feature (107)..(139): Pfam Name: Pfam Description:  Ribosomal protein L15
  misc_feature (1)..(145): NCBI GI NO: 30017566 NR Description: putative ribosomal protein L27a
  misc_feature (1)..(145): NCBI GI NO: 23237917 NR Description: putative 60S ribosomal protein L27a
  misc_feature (1)..(145): NCBI GI NO: 3608481 NR Description: ribosomal protein L27a [Petunia x hybrida]
  misc_feature (1)..(145): NCBI GI NO: 15223190 NR Description: 60S ribosomal protein L27A; protein id:At1g70600
  misc_feature (1)..(145): NCBI GI NO: 21553702 NR Description: 60S ribosomal protein L27A [Arabidopsis thaliana]
  misc_feature (1)..(145): NCBI GI NO: 7959355 NR Description: 60S ribosomal protein L27a [Panax ginseng]
  misc_feature (1)..(145): NCBI GI NO: 15220698 NR Description: 60s ribosomal protein l27a
  misc_feature (3)..(145): NCBI GI NO: 22758850 NR Description: ribosomal protein L22 [Argopecten irradians]
  misc_feature (1)..(145): NCBI GI NO: 17509867 NR Description: Ribosomal protein L15 (16.2 kD)
  misc_feature (1)..(145): NCBI GI NO: 23612262 NR Description: 60S ribosomal protein L27a, putative
MTTRFKKNRKKRGHVSAGHGRVGKHRKHPGGRGNAGDMHHHRILFDKYHPGYFGKVGMRYFHKLSNRFYTPTVNVERLWSMVPSDKAAEAGGDKAPVVDVSQFGYFKVLGKGMLPEKPIVVKAKLISKIAEKKIKAAGGAVVLVA

SEQ ID NO: 13218 - protein, 108 aa, Triticum aestivum
  peptide (1)..(108): Ceres Seq. ID no. 12585659
  misc_feature (70)..(102): Pfam Name: Pfam Description:  Ribosomal protein L15
  misc_feature (1)..(108): NCBI GI NO: 30017566 NR Description: putative ribosomal protein L27a
  misc_feature (1)..(108): NCBI GI NO: 23237917 NR Description: putative 60S ribosomal protein L27a
  misc_feature (1)..(108): NCBI GI NO: 3608481 NR Description: ribosomal protein L27a [Petunia x hybrida]
  misc_feature (1)..(108): NCBI GI NO: 15223190 NR Description: 60S ribosomal protein L27A; protein id:At1g70600
  misc_feature (1)..(108): NCBI GI NO: 21553702 NR Description: 60S ribosomal protein L27A [Arabidopsis thaliana]
  misc_feature (1)..(108): NCBI GI NO: 7959355 NR Description: 60S ribosomal protein L27a [Panax ginseng]
  misc_feature (1)..(108): NCBI GI NO: 15220698 NR Description: 60s ribosomal protein l27a
  misc_feature (1)..(108): NCBI GI NO: 22758850 NR Description: ribosomal protein L22 [Argopecten irradians]
  misc_feature (1)..(108): NCBI GI NO: 17509867 NR Description: Ribosomal protein L15 (16.2 kD)
  misc_feature (1)..(108): NCBI GI NO: 23612262 NR Description: 60S ribosomal protein L27a, putative
MHHHRILFDKYHPGYFGKVGMRYFHKLSNRFYTPTVNVERLWSMVPSDKAAEAGGDKAPVVDVSQFGYFKVLGKGMLPEKPIVVKAKLISKIAEKKIKAAGGAVVLVA

SEQ ID NO: 13219 - DNA, 948 bp, Triticum aestivum
  misc_feature (1)..(948): Ceres Seq. ID no. 12587066
attcaataccatctcccagtcaagtaaggggagagaagcagaggagcagcagccaatagccgcccacggagatagccagagccagagagcaaggcgtggaattcgagagatcggagggaggaggatgatggagcggcaggacgaggcgtggtgctcgtgctcgccgaggcagtgcaggatttgccacgaggaggaaagggacgacggctgcgtaaccgcaaccgcaaccgcaaccgccatggagtctccctgcggatgctctggctccctcaagtatgctcacagggggtgcgtgcagagatggtgcgacgagaaggggagcaccgtctgcgagatttgcctccagaattacgagcctggatacaccgctgctcccaagaaaactcaagttgctcatgtcgcagtcaccatcagagggagcctggaggtcccaaggcaggattatgaggcaccggagcatgccccgttgatcgggctcgacgcggcggcgggcgacccggcctacgctgagtgcgcgagtgccgccggcagaagtgctgcctggtgccggtcggtgacggtgacgttcactgttgtgttgctgctgaggcatctcattgccctggtgaccgtcggcgccgcgaatcaatacgccttcagcctgctgacgatatacttgctgagggcgagtgggatcttgctgccgttctacgtcctcatgcggcttatctccgcggtgcagcacggccagatgcagtaccggctgcagatgctccaggagcaaagaaggaacgcatcaagaatgcaacacagggtgcctggtcagggacaacggcagcatgtgattcttgttgtgtgaggagaacagtgaagtggatgttgtcctctggaatagtcttaaatgtattattattgatgttgatcaaggagcaattaggaaaaaagaaaagagaaagttcataagctttc

SEQ ID NO: 13220 - protein, 278 aa, Triticum aestivum
  peptide (1)..(278): Ceres Seq. ID no. 12587067
  misc_feature (58)..(113): Pfam Name: RING finger Pfam Description: Zinc finger, C3HC4 type
  misc_feature (43)..(277): NCBI GI NO: 34905532 NR Description: B1146F03.23
  misc_feature (47)..(274): NCBI GI NO: 25518349 NR Description: hypothetical protein T14P4
  misc_feature (57)..(240): NCBI GI NO: 18411826 NR Description: Expressed protein; protein id: At4g02075
  misc_feature (54)..(237): NCBI GI NO: 22325409 NR Description: similar to nucleoside triphosphatase, putative
  misc_feature (57)..(254): NCBI GI NO: 15227065 NR Description: unknown protein; protein id: At2g02960
  misc_feature (54)..(266): NCBI GI NO: 15223693 NR Description: nucleoside triphosphatase, putative
  misc_feature (54)..(266): NCBI GI NO: 26451292 NR Description: unknown protein [Arabidopsis thaliana]
  misc_feature (54)..(266): NCBI GI NO: 21537046 NR Description: nucleoside triphosphatase, putative
  misc_feature (57)..(272): NCBI GI NO: 18424590 NR Description: expressed protein; protein id: At5g62460
  misc_feature (51)..(240): NCBI GI NO: 15240828 NR Description: putative protein; protein id: At5g38070.1
FNTISQSSKGREAEEQQPIAAHGDSQSQRARRGIREIGGRRMMERQDEAWCSCSPRQCRICHEEERDDGCVTATATATAMESPCGCSGSLKYAHRGCVQRWCDEKGSTVCEICLQNYEPGYTAAPKKTQVAHVAVTIRGSLEVPRQDYEAPEHAPLIGLDAAAGDPAYAECASAAGRSAAWCRSVTVTFTVVLLLRHLIALVTVGAANQYAFSLLTIYLLRASGILLPFYVLMRLISAVQHGQMQYRLQMLQEQRRNASRMQHRVPGQGQRQHVILVV

SEQ ID NO: 13221 - protein, 237 aa, Triticum aestivum
  peptide (1)..(237): Ceres Seq. ID no. 12587068
  misc_feature (17)..(72): Pfam Name: RING finger Pfam Description: Zinc finger, C3HC4 type
  misc_feature (2)..(236): NCBI GI NO: 34905532 NR Description: B1146F03.23
  misc_feature (6)..(233): NCBI GI NO: 25518349 NR Description: hypothetical protein T14P4
  misc_feature (16)..(199): NCBI GI NO: 18411826 NR Description: Expressed protein; protein id: At4g02075
  misc_feature (13)..(196): NCBI GI NO: 22325409 NR Description: similar to nucleoside triphosphatase, putative
  misc_feature (16)..(213): NCBI GI NO: 15227065 NR Description: unknown protein; protein id: At2g02960
  misc_feature (13)..(225): NCBI GI NO: 15223693 NR Description: nucleoside triphosphatase, putative
  misc_feature (13)..(225): NCBI GI NO: 21537046 NR Description: nucleoside triphosphatase, putative
  misc_feature (13)..(225): NCBI GI NO: 26451292 NR Description: unknown protein [Arabidopsis thaliana]
  misc_feature (16)..(231): NCBI GI NO: 18424590 NR Description: expressed protein; protein id: At5g62460
  misc_feature (10)..(199): NCBI GI NO: 15240828 NR Description: putative protein; protein id: At5g38070.1
MMERQDEAWCSCSPRQCRICHEEERDDGCVTATATATAMESPCGCSGSLKYAHRGCVQRWCDEKGSTVCEICLQNYEPGYTAAPKKTQVAHVAVTIRGSLEVPRQDYEAPEHAPLIGLDAAAGDPAYAECASAAGRSAAWCRSVTVTFTVVLLLRHLIALVTVGAANQYAFSLLTIYLLRASGILLPFYVLMRLISAVQHGQMQYRLQMLQEQRRNASRMQHRVPGQGQRQHVILVV

SEQ ID NO: 13222 - protein, 236 aa, Triticum aestivum
  peptide (1)..(236): Ceres Seq. ID no. 12587069
  misc_feature (16)..(71): Pfam Name: RING finger Pfam Description: Zinc finger, C3HC4 type
  misc_feature (1)..(235): NCBI GI NO: 34905532 NR Description: B1146F03.23
  misc_feature (5)..(232): NCBI GI NO: 25518349 NR Description: hypothetical protein T14P4
  misc_feature (15)..(198): NCBI GI NO: 18411826 NR Description: Expressed protein; protein id: At4g02075
  misc_feature (12)..(195): NCBI GI NO: 22325409 NR Description: similar to nucleoside triphosphatase, putative
  misc_feature (15)..(212): NCBI GI NO: 15227065 NR Description: unknown protein; protein id: At2g02960
  misc_feature (12)..(224): NCBI GI NO: 15223693 NR Description: nucleoside triphosphatase, putative
  misc_feature (12)..(224): NCBI GI NO: 26451292 NR Description: unknown protein [Arabidopsis thaliana]
  misc_feature (12)..(224): NCBI GI NO: 21537046 NR Description: nucleoside triphosphatase, putative
  misc_feature (15)..(230): NCBI GI NO: 18424590 NR Description: expressed protein; protein id: At5g62460
  misc_feature (9)..(198): NCBI GI NO: 15240828 NR Description: putative protein; protein id: At5g38070.1
MERQDEAWCSCSPRQCRICHEEERDDGCVTATATATAMESPCGCSGSLKYAHRGCVQRWCDEKGSTVCEICLQNYEPGYTAAPKKTQVAHVAVTIRGSLEVPRQDYEAPEHAPLIGLDAAAGDPAYAECASAAGRSAAWCRSVTVTFTVVLLLRHLIALVTVGAANQYAFSLLTIYLLRASGILLPFYVLMRLISAVQHGQMQYRLQMLQEQRRNASRMQHRVPGQGQRQHVILVV

SEQ ID NO: 13223 - DNA, 1289 bp, Triticum aestivum
  misc_feature (1)..(1289): Ceres Seq. ID no. 14303612
ttcccctctcgcgcgcccgcccacgggatttcctcctccgccgccgccctccctccctccatcgtcagatctatccatccgtaagcaccccacctgctttccactcgatccgcgcgcccctcccgccgccgtcgccggcccttcatctgactccccccctcccctctccgcctcctcgccgctgcaggtgattccgtcgggggcgggccacatggcgtccacggctgcggcggcgctcgcggtgacggacgagctggccctgccgctccgcgcggtgggggacctggcggcggccgccggggtctcgcgggaggaggtcgtcgtcatcacgcagtgcgcctcgctcggtgggaagttgccttttgatgatgcatcggtgggtgctgttctatatgtcataaaaaatgtggagagctttggggataagttggttgctgaaattagccgagtgctgaaagctggtggaattgtgctggtacagagcttcacaccctctgctgatcagaagccaaacaattatatcgagcgccagctactcatgggaggttttgttgaagtgcaagcttctgccacaagctcgcaggatagtgtgcaatctgttactatcaaggcaaagaagccctcgtggagtatgggttcttccttccccctgaagaaagcagtaaaggctcttccaaagattgaaattgacgacgatgatgaactgattgacgaagacagcctcttgactgaggaggacttgaagaagccacagcttccagttgtaggagattgtgaggtgggagctacaaagaaggcatgcaagaactgcagttgtggcagggccgaggctgagcaggtggagaagctggggctcactgcagaacagattgataaccctgtctcagcttgtggcagttgtgggttgggcgacgccttccgatgcagcacctgcccatacagaggcctggcgccgttcaagttgggcgagaaggttaccttgtctgacaacttcctctcggccgacatatgatgacggacagcagctgcggatatgaaatgtgccttgttggatttgttggttcgttaggaagatatatctgcgtacgtttttttcgtggtgatggtggttacagcaaaagaagagtgcgtttggagtagcagctcgtgttagcatgtcgtgcgtgtccttgctctcccacctaggctgaagcgagaattggatcgtgtgtgcgcctctgtattcggcaagaagattacatgcatgtaatttgacgaagaaacatatgatggaaagactttgatctgcc

SEQ ID NO: 13224 - protein, 336 aa, Triticum aestivum
  peptide (1)..(336): Ceres Seq. ID no. 14303613
  misc_feature (180)..(328): Pfam Name: DUF689 Pfam Description: Protein of unknown function
  misc_feature (71)..(336): NCBI GI NO: 38344920 NR Description: OSJNBa0018M05.11
  misc_feature (71)..(336): NCBI GI NO: 32488638 NR Description: OSJNBa0032F06.14
  misc_feature (79)..(336): NCBI GI NO: 18418605 NR Description: expressed protein [Arabidopsis thaliana]
  misc_feature (79)..(336): NCBI GI NO: 30686798 NR Description: expressed protein [Arabidopsis thaliana]
  misc_feature (79)..(336): NCBI GI NO: 19424097 NR Description: unknown protein [Arabidopsis thaliana]
  misc_feature (132)..(336): NCBI GI NO: 2293332 NR Description: unknown [Dictyostelium discoideum]
  misc_feature (138)..(336): NCBI GI NO: 17933742 NR Description: lethal (2) 35Bg CG4180-PA
  misc_feature (132)..(336): NCBI GI NO: 31237546 NR Description: ENSANGP00000013898 [Anopheles gambiae]
  misc_feature (141)..(331): NCBI GI NO: 17555168 NR Description: PRO0915 like (25.6 kD) (3I468)
  misc_feature (127)..(332): NCBI GI NO: 3252825 NR Description: Unknown gene product [Homo sapiens]
SPLARPPTGFPPPPPPSLPPSSDLSIRKHPTCFPLDPRAPPAAVAGPSSDSPPPLSASSPLQVIPSGAGHMASTAAAALAVTDELALPLRAVGDLAAAAGVSREEVVVITQCASLGGKLPFDDASVGAVLYVIKNVESFGDKLVAEISRVLKAGGIVLVQSFTPSADQKPNNYIERQLLMGGFVEVQASATSSQDSVQSVTIKAKKPSWSMGSSFPLKKAVKALPKIEIDDDDELIDEDSLLTEEDLKKPQLPVVGDCEVGATKKACKNCSCGRAEAEQVEKLGLTAEQIDNPVSACGSCGLGDAFRCSTCPYRGLAPFKLGEKVTLSDNFLSADI

SEQ ID NO: 13225 - protein, 266 aa, Triticum aestivum
  peptide (1)..(266): Ceres Seq. ID no. 14303614
  misc_feature (110)..(258): Pfam Name: DUF689 Pfam Description: Protein of unknown function
  misc_feature (1)..(266): NCBI GI NO: 38344920 NR Description: OSJNBa0018M05.11
  misc_feature (1)..(266): NCBI GI NO: 32488638 NR Description: OSJNBa0032F06.14
  misc_feature (9)..(266): NCBI GI NO: 18418605 NR Description: expressed protein [Arabidopsis thaliana]
  misc_feature (9)..(266): NCBI GI NO: 30686798 NR Description: expressed protein [Arabidopsis thaliana]
  misc_feature (9)..(266): NCBI GI NO: 19424097 NR Description: unknown protein [Arabidopsis thaliana]
  misc_feature (62)..(266): NCBI GI NO: 2293332 NR Description: unknown [Dictyostelium discoideum]
  misc_feature (68)..(266): NCBI GI NO: 17933742 NR Description: lethal (2) 35Bg CG4180-PA
  misc_feature (62)..(266): NCBI GI NO: 31237546 NR Description: ENSANGP00000013898 [Anopheles gambiae]
  misc_feature (71)..(261): NCBI GI NO: 17555168 NR Description: PRO0915 like (25.6 kD) (3I468)
  misc_feature (57)..(262): NCBI GI NO: 3252825 NR Description: Unknown gene product [Homo sapiens]
MASTAAAALAVTDELALPLRAVGDLAAAAGVSREEVVVITQCASLGGKLPFDDASVGAVLYVIKNVESFGDKLVAEISRVLKAGGIVLVQSFTPSADQKPNNYIERQLLMGGFVEVQASATSSQDSVQSVTIKAKKPSWSMGSSFPLKKAVKALPKIEIDDDDELIDEDSLLTEEDLKKPQLPVVGDCEVGATKKACKNCSCGRAEAEQVEKLGLTAEQIDNPVSACGSCGLGDAFRCSTCPYRGLAPFKLGEKVTLSDNFLSADI

SEQ ID NO: 13226 - DNA, 920 bp, Triticum aestivum
  misc_feature (1)..(920): Ceres Seq. ID no. 12585194
agatacaaatacatcccggcgaaaatcaggcaggcggagcatggaagggaggagcacggccgccgcgatgtcgtcggagccggtgaggctcatcggctgcttcgccagcccggtggtccaccgcgccgagctggccctgcgcctcaagggcgtcccctacgagctcatcgaggaggacctcaacaacaagagcgagctgctgctgacgcacaaccccatccacaagaccgtccccgtgctcctccacggcgaccgctccatcccggagtcgctcgtcatcgtcgagtatgtcgacgaggccttccccgccggcccgccgctcctccccgtcgaccccctcgcccgtgcaaccgcccgcttctgggtccgattcctcgaagaggaggagtgcaagaagcctatgtggatcgcgctgtgggcggacggcgaggcgcaggctgcggcggcgagggagacgaaggagaagctggcgctgctggaggcgcagctgccggaggggaagaggttcttcggcggcgacgccatcggcttcctcgacatcgccgccggcggggcgctcgcgcactggatgggggtgttcgaggagatggccggggtgcggctgctcaccgaggaggcgcacccggcgctgtgccgctgggcgagggagtacagggccgacgagaccgtgcgtgggtgcctcccggacaggtcccgcgtgctcgctgccttggcggcgaggaaggatctgtatgtctccattgctaaggccatggctgcacagaagtagtagcacggttcacgaccaagaaggggatatgcatgcttgtgaccatggcgtactggtcaatgatgctgaaatcagggctatgtatacatgtcgatgcatatccatagtggatccaatgttcttggaataaaaagaagggaaaagtgcgtcc

SEQ ID NO: 13227 - protein, 255 aa, Triticum aestivum
  peptide (1)..(255): Ceres Seq. ID no. 12585195
  misc_feature (108)..(221): Pfam Name: Pfam Description:  Glutathione S-transferase, C-terminal domain
  misc_feature (21)..(254): NCBI GI NO: 19386822 NR Description: putative glutathione S-transferase GST 24
  misc_feature (23)..(252): NCBI GI NO: 11385509 NR Description: glutathione S-transferase GST 29 [Zea mays]
  misc_feature (24)..(250): NCBI GI NO: 19386816 NR Description: putative glutathione S-transferase GST 24
  misc_feature (24)..(250): NCBI GI NO: 13699857 NR Description: glutathione S-transferase GST 24 [Zea mays]
  misc_feature (25)..(254): NCBI GI NO: 4468798 NR Description: GST7 protein [Zea mays]
  misc_feature (28)..(255): NCBI GI NO: 34896730 NR Description: putative glutathione transferase
  misc_feature (28)..(250): NCBI GI NO: 11385507 NR Description: glutathione S-transferase GST 28 [Zea mays]
  misc_feature (28)..(250): NCBI GI NO: 19386820 NR Description: putative glutathione S-transferase GST 24
  misc_feature (25)..(254): NCBI GI NO: 19386818 NR Description: putative glutathione S-transferase GST 24
  misc_feature (26)..(243): NCBI GI NO: 19386817 NR Description: putative glutathione S-transferase GST 24
DTNTSRRKSGRRSMEGRSTAAAMSSEPVRLIGCFASPVVHRAELALRLKGVPYELIEEDLNNKSELLLTHNPIHKTVPVLLHGDRSIPESLVIVEYVDEAFPAGPPLLPVDPLARATARFWVRFLEEEECKKPMWIALWADGEAQAAAARETKEKLALLEAQLPEGKRFFGGDAIGFLDIAAGGALAHWMGVFEEMAGVRLLTEEAHPALCRWAREYRADETVRGCLPDRSRVLAALAARKDLYVSIAKAMAAQK

SEQ ID NO: 13228 - protein, 248 aa, Triticum aestivum
  peptide (1)..(248): Ceres Seq. ID no. 12585196
  misc_feature (26)..(223): NCBI GI NO: 15827818 NR Description: initiation factor IF-2 [Mycobacterium leprae]
  misc_feature (31)..(241): NCBI GI NO: 23106420 NR Description: hypothetical protein [Azotobacter vinelandii]
RYKYIPAKIRQAEHGREEHGRRDVVGAGEAHRLLRQPGGPPRRAGPAPQGRPLRAHRGGPQQQERAAADAQPHPQDRPRAPPRRPLHPGVARHRRVCRRGLPRRPAAPPRRPPRPCNRPLLGPIPRRGGVQEAYVDRAVGGRRGAGCGGEGDEGEAGAAGGAAAGGEEVLRRRRHRLPRHRRRRGARALDGGVRGDGRGAAAHRGGAPGAVPLGEGVQGRRDRAWVPPGQVPRARCLGGEEGSVCLHC

SEQ ID NO: 13229 - protein, 242 aa, Triticum aestivum
  peptide (1)..(242): Ceres Seq. ID no. 12585197
  misc_feature (95)..(208): Pfam Name: Pfam Description:  Glutathione S-transferase, C-terminal domain
  misc_feature (8)..(241): NCBI GI NO: 19386822 NR Description: putative glutathione S-transferase GST 24
  misc_feature (10)..(239): NCBI GI NO: 11385509 NR Description: glutathione S-transferase GST 29 [Zea mays]
  misc_feature (11)..(237): NCBI GI NO: 19386816 NR Description: putative glutathione S-transferase GST 24
  misc_feature (11)..(237): NCBI GI NO: 13699857 NR Description: glutathione S-transferase GST 24 [Zea mays]
  misc_feature (12)..(241): NCBI GI NO: 4468798 NR Description: GST7 protein [Zea mays]
  misc_feature (15)..(242): NCBI GI NO: 34896730 NR Description: putative glutathione transferase
  misc_feature (15)..(237): NCBI GI NO: 11385507 NR Description: glutathione S-transferase GST 28 [Zea mays]
  misc_feature (15)..(237): NCBI GI NO: 19386820 NR Description: putative glutathione S-transferase GST 24
  misc_feature (12)..(241): NCBI GI NO: 19386818 NR Description: putative glutathione S-transferase GST 24
  misc_feature (13)..(230): NCBI GI NO: 19386817 NR Description: putative glutathione S-transferase GST 24
MEGRSTAAAMSSEPVRLIGCFASPVVHRAELALRLKGVPYELIEEDLNNKSELLLTHNPIHKTVPVLLHGDRSIPESLVIVEYVDEAFPAGPPLLPVDPLARATARFWVRFLEEEECKKPMWIALWADGEAQAAAARETKEKLALLEAQLPEGKRFFGGDAIGFLDIAAGGALAHWMGVFEEMAGVRLLTEEAHPALCRWAREYRADETVRGCLPDRSRVLAALAARKDLYVSIAKAMAAQK

SEQ ID NO: 13230 - DNA, 1027 bp, Triticum aestivum
  misc_feature (1)..(1027): Ceres Seq. ID no. 12564952
gtacaggtaacatcaaattccctcttcgtagtctggaggcgggagattcggaagccatggcggaggagcagttcctggccgcagctgtgggcgccgccaagagcgccggcgagattatccgcaagagcttttacctaaccaagaatgtggagcacaagggccaggtggatttggtgacggagacggacaaggcctgcgaggatctcatcttcaaccacctccggatgctctacccggaccacaagttcatcggcgaggagacgtctgcagccctcggttccaccgatgacctcacctacgaccccacctggatagtcgaccccctcgatggcaccaccaatttcgttcatggctttccttttgtgtgcgtctcgattggcctcaccattgggaagattcccaccgttgcagttgtgtacaaccccatcatgaatgagcttttcacagctgttcgtggaaaaggtgcttttctcaatggttctccaattaaaacatcgcctcaaaatgagttggtgaaggctcttatggtgacagaggtagggaccaaaagagacaagtccactttggatgatacaaccaacagaattaataagttactattcaagattagatctatacgtatgtgtggctctttggctctaaacatgtgtggagttgcttgtggtaggctagatttgtgttatgagatcggttttggtggcccctgggatgtggctgctggagctttgattctaaaggaagctgggggttttgtttttgatccgagcggtgatgagtttgatctgatggcgcaaagaatggcaggatcaaatggccacctcaaggatcagttcatcaaagcattgggagatgcaagctgaataacttatttctcttttcaagtagaatgaaagaatgtaagatggccccaccaataagtaattaagggctaatttttgtgtagttttaagtggacactatatgcatattttgcaaacatggcggatgtaatgacatgtggatatattgctcgttttattgaccatgc

SEQ ID NO: 13231 - protein, 285 aa, Triticum aestivum
  peptide (1)..(285): Ceres Seq. ID no. 12564953
  misc_feature (22)..(283): NCBI GI NO: 1709205 NR Description: Inositol-1
  misc_feature (15)..(281): NCBI GI NO: 15232993 NR Description: putative myo-inositol monophosphatase
  misc_feature (22)..(281): NCBI GI NO: 21553679 NR Description: putative myo-inositol monophosphatase
  misc_feature (24)..(284): NCBI GI NO: 3914097 NR Description: Inositol-1
  misc_feature (22)..(281): NCBI GI NO: 1709203 NR Description: Inositol-1
  misc_feature (22)..(284): NCBI GI NO: 1709204 NR Description: Inositol-1
  misc_feature (22)..(281): NCBI GI NO: 30143275 NR Description: myo inositol monophosphatase isoform 1
  misc_feature (22)..(284): NCBI GI NO: 30143277 NR Description: myo inositol monophosphatase isoform 2
  misc_feature (22)..(281): NCBI GI NO: 21357329 NR Description: CG9391-PA [Drosophila melanogaster]
  misc_feature (28)..(281): NCBI GI NO: 27805945 NR Description: inositol(myo)-1(or 4)-monophosphatase 1
TGNIKFPLRSLEAGDSEAMAEEQFLAAAVGAAKSAGEIIRKSFYLTKNVEHKGQVDLVTETDKACEDLIFNHLRMLYPDHKFIGEETSAALGSTDDLTYDPTWIVDPLDGTTNFVHGFPFVCVSIGLTIGKIPTVAVVYNPIMNELFTAVRGKGAFLNGSPIKTSPQNELVKALMVTEVGTKRDKSTLDDTTNRINKLLFKIRSIRMCGSLALNMCGVACGRLDLCYEIGFGGPWDVAAGALILKEAGGFVFDPSGDEFDLMAQRMAGSNGHLKDQFIKALGDAS

SEQ ID NO: 13232 - protein, 267 aa, Triticum aestivum
  peptide (1)..(267): Ceres Seq. ID no. 12564954
  misc_feature (4)..(265): NCBI GI NO: 1709205 NR Description: Inositol-1
  misc_feature (1)..(263): NCBI GI NO: 15232993 NR Description: putative myo-inositol monophosphatase
  misc_feature (4)..(263): NCBI GI NO: 21553679 NR Description: putative myo-inositol monophosphatase
  misc_feature (6)..(266): NCBI GI NO: 3914097 NR Description: Inositol-1
  misc_feature (4)..(263): NCBI GI NO: 1709203 NR Description: Inositol-1
  misc_feature (4)..(266): NCBI GI NO: 1709204 NR Description: Inositol-1
  misc_feature (4)..(263): NCBI GI NO: 30143275 NR Description: myo inositol monophosphatase isoform 1
  misc_feature (4)..(266): NCBI GI NO: 30143277 NR Description: myo inositol monophosphatase isoform 2
  misc_feature (4)..(263): NCBI GI NO: 21357329 NR Description: CG9391-PA [Drosophila melanogaster]
  misc_feature (10)..(263): NCBI GI NO: 27805945 NR Description: inositol(myo)-1(or 4)-monophosphatase 1
MAEEQFLAAAVGAAKSAGEIIRKSFYLTKNVEHKGQVDLVTETDKACEDLIFNHLRMLYPDHKFIGEETSAALGSTDDLTYDPTWIVDPLDGTTNFVHGFPFVCVSIGLTIGKIPTVAVVYNPIMNELFTAVRGKGAFLNGSPIKTSPQNELVKALMVTEVGTKRDKSTLDDTTNRINKLLFKIRSIRMCGSLALNMCGVACGRLDLCYEIGFGGPWDVAAGALILKEAGGFVFDPSGDEFDLMAQRMAGSNGHLKDQFIKALGDAS

SEQ ID NO: 13233 - protein, 211 aa, Triticum aestivum
  peptide (1)..(211): Ceres Seq. ID no. 12564955
  misc_feature (1)..(209): NCBI GI NO: 1709205 NR Description: Inositol-1
  misc_feature (1)..(207): NCBI GI NO: 15232993 NR Description: putative myo-inositol monophosphatase
  misc_feature (1)..(207): NCBI GI NO: 21553679 NR Description: putative myo-inositol monophosphatase
  misc_feature (1)..(210): NCBI GI NO: 3914097 NR Description: Inositol-1
  misc_feature (1)..(207): NCBI GI NO: 1709203 NR Description: Inositol-1
  misc_feature (1)..(210): NCBI GI NO: 1709204 NR Description: Inositol-1
  misc_feature (1)..(207): NCBI GI NO: 30143275 NR Description: myo inositol monophosphatase isoform 1
  misc_feature (1)..(210): NCBI GI NO: 30143277 NR Description: myo inositol monophosphatase isoform 2
  misc_feature (1)..(207): NCBI GI NO: 21357329 NR Description: CG9391-PA [Drosophila melanogaster]
  misc_feature (1)..(207): NCBI GI NO: 27805945 NR Description: inositol(myo)-1(or 4)-monophosphatase 1
MLYPDHKFIGEETSAALGSTDDLTYDPTWIVDPLDGTTNFVHGFPFVCVSIGLTIGKIPTVAVVYNPIMNELFTAVRGKGAFLNGSPIKTSPQNELVKALMVTEVGTKRDKSTLDDTTNRINKLLFKIRSIRMCGSLALNMCGVACGRLDLCYEIGFGGPWDVAAGALILKEAGGFVFDPSGDEFDLMAQRMAGSNGHLKDQFIKALGDAS

SEQ ID NO: 13234 - DNA, 1451 bp, Triticum aestivum
  misc_feature (1)..(1451): Ceres Seq. ID no. 13655338
aaaatttggtccagcgaacgcagagcggataccaaccaggtgagccatcaaagccgcttctcttcccctaaaacctagcccgcaaatcccaatccagcccacgcgcctcccccccaaaccctcgtccccaagctcgcgaacctcgccgccgccaccgcccgcaccaccaccggccgctccgcgcgaccgcccaccatggcgcgtaacgaggagaaggcgcagtccatgctgaaccgcttcatcacgatgaagcaggaggagaagcgcaagccccgcgagcgccggccgtacctcgcctccgagtgccgggacctcgctgacgccgaccgctggcgtggagagatcctgcgcgagatcggcgtcaaggtcgccgagatccagaacgagggcctcggggagcaccgcctccgagacctcaacgacgagatcaacaagctcctccgcgagcgcagccactgggagcgccgcatcctcgagctcggaggccgcgactactctcgcagctccaacgccgccctcatgaccgacctcgacggcaacatcgtcgccatccccaacccctccggccggggcccaggctaccgctactttggcgctgccaagaagctccccggcgtccgtgagctatttgacaagccacctgaggtccgcaagcgccgcacccgctatgagatccacaagcgcatcaatgccgggtactacggatactatgacgatgaggacggtgtgcttgagccccttgaggctgctgccgagaagcgcatgcgggacgaggttgtcacggagtggcaccgggtggagcgtgtgcggcgggaggccatgaagaatgtggtgagtggcgaggtggctgcagcaggtgggcgtggtggggaagctgctagggaggtgctgttcgaggaggtggaggaggaggttgaggaggagaggaggctggaggaagagaggatggaaagagagaagggggaagaggctgggagggagtttgtcgcacatgtgccgctccctgatgagaaggagattgagcggatggtgctagagaagaagaagaaggagctgctcagcaagtacacaagtgataccctgcaaggcgagcagaaggaggctaaggagatgctcaatgtgcaacgctaggagagatgttggccattgctgaatccttcacggtattgagacgagtgaagtgcgaggagcaatatgtgcagtgctggacaagcgttgacgcaaccctagaagatctgatgctgaaaacgctgaagggcttcgctgcaatcatgttgatcgatgtgatgtttattaccctagaatgattgatgccaaaagggtaaacctgagatagtggtggtgaaccgtcactgtgcatggatgtgctgtattcactggcactgtacaagtacatccattggctacgcatatatctaaaaaactactagaccataatgaaagcaattctg

SEQ ID NO: 13235 - protein, 311 aa, Triticum aestivum
  peptide (1)..(311): Ceres Seq. ID no. 13655339
  misc_feature (1)..(291): Pfam Name: Pfam Description:  Isy1-like splicing family
  misc_feature (1)..(311): NCBI GI NO: 15230193 NR Description: expressed protein [Arabidopsis thaliana]
  misc_feature (1)..(307): NCBI GI NO: 13938521 NR Description: Unknown (protein for MGC:2431) [Homo sapiens]
  misc_feature (1)..(306): NCBI GI NO: 34856385 NR Description: similar to RIKEN cDNA 5830446M03
  misc_feature (1)..(208): NCBI GI NO: 6330157 NR Description: KIAA1160 protein [Homo sapiens]
  misc_feature (1)..(279): NCBI GI NO: 38174132 NR Description: Unknown (protein for MGC:76019)
  misc_feature (1)..(248): NCBI GI NO: 20149316 NR Description: expressed sequence AU020769 [Mus musculus]
  misc_feature (1)..(208): NCBI GI NO: 20149304 NR Description: KIAA1160 protein [Homo sapiens]
  misc_feature (1)..(248): NCBI GI NO: 12857516 NR Description: unnamed protein product [Mus musculus]
  misc_feature (7)..(295): NCBI GI NO: 24644974 NR Description: CG9667-PA [Drosophila melanogaster]
  misc_feature (1)..(230): NCBI GI NO: 19527549 NR Description: RE31520p [Drosophila melanogaster]
MARNEEKAQSMLNRFITMKQEEKRKPRERRPYLASECRDLADADRWRGEILREIGVKVAEIQNEGLGEHRLRDLNDEINKLLRERSHWERRILELGGRDYSRSSNAALMTDLDGNIVAIPNPSGRGPGYRYFGAAKKLPGVRELFDKPPEVRKRRTRYEIHKRINAGYYGYYDDEDGVLEPLEAAAEKRMRDEVVTEWHRVERVRREAMKNVVSGEVAAAGGRGGEAAREVLFEEVEEEVEEERRLEEERMEREKGEEAGREFVAHVPLPDEKEIERMVLEKKKKELLSKYTSDTLQGEQKEAKEMLNVQR

SEQ ID NO: 13236 - protein, 301 aa, Triticum aestivum
  peptide (1)..(301): Ceres Seq. ID no. 13655340
  misc_feature (1)..(281): Pfam Name: Pfam Description:  Isy1-like splicing family
  misc_feature (1)..(301): NCBI GI NO: 15230193 NR Description: expressed protein [Arabidopsis thaliana]
  misc_feature (1)..(297): NCBI GI NO: 13938521 NR Description: Unknown (protein for MGC:2431) [Homo sapiens]
  misc_feature (1)..(296): NCBI GI NO: 34856385 NR Description: similar to RIKEN cDNA 5830446M03
  misc_feature (1)..(198): NCBI GI NO: 6330157 NR Description: KIAA1160 protein [Homo sapiens]
  misc_feature (1)..(269): NCBI GI NO: 38174132 NR Description: Unknown (protein for MGC:76019)
  misc_feature (1)..(238): NCBI GI NO: 20149316 NR Description: expressed sequence AU020769 [Mus musculus]
  misc_feature (1)..(198): NCBI GI NO: 20149304 NR Description: KIAA1160 protein [Homo sapiens]
  misc_feature (1)..(238): NCBI GI NO: 12857516 NR Description: unnamed protein product [Mus musculus]
  misc_feature (1)..(285): NCBI GI NO: 24644974 NR Description: CG9667-PA [Drosophila melanogaster]
  misc_feature (1)..(220): NCBI GI NO: 19527549 NR Description: RE31520p [Drosophila melanogaster]
MLNRFITMKQEEKRKPRERRPYLASECRDLADADRWRGEILREIGVKVAEIQNEGLGEHRLRDLNDEINKLLRERSHWERRILELGGRDYSRSSNAALMTDLDGNIVAIPNPSGRGPGYRYFGAAKKLPGVRELFDKPPEVRKRRTRYEIHKRINAGYYGYYDDEDGVLEPLEAAAEKRMRDEVVTEWHRVERVRREAMKNVVSGEVAAAGGRGGEAAREVLFEEVEEEVEEERRLEEERMEREKGEEAGREFVAHVPLPDEKEIERMVLEKKKKELLSKYTSDTLQGEQKEAKEMLNVQR

SEQ ID NO: 13237 - protein, 294 aa, Triticum aestivum
  peptide (1)..(294): Ceres Seq. ID no. 13655341
  misc_feature (1)..(274): Pfam Name: Pfam Description:  Isy1-like splicing family
  misc_feature (1)..(294): NCBI GI NO: 15230193 NR Description: expressed protein [Arabidopsis thaliana]
  misc_feature (1)..(290): NCBI GI NO: 13938521 NR Description: Unknown (protein for MGC:2431) [Homo sapiens]
  misc_feature (1)..(289): NCBI GI NO: 34856385 NR Description: similar to RIKEN cDNA 5830446M03
  misc_feature (1)..(191): NCBI GI NO: 6330157 NR Description: KIAA1160 protein [Homo sapiens]
  misc_feature (1)..(262): NCBI GI NO: 38174132 NR Description: Unknown (protein for MGC:76019)
  misc_feature (1)..(231): NCBI GI NO: 20149316 NR Description: expressed sequence AU020769 [Mus musculus]
  misc_feature (1)..(191): NCBI GI NO: 20149304 NR Description: KIAA1160 protein [Homo sapiens]
  misc_feature (1)..(231): NCBI GI NO: 12857516 NR Description: unnamed protein product [Mus musculus]
  misc_feature (1)..(278): NCBI GI NO: 24644974 NR Description: CG9667-PA [Drosophila melanogaster]
  misc_feature (1)..(213): NCBI GI NO: 19527549 NR Description: RE31520p [Drosophila melanogaster]
MKQEEKRKPRERRPYLASECRDLADADRWRGEILREIGVKVAEIQNEGLGEHRLRDLNDEINKLLRERSHWERRILELGGRDYSRSSNAALMTDLDGNIVAIPNPSGRGPGYRYFGAAKKLPGVRELFDKPPEVRKRRTRYEIHKRINAGYYGYYDDEDGVLEPLEAAAEKRMRDEVVTEWHRVERVRREAMKNVVSGEVAAAGGRGGEAAREVLFEEVEEEVEEERRLEEERMEREKGEEAGREFVAHVPLPDEKEIERMVLEKKKKELLSKYTSDTLQGEQKEAKEMLNVQR

SEQ ID NO: 13238 - DNA, 1208 bp, Triticum aestivum
  misc_feature (1)..(1208): Ceres Seq. ID no. 12778054
acccgtccaccccctcgcgtattccgccgccacgccgccgcggcgcccttcccgccgtcgcgagccgtatctttcggcaacacacacacacaaagccgcccacacgccatggaggagaccgaggctaagaagcccacccccgcatcccccctcttctccttctccaaccccagcgcctccttcggcttcgggttcggcgccgcgcccggccctccccctccgcctccgccgccagctgtcgaggtcctcctctccgaggaatcacccgtcgcggccggcaacttggagcctgtggtggttgacgactccctatcgatctacaaggggagagttaacacctctgatgttttgggggtaaaaaactctgatttggttccaggaaaatatgaaggggggttgaaactgtgggaaggatcattggacttggtgaaaaccctaaattcagacatcaaagatgatcgattgcttatggaaggcaaacacgtactagagctaggatgtggacatggcctccctggcatctttgcaggtctgaagggtgctgctctagttcacttccaagatttcaatgctgaggtccttaggtgccttaccatcccaaatgtaaaagctaatctgttcaaggaatcatctgaaacatctaggagtgttggtttttatgctggtgattggagtgaaatcgacaagttacttcttcgcggagatgctgtccaggataaaacaaccaatcttcacacagaaaatgaagggcatagaggctacaatatcatcctgatggctgagactgtgtatgcattggattcacttcctagtctctacaggctcatcaagaagtgcttacactaccctagtggtgtagtttatatggcagggaaaaagcattactttggtgtaggtggcggcacaaggcaatttctacgcttggttacagaagatggtgccatgcagtcggacctgcttgctgaagttactgacggatcatccaatgttagggaggtttggaaattctcattcaagtagacaagcatggcctctgtgattgctgtatcagatacaaaacgtgtaccgggctccatattggtagagtgtgagccttggtttagccgtatcatggtgttttaatgcactgttagttccaagttgattgttcatgaactcttgagaagtcatacaagtacttgagtcctatctctgaattactgactctt

SEQ ID NO: 13239 - protein, 339 aa, Triticum aestivum
  peptide (1)..(339): Ceres Seq. ID no. 12778055
  misc_feature (47)..(339): NCBI GI NO: 21554662 NR Description: unknown [Arabidopsis thaliana]
  misc_feature (42)..(339): NCBI GI NO: 18414120 NR Description: expressed protein; protein id: At4g14000
  misc_feature (42)..(231): NCBI GI NO: 7485012 NR Description: hypothetical protein - Arabidopsis thaliana
  misc_feature (209)..(315): NCBI GI NO: 7485012 NR Description: hypothetical protein - Arabidopsis thaliana
  misc_feature (76)..(231): NCBI GI NO: 18406207 NR Description: expressed protein; protein id: At2g43320
  misc_feature (223)..(339): NCBI GI NO: 18406207 NR Description: expressed protein; protein id: At2g43320
  misc_feature (76)..(231): NCBI GI NO: 16226903 NR Description: At2g43320/T1O24.6 [Arabidopsis thaliana]
  misc_feature (223)..(339): NCBI GI NO: 16226903 NR Description: At2g43320/T1O24.6 [Arabidopsis thaliana]
  misc_feature (76)..(231): NCBI GI NO: 38346224 NR Description: OJ990528_30.4
  misc_feature (253)..(339): NCBI GI NO: 38346224 NR Description: OJ990528_30.4
TRPPPRVFRRHAAAAPFPPSRAVSFGNTHTQSRPHAMEETEAKKPTPASPLFSFSNPSASFGFGFGAAPGPPPPPPPPAVEVLLSEESPVAAGNLEPVVVDDSLSIYKGRVNTSDVLGVKNSDLVPGKYEGGLKLWEGSLDLVKTLNSDIKDDRLLMEGKHVLELGCGHGLPGIFAGLKGAALVHFQDFNAEVLRCLTIPNVKANLFKESSETSRSVGFYAGDWSEIDKLLLRGDAVQDKTTNLHTENEGHRGYNIILMAETVYALDSLPSLYRLIKKCLHYPSGVVYMAGKKHYFGVGGGTRQFLRLVTEDGAMQSDLLAEVTDGSSNVREVWKFSFK

SEQ ID NO: 13240 - protein, 303 aa, Triticum aestivum
  peptide (1)..(303): Ceres Seq. ID no. 12778056
  misc_feature (11)..(303): NCBI GI NO: 21554662 NR Description: unknown [Arabidopsis thaliana]
  misc_feature (6)..(303): NCBI GI NO: 18414120 NR Description: expressed protein; protein id: At4g14000
  misc_feature (6)..(195): NCBI GI NO: 7485012 NR Description: hypothetical protein - Arabidopsis thaliana
  misc_feature (173)..(279): NCBI GI NO: 7485012 NR Description: hypothetical protein - Arabidopsis thaliana
  misc_feature (40)..(195): NCBI GI NO: 18406207 NR Description: expressed protein; protein id: At2g43320
  misc_feature (187)..(303): NCBI GI NO: 18406207 NR Description: expressed protein; protein id: At2g43320
  misc_feature (40)..(195): NCBI GI NO: 16226903 NR Description: At2g43320/T1O24.6 [Arabidopsis thaliana]
  misc_feature (187)..(303): NCBI GI NO: 16226903 NR Description: At2g43320/T1O24.6 [Arabidopsis thaliana]
  misc_feature (40)..(195): NCBI GI NO: 38346224 NR Description: OJ990528_30.4
  misc_feature (217)..(303): NCBI GI NO: 38346224 NR Description: OJ990528_30.4
MEETEAKKPTPASPLFSFSNPSASFGFGFGAAPGPPPPPPPPAVEVLLSEESPVAAGNLEPVVVDDSLSIYKGRVNTSDVLGVKNSDLVPGKYEGGLKLWEGSLDLVKTLNSDIKDDRLLMEGKHVLELGCGHGLPGIFAGLKGAALVHFQDFNAEVLRCLTIPNVKANLFKESSETSRSVGFYAGDWSEIDKLLLRGDAVQDKTTNLHTENEGHRGYNIILMAETVYALDSLPSLYRLIKKCLHYPSGVVYMAGKKHYFGVGGGTRQFLRLVTEDGAMQSDLLAEVTDGSSNVREVWKFSFK

SEQ ID NO: 13241 - protein, 183 aa, Triticum aestivum
  peptide (1)..(183): Ceres Seq. ID no. 12778057
  misc_feature (1)..(183): NCBI GI NO: 21554662 NR Description: unknown [Arabidopsis thaliana]
  misc_feature (1)..(183): NCBI GI NO: 18414120 NR Description: expressed protein; protein id: At4g14000
  misc_feature (1)..(75): NCBI GI NO: 7485012 NR Description: hypothetical protein - Arabidopsis thaliana
  misc_feature (53)..(159): NCBI GI NO: 7485012 NR Description: hypothetical protein - Arabidopsis thaliana
  misc_feature (1)..(75): NCBI GI NO: 18406207 NR Description: expressed protein; protein id: At2g43320
  misc_feature (67)..(183): NCBI GI NO: 18406207 NR Description: expressed protein; protein id: At2g43320
  misc_feature (1)..(75): NCBI GI NO: 16226903 NR Description: At2g43320/T1O24.6 [Arabidopsis thaliana]
  misc_feature (67)..(183): NCBI GI NO: 16226903 NR Description: At2g43320/T1O24.6 [Arabidopsis thaliana]
  misc_feature (1)..(75): NCBI GI NO: 38346224 NR Description: OJ990528_30.4
  misc_feature (97)..(183): NCBI GI NO: 38346224 NR Description: OJ990528_30.4
MEGKHVLELGCGHGLPGIFAGLKGAALVHFQDFNAEVLRCLTIPNVKANLFKESSETSRSVGFYAGDWSEIDKLLLRGDAVQDKTTNLHTENEGHRGYNIILMAETVYALDSLPSLYRLIKKCLHYPSGVVYMAGKKHYFGVGGGTRQFLRLVTEDGAMQSDLLAEVTDGSSNVREVWKFSFK

SEQ ID NO: 13242 - DNA, 821 bp, Triticum aestivum
  misc_feature (1)..(821): Ceres Seq. ID no. 13655082
agaacatcctaatcgaaaaacaagaggaaacgagctagctagatagcatttggtacacagctacatacatatccggcacgagaggatgtcgttggtgaggttcttcgacaccctggccatggactcgtggaaccccttcggcaccatcttcggcaccacggcgtccagcggcaccgacgcctggctggccagcgacaccacggcgttcgccgacacctacatcgagacccgggagacggcggacgcctacgtcttcagcgccaggctccccgccggtgtcaccaaggaggaggtcaaggtggaggtggaggaggacggcaaggtgctggtcatcgccggcgagcggtgcctgcggagggaggccaagagcgaggcgcgccaccacatcgagcgcagcgtcgccaccttcttcggcaggttccacctccccgacgacgccgccttgggccaggtcagggccgccatggacgacgggggcgcgcagctcaccgtcactgtgcccagggtcggcgccgccgttgccgccgtgaccatgcccgagcctgccggggccatcgaggtcgtcgaggccagcccgtgctgattggctgattgcggcgtactccggtgccgactgcagacagagtgcagacatacgtgcggtaagttgccgctcgtatgatctgctcgatcgggtcctttgggtgtgattccacaaattgtggtgttcgatgtacgtaactacgtacttgagtcggtatgtggcttgctgttgtgacttgtgagtgaggtgcttgcatggttgcctgtactgttacttgttagttctcgtgttcacgctc

SEQ ID NO: 13243 - protein, 165 aa, Triticum aestivum
  peptide (1)..(165): Ceres Seq. ID no. 13655083
  misc_feature (1)..(164): NCBI GI NO: 15408720 NR Description: P0443D08.1
  misc_feature (1)..(140): NCBI GI NO: 100883 NR Description: heat shock protein 17.2 - maize
  misc_feature (1)..(159): NCBI GI NO: 169799 NR Description: 16.9 kDa heat shock protein
  misc_feature (1)..(159): NCBI GI NO: 123543 NR Description: 16.9 KD CLASS I HEAT SHOCK PROTEIN
  misc_feature (1)..(155): NCBI GI NO: 7441297 NR Description: heat shock protein 16.9 - pearl millet
  misc_feature (7)..(156): NCBI GI NO: 2911276 NR Description: LMW heat shock protein [Fragaria x ananassa]
  misc_feature (1)..(140): NCBI GI NO: 25044839 NR Description: class-1 LMW heat shock protein [Ananas comosus]
  misc_feature (1)..(159): NCBI GI NO: 15408722 NR Description: putative 16.9 kDa heat shock protein
  misc_feature (1)..(140): NCBI GI NO: 7441298 NR Description: heat shock protein 17.0 - pearl millet
  misc_feature (7)..(140): NCBI GI NO: 7441300 NR Description: probable heat shock protein - garden pea
MSLVRFFDTLAMDSWNPFGTIFGTTASSGTDAWLASDTTAFADTYIETRETADAYVFSARLPAGVTKEEVKVEVEEDGKVLVIAGERCLRREAKSEARHHIERSVATFFGRFHLPDDAALGQVRAAMDDGGAQLTVTVPRVGAAVAAVTMPEPAGAIEVVEASPC

SEQ ID NO: 13244 - protein, 154 aa, Triticum aestivum
  peptide (1)..(154): Ceres Seq. ID no. 13655084
  misc_feature (1)..(153): NCBI GI NO: 15408720 NR Description: P0443D08.1
  misc_feature (1)..(129): NCBI GI NO: 100883 NR Description: heat shock protein 17.2 - maize
  misc_feature (1)..(148): NCBI GI NO: 169799 NR Description: 16.9 kDa heat shock protein
  misc_feature (1)..(148): NCBI GI NO: 123543 NR Description: 16.9 KD CLASS I HEAT SHOCK PROTEIN
  misc_feature (1)..(144): NCBI GI NO: 7441297 NR Description: heat shock protein 16.9 - pearl millet
  misc_feature (1)..(145): NCBI GI NO: 2911276 NR Description: LMW heat shock protein [Fragaria x ananassa]
  misc_feature (1)..(129): NCBI GI NO: 25044839 NR Description: class-1 LMW heat shock protein [Ananas comosus]
  misc_feature (1)..(148): NCBI GI NO: 15408722 NR Description: putative 16.9 kDa heat shock protein
  misc_feature (1)..(129): NCBI GI NO: 7441298 NR Description: heat shock protein 17.0 - pearl millet
  misc_feature (1)..(129): NCBI GI NO: 7441300 NR Description: probable heat shock protein - garden pea
MDSWNPFGTIFGTTASSGTDAWLASDTTAFADTYIETRETADAYVFSARLPAGVTKEEVKVEVEEDGKVLVIAGERCLRREAKSEARHHIERSVATFFGRFHLPDDAALGQVRAAMDDGGAQLTVTVPRVGAAVAAVTMPEPAGAIEVVEASPC

SEQ ID NO: 13245 - DNA, 1139 bp, Triticum aestivum
  misc_feature (1)..(1139): Ceres Seq. ID no. 13655345
atcggatctccgaaccggaactctgactctctctgtctcctccccgtgccggacggcgaggtccccctcttcctccggccgcctctcccccccgttcccgtcgcttctcggttccacgggcgccgcggccgccggtctccgacgccatggggttcctcgaggacttccaggccagtgttgaaacattgccagctatgctgcacaagaactattcattaatgcgagagctcgataaaagcttgcaaggtgtgcagctggaaaatgagcagcgatgtcaacaagaaatagaggacattaagcatggacttgaatctggaagtattacaacatatgagccagcaaaacttaaattttctgatgaggcaatcgaggagcagaaacattgtgttaggattgctgatgagaaggtggctttagccacacaaacatatgacctggtcgacgctcatatccaacagcttgatcaatacatgaggaagcttgaagaacttcgactagaaaaggaggcagtggcagctgcagctgcagctgcggcagatacagctgttgctgctacttcagctgctcctgctggtgctggtagcttaaggtccgcagctgctgatcctgctccaaaaactggacgagctggcgaaagaagcagaggagggcggaagaaggctaaggtgcccacggagatgcctacagagatgcccatggagcagccagctatagatttagaattgcctgtcgatcctaatgaaccgacgtattgtttctgcaaccaagtcagctacggtgagatggtcgcgtgcgacaaccctgattgcaagatagagtggttccactttggatgcgtgggcttgaaagagcagccgaggggaaagtggtattgcctgagttgcagcgcgttccaaaagaagcgcaagggaaggtgagatacatatggtccttgtgctaggaggtatgcagtcagtcatccgtgatcgtctgattccgttgtgctgagcagcgccttgtttgtctgggaagcaactgttgaatgtagcttgagtgatcttgcacatgttgtgacagtcttgaggagtgttgtacatgtgtggccccgtttagaacatgggaatttcttctgttcttgtgggtgatgaactggtgactgc

SEQ ID NO: 13246 - protein, 256 aa, Triticum aestivum
  peptide (1)..(256): Ceres Seq. ID no. 13655346
  misc_feature (202)..(247): Pfam Name: Pfam Description:  PHD-finger
  misc_feature (1)..(256): NCBI GI NO: 29367421 NR Description: putative PHD-finger protein
  misc_feature (3)..(253): NCBI GI NO: 26327491 NR Description: unnamed protein product [Mus musculus]
  misc_feature (3)..(253): NCBI GI NO: 19111152 NR Description: ING1-like protein
  misc_feature (1)..(120): NCBI GI NO: 34855011 NR Description: similar to inhibitor of growth family, member 3
  misc_feature (125)..(256): NCBI GI NO: 34855011 NR Description: similar to inhibitor of growth family, member 3
  misc_feature (3)..(253): NCBI GI NO: 34858458 NR Description: similar to ING1-like protein
  misc_feature (115)..(256): NCBI GI NO: 28278108 NR Description: Similar to inhibitor of growth family, member 3
  misc_feature (1)..(120): NCBI GI NO: 28278108 NR Description: Similar to inhibitor of growth family, member 3
  misc_feature (3)..(243): NCBI GI NO: 12002020 NR Description: brain my036 protein [Homo sapiens]
  misc_feature (125)..(256): NCBI GI NO: 10863865 NR Description: p47 [Mus musculus]
MGFLEDFQASVETLPAMLHKNYSLMRELDKSLQGVQLENEQRCQQEIEDIKHGLESGSITTYEPAKLKFSDEAIEEQKHCVRIADEKVALATQTYDLVDAHIQQLDQYMRKLEELRLEKEAVAAAAAAAADTAVAATSAAPAGAGSLRSAAADPAPKTGRAGERSRGGRKKAKVPTEMPTEMPMEQPAIDLELPVDPNEPTYCFCNQVSYGEMVACDNPDCKIEWFHFGCVGLKEQPRGKWYCLSCSAFQKKRKGR

SEQ ID NO: 13247 - protein, 240 aa, Triticum aestivum
  peptide (1)..(240): Ceres Seq. ID no. 13655347
  misc_feature (186)..(231): Pfam Name: Pfam Description:  PHD-finger
  misc_feature (1)..(240): NCBI GI NO: 29367421 NR Description: putative PHD-finger protein
  misc_feature (1)..(237): NCBI GI NO: 26327491 NR Description: unnamed protein product [Mus musculus]
  misc_feature (1)..(237): NCBI GI NO: 19111152 NR Description: ING1-like protein
  misc_feature (1)..(104): NCBI GI NO: 34855011 NR Description: similar to inhibitor of growth family, member 3
  misc_feature (109)..(240): NCBI GI NO: 34855011 NR Description: similar to inhibitor of growth family, member 3
  misc_feature (1)..(237): NCBI GI NO: 34858458 NR Description: similar to ING1-like protein
  misc_feature (99)..(240): NCBI GI NO: 28278108 NR Description: Similar to inhibitor of growth family, member 3
  misc_feature (1)..(104): NCBI GI NO: 28278108 NR Description: Similar to inhibitor of growth family, member 3
  misc_feature (1)..(227): NCBI GI NO: 12002020 NR Description: brain my036 protein [Homo sapiens]
  misc_feature (109)..(240): NCBI GI NO: 10863865 NR Description: p47 [Mus musculus]
MLHKNYSLMRELDKSLQGVQLENEQRCQQEIEDIKHGLESGSITTYEPAKLKFSDEAIEEQKHCVRIADEKVALATQTYDLVDAHIQQLDQYMRKLEELRLEKEAVAAAAAAAADTAVAATSAAPAGAGSLRSAAADPAPKTGRAGERSRGGRKKAKVPTEMPTEMPMEQPAIDLELPVDPNEPTYCFCNQVSYGEMVACDNPDCKIEWFHFGCVGLKEQPRGKWYCLSCSAFQKKRKGR

SEQ ID NO: 13248 - protein, 232 aa, Triticum aestivum
  peptide (1)..(232): Ceres Seq. ID no. 13655348
  misc_feature (178)..(223): Pfam Name: Pfam Description:  PHD-finger
  misc_feature (1)..(232): NCBI GI NO: 29367421 NR Description: putative PHD-finger protein
  misc_feature (1)..(229): NCBI GI NO: 26327491 NR Description: unnamed protein product [Mus musculus]
  misc_feature (1)..(229): NCBI GI NO: 19111152 NR Description: ING1-like protein
  misc_feature (1)..(96): NCBI GI NO: 34855011 NR Description: similar to inhibitor of growth family, member 3
  misc_feature (101)..(232): NCBI GI NO: 34855011 NR Description: similar to inhibitor of growth family, member 3
  misc_feature (1)..(229): NCBI GI NO: 34858458 NR Description: similar to ING1-like protein
  misc_feature (91)..(232): NCBI GI NO: 28278108 NR Description: Similar to inhibitor of growth family, member 3
  misc_feature (1)..(96): NCBI GI NO: 28278108 NR Description: Similar to inhibitor of growth family, member 3
  misc_feature (1)..(219): NCBI GI NO: 12002020 NR Description: brain my036 protein [Homo sapiens]
  misc_feature (101)..(232): NCBI GI NO: 10863865 NR Description: p47 [Mus musculus]
MRELDKSLQGVQLENEQRCQQEIEDIKHGLESGSITTYEPAKLKFSDEAIEEQKHCVRIADEKVALATQTYDLVDAHIQQLDQYMRKLEELRLEKEAVAAAAAAAADTAVAATSAAPAGAGSLRSAAADPAPKTGRAGERSRGGRKKAKVPTEMPTEMPMEQPAIDLELPVDPNEPTYCFCNQVSYGEMVACDNPDCKIEWFHFGCVGLKEQPRGKWYCLSCSAFQKKRKGR

SEQ ID NO: 13249 - DNA, 836 bp, Triticum aestivum
  misc_feature (1)..(836): Ceres Seq. ID no. 12585210
tctcctcttcttccccctcacgtctccatcaccttcttccacttctcccgcatttacacaccaccgcacgcagctagctagccacactcacactcccatccctctcacagcaccaccgcactagctagccacaccacaccgcactgcactcccgtcgctctcggccatggcgtcctacaggctgctcgtgatcctggtcttctccgcgctcctcctcggcgtcgcagtcggcgacacctacccggccgactgcccgtacccgtgcctgctgccgccgcccacgcccccggcctccagcgccgactgcccgccgccaccctcctcgccatccggctccggctacgtgtacccgcccccgtcctcctccgggaactccccgccgacgccgtcgtcctggagctacccgccaccgtctgggggctacattcccggcttctaccagcctcccgccggcgggggcggtggtggtggcggaggcggaggaggggctggcggcaacttcgggcctgcgccaccgccgccgaaccccatcctgccgtggtacccctggtactaccggtccccgccgtcctcgtccgcgaccaggcctggtcgcgcctcggcggtcgtgctctgcctggtggccgccgtgactgccgctgctgctctggtcggttactagtacgatcatcgatcaatcagttactagctaagctagcactcccatcacatttttcatttccgttcgtagtcgattcttgatatatactactccatgtacaatggggcaccattactatttagctatcctactcatcaactcctctgtattgattcattgctcagttggcttttgg

SEQ ID NO: 13250 - protein, 164 aa, Triticum aestivum
  peptide (1)..(164): Ceres Seq. ID no. 12585211
  misc_feature (36)..(94): Pfam Name: Pfam Description:  Extensin-like region
  misc_feature (1)..(160): NCBI GI NO: 34894212 NR Description: P0439B06.27
  misc_feature (27)..(160): NCBI GI NO: 34894480 NR Description: OJ1116_C07.3
  misc_feature (1)..(152): NCBI GI NO: 18423010 NR Description: expressed protein; protein id: At5g49280
  misc_feature (24)..(137): NCBI GI NO: 15234820 NR Description: extensin like protein; protein id: At4g16140.1
  misc_feature (32)..(162): NCBI GI NO: 15220010 NR Description: unknown protein; protein id: At1g23050.1
  misc_feature (43)..(152): NCBI GI NO: 18397707 NR Description: expressed protein; protein id: At3g06750
  misc_feature (43)..(164): NCBI GI NO: 18409730 NR Description: Expressed protein; protein id: At1g70985
  misc_feature (37)..(118): NCBI GI NO: 114248 NR Description: ANTHER-SPECIFIC PROTEIN SF18 PRECURSOR
  misc_feature (11)..(110): NCBI GI NO: 33668156 NR Description: GPRP [Oryza sativa (indica cultivar-group)]
  misc_feature (37)..(118): NCBI GI NO: 32422095 NR Description: predicted protein [Neurospora crassa]
MASYRLLVILVFSALLLGVAVGDTYPADCPYPCLLPPPTPPASSADCPPPPSSPSGSGYVYPPPSSSGNSPPTPSSWSYPPPSGGYIPGFYQPPAGGGGGGGGGGGGAGGNFGPAPPPPNPILPWYPWYYRSPPSSSATRPGRASAVVLCLVAAVTAAAALVGY

SEQ ID NO: 13251 - DNA, 710 bp, Triticum aestivum
  misc_feature (1)..(710): Ceres Seq. ID no. 15173684
ctttttttgtccggccatttggtgaaccaccgagccgcatgatcgttctgcatttctccacatatatatctcgatcggcgaccgaagcgatggcgtcctcccggcgagatctgctcgtggcgctctgcgtggcggcgctcctggccgtcgggtcggagtcccacgggctggaggacttcggcagcgaggggaagacggaggcgacgcccgagatggcctccttcttcggcgccaagcccgaggccgccgtgctcccggaggcgctggacaactccatggccgccaagccggaggcggcatcggcgatgcccaccaccaccagcaccaacccgcgtgcgtccccgccgcgcagatccgtggccgtcgcggccggcgtggcctgcggcgtcgcggccctggcggtggtcggcgtggccgtcgccgtcgccttcgtggtgcgcgccaggcgcggcgagaggcgcgaggccgaggtccatctcggctaagcccgccggcttggtttcattaggggttgctcgtcaattcattagcgtcgtggtttgcgtttagttaattgcgtgtttagttcgatgatgaatgatttcttccgttcttccgctgtttgtgtgtgtgtgatggagatttggggaagcacgctgtaacataaataacgcttcattggcatgcatgttactgtgatgtctagaccttgaatgaagtatttcactagg

SEQ ID NO: 13252 - protein, 160 aa, Triticum aestivum
  peptide (1)..(160): Ceres Seq. ID no. 15173685
  misc_feature (30)..(160): NCBI GI NO: 5679839 NR Description: hypothetical protein
  misc_feature (30)..(160): NCBI GI NO: 38344333 NR Description: OSJNBa0058K23.15
FFVRPFGEPPSRMIVLHFSTYISRSATEAMASSRRDLLVALCVAALLAVGSESHGLEDFGSEGKTEATPEMASFFGAKPEAAVLPEALDNSMAAKPEAASAMPTTTSTNPRASPPRRSVAVAAGVACGVAALAVVGVAVAVAFVVRARRGERREAEVHLG

SEQ ID NO: 13253 - protein, 148 aa, Triticum aestivum
  peptide (1)..(148): Ceres Seq. ID no. 15173686
  misc_feature (18)..(148): NCBI GI NO: 5679839 NR Description: hypothetical protein
  misc_feature (18)..(148): NCBI GI NO: 38344333 NR Description: OSJNBa0058K23.15
MIVLHFSTYISRSATEAMASSRRDLLVALCVAALLAVGSESHGLEDFGSEGKTEATPEMASFFGAKPEAAVLPEALDNSMAAKPEAASAMPTTTSTNPRASPPRRSVAVAAGVACGVAALAVVGVAVAVAFVVRARRGERREAEVHLG

SEQ ID NO: 13254 - protein, 131 aa, Triticum aestivum
  peptide (1)..(131): Ceres Seq. ID no. 15173687
  misc_feature (1)..(131): NCBI GI NO: 5679839 NR Description: hypothetical protein
  misc_feature (1)..(131): NCBI GI NO: 38344333 NR Description: OSJNBa0058K23.15
MASSRRDLLVALCVAALLAVGSESHGLEDFGSEGKTEATPEMASFFGAKPEAAVLPEALDNSMAAKPEAASAMPTTTSTNPRASPPRRSVAVAAGVACGVAALAVVGVAVAVAFVVRARRGERREAEVHLG

SEQ ID NO: 13255 - DNA, 620 bp, Triticum aestivum
  misc_feature (1)..(620): Ceres Seq. ID no. 12585212
cagatagcagagcgtccaggcccagggaagccacccctaatctcgaacagcacccaaagcagagccgccggggaggctgcggcgagctgccggagggagggaaggggagatggcgagccggctgtggaggtggtacgcggaccggcagttccacaagtgggagaagacggtgctgtgggacatggtggagccctaccgcccgccgcgctccttcgcgccgctcgtcggcacctacgtcgccgccttctacaccgccatcgtcggcgccgccgtcaccgagcagctctacaaggagaagtactgggaggatcacccgggcgaggcggtgccgatcatgccgcccatgttctactgggggccatggagggtggtgaacggagaggttccccgcttcatccagacgcccgaggaagctaagccggcatagaactgcttggagatcgctggggatgctgtgaaatgtttgctgttcactgtctgctgtgtagctatggcattcctgcatttcttgcaatttgcattctggtgattgcgcactgccgtgaatcataatggtctttctatgtatccttgtttgcacaaataaattgatatttctatcacggagcagattgtttgcc

SEQ ID NO: 13256 - protein, 138 aa, Triticum aestivum
  peptide (1)..(138): Ceres Seq. ID no. 12585213
QIAERPGPGKPPLISNSTQSRAAGEAAASCRREGRGDGEPAVEVVRGPAVPQVGEDGAVGHGGALPPAALLRAARRHLRRRLLHRHRRRRRHRAALQGEVLGGSPGRGGADHAAHVLLGAMEGGERRGSPLHPDARGS

SEQ ID NO: 13257 - protein, 123 aa, Triticum aestivum
  peptide (1)..(123): Ceres Seq. ID no. 12585214
DSRASRPREATPNLEQHPKQSRRGGCGELPEGGKGRWRAGCGGGTRTGSSTSGRRRCCGTWWSPTARRAPSRRSSAPTSPPSTPPSSAPPSPSSSTRRSTGRITRARRCRSCRPCSTGGHGGW

SEQ ID NO: 13258 - protein, 105 aa, Triticum aestivum
  peptide (1)..(105): Ceres Seq. ID no. 12585215
  misc_feature (3)..(91): NCBI GI NO: 18417439 NR Description: putative protein; protein id: At4g29660
  misc_feature (3)..(87): NCBI GI NO: 7487097 NR Description: hypothetical protein T16L4
MASRLWRWYADRQFHKWEKTVLWDMVEPYRPPRSFAPLVGTYVAAFYTAIVGAAVTEQLYKEKYWEDHPGEAVPIMPPMFYWGPWRVVNGEVPRFIQTPEEAKPA

SEQ ID NO: 13259 - DNA, 839 bp, Triticum aestivum
  misc_feature (1)..(839): Ceres Seq. ID no. 13583909
acacactgaactgcttcagcttgttcttgttggttcacagacacttcccttctcacagtccattaagtccatggcgatgaggaagaacaaggttcacgagttcgaggccgatgtgcccgccgccgacctatgggggctctatggcacgctccgtgcagcggagctgctgcccgagcttctcccgcaggtgctcgccaagatacagctcgtgagcggcgacggcgacgtcggcaccatcttggagctcacattcgctccagggatccctggcctggagacatacagggagaaattcatcaaggtcgacaatgagaactacatcaaggaagcgcagacgattgacggagacatcctgaagctcgggttcctctattacatggtcaggttcgagatcatcgccaaaggacccagttcttcagtgataagatcgaccattgtgtatgagataaattatgaaactcaccccgggcttgaagctatggtcagcaccggacctctggctgcaactgctgagaaatttgcagggtacctcaaggagcagaagatcgctcagagcagttaattcttgcaacagctcagagcaaaagtgtatcaatgctttgagaaaaataatgtctgattccacgttgtgtgttttccctgaaaaaataaatgaccaatgatcaaacatattaggatagtatgtttgatcatatgaatatcacatagttgatatatagatatttcacggtccatgtaccttaactttattagtttcatgaaaatgaagttgggagccttgatgctccttttctcgaagaaatgtaccttaacttgttttggttaatgaaggtttgatt

SEQ ID NO: 13260 - protein, 186 aa, Triticum aestivum
  peptide (1)..(186): Ceres Seq. ID no. 13583910
  misc_feature (38)..(179): Pfam Name: Pfam Description:  Pathogenesis-related protein Bet v I family
  misc_feature (26)..(186): NCBI GI NO: 38347061 NR Description: OSJNBa0006A01.2
  misc_feature (26)..(181): NCBI GI NO: 38347062 NR Description: OSJNBa0006A01.3
  misc_feature (38)..(179): NCBI GI NO: 3510542 NR Description: intracellular pathogenesis-related protein PinmIII
  misc_feature (31)..(160): NCBI GI NO: 402743 NR Description: Car b I [Carpinus betulus]
  misc_feature (31)..(160): NCBI GI NO: 730048 NR Description: Major pollen allergen Car b 1 isoforms 1A and 1B
  misc_feature (28)..(184): NCBI GI NO: 6466174 NR Description: putative intracellular pathogenesis-related protein
  misc_feature (31)..(184): NCBI GI NO: 6466176 NR Description: putative intracellular pathogenesis-related protein
  misc_feature (26)..(173): NCBI GI NO: 9837528 NR Description: cytokinin-specific binding protein 1
  misc_feature (33)..(147): NCBI GI NO: 7442194 NR Description: major allergen Mal d 1 - apple tree
  misc_feature (33)..(147): NCBI GI NO: 27922941 NR Description: major allergen Mal d 1 [Malus x domestica]
HTELLQLVLVGSQTLPFSQSIKSMAMRKNKVHEFEADVPAADLWGLYGTLRAAELLPELLPQVLAKIQLVSGDGDVGTILELTFAPGIPGLETYREKFIKVDNENYIKEAQTIDGDILKLGFLYYMVRFEIIAKGPSSSVIRSTIVYEINYETHPGLEAMVSTGPLAATAEKFAGYLKEQKIAQSS

SEQ ID NO: 13261 - protein, 163 aa, Triticum aestivum
  peptide (1)..(163): Ceres Seq. ID no. 13583911
  misc_feature (15)..(156): Pfam Name: Pfam Description:  Pathogenesis-related protein Bet v I family
  misc_feature (3)..(163): NCBI GI NO: 38347061 NR Description: OSJNBa0006A01.2
  misc_feature (3)..(158): NCBI GI NO: 38347062 NR Description: OSJNBa0006A01.3
  misc_feature (15)..(156): NCBI GI NO: 3510542 NR Description: intracellular pathogenesis-related protein PinmIII
  misc_feature (8)..(137): NCBI GI NO: 402743 NR Description: Car b I [Carpinus betulus]
  misc_feature (8)..(137): NCBI GI NO: 730048 NR Description: Major pollen allergen Car b 1 isoforms 1A and 1B
  misc_feature (5)..(161): NCBI GI NO: 6466174 NR Description: putative intracellular pathogenesis-related protein
  misc_feature (8)..(161): NCBI GI NO: 6466176 NR Description: putative intracellular pathogenesis-related protein
  misc_feature (3)..(150): NCBI GI NO: 9837528 NR Description: cytokinin-specific binding protein 1
  misc_feature (10)..(124): NCBI GI NO: 7442194 NR Description: major allergen Mal d 1 - apple tree
  misc_feature (10)..(124): NCBI GI NO: 27922941 NR Description: major allergen Mal d 1 [Malus x domestica]
MAMRKNKVHEFEADVPAADLWGLYGTLRAAELLPELLPQVLAKIQLVSGDGDVGTILELTFAPGIPGLETYREKFIKVDNENYIKEAQTIDGDILKLGFLYYMVRFEIIAKGPSSSVIRSTIVYEINYETHPGLEAMVSTGPLAATAEKFAGYLKEQKIAQSS

SEQ ID NO: 13262 - protein, 161 aa, Triticum aestivum
  peptide (1)..(161): Ceres Seq. ID no. 13583912
  misc_feature (13)..(154): Pfam Name: Pfam Description:  Pathogenesis-related protein Bet v I family
  misc_feature (1)..(161): NCBI GI NO: 38347061 NR Description: OSJNBa0006A01.2
  misc_feature (1)..(156): NCBI GI NO: 38347062 NR Description: OSJNBa0006A01.3
  misc_feature (13)..(154): NCBI GI NO: 3510542 NR Description: intracellular pathogenesis-related protein PinmIII
  misc_feature (6)..(135): NCBI GI NO: 402743 NR Description: Car b I [Carpinus betulus]
  misc_feature (6)..(135): NCBI GI NO: 730048 NR Description: Major pollen allergen Car b 1 isoforms 1A and 1B
  misc_feature (3)..(159): NCBI GI NO: 6466174 NR Description: putative intracellular pathogenesis-related protein
  misc_feature (6)..(159): NCBI GI NO: 6466176 NR Description: putative intracellular pathogenesis-related protein
  misc_feature (1)..(148): NCBI GI NO: 9837528 NR Description: cytokinin-specific binding protein 1
  misc_feature (8)..(122): NCBI GI NO: 7442194 NR Description: major allergen Mal d 1 - apple tree
  misc_feature (8)..(122): NCBI GI NO: 27922941 NR Description: major allergen Mal d 1 [Malus x domestica]
MRKNKVHEFEADVPAADLWGLYGTLRAAELLPELLPQVLAKIQLVSGDGDVGTILELTFAPGIPGLETYREKFIKVDNENYIKEAQTIDGDILKLGFLYYMVRFEIIAKGPSSSVIRSTIVYEINYETHPGLEAMVSTGPLAATAEKFAGYLKEQKIAQSS

SEQ ID NO: 13263 - DNA, 908 bp, Triticum aestivum
  misc_feature (1)..(908): Ceres Seq. ID no. 13583691
aatcccaatcgagccctcctccccttccgccgccgccgccgccgccatgtcccgcttcgtgcggcgcctcgccggcatcccgtggcgccagatcgccggggaggcctcctccgtcggtctgctaatggcgcagggcctctgcgccgtccacgtcgtcagcgagcacgtcctcggcgtcgccttcccacggggccccagcatgctgccggcgctgaacatggcgggggacgtgctgctcaccgacaaggtgagcccgcggcgcgggtgggtggggccgggggacgtcgtgctcctcctctcgccggaggacccgcgcaagatcgtcgccaagcgcgtgctcgggatggagggcgacgaggtcacctaccccgtcgacgccggcaacagcgacgccaccaagaccgtcgtggtaccgcaaggtcatatctgggtgcagggcgacaatatctattcatctaacgactcgaggcagtttggacccgtgccttacggtctcgtaaaagggaagatgtcctatcggatttggccaccgtcaaggattggttcgattgactcaaaggagtaggacacagagtataagcgactgttcatacgatgcaaccaggccctgcatttgttggtgcatcttgatgtctaccatttgatgcttcacaattttggtccttgccccccagaagccccgttcagcgaatctatggcatgatttgattgctgtgtctcatgtcgtaacttatggtctgtgatacttgtaaagtgaactaacccgatgaacctacaagttccgggcatggctgagatcagctagtgtcttgacgttgagattgtattaaacttgtcattctcctggaccaaagcttgatgagttgtgcattgtaacatttgcttattattaaggccgttttaagcgg

SEQ ID NO: 13264 - protein, 187 aa, Triticum aestivum
  peptide (1)..(187): Ceres Seq. ID no. 13583692
  misc_feature (31)..(137): Pfam Name: Pfam Description:  Signal peptidase I
  misc_feature (16)..(173): NCBI GI NO: 22208508 NR Description: unknown protein [Sorghum bicolor]
  misc_feature (16)..(137): NCBI GI NO: 23928440 NR Description: hypothetical protein [Zea mays]
  misc_feature (137)..(173): NCBI GI NO: 23928440 NR Description: hypothetical protein [Zea mays]
  misc_feature (28)..(183): NCBI GI NO: 30695525 NR Description: expressed protein [Arabidopsis thaliana]
  misc_feature (50)..(173): NCBI GI NO: 4680499 NR Description: hypothetical protein [Oryza sativa]
  misc_feature (16)..(60): NCBI GI NO: 4680499 NR Description: hypothetical protein [Oryza sativa]
  misc_feature (28)..(187): NCBI GI NO: 22329754 NR Description: polygalacturonase, putative [Arabidopsis thaliana]
  misc_feature (28)..(173): NCBI GI NO: 25518432 NR Description: hypothetical protein F5O8.3 - Arabidopsis thaliana
  misc_feature (28)..(173): NCBI GI NO: 15220621 NR Description: hypothetical protein [Arabidopsis thaliana]
  misc_feature (29)..(185): NCBI GI NO: 21312276 NR Description: RIKEN cDNA 1500034J20 [Mus musculus]
IPIEPSSPSAAAAAAMSRFVRRLAGIPWRQIAGEASSVGLLMAQGLCAVHVVSEHVLGVAFPRGPSMLPALNMAGDVLLTDKVSPRRGWVGPGDVVLLLSPEDPRKIVAKRVLGMEGDEVTYPVDAGNSDATKTVVVPQGHIWVQGDNIYSSNDSRQFGPVPYGLVKGKMSYRIWPPSRIGSIDSKE

SEQ ID NO: 13265 - protein, 172 aa, Triticum aestivum
  peptide (1)..(172): Ceres Seq. ID no. 13583693
  misc_feature (16)..(122): Pfam Name: Pfam Description:  Signal peptidase I
  misc_feature (1)..(158): NCBI GI NO: 22208508 NR Description: unknown protein [Sorghum bicolor]
  misc_feature (1)..(122): NCBI GI NO: 23928440 NR Description: hypothetical protein [Zea mays]
  misc_feature (122)..(158): NCBI GI NO: 23928440 NR Description: hypothetical protein [Zea mays]
  misc_feature (13)..(168): NCBI GI NO: 30695525 NR Description: expressed protein [Arabidopsis thaliana]
  misc_feature (35)..(158): NCBI GI NO: 4680499 NR Description: hypothetical protein [Oryza sativa]
  misc_feature (1)..(45): NCBI GI NO: 4680499 NR Description: hypothetical protein [Oryza sativa]
  misc_feature (13)..(172): NCBI GI NO: 22329754 NR Description: polygalacturonase, putative [Arabidopsis thaliana]
  misc_feature (13)..(158): NCBI GI NO: 25518432 NR Description: hypothetical protein F5O8.3 - Arabidopsis thaliana
  misc_feature (13)..(158): NCBI GI NO: 15220621 NR Description: hypothetical protein [Arabidopsis thaliana]
  misc_feature (14)..(170): NCBI GI NO: 21312276 NR Description: RIKEN cDNA 1500034J20 [Mus musculus]
MSRFVRRLAGIPWRQIAGEASSVGLLMAQGLCAVHVVSEHVLGVAFPRGPSMLPALNMAGDVLLTDKVSPRRGWVGPGDVVLLLSPEDPRKIVAKRVLGMEGDEVTYPVDAGNSDATKTVVVPQGHIWVQGDNIYSSNDSRQFGPVPYGLVKGKMSYRIWPPSRIGSIDSKE

SEQ ID NO: 13266 - protein, 152 aa, Triticum aestivum
  peptide (1)..(152): Ceres Seq. ID no. 13583694
NPNRALLPFRRRRRRHVPLRAAPRRHPVAPDRRGGLLRRSANGAGPLRRPRRQRARPRRRLPTGPQHAAGAEHGGGRAAHRQGEPAARVGGAGGRRAPPLAGGPAQDRRQARARDGGRRGHLPRRRRQQRRHQDRRGTARSYLGAGRQYLFI

SEQ ID NO: 13267 - DNA, 614 bp, Triticum aestivum
  misc_feature (1)..(614): Ceres Seq. ID no. 13590229
cctcgttgaaatgcttagaagaggagaaacgccccctcgtggcacccagaacccagagcggaaaaactgtggtcctgctggagggatgaccaccttgctaggcgagccaaagcctcccccatgcagggacctggatgcctgctaggtttgctttgagttgcaagcacacaaataagtaggcccggtcgcactgtatgttgcggaaaccgcgaaagcgatttgatctcctgttgttctcaaagctttcttgtggccaacaatggacattcgatttgattgatcttgttgttgtcgaagctttcttttgtctgacaattggatgcgtctacctgtcacacaccatctcttcttttttccttatcatcagctagactgcccactgataagatagtgctattctgaagctgcagctttgtatccggcataagaatctggggcactagatcgattgctgttatgctactcctgcagtgttatattcctgttgttcatgcattaatgtttgaatgaacacggacctggtacattgccgattttcggggagaaactttttgatatactaattttcttattctgtcattgtattaaacatcaatttatgtggtgtgtactgc

SEQ ID NO: 13268 - protein, 58 aa, Triticum aestivum
  peptide (1)..(58): Ceres Seq. ID no. 13590230
MLRKPRKRFDLLLFSKLSCGQQWTFDLIDLVVVEAFFCLTIGCVYLSHTISSFFLIIS

SEQ ID NO: 13269 - protein, 47 aa, Triticum aestivum
  peptide (1)..(47): Ceres Seq. ID no. 13590231
  misc_feature (1)..(47): NCBI GI NO: 6647650 NR Description: NADH-ubiquinone oxidoreductase 24 kDa subunit
  misc_feature (1)..(47): NCBI GI NO: 18411985 NR Description: predicted NADH dehydrogenase 24 kD subunit
LVEMLRRGETPPRGTQNPERKNCGPAGGMTTLLGEPKPPPCRDLDAC

SEQ ID NO: 13270 - protein, 44 aa, Triticum aestivum
  peptide (1)..(44): Ceres Seq. ID no. 13590232
  misc_feature (1)..(44): NCBI GI NO: 6647650 NR Description: NADH-ubiquinone oxidoreductase 24 kDa subunit
  misc_feature (1)..(44): NCBI GI NO: 18411985 NR Description: predicted NADH dehydrogenase 24 kD subunit
MLRRGETPPRGTQNPERKNCGPAGGMTTLLGEPKPPPCRDLDAC

SEQ ID NO: 13271 - DNA, 875 bp, Triticum aestivum
  misc_feature (1)..(875): Ceres Seq. ID no. 13583760
atcccgtcgctactcgcccatccccttcgccgcagcgccgccgcctctgatctccaccctcctcgacgcggcgactctgctttacgcccttacgcggcggaggcaaacagatcaaggataacacaaaatcatactttgaagaggtgtcttgtgccaatcactggaataatgactccgtcggcatctgttggaaaggaagtcaacttgaaggaagtcaacttcaacttgaaggaggataagaacataccctgtgctattcagtttgtaacgacgatgttggggacgtcttcaacattgacgatcggggaccggaacaagaagttcagggtgagccgttcttcgacttggataacggttgtcttcacacagtctatgttcattgccaccacagcaggttggatctacgacatgtataataaacctatctggaatgccggcttcccatggtggctgccagttgctgtgttgttgggcgcctacctggcagtggtagacctggcgcgtgggtatttgaccctcttcgtgccacaggcacccttggcggcatggaatgcacttgacgaagttggcttcaaggtgattggattttctgtcatcttaatctctgtccctgttttcttgtttgaccaggcgtggctgcacatcacctttgcttgccttcttagtgtcctcattgctaccatacttgccttctgtgtctgtcttgttcgcacgtaccggcaatagccctcttggcacctagcggctttgtttatggtttggatgtcgtttgctagtagacgaataagcttgtctctccaagccaaagtcgccccttttgtgtaaacagtcggtgccactcatgtgttgttgttgttattattattattattatt

SEQ ID NO: 13272 - protein, 241 aa, Triticum aestivum
  peptide (1)..(241): Ceres Seq. ID no. 13583761
  misc_feature (99)..(239): NCBI GI NO: 34910720 NR Description: P0690B02.24
  misc_feature (98)..(239): NCBI GI NO: 15528714 NR Description: P0583G08.15
IPSLLAHPLRRSAAASDLHPPRRGDSALRPYAAEANRSRITQNHTLKRCLVPITGIMTPSASVGKEVNLKEVNFNLKEDKNIPCAIQFVTTMLGTSSTLTIGDRNKKFRVSRSSTWITVVFTQSMFIATTAGWIYDMYNKPIWNAGFPWWLPVAVLLGAYLAVVDLARGYLTLFVPQAPLAAWNALDEVGFKVIGFSVILISVPVFLFDQAWLHITFACLLSVLIATILAFCVCLVRTYRQ

SEQ ID NO: 13273 - protein, 185 aa, Triticum aestivum
  peptide (1)..(185): Ceres Seq. ID no. 13583762
  misc_feature (43)..(183): NCBI GI NO: 34910720 NR Description: P0690B02.24
  misc_feature (42)..(183): NCBI GI NO: 15528714 NR Description: P0583G08.15
MTPSASVGKEVNLKEVNFNLKEDKNIPCAIQFVTTMLGTSSTLTIGDRNKKFRVSRSSTWITVVFTQSMFIATTAGWIYDMYNKPIWNAGFPWWLPVAVLLGAYLAVVDLARGYLTLFVPQAPLAAWNALDEVGFKVIGFSVILISVPVFLFDQAWLHITFACLLSVLIATILAFCVCLVRTYRQ

SEQ ID NO: 13274 - protein, 150 aa, Triticum aestivum
  peptide (1)..(150): Ceres Seq. ID no. 13583763
  misc_feature (8)..(148): NCBI GI NO: 34910720 NR Description: P0690B02.24
  misc_feature (7)..(148): NCBI GI NO: 15528714 NR Description: P0583G08.15
MLGTSSTLTIGDRNKKFRVSRSSTWITVVFTQSMFIATTAGWIYDMYNKPIWNAGFPWWLPVAVLLGAYLAVVDLARGYLTLFVPQAPLAAWNALDEVGFKVIGFSVILISVPVFLFDQAWLHITFACLLSVLIATILAFCVCLVRTYRQ

SEQ ID NO: 13275 - DNA, 622 bp, Triticum aestivum
  misc_feature (1)..(622): Ceres Seq. ID no. 12593148
aaagcaatcccaggacctccagctaatcatagcagccactcgactcgattcgattcgatctttctcggcgtctcgagctccccattcctcgatctcattccatccatggcgccgtccatctccattgccgccgcctcgccggcctcgggctggaagagcggcaggaaggccggggcggcgccggcggagggcgaggcggagaaggaggcgctgctgctgcggcgccgcaacgccgagctggagcgggaggtggcgctgctgcgggcggagctggaggccgcgcggctgcgcgccgaggccgcggaggaggccgaggagcggctgtgcgcgcagctgggcgaggccgagtgcgaggccctcgagctcgcgcgcgcctaccagggccacgtccaggagctcgcgcgggagctcgccgccgcacgcagcagataggcggagcgccgaggccgagctcgtcggtgattctttgacgatcgacgaagagacgtgtcgcgctctcgacacacgcggtgcggcggcagtatagatttctagacaaatgtaaaacgaggttaattagtattttcttgtccgagtatagattcctagcaagatgtccgagtaaaaagatggcagtgtttcc

SEQ ID NO: 13276 - protein, 174 aa, Triticum aestivum
  peptide (1)..(174): Ceres Seq. ID no. 12593149
  misc_feature (46)..(147): NCBI GI NO: 32400889 NR Description: ocs-element binding factor 1 [Triticum aestivum]
KQSQDLQLIIAATRLDSIRSFSASRAPHSSISFHPWRRPSPLPPPRRPRAGRAAGRPGRRRRRARRRRRRCCCGAATPSWSGRWRCCGRSWRPRGCAPRPRRRPRSGCARSWARPSARPSSSRAPTRATSRSSRGSSPPHAADRRSAEAELVGDSLTIDEETCRALDTRGAAAV

SEQ ID NO: 13277 - protein, 143 aa, Triticum aestivum
  peptide (1)..(143): Ceres Seq. ID no. 12593150
  misc_feature (66)..(142): NCBI GI NO: 37528811 NR Description: unknown protein [Brassica rapa subsp. pekinensis]
  misc_feature (55)..(140): NCBI GI NO: 37535942 NR Description: hypothetical protein
  misc_feature (68)..(138): NCBI GI NO: 15144306 NR Description: hypothetical protein
  misc_feature (66)..(142): NCBI GI NO: 15229169 NR Description: hypothetical protein; protein id: At3g49570.1
KAIPGPPANHSSHSTRFDSIFLGVSSSPFLDLIPSMAPSISIAAASPASGWKSGRKAGAAPAEGEAEKEALLLRRRNAELEREVALLRAELEAARLRAEAAEEAEERLCAQLGEAECEALELARAYQGHVQELARELAAARSR

SEQ ID NO: 13278 - protein, 108 aa, Triticum aestivum
  peptide (1)..(108): Ceres Seq. ID no. 12593151
  misc_feature (31)..(107): NCBI GI NO: 37528811 NR Description: unknown protein [Brassica rapa subsp. pekinensis]
  misc_feature (20)..(105): NCBI GI NO: 37535942 NR Description: hypothetical protein
  misc_feature (33)..(103): NCBI GI NO: 15144306 NR Description: hypothetical protein
  misc_feature (31)..(107): NCBI GI NO: 15229169 NR Description: hypothetical protein; protein id: At3g49570.1
MAPSISIAAASPASGWKSGRKAGAAPAEGEAEKEALLLRRRNAELEREVALLRAELEAARLRAEAAEEAEERLCAQLGEAECEALELARAYQGHVQELARELAAARSR

SEQ ID NO: 13279 - DNA, 1403 bp, Triticum aestivum
  misc_feature (1)..(1403): Ceres Seq. ID no. 14302317
atcaattattgtatccaaacagatctagaagagaagctgatcttctccttccttcggcaccctctccttccctgatccacctactactccttctctcttcctcctagatcctgatcgggtacgttacagacgcgctggccatggcttcccctcgccatcgccaggacggagacggaccacacgacggcgcgccgacgtacgccggcatggcgaagctggtgccggcgctcccgctcgagacgcggtgcccgccgttcgcgctgcggcgctacggcggcttctggctgccggaggcggccctgcggcgcggcctcccggcgttgcacgccgggttcgcgcccaggcgcgcagacgtgctcctcgccagctaccccaagtccggcaccacctggctcaaggccctcgccttcgccaccgtccgccgcgccgtgcacccgccttcttccatcgaccacccgctccgccgtcgcaacccgcaggactgcgtcccgttcctcgagttcgacttcgaccacggggacatggccgagctcgaggcgctcccttccccgcgggtgctcgccacgcacctcccctactcgctcctccccgaccgcgtcgtcgccgacgacggcgcgcggatcgtgtacgtctgccgggaccccaaggacgcgctggtctcctcgtggctcttcaccaggaaagcgtcgccgagtgtcggagtggactccgactcctactcgctgcaggaggcggccgagcttttccgcgagggccggtgcttctacggccctcagtgccggcacgtgctcgagtactgggacgcgagccgccgtcccttcggcggcggcgaggtgctgttcctgaggtacgaggagatgctgcgcgacccggcggggagtctgaagacgatggcggagttcatgggatgcggcttctccgaggaggaggtggcgcgaggggtggtggacgagatcgtggacctgtgcagcctggagaagctgaagaacatggaggccaacagggacgggcggcggaacgcgtcgggcatcaggagcgactctttcttccggaagggggtcgccggggactggagcagccacatgtcgccggagatggggaagatgctggacgaggccgtcgaggaggcactccaggggtctgggttcagcttctctggctgagctccggcgagcactggccagggcggtagtgcggggcaaacaacaatgtcattgcaaagcacggcttggaacacatgttttgtggcgatccatggatttaaggcgcgagtttgattccagtttcttgctcgaaagttgattgtcttgtaagttcaaacagtagtttgataactcattccaaatgtttctttcccaaagttccgaatcattccagttctacaatttcagtcctcattcagc

SEQ ID NO: 13280 - protein, 340 aa, Triticum aestivum
  peptide (1)..(340): Ceres Seq. ID no. 14302318
  misc_feature (70)..(335): Pfam Name: Pfam Description:  Sulfotransferase domain
  misc_feature (41)..(337): NCBI GI NO: 40253317 NR Description: putative flavonol 3-sulfotransferase
  misc_feature (23)..(337): NCBI GI NO: 40253319 NR Description: putative flavonol 3-sulfotransferase
  misc_feature (25)..(335): NCBI GI NO: 38346451 NR Description: OSJNBa0018J19.12
  misc_feature (36)..(335): NCBI GI NO: 35215145 NR Description: putative flavonol 3'-sulfotransferase
  misc_feature (37)..(321): NCBI GI NO: 34393650 NR Description: putative flavonol 3-sulfotransferase
  misc_feature (25)..(338): NCBI GI NO: 37531912 NR Description: putative flavonol 3-sulfotransferase
  misc_feature (44)..(337): NCBI GI NO: 34905060 NR Description: putative flavonol 4'-sulfotransferase
  misc_feature (26)..(335): NCBI GI NO: 15221130 NR Description: sulfotransferase family [Arabidopsis thaliana]
  misc_feature (26)..(335): NCBI GI NO: 21593660 NR Description: putative flavonol sulfotransferase
  misc_feature (3)..(340): NCBI GI NO: 38344441 NR Description: OSJNBa0038O10.13
MASPRHRQDGDGPHDGAPTYAGMAKLVPALPLETRCPPFALRRYGGFWLPEAALRRGLPALHAGFAPRRADVLLASYPKSGTTWLKALAFATVRRAVHPPSSIDHPLRRRNPQDCVPFLEFDFDHGDMAELEALPSPRVLATHLPYSLLPDRVVADDGARIVYVCRDPKDALVSSWLFTRKASPSVGVDSDSYSLQEAAELFREGRCFYGPQCRHVLEYWDASRRPFGGGEVLFLRYEEMLRDPAGSLKTMAEFMGCGFSEEEVARGVVDEIVDLCSLEKLKNMEANRDGRRNASGIRSDSFFRKGVAGDWSSHMSPEMGKMLDEAVEEALQGSGFSFSG

SEQ ID NO: 13281 - protein, 318 aa, Triticum aestivum
  peptide (1)..(318): Ceres Seq. ID no. 14302319
  misc_feature (48)..(313): Pfam Name: Pfam Description:  Sulfotransferase domain
  misc_feature (19)..(315): NCBI GI NO: 40253317 NR Description: putative flavonol 3-sulfotransferase
  misc_feature (1)..(315): NCBI GI NO: 40253319 NR Description: putative flavonol 3-sulfotransferase
  misc_feature (3)..(313): NCBI GI NO: 38346451 NR Description: OSJNBa0018J19.12
  misc_feature (14)..(313): NCBI GI NO: 35215145 NR Description: putative flavonol 3'-sulfotransferase
  misc_feature (15)..(299): NCBI GI NO: 34393650 NR Description: putative flavonol 3-sulfotransferase
  misc_feature (3)..(316): NCBI GI NO: 37531912 NR Description: putative flavonol 3-sulfotransferase
  misc_feature (22)..(315): NCBI GI NO: 34905060 NR Description: putative flavonol 4'-sulfotransferase
  misc_feature (4)..(313): NCBI GI NO: 15221130 NR Description: sulfotransferase family [Arabidopsis thaliana]
  misc_feature (4)..(313): NCBI GI NO: 21593660 NR Description: putative flavonol sulfotransferase
  misc_feature (1)..(318): NCBI GI NO: 38344441 NR Description: OSJNBa0038O10.13
MAKLVPALPLETRCPPFALRRYGGFWLPEAALRRGLPALHAGFAPRRADVLLASYPKSGTTWLKALAFATVRRAVHPPSSIDHPLRRRNPQDCVPFLEFDFDHGDMAELEALPSPRVLATHLPYSLLPDRVVADDGARIVYVCRDPKDALVSSWLFTRKASPSVGVDSDSYSLQEAAELFREGRCFYGPQCRHVLEYWDASRRPFGGGEVLFLRYEEMLRDPAGSLKTMAEFMGCGFSEEEVARGVVDEIVDLCSLEKLKNMEANRDGRRNASGIRSDSFFRKGVAGDWSSHMSPEMGKMLDEAVEEALQGSGFSFSG

SEQ ID NO: 13282 - protein, 213 aa, Triticum aestivum
  peptide (1)..(213): Ceres Seq. ID no. 14302320
  misc_feature (1)..(208): Pfam Name: Pfam Description:  Sulfotransferase domain
  misc_feature (1)..(210): NCBI GI NO: 40253317 NR Description: putative flavonol 3-sulfotransferase
  misc_feature (1)..(210): NCBI GI NO: 40253319 NR Description: putative flavonol 3-sulfotransferase
  misc_feature (1)..(208): NCBI GI NO: 38346451 NR Description: OSJNBa0018J19.12
  misc_feature (1)..(208): NCBI GI NO: 35215145 NR Description: putative flavonol 3'-sulfotransferase
  misc_feature (1)..(194): NCBI GI NO: 34393650 NR Description: putative flavonol 3-sulfotransferase
  misc_feature (1)..(211): NCBI GI NO: 37531912 NR Description: putative flavonol 3-sulfotransferase
  misc_feature (1)..(210): NCBI GI NO: 34905060 NR Description: putative flavonol 4'-sulfotransferase
  misc_feature (1)..(208): NCBI GI NO: 15221130 NR Description: sulfotransferase family [Arabidopsis thaliana]
  misc_feature (1)..(208): NCBI GI NO: 21593660 NR Description: putative flavonol sulfotransferase
  misc_feature (1)..(213): NCBI GI NO: 38344441 NR Description: OSJNBa0038O10.13
MAELEALPSPRVLATHLPYSLLPDRVVADDGARIVYVCRDPKDALVSSWLFTRKASPSVGVDSDSYSLQEAAELFREGRCFYGPQCRHVLEYWDASRRPFGGGEVLFLRYEEMLRDPAGSLKTMAEFMGCGFSEEEVARGVVDEIVDLCSLEKLKNMEANRDGRRNASGIRSDSFFRKGVAGDWSSHMSPEMGKMLDEAVEEALQGSGFSFSG

SEQ ID NO: 13283 - DNA, 1475 bp, Triticum aestivum
  misc_feature (1)..(1475): Ceres Seq. ID no. 12615552
actgccagtccccacgcgagcgacctagggcgagatgagtagccgccgccgccgccgccacgccggctcgccggcgtccgcgccgctggacgacgacgacctcctctgcgagatcctgctccgccttcccccggagccctcctccctcccgcgcgcatccctcgtctgcaagcgctggcgccgcctcgtctcctaccccggcttcttccgccgcttccgcctccaccaccgccgcaacccttccctcctcggcttcttcgacaggtttaatggcctctccttcctacccactctgggggcccccaatcgcgtcccccacgggcgcttctctttccactgcgatgacttcgacagctgctctatgtcccttggatgtcgccatggcctcatgctcatcttccttcgtaagcgtctccaggtcctggtgtgggaccccgtcaccggcgaccagcaccgcattgccattcccgcagcgtttgatacggagaaaacccttatcaacggggcggttcttcgcgctgccggagatgtcgaaaacttccaggtggtgttggtagctgcagatggcgacgacgaacaacacatacaggcgctcgcctgtgtttactcgtcaaagaccggcttatggggaaatcttgtctcaacaccgattccataccaggcttctgatagtccataccgtatccccaccatggttaatacagatgacgctgtgctagctggagattccctttactggaagcttactgggaatatggttggaattcttgagtttgatttggaaaagcagagtctagctgtgataaggatgccactggatatgtatggccagggcaagtgcttcacggttatgcgggccgagggtggtgggctgggtctcctcgttgtgttgaactctgactacaccgcccagttatggaagaggaagatcgattgtgatggtggtgcttcatgggggcttgcacgaactattgaactggacaagctacttcccataaaaccggaggagaaagggcttctagtgatactagggtttgctgagcagaataatgtggtgtttctgtggacagttatcggtgtattgatgatccagcttgagtcattggagttcaagaatctttataaaaccatgatcttttcttactaccatccatttgaaagtgtctacagtgcaggaacatctgtttctggtggacgcgacagggctgagcttttggtcaataaataagatgattgtccgttggatatgctgtttgatctactaattgagcaggtatctagagctacattctggtgactgagatgaagaagaaatgggttgttggctgtaggcagggatcaggctcttgtattttgtatgttggaccttcagattgactctctatgtagcatgcaccggtctgtactctgctgtgaagtgcacctgtaggaattaattgcttaatttgacaacctgcgtcgatcatctagtttct

SEQ ID NO: 13284 - protein, 397 aa, Triticum aestivum
  peptide (1)..(397): Ceres Seq. ID no. 12615553
  misc_feature (17)..(62): Pfam Name: Pfam Description:  F-box domain
  misc_feature (3)..(391): NCBI GI NO: 37530914 NR Description: unknown protein
  misc_feature (4)..(381): NCBI GI NO: 37530900 NR Description: hypothetical protein
  misc_feature (178)..(392): NCBI GI NO: 37530924 NR Description: unknown protein
  misc_feature (4)..(158): NCBI GI NO: 37530924 NR Description: unknown protein
  misc_feature (1)..(205): NCBI GI NO: 37531854 NR Description: hypothetical protein
  misc_feature (262)..(356): NCBI GI NO: 37531854 NR Description: hypothetical protein
  misc_feature (1)..(296): NCBI GI NO: 37530944 NR Description: hypothetical protein
  misc_feature (12)..(378): NCBI GI NO: 37531026 NR Description: hypothetical protein
  misc_feature (9)..(397): NCBI GI NO: 37531022 NR Description: hypothetical protein
  misc_feature (4)..(376): NCBI GI NO: 37531214 NR Description: unknown protein
MSSRRRRRHAGSPASAPLDDDDLLCEILLRLPPEPSSLPRASLVCKRWRRLVSYPGFFRRFRLHHRRNPSLLGFFDRFNGLSFLPTLGAPNRVPHGRFSFHCDDFDSCSMSLGCRHGLMLIFLRKRLQVLVWDPVTGDQHRIAIPAAFDTEKTLINGAVLRAAGDVENFQVVLVAADGDDEQHIQALACVYSSKTGLWGNLVSTPIPYQASDSPYRIPTMVNTDDAVLAGDSLYWKLTGNMVGILEFDLEKQSLAVIRMPLDMYGQGKCFTVMRAEGGGLGLLVVLNSDYTAQLWKRKIDCDGGASWGLARTIELDKLLPIKPEEKGLLVILGFAEQNNVVFLWTVIGVLMIQLESLEFKNLYKTMIFSYYHPFESVYSAGTSVSGGRDRAELLVNK

SEQ ID NO: 13285 - protein, 288 aa, Triticum aestivum
  peptide (1)..(288): Ceres Seq. ID no. 12615554
  misc_feature (1)..(282): NCBI GI NO: 37530914 NR Description: unknown protein
  misc_feature (1)..(272): NCBI GI NO: 37530900 NR Description: hypothetical protein
  misc_feature (69)..(283): NCBI GI NO: 37530924 NR Description: unknown protein
  misc_feature (1)..(49): NCBI GI NO: 37530924 NR Description: unknown protein
  misc_feature (1)..(96): NCBI GI NO: 37531854 NR Description: hypothetical protein
  misc_feature (153)..(247): NCBI GI NO: 37531854 NR Description: hypothetical protein
  misc_feature (1)..(187): NCBI GI NO: 37530944 NR Description: hypothetical protein
  misc_feature (1)..(269): NCBI GI NO: 37531026 NR Description: hypothetical protein
  misc_feature (1)..(288): NCBI GI NO: 37531022 NR Description: hypothetical protein
  misc_feature (1)..(267): NCBI GI NO: 37531214 NR Description: unknown protein
MSLGCRHGLMLIFLRKRLQVLVWDPVTGDQHRIAIPAAFDTEKTLINGAVLRAAGDVENFQVVLVAADGDDEQHIQALACVYSSKTGLWGNLVSTPIPYQASDSPYRIPTMVNTDDAVLAGDSLYWKLTGNMVGILEFDLEKQSLAVIRMPLDMYGQGKCFTVMRAEGGGLGLLVVLNSDYTAQLWKRKIDCDGGASWGLARTIELDKLLPIKPEEKGLLVILGFAEQNNVVFLWTVIGVLMIQLESLEFKNLYKTMIFSYYHPFESVYSAGTSVSGGRDRAELLVNK

SEQ ID NO: 13286 - protein, 279 aa, Triticum aestivum
  peptide (1)..(279): Ceres Seq. ID no. 12615555
  misc_feature (1)..(273): NCBI GI NO: 37530914 NR Description: unknown protein
  misc_feature (1)..(263): NCBI GI NO: 37530900 NR Description: hypothetical protein
  misc_feature (60)..(274): NCBI GI NO: 37530924 NR Description: unknown protein
  misc_feature (1)..(40): NCBI GI NO: 37530924 NR Description: unknown protein
  misc_feature (1)..(87): NCBI GI NO: 37531854 NR Description: hypothetical protein
  misc_feature (144)..(238): NCBI GI NO: 37531854 NR Description: hypothetical protein
  misc_feature (1)..(178): NCBI GI NO: 37530944 NR Description: hypothetical protein
  misc_feature (1)..(260): NCBI GI NO: 37531026 NR Description: hypothetical protein
  misc_feature (1)..(279): NCBI GI NO: 37531022 NR Description: hypothetical protein
  misc_feature (1)..(258): NCBI GI NO: 37531214 NR Description: unknown protein
MLIFLRKRLQVLVWDPVTGDQHRIAIPAAFDTEKTLINGAVLRAAGDVENFQVVLVAADGDDEQHIQALACVYSSKTGLWGNLVSTPIPYQASDSPYRIPTMVNTDDAVLAGDSLYWKLTGNMVGILEFDLEKQSLAVIRMPLDMYGQGKCFTVMRAEGGGLGLLVVLNSDYTAQLWKRKIDCDGGASWGLARTIELDKLLPIKPEEKGLLVILGFAEQNNVVFLWTVIGVLMIQLESLEFKNLYKTMIFSYYHPFESVYSAGTSVSGGRDRAELLVNK

SEQ ID NO: 13287 - DNA, 1691 bp, Triticum aestivum
  misc_feature (1)..(1691): Ceres Seq. ID no. 12465428
aagcaaacaaactttccttaaacccaagtagccaaagggaaagaaaaaaccccaagccatggcctcctcttccctcttcgccgccgggcgccgccttctccacttggggcgcggcaggcttctccaaggccgagtccgtccccacaatcccactcctctgctcctccctgtgcgcgccgcatcctctcctccctccaacagcgccgagaggccgccgcggcgacccccgggcctgcagtccacgctgtggccgctgggccacccggacacgcttctggtgccggagatcgagcgctgggcggagaagccccgcaaccgcctccgccccgtggagctcgagcgcatcgtcaaagagctccgcaagcgccgccgccaccgccaggccctcgaggtctccgaatggatgagtgctaagggtcatgtcagatttttgccaaaggatcatgctgttcacctggatttgatcggtcaagttcgtggaatcggagcagcagaagcctatttcaatcaactgcctgataaagataagacggagaaaccctacggtgcactcctgaactgctacacacgagaactcatggttgatgaatccttggctcattttcagaagatgaaagagctgggttttgtgttctgcagtctcccctacaacaacctcatgggcctctatactaacatagggcagcatgagaaggtcccttcagtgatagcagagatgaaaaggagtggtatcatgcctgacaacttcagctacagaatttgcataaactcttatggcacacgggcagattttttcgggatggagaacaccctggaagatatggagtgtgagcctcaaattgtagtcgattggaatacctatgccgttgcggcgagcaactacattaagggcaacctaagggagaaggcaatctctgccttaaagaaagcagaagcaaaaattgacataaaagattcagatacctacaaccacctgatgtccctctacggccagctgggggacaagtcagaggtgaagaggctgtgggcactccaaatgtcaaactgcaagaggcatattaataaggactacactacaatgcttgcaatgcttgtgagacttgatgaaattgaagaagctgaggccttgttgaaagagtgggagtcgagcgaaaacacattcgacttccatgttccgaatgtcttgatcactggataccgacagaaggacatgctggacaaggccgaagcgctgctggatgacttcttgaagaagggaaagatgcctccttcgagcagttgggccatcgtggcaatcggctatgctgagaaaggtgatgctgcgaaagcctatgagttgacaaaaaatgccctttgtgtttacgctccgaggagcggctggatcccgaggcctgcgatgattgagatgatactcaagtatcttggagacgaaggtgatctcaaggatgttgaaactttcattcaactgctgcaagctgctatgcctatgaacttagatatgaccgacgttttgtcaagggctcgtatgagagaagaaaagaaggctggagatgcagagaaggaagccctaagctcaacaaaggcatcaggataattttactgcaactctcaggaccaacttatttcaccatgtaatttatctagttagttaccggaatttatttgatattttactgagtctgaaacttgcc

SEQ ID NO: 13288 - protein, 511 aa, Triticum aestivum
  peptide (1)..(511): Ceres Seq. ID no. 12465429
  misc_feature (195)..(229): Pfam Name: Pfam Description:  PPR repeat
  misc_feature (2)..(499): NCBI GI NO: 34393591 NR Description: putative DNA-binding protein
  misc_feature (59)..(492): NCBI GI NO: 22328859 NR Description: unknown protein; protein id: At4g21705.1
  misc_feature (59)..(471): NCBI GI NO: 15225409 NR Description: hypothetical protein; protein id: At2g20710.1
  misc_feature (77)..(503): NCBI GI NO: 22329290 NR Description: hypothetical protein; protein id: At1g02150
  misc_feature (77)..(503): NCBI GI NO: 20453085 NR Description: At1g02150/T7I23.8 [Arabidopsis thaliana]
  misc_feature (92)..(472): NCBI GI NO: 15219808 NR Description: hypothetical protein; protein id: At1g60770.1
  misc_feature (13)..(511): NCBI GI NO: 37535776 NR Description: putative leaf protein
  misc_feature (52)..(487): NCBI GI NO: 34905490 NR Description: P0682B08.20
  misc_feature (39)..(498): NCBI GI NO: 37535774 NR Description: putative leaf protein
  misc_feature (92)..(501): NCBI GI NO: 18411800 NR Description: expressed protein; protein id: At4g01990
MASSSLFAAGRRLLHLGRGRLLQGRVRPHNPTPLLLPVRAASSPPSNSAERPPRRPPGLQSTLWPLGHPDTLLVPEIERWAEKPRNRLRPVELERIVKELRKRRRHRQALEVSEWMSAKGHVRFLPKDHAVHLDLIGQVRGIGAAEAYFNQLPDKDKTEKPYGALLNCYTRELMVDESLAHFQKMKELGFVFCSLPYNNLMGLYTNIGQHEKVPSVIAEMKRSGIMPDNFSYRICINSYGTRADFFGMENTLEDMECEPQIVVDWNTYAVAASNYIKGNLREKAISALKKAEAKIDIKDSDTYNHLMSLYGQLGDKSEVKRLWALQMSNCKRHINKDYTTMLAMLVRLDEIEEAEALLKEWESSENTFDFHVPNVLITGYRQKDMLDKAEALLDDFLKKGKMPPSSSWAIVAIGYAEKGDAAKAYELTKNALCVYAPRSGWIPRPAMIEMILKYLGDEGDLKDVETFIQLLQAAMPMNLDMTDVLSRARMREEKKAGDAEKEALSSTKASG

SEQ ID NO: 13289 - protein, 396 aa, Triticum aestivum
  peptide (1)..(396): Ceres Seq. ID no. 12465430
  misc_feature (80)..(114): Pfam Name: Pfam Description:  PPR repeat
  misc_feature (1)..(384): NCBI GI NO: 34393591 NR Description: putative DNA-binding protein
  misc_feature (1)..(377): NCBI GI NO: 22328859 NR Description: unknown protein; protein id: At4g21705.1
  misc_feature (1)..(356): NCBI GI NO: 15225409 NR Description: hypothetical protein; protein id: At2g20710.1
  misc_feature (1)..(388): NCBI GI NO: 22329290 NR Description: hypothetical protein; protein id: At1g02150
  misc_feature (1)..(388): NCBI GI NO: 20453085 NR Description: At1g02150/T7I23.8 [Arabidopsis thaliana]
  misc_feature (1)..(357): NCBI GI NO: 15219808 NR Description: hypothetical protein; protein id: At1g60770.1
  misc_feature (1)..(396): NCBI GI NO: 37535776 NR Description: putative leaf protein
  misc_feature (1)..(372): NCBI GI NO: 34905490 NR Description: P0682B08.20
  misc_feature (1)..(383): NCBI GI NO: 37535774 NR Description: putative leaf protein
  misc_feature (1)..(386): NCBI GI NO: 18411800 NR Description: expressed protein; protein id: At4g01990
MSAKGHVRFLPKDHAVHLDLIGQVRGIGAAEAYFNQLPDKDKTEKPYGALLNCYTRELMVDESLAHFQKMKELGFVFCSLPYNNLMGLYTNIGQHEKVPSVIAEMKRSGIMPDNFSYRICINSYGTRADFFGMENTLEDMECEPQIVVDWNTYAVAASNYIKGNLREKAISALKKAEAKIDIKDSDTYNHLMSLYGQLGDKSEVKRLWALQMSNCKRHINKDYTTMLAMLVRLDEIEEAEALLKEWESSENTFDFHVPNVLITGYRQKDMLDKAEALLDDFLKKGKMPPSSSWAIVAIGYAEKGDAAKAYELTKNALCVYAPRSGWIPRPAMIEMILKYLGDEGDLKDVETFIQLLQAAMPMNLDMTDVLSRARMREEKKAGDAEKEALSSTKASG

SEQ ID NO: 13290 - protein, 338 aa, Triticum aestivum
  peptide (1)..(338): Ceres Seq. ID no. 12465431
  misc_feature (22)..(56): Pfam Name: Pfam Description:  PPR repeat
  misc_feature (1)..(326): NCBI GI NO: 34393591 NR Description: putative DNA-binding protein
  misc_feature (1)..(319): NCBI GI NO: 22328859 NR Description: unknown protein; protein id: At4g21705.1
  misc_feature (1)..(298): NCBI GI NO: 15225409 NR Description: hypothetical protein; protein id: At2g20710.1
  misc_feature (1)..(330): NCBI GI NO: 22329290 NR Description: hypothetical protein; protein id: At1g02150
  misc_feature (1)..(330): NCBI GI NO: 20453085 NR Description: At1g02150/T7I23.8 [Arabidopsis thaliana]
  misc_feature (1)..(299): NCBI GI NO: 15219808 NR Description: hypothetical protein; protein id: At1g60770.1
  misc_feature (1)..(338): NCBI GI NO: 37535776 NR Description: putative leaf protein
  misc_feature (1)..(314): NCBI GI NO: 34905490 NR Description: P0682B08.20
  misc_feature (1)..(325): NCBI GI NO: 37535774 NR Description: putative leaf protein
  misc_feature (1)..(328): NCBI GI NO: 18411800 NR Description: expressed protein; protein id: At4g01990
MVDESLAHFQKMKELGFVFCSLPYNNLMGLYTNIGQHEKVPSVIAEMKRSGIMPDNFSYRICINSYGTRADFFGMENTLEDMECEPQIVVDWNTYAVAASNYIKGNLREKAISALKKAEAKIDIKDSDTYNHLMSLYGQLGDKSEVKRLWALQMSNCKRHINKDYTTMLAMLVRLDEIEEAEALLKEWESSENTFDFHVPNVLITGYRQKDMLDKAEALLDDFLKKGKMPPSSSWAIVAIGYAEKGDAAKAYELTKNALCVYAPRSGWIPRPAMIEMILKYLGDEGDLKDVETFIQLLQAAMPMNLDMTDVLSRARMREEKKAGDAEKEALSSTKASG

SEQ ID NO: 13291 - DNA, 760 bp, Triticum aestivum
  misc_feature (1)..(760): Ceres Seq. ID no. 13583718
gaagagccgaacacccaccccaatccactaacctagcgatgcctcccaagcgcaagtccccggttgcgacggcggcggcccccgcaatgccgcctaggatgacccggagcatggccgccgggaagcggggcgccgacgctccggctaaaaaggaggaagcagaggcggcgccggcggcggccggggggaagggcaggaagaaggccaagaaggaggtgtctgcggtggagacggtactgtcgcctcctgcagcggccaagcagaaggtgaagaaaaatgccaagaaggaggtggtggcggccgcggtagatgatggcggtgctggcgctgaaagcgggaagcgcgtcatcgtcgaggcctgcacccagtgccaacagttcaagagaagagctttaaaggtgaaggaggatcttgaaagtgctgtccctggggtttctgtgacaatcaaccctgagaagccacgccgtggatgccttgagatacgggaggaaggtggtgatgtgttcatttcactgcagaacatgccccggcccttcaaaaagatgagggagctcgacatggacaaggttatcaaggacattgcccagaaaattgcttgaatctgacgtggcattaatgtatggatgcgctccttttgcaattgatgtttagggcttattttgtgtgggaacttggtattgcagtggccgtagaatgtgggatcagtgtttcgttattgtgccctatgtgggctaagacatgctgaaattatcgcattagc

SEQ ID NO: 13292 - protein, 198 aa, Triticum aestivum
  peptide (1)..(198): Ceres Seq. ID no. 13583719
  misc_feature (13)..(197): NCBI GI NO: 22329049 NR Description: expressed protein [Arabidopsis thaliana]
  misc_feature (32)..(197): NCBI GI NO: 18400547 NR Description: expressed protein [Arabidopsis thaliana]
  misc_feature (13)..(152): NCBI GI NO: 7486666 NR Description: hypothetical protein F8F16
  misc_feature (90)..(198): NCBI GI NO: 33516960 NR Description: Selenoprotein H
RAEHPPQSTNLAMPPKRKSPVATAAAPAMPPRMTRSMAAGKRGADAPAKKEEAEAAPAAAGGKGRKKAKKEVSAVETVLSPPAAAKQKVKKNAKKEVVAAAVDDGGAGAESGKRVIVEACTQCQQFKRRALKVKEDLESAVPGVSVTINPEKPRRGCLEIREEGGDVFISLQNMPRPFKKMRELDMDKVIKDIAQKIA

SEQ ID NO: 13293 - protein, 186 aa, Triticum aestivum
  peptide (1)..(186): Ceres Seq. ID no. 13583720
  misc_feature (1)..(185): NCBI GI NO: 22329049 NR Description: expressed protein [Arabidopsis thaliana]
  misc_feature (20)..(185): NCBI GI NO: 18400547 NR Description: expressed protein [Arabidopsis thaliana]
  misc_feature (1)..(140): NCBI GI NO: 7486666 NR Description: hypothetical protein F8F16
  misc_feature (78)..(186): NCBI GI NO: 33516960 NR Description: Selenoprotein H
MPPKRKSPVATAAAPAMPPRMTRSMAAGKRGADAPAKKEEAEAAPAAAGGKGRKKAKKEVSAVETVLSPPAAAKQKVKKNAKKEVVAAAVDDGGAGAESGKRVIVEACTQCQQFKRRALKVKEDLESAVPGVSVTINPEKPRRGCLEIREEGGDVFISLQNMPRPFKKMRELDMDKVIKDIAQKIA

SEQ ID NO: 13294 - protein, 170 aa, Triticum aestivum
  peptide (1)..(170): Ceres Seq. ID no. 13583721
  misc_feature (1)..(169): NCBI GI NO: 22329049 NR Description: expressed protein [Arabidopsis thaliana]
  misc_feature (4)..(169): NCBI GI NO: 18400547 NR Description: expressed protein [Arabidopsis thaliana]
  misc_feature (1)..(124): NCBI GI NO: 7486666 NR Description: hypothetical protein F8F16
  misc_feature (62)..(170): NCBI GI NO: 33516960 NR Description: Selenoprotein H
MPPRMTRSMAAGKRGADAPAKKEEAEAAPAAAGGKGRKKAKKEVSAVETVLSPPAAAKQKVKKNAKKEVVAAAVDDGGAGAESGKRVIVEACTQCQQFKRRALKVKEDLESAVPGVSVTINPEKPRRGCLEIREEGGDVFISLQNMPRPFKKMRELDMDKVIKDIAQKIA

SEQ ID NO: 13295 - DNA, 1429 bp, Triticum aestivum
  misc_feature (1)..(1429): Ceres Seq. ID no. 14314084
cttttttcgcttcactccattctcaaaccatggcggagcacaagcgtacagtttccaccctcgttctcctcctcctcttcttctcggcgccgacgaatgccacacggccaccagcaacgctccgcatccccgtcgtccaccgcgacgcggtcttcccgccgccgccgggcgccagccgtggtagcctcctaagccgccgcgcggctgccgacgccgcgcggctgccgacgccgcgcgctacgcctccctcaaggcgtccctcgggcctcggcctccgctcctcctccgcgcacgacgaccgcctccactccccggtcatgtccgggctccccttcgacagcggcgagtacttcgcgtccgtcggcgtgggcaccccgtccaccagcgcgctgctggtcatcgacaccgggagcgacctcatctggctccagtgcaaaccctgccgccgctgccaccgccagatgagcccgctctacgaccccaagggctccagcacctaccgccagatcccctgctcgtcgccgcggtgcttccctcgccatggctgcgacaccagcaccggggcctgcgggtacgccatggtctacggcgacggctccggcagcaggggcaacctcgccaccgacaggctcgtcttctccaacgacacgtccgtggacagcgtcgtcatcgggtgcggccacgacaacgcggagctgttcgactcgtcggccggggtgctgggcgtcggccgcggcgccggctccctggcgacgcaggtggcgccgacctacgggcgctacttcgcctactgcctcggcgaccgcacgtccgtcgcgcggagcagcgcctcgtacctcgccttcggccgcacgccggagccgccgtccacggccttcaccccgctgctgtccaacccgcggcgccccaacctgtactacgtgaacatggccggcttcagcgtcggcggcgagcgtgtcgccggcgggttctgcagctccagcctctggctcgacccggcgaccgggcggggcggcgtggtggtggactcgggcacgtccatatcgcggctccccagggatgtgtacgcggcgctgcgcgacgccttcgacgcgcgcgcggccgcggccgggatgcggaggctggcgcggggcatctcggtgttcgacgcgtgctacgagctccgaggcgccagcgtgccggcggtggtgctgcacttcgctggcggcgcggacgtggcgctgcccccggagaactacttcatacccgagcagggcgggaagtaccactgcctggcgctggaggcgacggacgacgggctcagcgtgctcggcaacgtcctgcagcagggattccgggtcgtgttcgatgtcgagaaagaacgtgtcgggttcgcgccaaatggctgctaagcttgatcaacatttatttacacggttgtttaacctgc

SEQ ID NO: 13296 - protein, 462 aa, Triticum aestivum
  peptide (1)..(462): Ceres Seq. ID no. 14314085
  misc_feature (70)..(459): Pfam Name: Pfam Description:  Eukaryotic aspartyl protease
  misc_feature (70)..(462): NCBI GI NO: 34910676 NR Description: P0690B02.2
  misc_feature (17)..(73): NCBI GI NO: 34910676 NR Description: P0690B02.2
  misc_feature (38)..(462): NCBI GI NO: 15290061 NR Description: nucleoid DNA-binding protein cnd41-like protein
  misc_feature (62)..(462): NCBI GI NO: 15223368 NR Description: chloroplast nucleoid DNA binding protein -related
  misc_feature (62)..(462): NCBI GI NO: 21594980 NR Description: chloroplast nucleoid DNA binding protein, putative
  misc_feature (105)..(462): NCBI GI NO: 15228618 NR Description: expressed protein [Arabidopsis thaliana]
  misc_feature (64)..(462): NCBI GI NO: 34895664 NR Description: nucleoid DNA-binding protein cnd41-like protein
  misc_feature (39)..(462): NCBI GI NO: 28392860 NR Description: unknown protein [Arabidopsis thaliana]
  misc_feature (101)..(462): NCBI GI NO: 15229656 NR Description: chloroplast nucleoid DNA-binding protein -related
  misc_feature (101)..(462): NCBI GI NO: 19424106 NR Description: putative chloroplast nucleoid DNA-binding protein
FFASLHSQTMAEHKRTVSTLVLLLLFFSAPTNATRPPATLRIPVVHRDAVFPPPPGASRGSLLSRRAAADAARLPTPRATPPSRRPSGLGLRSSSAHDDRLHSPVMSGLPFDSGEYFASVGVGTPSTSALLVIDTGSDLIWLQCKPCRRCHRQMSPLYDPKGSSTYRQIPCSSPRCFPRHGCDTSTGACGYAMVYGDGSGSRGNLATDRLVFSNDTSVDSVVIGCGHDNAELFDSSAGVLGVGRGAGSLATQVAPTYGRYFAYCLGDRTSVARSSASYLAFGRTPEPPSTAFTPLLSNPRRPNLYYVNMAGFSVGGERVAGGFCSSSLWLDPATGRGGVVVDSGTSISRLPRDVYAALRDAFDARAAAAGMRRLARGISVFDACYELRGASVPAVVLHFAGGADVALPPENYFIPEQGGKYHCLALEATDDGLSVLGNVLQQGFRVVFDVEKERVGFAPNGC

SEQ ID NO: 13297 - protein, 453 aa, Triticum aestivum
  peptide (1)..(453): Ceres Seq. ID no. 14314086
  misc_feature (61)..(450): Pfam Name: Pfam Description:  Eukaryotic aspartyl protease
  misc_feature (61)..(453): NCBI GI NO: 34910676 NR Description: P0690B02.2
  misc_feature (8)..(64): NCBI GI NO: 34910676 NR Description: P0690B02.2
  misc_feature (29)..(453): NCBI GI NO: 15290061 NR Description: nucleoid DNA-binding protein cnd41-like protein
  misc_feature (53)..(453): NCBI GI NO: 15223368 NR Description: chloroplast nucleoid DNA binding protein -related
  misc_feature (53)..(453): NCBI GI NO: 21594980 NR Description: chloroplast nucleoid DNA binding protein, putative
  misc_feature (96)..(453): NCBI GI NO: 15228618 NR Description: expressed protein [Arabidopsis thaliana]
  misc_feature (55)..(453): NCBI GI NO: 34895664 NR Description: nucleoid DNA-binding protein cnd41-like protein
  misc_feature (30)..(453): NCBI GI NO: 28392860 NR Description: unknown protein [Arabidopsis thaliana]
  misc_feature (92)..(453): NCBI GI NO: 15229656 NR Description: chloroplast nucleoid DNA-binding protein -related
  misc_feature (92)..(453): NCBI GI NO: 19424106 NR Description: putative chloroplast nucleoid DNA-binding protein
MAEHKRTVSTLVLLLLFFSAPTNATRPPATLRIPVVHRDAVFPPPPGASRGSLLSRRAAADAARLPTPRATPPSRRPSGLGLRSSSAHDDRLHSPVMSGLPFDSGEYFASVGVGTPSTSALLVIDTGSDLIWLQCKPCRRCHRQMSPLYDPKGSSTYRQIPCSSPRCFPRHGCDTSTGACGYAMVYGDGSGSRGNLATDRLVFSNDTSVDSVVIGCGHDNAELFDSSAGVLGVGRGAGSLATQVAPTYGRYFAYCLGDRTSVARSSASYLAFGRTPEPPSTAFTPLLSNPRRPNLYYVNMAGFSVGGERVAGGFCSSSLWLDPATGRGGVVVDSGTSISRLPRDVYAALRDAFDARAAAAGMRRLARGISVFDACYELRGASVPAVVLHFAGGADVALPPENYFIPEQGGKYHCLALEATDDGLSVLGNVLQQGFRVVFDVEKERVGFAPNGC

SEQ ID NO: 13298 - protein, 357 aa, Triticum aestivum
  peptide (1)..(357): Ceres Seq. ID no. 14314087
  misc_feature (1)..(354): Pfam Name: Pfam Description:  Eukaryotic aspartyl protease
  misc_feature (1)..(357): NCBI GI NO: 34910676 NR Description: P0690B02.2
  misc_feature (1)..(357): NCBI GI NO: 15290061 NR Description: nucleoid DNA-binding protein cnd41-like protein
  misc_feature (1)..(357): NCBI GI NO: 15223368 NR Description: chloroplast nucleoid DNA binding protein -related
  misc_feature (1)..(357): NCBI GI NO: 21594980 NR Description: chloroplast nucleoid DNA binding protein, putative
  misc_feature (1)..(357): NCBI GI NO: 15228618 NR Description: expressed protein [Arabidopsis thaliana]
  misc_feature (1)..(357): NCBI GI NO: 34895664 NR Description: nucleoid DNA-binding protein cnd41-like protein
  misc_feature (1)..(357): NCBI GI NO: 28392860 NR Description: unknown protein [Arabidopsis thaliana]
  misc_feature (1)..(357): NCBI GI NO: 15229656 NR Description: chloroplast nucleoid DNA-binding protein -related
  misc_feature (1)..(357): NCBI GI NO: 19424106 NR Description: putative chloroplast nucleoid DNA-binding protein
  misc_feature (1)..(357): NCBI GI NO: 15231010 NR Description: expressed protein [Arabidopsis thaliana]
MSGLPFDSGEYFASVGVGTPSTSALLVIDTGSDLIWLQCKPCRRCHRQMSPLYDPKGSSTYRQIPCSSPRCFPRHGCDTSTGACGYAMVYGDGSGSRGNLATDRLVFSNDTSVDSVVIGCGHDNAELFDSSAGVLGVGRGAGSLATQVAPTYGRYFAYCLGDRTSVARSSASYLAFGRTPEPPSTAFTPLLSNPRRPNLYYVNMAGFSVGGERVAGGFCSSSLWLDPATGRGGVVVDSGTSISRLPRDVYAALRDAFDARAAAAGMRRLARGISVFDACYELRGASVPAVVLHFAGGADVALPPENYFIPEQGGKYHCLALEATDDGLSVLGNVLQQGFRVVFDVEKERVGFAPNGC

SEQ ID NO: 13299 - DNA, 1360 bp, Triticum aestivum
  misc_feature (1)..(1360): Ceres Seq. ID no. 14303608
cccccgtcctctagctcaccgccgccgccgccgccgccgccgccgctttcttccgccatggccagccccgcggagagctctcgccggcgggaagaagaccgcactccatctccttccaggtcttcctcttctcgccccagcaagtgcaggacggcggccgagagactcaccgacgacctcctcgtggaggtcctctcgcgcgtcccggccaagtcgctctgccgcttcaagtgcgtctccaaccactggctcagcgtcatcgaccaccccgaccaccgcaagaagctgccccaaaccctcaccggcttcttccacggtagcagcaacctcgaggattggattctggaatcacctgtcctcttcaccagcgtgtcgccctcccctcccatggacacctcattcgccttcctgcccaaccaccagcagttcgatctgttagacagctgctacggtctcctcctctgccgcttgtacaacgtctcggctgaggttggcaagtgccattatgtggtgtgcaatcctgccacggagaagtgggtcctgttgccggactccggccaggacagtgtcaacgcatgtttgggcttcaacccagccctgtcttcgcatttccatgtgtttgagttggtggaggagcaggataactacatttccggagtggcagtgtattcgtcagaaaccggagtttgggtttacaaggaaaacagatggaacaaacgtgtcatgctcattgagcttcagccatcatttgtatttcttaacggctatctgcattttcaagtcgatggccatgacttttcccgttatctagctgtggtggacacggacggggaaacatggatgaacttcagtgtccctggtggcctgcttaacggttttattcaacattcacaaggccgcttgcattatgccaattttcagagagatgaacatggtggtgtctttcgactagtggtttatgttcttgagaactaccaaagcaaagaatggacattgaagcatagcgttgaaacttcatacatacttggaaggacagattactgcattgatgggtttgattggattgcgattcatccggaatgcaacttgatattcttcactattgggcaggaactcaaactcatgtgctataatatggatcgtcggcaactcaaagtgatctgcaatcttgaaggtgtcacgccgccatatctgtcatatgtgccattgtatgcagagttagaggcactgcacatttgacatcagcagtagttcatatttggtcgcactttatgttgtttgtacttgtttctgtatactatcagtggttctgttcagtgctacctccatgtgctcggttaactttgcaaaatgtttcagc

SEQ ID NO: 13300 - protein, 412 aa, Triticum aestivum
  peptide (1)..(412): Ceres Seq. ID no. 14303609
  misc_feature (46)..(406): NCBI GI NO: 34898788 NR Description: OJ1131_E05.20
  misc_feature (46)..(406): NCBI GI NO: 34898790 NR Description: OJ1131_E05.21
  misc_feature (53)..(406): NCBI GI NO: 34898810 NR Description: OJ1131_E05.32
  misc_feature (57)..(400): NCBI GI NO: 34898796 NR Description: OJ1131_E05.24
  misc_feature (81)..(406): NCBI GI NO: 33146479 NR Description: receptor-like kinase-like
  misc_feature (81)..(406): NCBI GI NO: 34898802 NR Description: OJ1131_E05.28
  misc_feature (128)..(406): NCBI GI NO: 33146481 NR Description: unknown protein
  misc_feature (168)..(405): NCBI GI NO: 37536818 NR Description: hypothetical protein
  misc_feature (52)..(402): NCBI GI NO: 34914902 NR Description: B1096D03.14
  misc_feature (58)..(385): NCBI GI NO: 34907324 NR Description: P0698A10.24
PPSSSSPPPPPPPPPLSSAMASPAESSRRREEDRTPSPSRSSSSRPSKCRTAAERLTDDLLVEVLSRVPAKSLCRFKCVSNHWLSVIDHPDHRKKLPQTLTGFFHGSSNLEDWILESPVLFTSVSPSPPMDTSFAFLPNHQQFDLLDSCYGLLLCRLYNVSAEVGKCHYVVCNPATEKWVLLPDSGQDSVNACLGFNPALSSHFHVFELVEEQDNYISGVAVYSSETGVWVYKENRWNKRVMLIELQPSFVFLNGYLHFQVDGHDFSRYLAVVDTDGETWMNFSVPGGLLNGFIQHSQGRLHYANFQRDEHGGVFRLVVYVLENYQSKEWTLKHSVETSYILGRTDYCIDGFDWIAIHPECNLIFFTIGQELKLMCYNMDRRQLKVICNLEGVTPPYLSYVPLYAELEALHI

SEQ ID NO: 13301 - protein, 393 aa, Triticum aestivum
  peptide (1)..(393): Ceres Seq. ID no. 14303610
  misc_feature (27)..(387): NCBI GI NO: 34898788 NR Description: OJ1131_E05.20
  misc_feature (27)..(387): NCBI GI NO: 34898790 NR Description: OJ1131_E05.21
  misc_feature (34)..(387): NCBI GI NO: 34898810 NR Description: OJ1131_E05.32
  misc_feature (38)..(381): NCBI GI NO: 34898796 NR Description: OJ1131_E05.24
  misc_feature (62)..(387): NCBI GI NO: 33146479 NR Description: receptor-like kinase-like
  misc_feature (62)..(387): NCBI GI NO: 34898802 NR Description: OJ1131_E05.28
  misc_feature (109)..(387): NCBI GI NO: 33146481 NR Description: unknown protein
  misc_feature (149)..(386): NCBI GI NO: 37536818 NR Description: hypothetical protein
  misc_feature (33)..(383): NCBI GI NO: 34914902 NR Description: B1096D03.14
  misc_feature (39)..(366): NCBI GI NO: 34907324 NR Description: P0698A10.24
MASPAESSRRREEDRTPSPSRSSSSRPSKCRTAAERLTDDLLVEVLSRVPAKSLCRFKCVSNHWLSVIDHPDHRKKLPQTLTGFFHGSSNLEDWILESPVLFTSVSPSPPMDTSFAFLPNHQQFDLLDSCYGLLLCRLYNVSAEVGKCHYVVCNPATEKWVLLPDSGQDSVNACLGFNPALSSHFHVFELVEEQDNYISGVAVYSSETGVWVYKENRWNKRVMLIELQPSFVFLNGYLHFQVDGHDFSRYLAVVDTDGETWMNFSVPGGLLNGFIQHSQGRLHYANFQRDEHGGVFRLVVYVLENYQSKEWTLKHSVETSYILGRTDYCIDGFDWIAIHPECNLIFFTIGQELKLMCYNMDRRQLKVICNLEGVTPPYLSYVPLYAELEALHI

SEQ ID NO: 13302 - protein, 283 aa, Triticum aestivum
  peptide (1)..(283): Ceres Seq. ID no. 14303611
  misc_feature (1)..(277): NCBI GI NO: 34898788 NR Description: OJ1131_E05.20
  misc_feature (1)..(277): NCBI GI NO: 34898790 NR Description: OJ1131_E05.21
  misc_feature (1)..(277): NCBI GI NO: 34898810 NR Description: OJ1131_E05.32
  misc_feature (1)..(271): NCBI GI NO: 34898796 NR Description: OJ1131_E05.24
  misc_feature (1)..(277): NCBI GI NO: 33146479 NR Description: receptor-like kinase-like
  misc_feature (1)..(277): NCBI GI NO: 34898802 NR Description: OJ1131_E05.28
  misc_feature (1)..(277): NCBI GI NO: 33146481 NR Description: unknown protein
  misc_feature (39)..(276): NCBI GI NO: 37536818 NR Description: hypothetical protein
  misc_feature (1)..(273): NCBI GI NO: 34914902 NR Description: B1096D03.14
  misc_feature (1)..(256): NCBI GI NO: 34907324 NR Description: P0698A10.24
MDTSFAFLPNHQQFDLLDSCYGLLLCRLYNVSAEVGKCHYVVCNPATEKWVLLPDSGQDSVNACLGFNPALSSHFHVFELVEEQDNYISGVAVYSSETGVWVYKENRWNKRVMLIELQPSFVFLNGYLHFQVDGHDFSRYLAVVDTDGETWMNFSVPGGLLNGFIQHSQGRLHYANFQRDEHGGVFRLVVYVLENYQSKEWTLKHSVETSYILGRTDYCIDGFDWIAIHPECNLIFFTIGQELKLMCYNMDRRQLKVICNLEGVTPPYLSYVPLYAELEALHI

SEQ ID NO: 13303 - DNA, 1262 bp, Triticum aestivum
  misc_feature (1)..(1262): Ceres Seq. ID no. 12616162
gaagaaagcatggcacgtattttccatgaaagcacgtccacgccgaagctctctataaagtacgtgcagtgcacagaaagtatcatcatatcatagaaaaacaagcatccatctcctcggttcagcccacagccaacgaacacacgcgagcgcacgagtgagcgagcgagagagagaaagatggcgaatctgttcctgaagcaggcgaagcactacgcggcggcgcggccggactacccggcggagctcttccacttcatcgcgtccaagacggcccgccacgacctcgcgtgggacgtcggcaccggcagcggccaggccgcagtctcgctggcgaagctgtacaagaacgtggtgggcacggacacgagcgcgcagcagctgggctacgcgcgggagctccccaacgtgcgctacgcccataccccggcggacctgccgctcgacggcatccacgcggccgtcgcgccgccgggctcggttgacgtggtcaccgtggcgcaggccttccactggctcgacctgccgcgcttctacgcgcaggtccgctccctcctgcgcccgcacggcgtcctcgccgcatggtgctacacggagccccgcatgggggccgccgtcgacgccgtcttctggcgcctctacgacggctcgcagccccactgggcgcccaaccggaagatggtcgacgacgagtaccgcagcgccgacttccccttcgaccccgtcgacggcgagacccacacgggccccttcgagttctccacggagcgatgcatgaacctcgacgactacttcacctacatcaagtcctggtccgcgtaccagaccgccaaggacaatggcgtcgagctgctcgacgccgagactgtgctggacttcgccgacgcgtggggcggcgaccgcgaggaggtcaagacggtgaggtaccccatcttcctcaggatcggcaaggtgaggccttaagaatcagatgcagcatgatgcaatgcaagtggccttgagaaagggacgctttcatgtctgcacgtcacgatcgaagtgacgatggtgcaaaatgccgagcagcgtacgtgtgccgccgctggaccattttatttgtattcccctcctattcctattccaaattcagcgtgtaacaaatggtattcctagtatccatcccattttagacaaataattgtaagttgtggatgttacctttgtctatcatatatgaatgttatttttgcggtgttgctaaaactgagtccgttgtgttagtc

SEQ ID NO: 13304 - protein, 260 aa, Triticum aestivum
  peptide (1)..(260): Ceres Seq. ID no. 12616163
  misc_feature (1)..(258): NCBI GI NO: 15227331 NR Description: putative embryo-abundant protein
  misc_feature (1)..(259): NCBI GI NO: 20339366 NR Description: embryo-abundant protein EMB [Pisum sativum]
  misc_feature (7)..(258): NCBI GI NO: 7484460 NR Description: embryonic abundant protein EMB34 - white spruce
  misc_feature (1)..(259): NCBI GI NO: 15238280 NR Description: embryonic abundant protein -like
  misc_feature (1)..(161): NCBI GI NO: 34912212 NR Description: P0415C01.8
  misc_feature (166)..(259): NCBI GI NO: 34912212 NR Description: P0415C01.8
  misc_feature (1)..(258): NCBI GI NO: 15233061 NR Description: putative protein; protein id: At3g61210.1
  misc_feature (1)..(258): NCBI GI NO: 15235684 NR Description: putative protein; protein id: At4g22530.1
  misc_feature (1)..(257): NCBI GI NO: 34910604 NR Description: putative embryonic abundant protein-like
  misc_feature (1)..(258): NCBI GI NO: 21594033 NR Description: embryonic abundant protein-like
MANLFLKQAKHYAAARPDYPAELFHFIASKTARHDLAWDVGTGSGQAAVSLAKLYKNVVGTDTSAQQLGYARELPNVRYAHTPADLPLDGIHAAVAPPGSVDVVTVAQAFHWLDLPRFYAQVRSLLRPHGVLAAWCYTEPRMGAAVDAVFWRLYDGSQPHWAPNRKMVDDEYRSADFPFDPVDGETHTGPFEFSTERCMNLDDYFTYIKSWSAYQTAKDNGVELLDAETVLDFADAWGGDREEVKTVRYPIFLRIGKVRP

SEQ ID NO: 13305 - protein, 139 aa, Triticum aestivum
  peptide (1)..(139): Ceres Seq. ID no. 12616164
MVLHGAPHGGRRRRRLLAPLRRLAAPLGAQPEDGRRRVPQRRLPLRPRRRRDPHGPLRVLHGAMHEPRRLLHLHQVLVRVPDRQGQWRRAARRRDCAGLRRRVGRRPRGGQDGEVPHLPQDRQGEALRIRCSMMQCKWP

SEQ ID NO: 13306 - DNA, 1186 bp, Triticum aestivum
  misc_feature (1)..(1186): Ceres Seq. ID no. 12593170
ttggactggaagcgacccgcgtccaccaccgccgctttccccgtctccccctcaccgcgcggcgacgccgagcgacccagcggcgagcccggcatgcatcacgaccccaaccccttcgacgagggcaccgccggcgacgagaaccccttctcgaatggaggaggccgcggcgggaagcagcagcacggcttccggcccaccgagcccgtcggcttcggcggcggcggcagcaggggcgacgccaccgtcgacgtgccgctcggcaacatgggcgactcgaatggcaaggcgagggagctctcgtcgtgggaatcagatctgaggcgccgtgaggcggatatcaaaaggagggaggaatcactgaagaatgctggagtgcccatggaggagaagaattggccgccttttttcccgattatccaccatgacatcgccaatgagatacctgccaacgtgcagaagctacagtatctggcgttcgcaagctggcttggaattgtgctctgcctctcctggacttattttgctgtcatagtctgctggatcaaggagggagattcaaagctgttcttccttgctacaatctatgctttgcttggaattcccctctcttacttgatgtggtatagacccctctatcgtgcaatgagaactaacagtgcattcagttttggatggtttttcctgtgttacctgatccacattggtttttgcataattgctgccattgctccgccaatcgtattccaagggaaatcattaacgggcatattggctgcgatcgacactttctctgagcatgtgataattgggatcttttacttcgtggggtttgcactattttgcttggagacactgctgagcatcggggttcttcagaaagtatacatgtacttccgagggcataagtgaagctagtcgtgatggaaatttttcagaagcctacaagcagtagtgattctgtccatatgtgttagtacaccttgagtctatgtttgttgagcgaagggttatcgaagaatgcttctgagactgagtggagtatggcatgtagcgctgctactataggatcttctctaagatgggggtgctgaggttctttatatgctgtgcttcgtgtgtcatctggtagttcgtttgggagtctggcatgtcggcgaacattacagtagtcagtatttattat

SEQ ID NO: 13307 - protein, 303 aa, Triticum aestivum
  peptide (1)..(303): Ceres Seq. ID no. 12593171
  misc_feature (129)..(303): Pfam Name: Pfam Description:  SCAMP family
  misc_feature (32)..(303): NCBI GI NO: 38347080 NR Description: OSJNBa0006A01.21
  misc_feature (33)..(303): NCBI GI NO: 15222550 NR Description: secretory carrier membrane protein, putative
  misc_feature (46)..(293): NCBI GI NO: 38567965 NR Description: OSJNBa0093F12.6
  misc_feature (34)..(301): NCBI GI NO: 3941289 NR Description: similarity to SCAMP37 [Pisum sativum]
  misc_feature (34)..(301): NCBI GI NO: 15219893 NR Description: secretory carrier membrane protein
  misc_feature (34)..(301): NCBI GI NO: 7109232 NR Description: secretory carrier membrane protein [Oryza sativa]
  misc_feature (34)..(301): NCBI GI NO: 15226410 NR Description: putative secretory carrier-associated membraneprotein
  misc_feature (31)..(301): NCBI GI NO: 15220305 NR Description: secretory carrier membrane protein, putative
  misc_feature (23)..(301): NCBI GI NO: 34899754 NR Description: putative secretory carrier membrane protein
  misc_feature (34)..(301): NCBI GI NO: 18379111 NR Description: expressed protein; protein id: At1g03550
LDWKRPASTTAAFPVSPSPRGDAERPSGEPGMHHDPNPFDEGTAGDENPFSNGGGRGGKQQHGFRPTEPVGFGGGGSRGDATVDVPLGNMGDSNGKARELSSWESDLRRREADIKRREESLKNAGVPMEEKNWPPFFPIIHHDIANEIPANVQKLQYLAFASWLGIVLCLSWTYFAVIVCWIKEGDSKLFFLATIYALLGIPLSYLMWYRPLYRAMRTNSAFSFGWFFLCYLIHIGFCIIAAIAPPIVFQGKSLTGILAAIDTFSEHVIIGIFYFVGFALFCLETLLSIGVLQKVYMYFRGHK

SEQ ID NO: 13308 - protein, 272 aa, Triticum aestivum
  peptide (1)..(272): Ceres Seq. ID no. 12593172
  misc_feature (98)..(272): Pfam Name: Pfam Description:  SCAMP family
  misc_feature (1)..(272): NCBI GI NO: 38347080 NR Description: OSJNBa0006A01.21
  misc_feature (2)..(272): NCBI GI NO: 15222550 NR Description: secretory carrier membrane protein, putative
  misc_feature (15)..(262): NCBI GI NO: 38567965 NR Description: OSJNBa0093F12.6
  misc_feature (3)..(270): NCBI GI NO: 3941289 NR Description: similarity to SCAMP37 [Pisum sativum]
  misc_feature (3)..(270): NCBI GI NO: 15219893 NR Description: secretory carrier membrane protein
  misc_feature (3)..(270): NCBI GI NO: 7109232 NR Description: secretory carrier membrane protein [Oryza sativa]
  misc_feature (3)..(270): NCBI GI NO: 15226410 NR Description: putative secretory carrier-associated membraneprotein
  misc_feature (1)..(270): NCBI GI NO: 15220305 NR Description: secretory carrier membrane protein, putative
  misc_feature (1)..(270): NCBI GI NO: 34899754 NR Description: putative secretory carrier membrane protein
  misc_feature (3)..(270): NCBI GI NO: 18379111 NR Description: expressed protein; protein id: At1g03550
MHHDPNPFDEGTAGDENPFSNGGGRGGKQQHGFRPTEPVGFGGGGSRGDATVDVPLGNMGDSNGKARELSSWESDLRRREADIKRREESLKNAGVPMEEKNWPPFFPIIHHDIANEIPANVQKLQYLAFASWLGIVLCLSWTYFAVIVCWIKEGDSKLFFLATIYALLGIPLSYLMWYRPLYRAMRTNSAFSFGWFFLCYLIHIGFCIIAAIAPPIVFQGKSLTGILAAIDTFSEHVIIGIFYFVGFALFCLETLLSIGVLQKVYMYFRGHK

SEQ ID NO: 13309 - protein, 214 aa, Triticum aestivum
  peptide (1)..(214): Ceres Seq. ID no. 12593173
  misc_feature (40)..(214): Pfam Name: Pfam Description:  SCAMP family
  misc_feature (1)..(214): NCBI GI NO: 38347080 NR Description: OSJNBa0006A01.21
  misc_feature (1)..(214): NCBI GI NO: 15222550 NR Description: secretory carrier membrane protein, putative
  misc_feature (1)..(204): NCBI GI NO: 38567965 NR Description: OSJNBa0093F12.6
  misc_feature (1)..(212): NCBI GI NO: 3941289 NR Description: similarity to SCAMP37 [Pisum sativum]
  misc_feature (1)..(212): NCBI GI NO: 15219893 NR Description: secretory carrier membrane protein
  misc_feature (1)..(212): NCBI GI NO: 7109232 NR Description: secretory carrier membrane protein [Oryza sativa]
  misc_feature (1)..(212): NCBI GI NO: 15226410 NR Description: putative secretory carrier-associated membraneprotein
  misc_feature (1)..(212): NCBI GI NO: 15220305 NR Description: secretory carrier membrane protein, putative
  misc_feature (1)..(212): NCBI GI NO: 34899754 NR Description: putative secretory carrier membrane protein
  misc_feature (1)..(212): NCBI GI NO: 18379111 NR Description: expressed protein; protein id: At1g03550
MGDSNGKARELSSWESDLRRREADIKRREESLKNAGVPMEEKNWPPFFPIIHHDIANEIPANVQKLQYLAFASWLGIVLCLSWTYFAVIVCWIKEGDSKLFFLATIYALLGIPLSYLMWYRPLYRAMRTNSAFSFGWFFLCYLIHIGFCIIAAIAPPIVFQGKSLTGILAAIDTFSEHVIIGIFYFVGFALFCLETLLSIGVLQKVYMYFRGHK

SEQ ID NO: 13310 - DNA, 1438 bp, Triticum aestivum
  misc_feature (1)..(1438): Ceres Seq. ID no. 13655131
gtcggtcacgcgcttctcttctccctcagatcagatgagagcagagcagagcagagaatgattgattgattgattgattgattgattgcagaagaggacgggcgagctagggttccttctccttccttccttgggacgaccagagccatggacatggaggattcctcctcctgctcctcctcctcgccggcgccggcggcggacttggtcgactacctgggtcccgacacctccgtcaccgtcttcaccatgctccaccaccccgccgacctcgcacgcgcatccgccgtctcccgatcctggcgacaattcgttatcgacaaccagttcagcaagctgcagtgcctgcgggcctgcccggagctctccaccttcacccaagtcgacatcaccaccacctccggctccagaaccccggcacgccgggaccaggacaccaccaccgggtcgagcgccgaggacgagaagctccacagggtgtacacgcacctcggccacggcctcctctcgccctacaagcccagggactgcatcatccactgcatcggcgcctccagcaccgacaacttccccgacgagaccatcgagaacaccctcgagcccgtcgaccacctcgagtccaacaggccctcctactggtccagcggcggccagagggaccccgccgtgcccgagtgcctcatatatcgcctccaggccgatctctgcctcatccaagagatcaagctgcagccattcaaagcgtttttccagcatggcgatcccatatattcgccaaagagcatccgcatccagatgggctatccaaggtcaccgctacgccctgaagcacttgtctgtgatgaaaatgaaggccagttgattgatgatagaaactacgtctggacctacacatctccagaattcccaatgctgcaggaaaatgttttgcaatcctttaagttaccacggccggttctgtgtattggcggggtggtgaaggttgagcttcttgggagagttcagaaacaggcaatcgatggcctctactacatatgcatatctcatgtccaaatagtggggaaggcactgtcccgagacctgggggttgttcctcgcgggaacggcctggtcctgaactactatctggatccccgtacatgcggcgttccccgccgtgaaccgtcacgggacgatgggcgcagcaggtggcagggcctggcgtcaaggatctggcattctggcacggcgcgagggataggaggtctgaaccaaacgctgttgagtagactgtttggcggtccgttgcggctcgtggtcgtagcggacgaatcggaaggggaggaggaggaggatcttccttagaaggaaggaaggagctcaagggaggagggtcttatttgatttgatttgatcttctgcacaaaagaaacatgtgatagttacatatataagagtg

SEQ ID NO: 13311 - protein, 398 aa, Triticum aestivum
  peptide (1)..(398): Ceres Seq. ID no. 15219208
  misc_feature (19)..(395): NCBI GI NO: 31193913 NR Description: unknown protein
  misc_feature (19)..(396): NCBI GI NO: 18411435 NR Description: F-box protein family [Arabidopsis thaliana]
  misc_feature (161)..(396): NCBI GI NO: 28393062 NR Description: putative F-box protein [Arabidopsis thaliana]
  misc_feature (19)..(221): NCBI GI NO: 7452420 NR Description: hypothetical protein A_TM018A10
  misc_feature (249)..(323): NCBI GI NO: 18308222 NR Description: unknown protein [Oryza sativa]
  misc_feature (110)..(235): NCBI GI NO: 28850404 NR Description: hypothetical protein [Dictyostelium discoideum]
  misc_feature (248)..(326): NCBI GI NO: 28850404 NR Description: hypothetical protein [Dictyostelium discoideum]
MDMEDSSSCSSSSPAPAADLVDYLGPDTSVTVFTMLHHPADLARASAVSRSWRQFVIDNQFSKLQCLRACPELSTFTQVDITTTSGSRTPARRDQDTTTGSSAEDEKLHRVYTHLGHGLLSPYKPRDCIIHCIGASSTDNFPDETIENTLEPVDHLESNRPSYWSSGGQRDPAVPECLIYRLQADLCLIQEIKLQPFKAFFQHGDPIYSPKSIRIQMGYPRSPLRPEALVCDENEGQLIDDRNYVWTYTSPEFPMLQENVLQSFKLPRPVLCIGGVVKVELLGRVQKQAIDGLYYICISHVQIVGKALSRDLGVVPRGNGLVLNYYLDPRTCGVPRREPSRDDGRSRWQGLASRIWHSGTARGIGGLNQTLLSRLFGGPLRLVVVADESEGEEEEDLP

SEQ ID NO: 13312 - protein, 396 aa, Triticum aestivum
  peptide (1)..(396): Ceres Seq. ID no. 15219209
  misc_feature (17)..(393): NCBI GI NO: 31193913 NR Description: unknown protein
  misc_feature (17)..(394): NCBI GI NO: 18411435 NR Description: F-box protein family [Arabidopsis thaliana]
  misc_feature (159)..(394): NCBI GI NO: 28393062 NR Description: putative F-box protein [Arabidopsis thaliana]
  misc_feature (17)..(219): NCBI GI NO: 7452420 NR Description: hypothetical protein A_TM018A10
  misc_feature (247)..(321): NCBI GI NO: 18308222 NR Description: unknown protein [Oryza sativa]
  misc_feature (108)..(233): NCBI GI NO: 28850404 NR Description: hypothetical protein [Dictyostelium discoideum]
  misc_feature (246)..(324): NCBI GI NO: 28850404 NR Description: hypothetical protein [Dictyostelium discoideum]
MEDSSSCSSSSPAPAADLVDYLGPDTSVTVFTMLHHPADLARASAVSRSWRQFVIDNQFSKLQCLRACPELSTFTQVDITTTSGSRTPARRDQDTTTGSSAEDEKLHRVYTHLGHGLLSPYKPRDCIIHCIGASSTDNFPDETIENTLEPVDHLESNRPSYWSSGGQRDPAVPECLIYRLQADLCLIQEIKLQPFKAFFQHGDPIYSPKSIRIQMGYPRSPLRPEALVCDENEGQLIDDRNYVWTYTSPEFPMLQENVLQSFKLPRPVLCIGGVVKVELLGRVQKQAIDGLYYICISHVQIVGKALSRDLGVVPRGNGLVLNYYLDPRTCGVPRREPSRDDGRSRWQGLASRIWHSGTARGIGGLNQTLLSRLFGGPLRLVVVADESEGEEEEDLP

SEQ ID NO: 13313 - protein, 364 aa, Triticum aestivum
  peptide (1)..(364): Ceres Seq. ID no. 15219210
  misc_feature (1)..(361): NCBI GI NO: 31193913 NR Description: unknown protein
  misc_feature (1)..(362): NCBI GI NO: 18411435 NR Description: F-box protein family [Arabidopsis thaliana]
  misc_feature (127)..(362): NCBI GI NO: 28393062 NR Description: putative F-box protein [Arabidopsis thaliana]
  misc_feature (1)..(187): NCBI GI NO: 7452420 NR Description: hypothetical protein A_TM018A10
  misc_feature (215)..(289): NCBI GI NO: 18308222 NR Description: unknown protein [Oryza sativa]
  misc_feature (76)..(201): NCBI GI NO: 28850404 NR Description: hypothetical protein [Dictyostelium discoideum]
  misc_feature (214)..(292): NCBI GI NO: 28850404 NR Description: hypothetical protein [Dictyostelium discoideum]
MLHHPADLARASAVSRSWRQFVIDNQFSKLQCLRACPELSTFTQVDITTTSGSRTPARRDQDTTTGSSAEDEKLHRVYTHLGHGLLSPYKPRDCIIHCIGASSTDNFPDETIENTLEPVDHLESNRPSYWSSGGQRDPAVPECLIYRLQADLCLIQEIKLQPFKAFFQHGDPIYSPKSIRIQMGYPRSPLRPEALVCDENEGQLIDDRNYVWTYTSPEFPMLQENVLQSFKLPRPVLCIGGVVKVELLGRVQKQAIDGLYYICISHVQIVGKALSRDLGVVPRGNGLVLNYYLDPRTCGVPRREPSRDDGRSRWQGLASRIWHSGTARGIGGLNQTLLSRLFGGPLRLVVVADESEGEEEEDLP

SEQ ID NO: 13314 - DNA, 1013 bp, Triticum aestivum
  misc_feature (1)..(1013): Ceres Seq. ID no. 15173596
cgaaaacatccaccacagcttagcagcaaccaccagtgccttacacactatccatcaacaaactctagctgatcagttgcatagcaagcaatggggtgctctaaaaccctagtagctgccctcttcgccatgctgttcctagcttcgaccgtcctagccaccgaccctgatcctctccaggacttctgcgtcgccgacctcgacggcaaggcggtctcggtgaacgggcacacgtgcaagcccatgtcggaggccggcgacgacttcctcttctcatccaagctggccaaggccggcaacacgtccactccgaacggctcggctgtgacggagctggacgtggctgagtggcccggtaccaacacactgggtgtgtccatgaaccgcgtggacttcgcgccagggggcaccaacccgccgcacatccacccgcgtgccaccgagatcggcatcgtgatgaaaggtgagctcctcgttggaatcctcggcagccttgactccgggaacaagctctactcgagggtggtgcgcgccggagagacgttcctcatcccacggggccttatgcacttccagttcaatgtcggtaagaccgaggcctccatggtcgtctccttcaacagccagaaccccggaatcgtcttcgtgcccctcacgcttttcggctccaacccgcccatcccaacgccggtgctcaccaaggcactccgggtggaggccggggtcgtggaacttctcaagtccaagttcgccgctgggttttaatttctgggagccttccctgaaatgatcaatatataattccatatatgcatgctagcaaaatttaataattctcaccagaagacatgtattcaagtttcaggttaatctcgcatgcagttgtaataagattgaataagttagcctcatggtgtagccttcaatcagaaccaatatgaggaattgaatgtactactttttactgtcgtctttgttcttttcactgaacggaatatataataagcattttc

SEQ ID NO: 13315 - protein, 224 aa, Triticum aestivum
  peptide (1)..(224): Ceres Seq. ID no. 15173597
  misc_feature (63)..(214): Pfam Name: Pfam Description:  Cupin
  misc_feature (1)..(224): NCBI GI NO: 121129 NR Description: Oxalate oxidase GF-2.8 precursor (Germin GF-2.8)
  misc_feature (1)..(224): NCBI GI NO: 1171937 NR Description: Oxalate oxidase 2 precursor (Germin)
  misc_feature (1)..(223): NCBI GI NO: 2266668 NR Description: oxalate oxidase [Hordeum vulgare]
  misc_feature (1)..(224): NCBI GI NO: 11967814 NR Description: oxalate oxidase [Lolium perenne]
  misc_feature (1)..(224): NCBI GI NO: 21912428 NR Description: oxalate oxidase 2 [Lolium perenne]
  misc_feature (1)..(224): NCBI GI NO: 21912430 NR Description: oxalate oxidase 4 [Lolium perenne]
  misc_feature (4)..(224): NCBI GI NO: 22138786 NR Description: oxalate oxidase [Lolium perenne]
  misc_feature (1)..(223): NCBI GI NO: 121131 NR Description: Oxalate oxidase GF-3.8 precursor (Germin GF-3.8)
  misc_feature (1)..(223): NCBI GI NO: 7447343 NR Description: germin homolog Ger3 - wheat
  misc_feature (24)..(223): NCBI GI NO: 14278247 NR Description: Chain A, Crystal Structure Of Germin
MGCSKTLVAALFAMLFLASTVLATDPDPLQDFCVADLDGKAVSVNGHTCKPMSEAGDDFLFSSKLAKAGNTSTPNGSAVTELDVAEWPGTNTLGVSMNRVDFAPGGTNPPHIHPRATEIGIVMKGELLVGILGSLDSGNKLYSRVVRAGETFLIPRGLMHFQFNVGKTEASMVVSFNSQNPGIVFVPLTLFGSNPPIPTPVLTKALRVEAGVVELLKSKFAAGF

SEQ ID NO: 13316 - protein, 211 aa, Triticum aestivum
  peptide (1)..(211): Ceres Seq. ID no. 15173598
  misc_feature (50)..(201): Pfam Name: Pfam Description:  Cupin
  misc_feature (1)..(211): NCBI GI NO: 121129 NR Description: Oxalate oxidase GF-2.8 precursor (Germin GF-2.8)
  misc_feature (1)..(211): NCBI GI NO: 1171937 NR Description: Oxalate oxidase 2 precursor (Germin)
  misc_feature (1)..(210): NCBI GI NO: 2266668 NR Description: oxalate oxidase [Hordeum vulgare]
  misc_feature (1)..(211): NCBI GI NO: 11967814 NR Description: oxalate oxidase [Lolium perenne]
  misc_feature (1)..(211): NCBI GI NO: 21912428 NR Description: oxalate oxidase 2 [Lolium perenne]
  misc_feature (1)..(211): NCBI GI NO: 21912430 NR Description: oxalate oxidase 4 [Lolium perenne]
  misc_feature (1)..(211): NCBI GI NO: 22138786 NR Description: oxalate oxidase [Lolium perenne]
  misc_feature (1)..(210): NCBI GI NO: 121131 NR Description: Oxalate oxidase GF-3.8 precursor (Germin GF-3.8)
  misc_feature (1)..(210): NCBI GI NO: 7447343 NR Description: germin homolog Ger3 - wheat
  misc_feature (11)..(210): NCBI GI NO: 14278247 NR Description: Chain A, Crystal Structure Of Germin
MLFLASTVLATDPDPLQDFCVADLDGKAVSVNGHTCKPMSEAGDDFLFSSKLAKAGNTSTPNGSAVTELDVAEWPGTNTLGVSMNRVDFAPGGTNPPHIHPRATEIGIVMKGELLVGILGSLDSGNKLYSRVVRAGETFLIPRGLMHFQFNVGKTEASMVVSFNSQNPGIVFVPLTLFGSNPPIPTPVLTKALRVEAGVVELLKSKFAAGF

SEQ ID NO: 13317 - protein, 173 aa, Triticum aestivum
  peptide (1)..(173): Ceres Seq. ID no. 15173599
  misc_feature (12)..(163): Pfam Name: Pfam Description:  Cupin
  misc_feature (1)..(173): NCBI GI NO: 121129 NR Description: Oxalate oxidase GF-2.8 precursor (Germin GF-2.8)
  misc_feature (1)..(173): NCBI GI NO: 1171937 NR Description: Oxalate oxidase 2 precursor (Germin)
  misc_feature (1)..(172): NCBI GI NO: 2266668 NR Description: oxalate oxidase [Hordeum vulgare]
  misc_feature (1)..(173): NCBI GI NO: 11967814 NR Description: oxalate oxidase [Lolium perenne]
  misc_feature (1)..(173): NCBI GI NO: 21912428 NR Description: oxalate oxidase 2 [Lolium perenne]
  misc_feature (1)..(173): NCBI GI NO: 21912430 NR Description: oxalate oxidase 4 [Lolium perenne]
  misc_feature (1)..(173): NCBI GI NO: 22138786 NR Description: oxalate oxidase [Lolium perenne]
  misc_feature (1)..(172): NCBI GI NO: 121131 NR Description: Oxalate oxidase GF-3.8 precursor (Germin GF-3.8)
  misc_feature (1)..(172): NCBI GI NO: 7447343 NR Description: germin homolog Ger3 - wheat
  misc_feature (1)..(172): NCBI GI NO: 14278247 NR Description: Chain A, Crystal Structure Of Germin
MSEAGDDFLFSSKLAKAGNTSTPNGSAVTELDVAEWPGTNTLGVSMNRVDFAPGGTNPPHIHPRATEIGIVMKGELLVGILGSLDSGNKLYSRVVRAGETFLIPRGLMHFQFNVGKTEASMVVSFNSQNPGIVFVPLTLFGSNPPIPTPVLTKALRVEAGVVELLKSKFAAGF

SEQ ID NO: 13318 - DNA, 1585 bp, Triticum aestivum
  misc_feature (1)..(1585): Ceres Seq. ID no. 13503468
gactgcaagtagttttaggagagcgccgaggacgcacccgcgtactgccaaatacaagccgcggtgcacccgtgccgccgttcgtccgctcccgtcgtccgcacacgcgcacgctcggctcgataatcctcaccggcgagcgcgcagctcacgatctatcatcccgatgtcgccggtgaggattaccgactcgacctatgtcggcgtgccggagaccgccgcgccaccgccggggccgatcaggttcaccgcgatggaggcgctctgggtcgtcttcccggtgctgcagcacgtgctgctctacgagggcgacgacgacatgccgcccttcgacgccattctcgagtccctccgctcctccctcgcggccactctgggcagcttcgcgccgctcgccggcaagctggtccacctcgaggagacgggggacgtgggcatcagctgctccgcctccgacggcgtcaggttcgtcgtcgccgagtgcgacgccgacatccgccgcctcgccggcgacgaggagcacgacctgcgcgtcctcgaggcgctcgtgccggaggtggacatgggccggctgccgaccgccctgctggccgtgcaggccacgcgtttcgagggcggcgtggcgctcgggctgacggtgcaccacggcgccgccgacgggcgggcgctgtggacgttcgtcgaggcgtgggcgacggcgtgccggggcgagacgccggccaccacgccgtgcttcgaccgctcgctcgtcaagatgcccgccggcgacgagctggccaggagtgttctgcggaagttcgctcccaatttgccctcggcggcactagcgtcatcagtcttcgaagaccgaaagcggctcactcgccgaaccttcaccttggaccaaggagacatccaacgcctgaagctgcgcattgtccacctcaatgagtcgggcggcacgcccctgcctcgcccgccgtctgctttcgccgccgtggtcgcgctcgcgtggacgtgcttcgcccggtgcaagtcgttctccttggacgacgacgtgtggctcttcttcttcgccgacatccgcgagcgccttgaccctcccgtcggcgcggggtacatcggctcgtgcctcaccaagtgtttggcaaggctccctgcccgggagcttcatggtgagcgtgccctggcggctgcggcgtcggcggtccaggacgagatcaacaagatgaaggaagaccctatcgctggttggaacttcttctcattcgatcccatgcccgccatggaccggttgatgaacatatcaggctcgtcgggctttagtgcatacaagatcgccgacttcgggtggggaaagccgacacggacagagccgattaggatgaacacagacggtcaggtggcattgatgggcagcagggacgaccggggtgtgcaggtctcagtggcactgctccaagcggcacaaatggacgagttcaaatctaactttctggcgctacttgagtgacaatttttgttctcaaagagacctagttaggtcaattcaaaacagtacacccagatgttttataaagattaatacattataattgaattgttt

SEQ ID NO: 13319 - protein, 496 aa, Triticum aestivum
  peptide (1)..(496): Ceres Seq. ID no. 13503469
  misc_feature (59)..(492): Pfam Name: Pfam Description:  Transferase family
  misc_feature (85)..(495): NCBI GI NO: 21741235 NR Description: OSJNBb0034I13.21
  misc_feature (150)..(496): NCBI GI NO: 40253598 NR Description: putative Anthocyanin 5-aromatic acyltransferase
  misc_feature (73)..(385): NCBI GI NO: 40253598 NR Description: putative Anthocyanin 5-aromatic acyltransferase
  misc_feature (55)..(492): NCBI GI NO: 37534152 NR Description: putative anthocyanin 5-aromatic acyltransferase
  misc_feature (59)..(222): NCBI GI NO: 39545754 NR Description: OSJNBb0034I13.20
  misc_feature (60)..(491): NCBI GI NO: 15230048 NR Description: transferase family [Arabidopsis thaliana]
  misc_feature (75)..(491): NCBI GI NO: 17980232 NR Description: malonyl CoA: anthocyanin 5-O-glucoside-6'''-O-malonyltransferase
  misc_feature (59)..(280): NCBI GI NO: 34894314 NR Description: unnamed protein product
  misc_feature (57)..(496): NCBI GI NO: 15230013 NR Description: transferase family [Arabidopsis thaliana]
  misc_feature (83)..(478): NCBI GI NO: 15241632 NR Description: transferase family [Arabidopsis thaliana]
TASSFRRAPRTHPRTAKYKPRCTRAAVRPLPSSAHAHARLDNPHRRARSSRSIIPMSPVRITDSTYVGVPETAAPPPGPIRFTAMEALWVVFPVLQHVLLYEGDDDMPPFDAILESLRSSLAATLGSFAPLAGKLVHLEETGDVGISCSASDGVRFVVAECDADIRRLAGDEEHDLRVLEALVPEVDMGRLPTALLAVQATRFEGGVALGLTVHHGAADGRALWTFVEAWATACRGETPATTPCFDRSLVKMPAGDELARSVLRKFAPNLPSAALASSVFEDRKRLTRRTFTLDQGDIQRLKLRIVHLNESGGTPLPRPPSAFAAVVALAWTCFARCKSFSLDDDVWLFFFADIRERLDPPVGAGYIGSCLTKCLARLPARELHGERALAAAASAVQDEINKMKEDPIAGWNFFSFDPMPAMDRLMNISGSSGFSAYKIADFGWGKPTRTEPIRMNTDGQVALMGSRDDRGVQVSVALLQAAQMDEFKSNFLALLE

SEQ ID NO: 13320 - protein, 441 aa, Triticum aestivum
  peptide (1)..(441): Ceres Seq. ID no. 13503470
  misc_feature (4)..(437): Pfam Name: Pfam Description:  Transferase family
  misc_feature (30)..(440): NCBI GI NO: 21741235 NR Description: OSJNBb0034I13.21
  misc_feature (95)..(441): NCBI GI NO: 40253598 NR Description: putative Anthocyanin 5-aromatic acyltransferase
  misc_feature (18)..(330): NCBI GI NO: 40253598 NR Description: putative Anthocyanin 5-aromatic acyltransferase
  misc_feature (1)..(437): NCBI GI NO: 37534152 NR Description: putative anthocyanin 5-aromatic acyltransferase
  misc_feature (4)..(167): NCBI GI NO: 39545754 NR Description: OSJNBb0034I13.20
  misc_feature (5)..(436): NCBI GI NO: 15230048 NR Description: transferase family [Arabidopsis thaliana]
  misc_feature (20)..(436): NCBI GI NO: 17980232 NR Description: malonyl CoA: anthocyanin 5-O-glucoside-6'''-O-malonyltransferase
  misc_feature (4)..(225): NCBI GI NO: 34894314 NR Description: unnamed protein product
  misc_feature (2)..(441): NCBI GI NO: 15230013 NR Description: transferase family [Arabidopsis thaliana]
  misc_feature (28)..(423): NCBI GI NO: 15241632 NR Description: transferase family [Arabidopsis thaliana]
MSPVRITDSTYVGVPETAAPPPGPIRFTAMEALWVVFPVLQHVLLYEGDDDMPPFDAILESLRSSLAATLGSFAPLAGKLVHLEETGDVGISCSASDGVRFVVAECDADIRRLAGDEEHDLRVLEALVPEVDMGRLPTALLAVQATRFEGGVALGLTVHHGAADGRALWTFVEAWATACRGETPATTPCFDRSLVKMPAGDELARSVLRKFAPNLPSAALASSVFEDRKRLTRRTFTLDQGDIQRLKLRIVHLNESGGTPLPRPPSAFAAVVALAWTCFARCKSFSLDDDVWLFFFADIRERLDPPVGAGYIGSCLTKCLARLPARELHGERALAAAASAVQDEINKMKEDPIAGWNFFSFDPMPAMDRLMNISGSSGFSAYKIADFGWGKPTRTEPIRMNTDGQVALMGSRDDRGVQVSVALLQAAQMDEFKSNFLALLE

SEQ ID NO: 13321 - protein, 412 aa, Triticum aestivum
  peptide (1)..(412): Ceres Seq. ID no. 13503471
  misc_feature (1)..(408): Pfam Name: Pfam Description:  Transferase family
  misc_feature (1)..(411): NCBI GI NO: 21741235 NR Description: OSJNBb0034I13.21
  misc_feature (66)..(412): NCBI GI NO: 40253598 NR Description: putative Anthocyanin 5-aromatic acyltransferase
  misc_feature (1)..(301): NCBI GI NO: 40253598 NR Description: putative Anthocyanin 5-aromatic acyltransferase
  misc_feature (1)..(408): NCBI GI NO: 37534152 NR Description: putative anthocyanin 5-aromatic acyltransferase
  misc_feature (1)..(138): NCBI GI NO: 39545754 NR Description: OSJNBb0034I13.20
  misc_feature (1)..(407): NCBI GI NO: 15230048 NR Description: transferase family [Arabidopsis thaliana]
  misc_feature (1)..(407): NCBI GI NO: 17980232 NR Description: malonyl CoA: anthocyanin 5-O-glucoside-6'''-O-malonyltransferase
  misc_feature (1)..(196): NCBI GI NO: 34894314 NR Description: unnamed protein product
  misc_feature (1)..(412): NCBI GI NO: 15230013 NR Description: transferase family [Arabidopsis thaliana]
  misc_feature (1)..(394): NCBI GI NO: 15241632 NR Description: transferase family [Arabidopsis thaliana]
MEALWVVFPVLQHVLLYEGDDDMPPFDAILESLRSSLAATLGSFAPLAGKLVHLEETGDVGISCSASDGVRFVVAECDADIRRLAGDEEHDLRVLEALVPEVDMGRLPTALLAVQATRFEGGVALGLTVHHGAADGRALWTFVEAWATACRGETPATTPCFDRSLVKMPAGDELARSVLRKFAPNLPSAALASSVFEDRKRLTRRTFTLDQGDIQRLKLRIVHLNESGGTPLPRPPSAFAAVVALAWTCFARCKSFSLDDDVWLFFFADIRERLDPPVGAGYIGSCLTKCLARLPARELHGERALAAAASAVQDEINKMKEDPIAGWNFFSFDPMPAMDRLMNISGSSGFSAYKIADFGWGKPTRTEPIRMNTDGQVALMGSRDDRGVQVSVALLQAAQMDEFKSNFLALLE

SEQ ID NO: 13322 - DNA, 1226 bp, Triticum aestivum
  misc_feature (1)..(1226): Ceres Seq. ID no. 13596944
gtgcttctaagtttgctcctagctggcttgcttgctccttgtccatgccagccacggccatggagctctccagcctgccgctagtcctgctgctctgcttgatggcgggctcgtcgacggctgccctgccggcgctgcccgggatggacagggtgcggcagcaggtcgacagggcgaacaggcacggcccgtccattgggctcgtcatgtcgtacgtcgccgaggacaccgcgctccaggcctccggctacttcaggccttggcacgtccagcccttcattgacctctacggacggaggtttcacatcgggagtattcgaggtgtgaatgttatatacgcattgacagggcaacgcaggttgaatgcagctgtcactgtacaaactctcgtcgacgtctttaccgtgtctggtattgtccattatggcacagcaggaagctctaatgattcaatgtcatttggagatgtcagtgtccccaagttagttgcttatacaggcgcttggacatggaagaagtacaaatcacttaaagaagagtcaacagaactaaactttggacaatttaacgtcccgaatggaggagagaacctgctagggtctctgaaatacagaaatgaggagctatactcagttggcaagcccatggaagaagttttctggttacctgtagattcagcatggttcaaaatagcagaaggacttaaggtcaaccttgaaagatgtaatgacactttctgcttaccaaaaacgccacaagtggttcatgggctaaaaggagcatcagccgacatgtttctagacaatgcagaataccggaagttccttttcagagaatttgcagtgtcaacaatagatgaggagagcgcagcagtggtgatgacaacaacatctcctggcgtacctgtgattgtgttccggggagtatctgatctggctggagtggaaccaacatggtcatcaacaagcctgatgaacctggcatctattaatgcactcaaagtggcagtggagttcattgctacaattggcaggcagatgtcgacaccattagcacaaagttcaaaaaactgagacaaaagagagctgacatgtccatggagcaggactgtagaatagttttaaacagcaattgggaacaaaattcagagtgataagtgacccttagcttcaaagtacacaaaacattcaacagaagaattatgtattcaatatatactcaattgt

SEQ ID NO: 13323 - protein, 356 aa, Triticum aestivum
  peptide (1)..(356): Ceres Seq. ID no. 13596945
  misc_feature (65)..(339): Pfam Name: Pfam Description:  Phosphorylase family
  misc_feature (120)..(356): NCBI GI NO: 34897886 NR Description: ESTs AU032452
  misc_feature (22)..(339): NCBI GI NO: 30686500 NR Description: expressed protein [Arabidopsis thaliana]
  misc_feature (22)..(339): NCBI GI NO: 21593613 NR Description: unknown [Arabidopsis thaliana]
  misc_feature (55)..(339): NCBI GI NO: 21617914 NR Description: unknown [Arabidopsis thaliana]
  misc_feature (55)..(339): NCBI GI NO: 18416327 NR Description: expressed protein [Arabidopsis thaliana]
  misc_feature (65)..(342): NCBI GI NO: 481815 NR Description: vegetative storage protein win4
  misc_feature (55)..(339): NCBI GI NO: 7487317 NR Description: hypothetical protein T22A6
  misc_feature (18)..(342): NCBI GI NO: 99650 NR Description: major storage protein - Carolina poplar
  misc_feature (20)..(342): NCBI GI NO: 4775662 NR Description: major storage protein [Populus x canadensis]
  misc_feature (18)..(342): NCBI GI NO: 421813 NR Description: storage protein, bark - cottonwood
ASKFAPSWLACSLSMPATAMELSSLPLVLLLCLMAGSSTAALPALPGMDRVRQQVDRANRHGPSIGLVMSYVAEDTALQASGYFRPWHVQPFIDLYGRRFHIGSIRGVNVIYALTGQRRLNAAVTVQTLVDVFTVSGIVHYGTAGSSNDSMSFGDVSVPKLVAYTGAWTWKKYKSLKEESTELNFGQFNVPNGGENLLGSLKYRNEELYSVGKPMEEVFWLPVDSAWFKIAEGLKVNLERCNDTFCLPKTPQVVHGLKGASADMFLDNAEYRKFLFREFAVSTIDEESAAVVMTTTSPGVPVIVFRGVSDLAGVEPTWSSTSLMNLASINALKVAVEFIATIGRQMSTPLAQSSKN

SEQ ID NO: 13324 - protein, 342 aa, Triticum aestivum
  peptide (1)..(342): Ceres Seq. ID no. 13596946
  misc_feature (51)..(325): Pfam Name: Pfam Description:  Phosphorylase family
  misc_feature (106)..(342): NCBI GI NO: 34897886 NR Description: ESTs AU032452
  misc_feature (8)..(325): NCBI GI NO: 30686500 NR Description: expressed protein [Arabidopsis thaliana]
  misc_feature (8)..(325): NCBI GI NO: 21593613 NR Description: unknown [Arabidopsis thaliana]
  misc_feature (41)..(325): NCBI GI NO: 21617914 NR Description: unknown [Arabidopsis thaliana]
  misc_feature (41)..(325): NCBI GI NO: 18416327 NR Description: expressed protein [Arabidopsis thaliana]
  misc_feature (51)..(328): NCBI GI NO: 481815 NR Description: vegetative storage protein win4
  misc_feature (41)..(325): NCBI GI NO: 7487317 NR Description: hypothetical protein T22A6
  misc_feature (4)..(328): NCBI GI NO: 99650 NR Description: major storage protein - Carolina poplar
  misc_feature (6)..(328): NCBI GI NO: 4775662 NR Description: major storage protein [Populus x canadensis]
  misc_feature (4)..(328): NCBI GI NO: 421813 NR Description: storage protein, bark - cottonwood
MPATAMELSSLPLVLLLCLMAGSSTAALPALPGMDRVRQQVDRANRHGPSIGLVMSYVAEDTALQASGYFRPWHVQPFIDLYGRRFHIGSIRGVNVIYALTGQRRLNAAVTVQTLVDVFTVSGIVHYGTAGSSNDSMSFGDVSVPKLVAYTGAWTWKKYKSLKEESTELNFGQFNVPNGGENLLGSLKYRNEELYSVGKPMEEVFWLPVDSAWFKIAEGLKVNLERCNDTFCLPKTPQVVHGLKGASADMFLDNAEYRKFLFREFAVSTIDEESAAVVMTTTSPGVPVIVFRGVSDLAGVEPTWSSTSLMNLASINALKVAVEFIATIGRQMSTPLAQSSKN

SEQ ID NO: 13325 - protein, 337 aa, Triticum aestivum
  peptide (1)..(337): Ceres Seq. ID no. 13596947
  misc_feature (46)..(320): Pfam Name: Pfam Description:  Phosphorylase family
  misc_feature (101)..(337): NCBI GI NO: 34897886 NR Description: ESTs AU032452
  misc_feature (3)..(320): NCBI GI NO: 30686500 NR Description: expressed protein [Arabidopsis thaliana]
  misc_feature (3)..(320): NCBI GI NO: 21593613 NR Description: unknown [Arabidopsis thaliana]
  misc_feature (36)..(320): NCBI GI NO: 21617914 NR Description: unknown [Arabidopsis thaliana]
  misc_feature (36)..(320): NCBI GI NO: 18416327 NR Description: expressed protein [Arabidopsis thaliana]
  misc_feature (46)..(323): NCBI GI NO: 481815 NR Description: vegetative storage protein win4
  misc_feature (36)..(320): NCBI GI NO: 7487317 NR Description: hypothetical protein T22A6
  misc_feature (1)..(323): NCBI GI NO: 99650 NR Description: major storage protein - Carolina poplar
  misc_feature (1)..(323): NCBI GI NO: 4775662 NR Description: major storage protein [Populus x canadensis]
  misc_feature (1)..(323): NCBI GI NO: 421813 NR Description: storage protein, bark - cottonwood
MELSSLPLVLLLCLMAGSSTAALPALPGMDRVRQQVDRANRHGPSIGLVMSYVAEDTALQASGYFRPWHVQPFIDLYGRRFHIGSIRGVNVIYALTGQRRLNAAVTVQTLVDVFTVSGIVHYGTAGSSNDSMSFGDVSVPKLVAYTGAWTWKKYKSLKEESTELNFGQFNVPNGGENLLGSLKYRNEELYSVGKPMEEVFWLPVDSAWFKIAEGLKVNLERCNDTFCLPKTPQVVHGLKGASADMFLDNAEYRKFLFREFAVSTIDEESAAVVMTTTSPGVPVIVFRGVSDLAGVEPTWSSTSLMNLASINALKVAVEFIATIGRQMSTPLAQSSKN

SEQ ID NO: 13326 - DNA, 937 bp, Triticum aestivum
  misc_feature (1)..(937): Ceres Seq. ID no. 13662587
gattaagcaagcatctgccttcaatatctcctgtattttctcatctaattagccacgcttgaagttcatacttgaaccatatttcctgctcttcttcgtgctaatcggctggccacttccagaaaccaatttctgtcctcagttttagtattgtgattctagattagaaaaaagagaaccaggtgatcgagcgaggtgaggcaatgggaggcaccctgcggttcctgtcggatgtgctgctaggtagcagcagccagaggcagcacagcaagaagcggaggcagttcaacacggtggagctcaaggtgaagatggactgcgacggctgcgagctcaagatccggaacaccctcgccaacatgagaggagctcagtcggtggagatcaaccggaagcagcacaaggtgacggtgaaggggttcgtggagccgcagcgtgtgctgaggagagtccagtcgacggggaagcgggccgagctctggccgtacgtgccttacacaaacccctacatggcgccggtgtacgacaagcgggctcccgccggccacgtgcgcaaggtggaaggtgtcatgccggtctccaccgggcaggaggagcgcctcgccacgatcttcagcgacgacaacccaaacgcctgctccgtcatgtagtcatgctcatgcaagtcactgcgccaaaagaccctttgcttcttcttcctttttcgggggtgattcctaccaaacgaccctctgctgaactttctccaccgacagactataaaatagcccattagtagaactactattacaaaactcgtcaacgatgcttgtaacaaaagactcatatttttaataatttaacaaagtactgtaatatatggtgaacgctatggtgaagctgatgctagcaagatttcatcgtatttcagaaatttaaaattatttgaagctagccc

SEQ ID NO: 13327 - protein, 148 aa, Triticum aestivum
  peptide (1)..(148): Ceres Seq. ID no. 13662588
  misc_feature (33)..(92): Pfam Name: Pfam Description:  Heavy-metal-associated domain
  misc_feature (1)..(148): NCBI GI NO: 37573003 NR Description: putative farnesylated protein
  misc_feature (1)..(148): NCBI GI NO: 15235984 NR Description: copper chaperone (CCH)-related
  misc_feature (3)..(148): NCBI GI NO: 32442810 NR Description: putative farnesylated protein
  misc_feature (3)..(148): NCBI GI NO: 15219990 NR Description: copper chaperone (CCH)-related
  misc_feature (3)..(148): NCBI GI NO: 15223925 NR Description: copper chaperone (CCH)-related
  misc_feature (24)..(148): NCBI GI NO: 15237967 NR Description: copper chaperone (CCH)-related
  misc_feature (19)..(148): NCBI GI NO: 23304411 NR Description: farnesylated protein 1
  misc_feature (19)..(148): NCBI GI NO: 38346843 NR Description: OSJNBa0091C12.3
  misc_feature (3)..(148): NCBI GI NO: 15233937 NR Description: copper chaperone (CCH)-related
  misc_feature (3)..(148): NCBI GI NO: 21536547 NR Description: farnesylated protein (ATFP6)
MGGTLRFLSDVLLGSSSQRQHSKKRRQFNTVELKVKMDCDGCELKIRNTLANMRGAQSVEINRKQHKVTVKGFVEPQRVLRRVQSTGKRAELWPYVPYTNPYMAPVYDKRAPAGHVRKVEGVMPVSTGQEERLATIFSDDNPNACSVM

SEQ ID NO: 13328 - protein, 112 aa, Triticum aestivum
  peptide (1)..(112): Ceres Seq. ID no. 13662589
  misc_feature (1)..(56): Pfam Name: Pfam Description:  Heavy-metal-associated domain
  misc_feature (1)..(112): NCBI GI NO: 37573003 NR Description: putative farnesylated protein
  misc_feature (1)..(112): NCBI GI NO: 15235984 NR Description: copper chaperone (CCH)-related
  misc_feature (1)..(112): NCBI GI NO: 32442810 NR Description: putative farnesylated protein
  misc_feature (1)..(112): NCBI GI NO: 15219990 NR Description: copper chaperone (CCH)-related
  misc_feature (1)..(112): NCBI GI NO: 15223925 NR Description: copper chaperone (CCH)-related
  misc_feature (1)..(112): NCBI GI NO: 15237967 NR Description: copper chaperone (CCH)-related
  misc_feature (1)..(112): NCBI GI NO: 23304411 NR Description: farnesylated protein 1
  misc_feature (1)..(112): NCBI GI NO: 38346843 NR Description: OSJNBa0091C12.3
  misc_feature (1)..(112): NCBI GI NO: 15233937 NR Description: copper chaperone (CCH)-related
  misc_feature (1)..(112): NCBI GI NO: 21536547 NR Description: farnesylated protein (ATFP6)
MDCDGCELKIRNTLANMRGAQSVEINRKQHKVTVKGFVEPQRVLRRVQSTGKRAELWPYVPYTNPYMAPVYDKRAPAGHVRKVEGVMPVSTGQEERLATIFSDDNPNACSVM

SEQ ID NO: 13329 - protein, 96 aa, Triticum aestivum
  peptide (1)..(96): Ceres Seq. ID no. 13662590
  misc_feature (1)..(96): NCBI GI NO: 37573003 NR Description: putative farnesylated protein
  misc_feature (1)..(96): NCBI GI NO: 15235984 NR Description: copper chaperone (CCH)-related
  misc_feature (1)..(96): NCBI GI NO: 32442810 NR Description: putative farnesylated protein
  misc_feature (1)..(96): NCBI GI NO: 15219990 NR Description: copper chaperone (CCH)-related
  misc_feature (1)..(96): NCBI GI NO: 15223925 NR Description: copper chaperone (CCH)-related
  misc_feature (1)..(96): NCBI GI NO: 15237967 NR Description: copper chaperone (CCH)-related
  misc_feature (1)..(96): NCBI GI NO: 23304411 NR Description: farnesylated protein 1
  misc_feature (1)..(96): NCBI GI NO: 38346843 NR Description: OSJNBa0091C12.3
  misc_feature (1)..(96): NCBI GI NO: 15233937 NR Description: copper chaperone (CCH)-related
  misc_feature (1)..(96): NCBI GI NO: 21536547 NR Description: farnesylated protein (ATFP6)
MRGAQSVEINRKQHKVTVKGFVEPQRVLRRVQSTGKRAELWPYVPYTNPYMAPVYDKRAPAGHVRKVEGVMPVSTGQEERLATIFSDDNPNACSVM

SEQ ID NO: 13330 - DNA, 2140 bp, Triticum aestivum
  misc_feature (1)..(2140): Ceres Seq. ID no. 14314096
gtctccttccccacatcgtcgtcaatccccaattcccaaatcacgcgctccgacgaccaaaccctaacctcggatccccggaagcacgccaaattcgccaaccctcccctcagattgggcatgccagccccccgaaactccagcccgtgacctcgccggagacgatggcctcgctgccgccgcatccccgccggattcggcccatcgccgtggcctccctggtgctcttcctcctcttcctctacacccgctcggatgggaaccctccgcggctcccgggctccgattcgcgcccgctccaccggaggctcctctccggtgccgatcccgccagccccgccgcgtccagaggcgggaacctttcggaggtcaccgggctgaacggcgagcagctggagaacccctccaccgcgtgcgccggcatcgaccgccacgagggtttcgggtcccagtgcgagttcctccgggctcacccgcagtgcagctccggcgggttcgtcgactacctggacttcttctactgcaggtgcgagagattcaggctgcttggatatgccgtgcttgcagtgtgcctcgcggcgctgttctacatgctcggtaacacggccgcggactacttctgttgcagcctagagaagatgtctgcgctgctgcggctaccgccgacagtggctggtgttaccctgctcccctttggtaatggtgctcctgatgtgtttgccagcattgcagcgtttatggggtctggcgccggggatgtcgggctgaacagcgtgctgggcggagcggtgtttgttacctgcgtcgttgttggggcagtatcattgtccgtcgcggagaagaatgtgcagattgattggaggtgctttgtgagggatgttggattcttcctgatcactttggtggcactgtctattatgttgattgtcgggaaggtgaccgtttggggagctatgctgtttgtatcgatttatgtggtttatgcatttgtggtggctgcaaatgagttattaaggaagcatgcacggatgctgaagtttgatgtagtcacaccattgcttccggtgaggggaagtatcttctcacacggactagaggatgatgattctgtgtacagttcacttcttgaggaggatacaagtgatgacgcggcccaggtaaacacatcattgccgcagtggatgtgggcttctcatgtggctatctactcaaatcaagggagagatggttcacctgacaggcctttgtggggttggaatgaagaaggaagagtggatacctccacgcttaactactccaaactgtttctgtttttggagctacccttgacaataccaagaaagttgacgattccaatagttgaggaagaccgctggtcacaagaatatgctgttgccagtgctggcttggcacctctactcttagcatttctgtggaacagccaggatggagtatccacgggtgccagcgtagcagcatatgtgattgctggtatttttgggattgcacttgcaggtcttgcttttacattcaccagtcccgaccgccctccaaggagatacttactcccatgggtgtttggagggtttgtgatgagcatcgtttggttctacatcattgccaatgagctggttgcactgttggttgcatttggagtgatacttgggattaatccttcaattctcggtttaacggtgttagcatggggcaattcgatgggtgacttaatgtcaaatgtggccttggcaatgaatggtggagatggtgtacagattgctatgtctggctgttatgcaggacctatgtttaatacacttgctggcctaggaatatcgatgctacttggagcttggtcgacggcacccaactcttatgttcttccgcaggaccgctctcttatttacacgatgagcttcctggttgctgggttgatctgggcgcttgttacgctgccacgaagcggcatgcgacctaacaagacgcttggagttggcctcattgctctctactcagttttccttttcattagagtaagcagtgctatggggatattgccactcccgggcttgaattagttgtttgtgtctattgtacatgactgtcctttatacagatgaaatggagttgtacattgttcctc

SEQ ID NO: 13331 - protein, 690 aa, Triticum aestivum
  peptide (1)..(690): Ceres Seq. ID no. 14314097
  misc_feature (534)..(676): Pfam Name: Pfam Description:  Sodium/calcium exchanger protein
  misc_feature (55)..(690): NCBI GI NO: 24960738 NR Description: Putative potassium-dependent sodium-calciumexchanger-like protein
  misc_feature (119)..(685): NCBI GI NO: 18404796 NR Description: cation exchanger, putative [Arabidopsis thaliana]
  misc_feature (70)..(685): NCBI GI NO: 18400266 NR Description: cation exchanger, putative (CAX9)
  misc_feature (431)..(684): NCBI GI NO: 15238665 NR Description: cation exchanger, putative (CAX7)
  misc_feature (110)..(343): NCBI GI NO: 15238665 NR Description: cation exchanger, putative (CAX7)
  misc_feature (431)..(684): NCBI GI NO: 18087575 NR Description: AT5g17860/MVA3_210 [Arabidopsis thaliana]
  misc_feature (431)..(682): NCBI GI NO: 15238663 NR Description: cation exchanger, putative (CAX8)
  misc_feature (110)..(343): NCBI GI NO: 18087575 NR Description: AT5g17860/MVA3_210 [Arabidopsis thaliana]
  misc_feature (138)..(331): NCBI GI NO: 15238663 NR Description: cation exchanger, putative (CAX8)
  misc_feature (107)..(394): NCBI GI NO: 18483233 NR Description: K-exchanger-like protein [Sorghum bicolor]
LLPHIVVNPQFPNHALRRPNPNLGSPEARQIRQPSPQIGHASPPKLQPVTSPETMASLPPHPRRIRPIAVASLVLFLLFLYTRSDGNPPRLPGSDSRPLHRRLLSGADPASPAASRGGNLSEVTGLNGEQLENPSTACAGIDRHEGFGSQCEFLRAHPQCSSGGFVDYLDFFYCRCERFRLLGYAVLAVCLAALFYMLGNTAADYFCCSLEKMSALLRLPPTVAGVTLLPFGNGAPDVFASIAAFMGSGAGDVGLNSVLGGAVFVTCVVVGAVSLSVAEKNVQIDWRCFVRDVGFFLITLVALSIMLIVGKVTVWGAMLFVSIYVVYAFVVAANELLRKHARMLKFDVVTPLLPVRGSIFSHGLEDDDSVYSSLLEEDTSDDAAQVNTSLPQWMWASHVAIYSNQGRDGSPDRPLWGWNEEGRVDTSTLNYSKLFLFLELPLTIPRKLTIPIVEEDRWSQEYAVASAGLAPLLLAFLWNSQDGVSTGASVAAYVIAGIFGIALAGLAFTFTSPDRPPRRYLLPWVFGGFVMSIVWFYIIANELVALLVAFGVILGINPSILGLTVLAWGNSMGDLMSNVALAMNGGDGVQIAMSGCYAGPMFNTLAGLGISMLLGAWSTAPNSYVLPQDRSLIYTMSFLVAGLIWALVTLPRSGMRPNKTLGVGLIALYSVFLFIRVSSAMGILPLPGLN

SEQ ID NO: 13332 - protein, 636 aa, Triticum aestivum
  peptide (1)..(636): Ceres Seq. ID no. 14314098
  misc_feature (480)..(622): Pfam Name: Pfam Description:  Sodium/calcium exchanger protein
  misc_feature (1)..(636): NCBI GI NO: 24960738 NR Description: Putative potassium-dependent sodium-calciumexchanger-like protein
  misc_feature (65)..(631): NCBI GI NO: 18404796 NR Description: cation exchanger, putative [Arabidopsis thaliana]
  misc_feature (16)..(631): NCBI GI NO: 18400266 NR Description: cation exchanger, putative (CAX9)
  misc_feature (377)..(630): NCBI GI NO: 15238665 NR Description: cation exchanger, putative (CAX7)
  misc_feature (56)..(289): NCBI GI NO: 15238665 NR Description: cation exchanger, putative (CAX7)
  misc_feature (377)..(630): NCBI GI NO: 18087575 NR Description: AT5g17860/MVA3_210 [Arabidopsis thaliana]
  misc_feature (377)..(628): NCBI GI NO: 15238663 NR Description: cation exchanger, putative (CAX8)
  misc_feature (56)..(289): NCBI GI NO: 18087575 NR Description: AT5g17860/MVA3_210 [Arabidopsis thaliana]
  misc_feature (84)..(277): NCBI GI NO: 15238663 NR Description: cation exchanger, putative (CAX8)
  misc_feature (53)..(340): NCBI GI NO: 18483233 NR Description: K-exchanger-like protein [Sorghum bicolor]
MASLPPHPRRIRPIAVASLVLFLLFLYTRSDGNPPRLPGSDSRPLHRRLLSGADPASPAASRGGNLSEVTGLNGEQLENPSTACAGIDRHEGFGSQCEFLRAHPQCSSGGFVDYLDFFYCRCERFRLLGYAVLAVCLAALFYMLGNTAADYFCCSLEKMSALLRLPPTVAGVTLLPFGNGAPDVFASIAAFMGSGAGDVGLNSVLGGAVFVTCVVVGAVSLSVAEKNVQIDWRCFVRDVGFFLITLVALSIMLIVGKVTVWGAMLFVSIYVVYAFVVAANELLRKHARMLKFDVVTPLLPVRGSIFSHGLEDDDSVYSSLLEEDTSDDAAQVNTSLPQWMWASHVAIYSNQGRDGSPDRPLWGWNEEGRVDTSTLNYSKLFLFLELPLTIPRKLTIPIVEEDRWSQEYAVASAGLAPLLLAFLWNSQDGVSTGASVAAYVIAGIFGIALAGLAFTFTSPDRPPRRYLLPWVFGGFVMSIVWFYIIANELVALLVAFGVILGINPSILGLTVLAWGNSMGDLMSNVALAMNGGDGVQIAMSGCYAGPMFNTLAGLGISMLLGAWSTAPNSYVLPQDRSLIYTMSFLVAGLIWALVTLPRSGMRPNKTLGVGLIALYSVFLFIRVSSAMGILPLPGLN

SEQ ID NO: 13333 - protein, 494 aa, Triticum aestivum
  peptide (1)..(494): Ceres Seq. ID no. 14314099
  misc_feature (338)..(480): Pfam Name: Pfam Description:  Sodium/calcium exchanger protein
  misc_feature (1)..(494): NCBI GI NO: 24960738 NR Description: Putative potassium-dependent sodium-calciumexchanger-like protein
  misc_feature (1)..(489): NCBI GI NO: 18404796 NR Description: cation exchanger, putative [Arabidopsis thaliana]
  misc_feature (1)..(489): NCBI GI NO: 18400266 NR Description: cation exchanger, putative (CAX9)
  misc_feature (235)..(488): NCBI GI NO: 15238665 NR Description: cation exchanger, putative (CAX7)
  misc_feature (1)..(147): NCBI GI NO: 15238665 NR Description: cation exchanger, putative (CAX7)
  misc_feature (235)..(488): NCBI GI NO: 18087575 NR Description: AT5g17860/MVA3_210 [Arabidopsis thaliana]
  misc_feature (235)..(486): NCBI GI NO: 15238663 NR Description: cation exchanger, putative (CAX8)
  misc_feature (1)..(147): NCBI GI NO: 18087575 NR Description: AT5g17860/MVA3_210 [Arabidopsis thaliana]
  misc_feature (1)..(135): NCBI GI NO: 15238663 NR Description: cation exchanger, putative (CAX8)
  misc_feature (1)..(198): NCBI GI NO: 18483233 NR Description: K-exchanger-like protein [Sorghum bicolor]
MLGNTAADYFCCSLEKMSALLRLPPTVAGVTLLPFGNGAPDVFASIAAFMGSGAGDVGLNSVLGGAVFVTCVVVGAVSLSVAEKNVQIDWRCFVRDVGFFLITLVALSIMLIVGKVTVWGAMLFVSIYVVYAFVVAANELLRKHARMLKFDVVTPLLPVRGSIFSHGLEDDDSVYSSLLEEDTSDDAAQVNTSLPQWMWASHVAIYSNQGRDGSPDRPLWGWNEEGRVDTSTLNYSKLFLFLELPLTIPRKLTIPIVEEDRWSQEYAVASAGLAPLLLAFLWNSQDGVSTGASVAAYVIAGIFGIALAGLAFTFTSPDRPPRRYLLPWVFGGFVMSIVWFYIIANELVALLVAFGVILGINPSILGLTVLAWGNSMGDLMSNVALAMNGGDGVQIAMSGCYAGPMFNTLAGLGISMLLGAWSTAPNSYVLPQDRSLIYTMSFLVAGLIWALVTLPRSGMRPNKTLGVGLIALYSVFLFIRVSSAMGILPLPGLN

SEQ ID NO: 13334 - DNA, 1793 bp, Triticum aestivum
  misc_feature (1)..(1793): Ceres Seq. ID no. 13655298
tcctcccatttgctctgctcgctcgctcgccgccccctcctctcctccgatcctccccccacgtcccgcgccggagctggggagggaggggggaaattcacccccgcgccaggcggattccgccccggatccccgcgtcgggcaggccggccttcttacccggttaaccaagtacggtgcattctgaacggtagcctgtaactcttattgggtaattctaccacattatggcctcggttggtgcggtgcgtccttcctcgcgctttcagaatgacacgagtactagtggtgatgccgaccgacttccgaacgagatgggcaatatgagcataagggatgacagggaccctgaggatatagtagtcaacggcaatgggacggaaccaggccatattatagtcacaagcattgagggaagaaatgggcaagcaaaacagaccattagctacatggctgagcgcgtggttggtaatgggtcatttggaactgttttccaggctaagtgtcttgaaactggggagacggtggctataaagaaggttcttcaagacaagagatataagaaccgtgagctgcaaacgatgcgagttcttgaccacccaaatgttgtggctttaaagcaywrtwwwktctsraagactgagarggrggagctttacctcaacctggtgcttgagtatgtgccggagactgctcatcgtgtcattaagcattacaacaagatgaaccaacgcatgcccttgatatatgcaaaactgtacatgtatcagatatgtagatctttggcatacattcacaacagcattggagtatgccacagagacatcaagcctcaaaatcttctggtgaatccacatacacaccaattgaaattatgtgacttcggaagtgcgaaagtgttggtaaaaggagaaccaaatatttcctatatctgttcaaggtactatagagccccagagctcatatttggtgctactgaatacacaacggcaattgacgtttggtctgctggctgtgttcttgctgaactccttctaggacagcctatattccctggcgacagtggtgttgatcagcttgttgaaatcatcaaggttttaggtacccctacaagagaagaaattaagtgcatgaatccaaattatacagagtttaaattcccacaaatcaaagctcacccatggcacaagatcttccataaaagaatgcctgctgaagcagtagatcttgtctccagactcttgcaatattcaccaagcctgcgttcaactgctttggaagcattaattcatccattcttcgatgaactccgggacccaaacacccgtttaccgaacggccgttttcttcctcccctctttaactttaagccccatgagttgaagggcgtgccaatggacatcctggtgaagctcatccctgaacatgctcggaagaactgtgcctttgtaggatggtgatccgtcagacggctgcttgaagtttagttcagaacaaatccagttgtcgtctactagaaaccccaggaatttgagattgcctgcagccacacgggatataggcgatgacacatgtgattattattctttttctcgtccgagacctcgatgtcatgtattctttccccctactgccgatgtaacaaaccacccatgattctgtaagtagatgagaagtgtttcgaccgttttcccctgagctcatgtgctatgcaatgaaggatgcaccctatgtaccgccaatatttggtccagtatttgttcatggatccaggctataattcatttgtactc

SEQ ID NO: 13335 - protein, 410 aa, Triticum aestivum
  peptide (1)..(410): Ceres Seq. ID no. 15219731
  misc_feature (74)..(358): Pfam Name: Pfam Description:  Protein kinase domain
  misc_feature (30)..(410): NCBI GI NO: 21745456 NR Description: GSK-like kinase [Triticum aestivum]
  misc_feature (1)..(408): NCBI GI NO: 15230058 NR Description: shaggy-related protein kinase gamma
  misc_feature (1)..(408): NCBI GI NO: 21553877 NR Description: shaggy related protein kinase ASK-GAMMA
  misc_feature (1)..(409): NCBI GI NO: 481018 NR Description: protein kinase MSK-3 (EC 2.7.1.-)
  misc_feature (1)..(409): NCBI GI NO: 11182434 NR Description: GLYCOGEN SYNTHASE KINASE-3 HOMOLOG MSK-3
  misc_feature (1)..(409): NCBI GI NO: 18421039 NR Description: shaggy-related protein kinase alpha
  misc_feature (1)..(409): NCBI GI NO: 1709127 NR Description: Glycogen synthase kinase-3 homolog MsK-1
  misc_feature (1)..(409): NCBI GI NO: 541901 NR Description: protein kinase ASK-alpha (EC 2.7.1.-)
  misc_feature (1)..(409): NCBI GI NO: 2398519 NR Description: shaggy-like kinase alpha [Arabidopsis thaliana]
  misc_feature (1)..(408): NCBI GI NO: 15217795 NR Description: shaggy-related protein kinase kappa, putative
  misc_feature (132)..(132): Xaa is any aa, unknown or other
  misc_feature (133)..(133): Xaa is any aa, unknown or other
  misc_feature (134)..(134): Xaa is any aa, unknown or other
  misc_feature (135)..(135): Xaa is any aa, unknown or other
  misc_feature (136)..(136): Xaa is any aa, unknown or other
  misc_feature (140)..(140): Xaa is any aa, unknown or other
  misc_feature (141)..(141): Xaa is any aa, unknown or other
MASVGAVRPSSRFQNDTSTSGDADRLPNEMGNMSIRDDRDPEDIVVNGNGTEPGHIIVTSIEGRNGQAKQTISYMAERVVGNGSFGTVFQAKCLETGETVAIKKVLQDKRYKNRELQTMRVLDHPNVVALKXXXXXKTEXXELYLNLVLEYVPETAHRVIKHYNKMNQRMPLIYAKLYMYQICRSLAYIHNSIGVCHRDIKPQNLLVNPHTHQLKLCDFGSAKVLVKGEPNISYICSRYYRAPELIFGATEYTTAIDVWSAGCVLAELLLGQPIFPGDSGVDQLVEIIKVLGTPTREEIKCMNPNYTEFKFPQIKAHPWHKIFHKRMPAEAVDLVSRLLQYSPSLRSTALEALIHPFFDELRDPNTRLPNGRFLPPLFNFKPHELKGVPMDILVKLIPEHARKNCAFVGW

SEQ ID NO: 13336 - protein, 381 aa, Triticum aestivum
  peptide (1)..(381): Ceres Seq. ID no. 15219732
  misc_feature (45)..(329): Pfam Name: Pfam Description:  Protein kinase domain
  misc_feature (1)..(381): NCBI GI NO: 21745456 NR Description: GSK-like kinase [Triticum aestivum]
  misc_feature (1)..(379): NCBI GI NO: 15230058 NR Description: shaggy-related protein kinase gamma
  misc_feature (1)..(379): NCBI GI NO: 21553877 NR Description: shaggy related protein kinase ASK-GAMMA
  misc_feature (1)..(380): NCBI GI NO: 481018 NR Description: protein kinase MSK-3 (EC 2.7.1.-)
  misc_feature (1)..(380): NCBI GI NO: 11182434 NR Description: GLYCOGEN SYNTHASE KINASE-3 HOMOLOG MSK-3
  misc_feature (1)..(380): NCBI GI NO: 18421039 NR Description: shaggy-related protein kinase alpha
  misc_feature (1)..(380): NCBI GI NO: 1709127 NR Description: Glycogen synthase kinase-3 homolog MsK-1
  misc_feature (1)..(380): NCBI GI NO: 541901 NR Description: protein kinase ASK-alpha (EC 2.7.1.-)
  misc_feature (1)..(380): NCBI GI NO: 2398519 NR Description: shaggy-like kinase alpha [Arabidopsis thaliana]
  misc_feature (1)..(379): NCBI GI NO: 15217795 NR Description: shaggy-related protein kinase kappa, putative
  misc_feature (103)..(103): Xaa is any aa, unknown or other
  misc_feature (104)..(104): Xaa is any aa, unknown or other
  misc_feature (105)..(105): Xaa is any aa, unknown or other
  misc_feature (106)..(106): Xaa is any aa, unknown or other
  misc_feature (107)..(107): Xaa is any aa, unknown or other
  misc_feature (111)..(111): Xaa is any aa, unknown or other
  misc_feature (112)..(112): Xaa is any aa, unknown or other
MGNMSIRDDRDPEDIVVNGNGTEPGHIIVTSIEGRNGQAKQTISYMAERVVGNGSFGTVFQAKCLETGETVAIKKVLQDKRYKNRELQTMRVLDHPNVVALKXXXXXKTEXXELYLNLVLEYVPETAHRVIKHYNKMNQRMPLIYAKLYMYQICRSLAYIHNSIGVCHRDIKPQNLLVNPHTHQLKLCDFGSAKVLVKGEPNISYICSRYYRAPELIFGATEYTTAIDVWSAGCVLAELLLGQPIFPGDSGVDQLVEIIKVLGTPTREEIKCMNPNYTEFKFPQIKAHPWHKIFHKRMPAEAVDLVSRLLQYSPSLRSTALEALIHPFFDELRDPNTRLPNGRFLPPLFNFKPHELKGVPMDILVKLIPEHARKNCAFVGW

SEQ ID NO: 13337 - protein, 378 aa, Triticum aestivum
  peptide (1)..(378): Ceres Seq. ID no. 15219733
  misc_feature (42)..(326): Pfam Name: Pfam Description:  Protein kinase domain
  misc_feature (1)..(378): NCBI GI NO: 21745456 NR Description: GSK-like kinase [Triticum aestivum]
  misc_feature (1)..(376): NCBI GI NO: 15230058 NR Description: shaggy-related protein kinase gamma
  misc_feature (1)..(376): NCBI GI NO: 21553877 NR Description: shaggy related protein kinase ASK-GAMMA
  misc_feature (1)..(377): NCBI GI NO: 481018 NR Description: protein kinase MSK-3 (EC 2.7.1.-)
  misc_feature (1)..(377): NCBI GI NO: 11182434 NR Description: GLYCOGEN SYNTHASE KINASE-3 HOMOLOG MSK-3
  misc_feature (1)..(377): NCBI GI NO: 18421039 NR Description: shaggy-related protein kinase alpha
  misc_feature (1)..(377): NCBI GI NO: 1709127 NR Description: Glycogen synthase kinase-3 homolog MsK-1
  misc_feature (1)..(377): NCBI GI NO: 541901 NR Description: protein kinase ASK-alpha (EC 2.7.1.-)
  misc_feature (1)..(377): NCBI GI NO: 2398519 NR Description: shaggy-like kinase alpha [Arabidopsis thaliana]
  misc_feature (1)..(376): NCBI GI NO: 15217795 NR Description: shaggy-related protein kinase kappa, putative
  misc_feature (100)..(100): Xaa is any aa, unknown or other
  misc_feature (101)..(101): Xaa is any aa, unknown or other
  misc_feature (102)..(102): Xaa is any aa, unknown or other
  misc_feature (103)..(103): Xaa is any aa, unknown or other
  misc_feature (104)..(104): Xaa is any aa, unknown or other
  misc_feature (108)..(108): Xaa is any aa, unknown or other
  misc_feature (109)..(109): Xaa is any aa, unknown or other
MSIRDDRDPEDIVVNGNGTEPGHIIVTSIEGRNGQAKQTISYMAERVVGNGSFGTVFQAKCLETGETVAIKKVLQDKRYKNRELQTMRVLDHPNVVALKXXXXXKTEXXELYLNLVLEYVPETAHRVIKHYNKMNQRMPLIYAKLYMYQICRSLAYIHNSIGVCHRDIKPQNLLVNPHTHQLKLCDFGSAKVLVKGEPNISYICSRYYRAPELIFGATEYTTAIDVWSAGCVLAELLLGQPIFPGDSGVDQLVEIIKVLGTPTREEIKCMNPNYTEFKFPQIKAHPWHKIFHKRMPAEAVDLVSRLLQYSPSLRSTALEALIHPFFDELRDPNTRLPNGRFLPPLFNFKPHELKGVPMDILVKLIPEHARKNCAFVGW

SEQ ID NO: 13338 - DNA, 1169 bp, Triticum aestivum
  misc_feature (1)..(1169): Ceres Seq. ID no. 13655404
ccagctctagcagtcccggctttccctgctcgcctcgcagtcgccgccgccgccgccagccatgggtcgcaccaaggacgagctcctcgcgcgcctcgaggagcttaagattgatttcaagcgctacgaccacccggttgtgctgacggtcgaggaacaggccaaacatgtgggaagttttggaggtgctttgaccaagaatctgcttctgaaggacaagaagcatcgcttgtacattgtttctgcacttgctgacaccaaagttgacatgaaaattctgtcccagcgtcttggcttgggaaaaggtggtgtgcgaatggctcctgaggagaatttgcgtcaagtgcttcaggtaccgttaggatgtgttactccgtttgcgctattcaatgagtccgcgagtgccgtctcattattactggaccaagggttcaagtctaaacagagctgctacttccatccactgacaaatgatgtgactattgccctcagttcaagcaacctggacaagtttctcctctccattgggaagcaaccagcttatgtagacttggaggcctcaccagtggtaggtaaagataatccccctgatctagcagatcttgtgccttctggtgcactctgttcctcagaagaatcagttgagaatccgactcctaaagatgctcctcaagtcaacgtacccaaacagaaaacgtgtctaccagaagtgaaggctaagcccaaagttcagaacaagggtgcagaaagttcagagagtaaagttcctactaataatggcgcaaatgttgagatatttgcaagtgatgtgcttgaggtcatcttcccattgttcctgtctgagacatcaaagaaattgaatattaaacaggaagagcttactcaaattttaaaattagatgactttaaacgacgagctgctccagatctggagagtgcaacgaatatgttcaaaaacatggcatacagtgcaggatttcacgctggcttcgataccatgctcaagtcgggtttaggtgggatgccctctcggaaatagtgggttaattcgatatagaagactgtgagttgattcagtcaatttttgtatgccccttggtgtaaaatcaaatcataccatatagtacttattatgttgaatgattcgattgaatgtatcaccttaagcc

SEQ ID NO: 13339 - protein, 325 aa, Triticum aestivum
  peptide (1)..(325): Ceres Seq. ID no. 13655405
  misc_feature (14)..(164): Pfam Name: Pfam Description:  YbaK / prolyl-tRNA synthetases associated domain
  misc_feature (1)..(309): NCBI GI NO: 30693857 NR Description: expressed protein [Arabidopsis thaliana]
  misc_feature (86)..(309): NCBI GI NO: 7271117 NR Description: 25.7 kDa protein [Cicer arietinum]
  misc_feature (164)..(309): NCBI GI NO: 25405166 NR Description: hypothetical protein T12C22.11
  misc_feature (1)..(97): NCBI GI NO: 25405166 NR Description: hypothetical protein T12C22.11
  misc_feature (3)..(171): NCBI GI NO: 16124366 NR Description: DNA-binding protein, putative
  misc_feature (4)..(171): NCBI GI NO: 22968624 NR Description: hypothetical protein [Rhodospirillum rubrum]
  misc_feature (11)..(165): NCBI GI NO: 27676960 NR Description: similar to RIKEN cDNA 2010316F05
  misc_feature (7)..(165): NCBI GI NO: 21312706 NR Description: RIKEN cDNA 2010316F05 [Mus musculus]
  misc_feature (1)..(165): NCBI GI NO: 34783837 NR Description: Unknown (protein for MGC:64201) [Danio rerio]
  misc_feature (1)..(166): NCBI GI NO: 13473736 NR Description: hypothetical protein, putative DNA-binding protein
MGRTKDELLARLEELKIDFKRYDHPVVLTVEEQAKHVGSFGGALTKNLLLKDKKHRLYIVSALADTKVDMKILSQRLGLGKGGVRMAPEENLRQVLQVPLGCVTPFALFNESASAVSLLLDQGFKSKQSCYFHPLTNDVTIALSSSNLDKFLLSIGKQPAYVDLEASPVVGKDNPPDLADLVPSGALCSSEESVENPTPKDAPQVNVPKQKTCLPEVKAKPKVQNKGAESSESKVPTNNGANVEIFASDVLEVIFPLFLSETSKKLNIKQEELTQILKLDDFKRRAAPDLESATNMFKNMAYSAGFHAGFDTMLKSGLGGMPSRK

SEQ ID NO: 13340 - protein, 256 aa, Triticum aestivum
  peptide (1)..(256): Ceres Seq. ID no. 13655406
  misc_feature (1)..(95): Pfam Name: Pfam Description:  YbaK / prolyl-tRNA synthetases associated domain
  misc_feature (1)..(240): NCBI GI NO: 30693857 NR Description: expressed protein [Arabidopsis thaliana]
  misc_feature (17)..(240): NCBI GI NO: 7271117 NR Description: 25.7 kDa protein [Cicer arietinum]
  misc_feature (95)..(240): NCBI GI NO: 25405166 NR Description: hypothetical protein T12C22.11
  misc_feature (1)..(28): NCBI GI NO: 25405166 NR Description: hypothetical protein T12C22.11
  misc_feature (1)..(102): NCBI GI NO: 16124366 NR Description: DNA-binding protein, putative
  misc_feature (1)..(102): NCBI GI NO: 22968624 NR Description: hypothetical protein [Rhodospirillum rubrum]
  misc_feature (1)..(96): NCBI GI NO: 27676960 NR Description: similar to RIKEN cDNA 2010316F05
  misc_feature (1)..(96): NCBI GI NO: 21312706 NR Description: RIKEN cDNA 2010316F05 [Mus musculus]
  misc_feature (1)..(96): NCBI GI NO: 34783837 NR Description: Unknown (protein for MGC:64201) [Danio rerio]
  misc_feature (1)..(97): NCBI GI NO: 13473736 NR Description: hypothetical protein, putative DNA-binding protein
MKILSQRLGLGKGGVRMAPEENLRQVLQVPLGCVTPFALFNESASAVSLLLDQGFKSKQSCYFHPLTNDVTIALSSSNLDKFLLSIGKQPAYVDLEASPVVGKDNPPDLADLVPSGALCSSEESVENPTPKDAPQVNVPKQKTCLPEVKAKPKVQNKGAESSESKVPTNNGANVEIFASDVLEVIFPLFLSETSKKLNIKQEELTQILKLDDFKRRAAPDLESATNMFKNMAYSAGFHAGFDTMLKSGLGGMPSRK

SEQ ID NO: 13341 - protein, 240 aa, Triticum aestivum
  peptide (1)..(240): Ceres Seq. ID no. 13655407
  misc_feature (1)..(79): Pfam Name: Pfam Description:  YbaK / prolyl-tRNA synthetases associated domain
  misc_feature (1)..(224): NCBI GI NO: 30693857 NR Description: expressed protein [Arabidopsis thaliana]
  misc_feature (1)..(224): NCBI GI NO: 7271117 NR Description: 25.7 kDa protein [Cicer arietinum]
  misc_feature (79)..(224): NCBI GI NO: 25405166 NR Description: hypothetical protein T12C22.11
  misc_feature (1)..(12): NCBI GI NO: 25405166 NR Description: hypothetical protein T12C22.11
  misc_feature (1)..(86): NCBI GI NO: 16124366 NR Description: DNA-binding protein, putative
  misc_feature (1)..(86): NCBI GI NO: 22968624 NR Description: hypothetical protein [Rhodospirillum rubrum]
  misc_feature (1)..(80): NCBI GI NO: 27676960 NR Description: similar to RIKEN cDNA 2010316F05
  misc_feature (1)..(80): NCBI GI NO: 21312706 NR Description: RIKEN cDNA 2010316F05 [Mus musculus]
  misc_feature (1)..(80): NCBI GI NO: 34783837 NR Description: Unknown (protein for MGC:64201) [Danio rerio]
  misc_feature (1)..(81): NCBI GI NO: 13473736 NR Description: hypothetical protein, putative DNA-binding protein
MAPEENLRQVLQVPLGCVTPFALFNESASAVSLLLDQGFKSKQSCYFHPLTNDVTIALSSSNLDKFLLSIGKQPAYVDLEASPVVGKDNPPDLADLVPSGALCSSEESVENPTPKDAPQVNVPKQKTCLPEVKAKPKVQNKGAESSESKVPTNNGANVEIFASDVLEVIFPLFLSETSKKLNIKQEELTQILKLDDFKRRAAPDLESATNMFKNMAYSAGFHAGFDTMLKSGLGGMPSRK

SEQ ID NO: 13342 - DNA, 1439 bp, Triticum aestivum
  misc_feature (1)..(1439): Ceres Seq. ID no. 14302820
gaaaagcaaatcgtgcccaaccaaaccctagccccctccccagcccatggcgaagttcggcgagggcgacgctcggtggatcgtgcaggagcgcgccgacggtgccaacgtccacaactggcactgggcggagcgcgactgtctcgactggtctcgcgcgcttctctccaagctcctcgcgggcctccccgtcctctccggagagggcggcctcaccctccgcaccaccaccctcgacaagctcgatggcgaggcctacgtcaacatccgcaagggcaaggtcatcccagggtacgagctttccctcacgctcgcctgggaggccgatgccacaaccgagtcgggggtcgtcaaggtcaccggcaccgctgaggtaccctacctcgctgacgagaacgccgacgaggaccccgaactccgcatcactgttcgcggtgacgacggccccctcgcgcgccgggccaaggatgccttcatcgcccatggcaagcctctggttattacgaagatccgggattatgtcgccgccatggcgaatggtggccccgccaaggacgagatagattctaagaagatttccaccaaggctgccccagcggccggtggcgcagctgttgctcctgctccttcagtgaaggtaacagcagcgccagtgcaggcgccagcagctaaggagaagaaggcgaatggcaaggataaggaaggattcaagactatcgagatgacagagaagttcaactgccgctccaaggacatctatgagatcttgatggatgacaacaggtggaagggtttcacacagagcaatgcgaggatcagcaaggatgttggtgggcagtttagcctctttgatgggtccatcacaggtgttaatgaggagctgcaggaagggaagctgatcgtgcagaaatggcggtttgggagctgggctgatggcgtccattctacagtcaggttggtgtttgatgagcctgagtcaggagtgacaacaataaagctcaaacaaactgatgtgccagaggaagacaggtatgggaactcaaccgtggtggagaacactgagagaggctggaaagagctcatcttccagaggatacgtgcagtgttcggttttggggtctgaaaaagcatctttgacatccagcttcaatgaagtcgatcctgccttttcatggctatccatgttttgctgtcttagtttattcgatgctgatcgacacacaaaacttcgtgaacttccgggaattgaaaaatactccgtgttaccttgtattcatcacgctgggttgtgctttgaagtcgtcactcatgaaagtttgagcttgtgactcatgtagaggccggcgaaagatggtcgctgagtgactattatttttattccttgcgtctgtatgacatggtaccagataaattgtattgaagtttctagttctacaagc

SEQ ID NO: 13343 - protein, 358 aa, Triticum aestivum
  peptide (1)..(358): Ceres Seq. ID no. 14302821
  misc_feature (219)..(358): Pfam Name: Pfam Description:  Aha1 domain
  misc_feature (1)..(358): NCBI GI NO: 21539453 NR Description: unknown protein [Arabidopsis thaliana]
  misc_feature (1)..(358): NCBI GI NO: 18399461 NR Description: expressed protein [Arabidopsis thaliana]
  misc_feature (89)..(358): NCBI GI NO: 30682028 NR Description: expressed protein [Arabidopsis thaliana]
  misc_feature (1)..(68): NCBI GI NO: 30682028 NR Description: expressed protein [Arabidopsis thaliana]
  misc_feature (1)..(357): NCBI GI NO: 40786381 NR Description: Bm44 [Bombyx mori]
  misc_feature (1)..(358): NCBI GI NO: 24585720 NR Description: CG1416-PA [Drosophila melanogaster]
  misc_feature (1)..(328): NCBI GI NO: 22122515 NR Description: AHA1
  misc_feature (1)..(180): NCBI GI NO: 39850089 NR Description: RIKEN cDNA 1110064P04 [Mus musculus]
  misc_feature (224)..(324): NCBI GI NO: 39850089 NR Description: RIKEN cDNA 1110064P04 [Mus musculus]
  misc_feature (1)..(328): NCBI GI NO: 6912280 NR Description: AHA1
MAKFGEGDARWIVQERADGANVHNWHWAERDCLDWSRALLSKLLAGLPVLSGEGGLTLRTTTLDKLDGEAYVNIRKGKVIPGYELSLTLAWEADATTESGVVKVTGTAEVPYLADENADEDPELRITVRGDDGPLARRAKDAFIAHGKPLVITKIRDYVAAMANGGPAKDEIDSKKISTKAAPAAGGAAVAPAPSVKVTAAPVQAPAAKEKKANGKDKEGFKTIEMTEKFNCRSKDIYEILMDDNRWKGFTQSNARISKDVGGQFSLFDGSITGVNEELQEGKLIVQKWRFGSWADGVHSTVRLVFDEPESGVTTIKLKQTDVPEEDRYGNSTVVENTERGWKELIFQRIRAVFGFGV

SEQ ID NO: 13344 - protein, 197 aa, Triticum aestivum
  peptide (1)..(197): Ceres Seq. ID no. 14302822
  misc_feature (58)..(197): Pfam Name: Pfam Description:  Aha1 domain
  misc_feature (1)..(197): NCBI GI NO: 21539453 NR Description: unknown protein [Arabidopsis thaliana]
  misc_feature (1)..(197): NCBI GI NO: 18399461 NR Description: expressed protein [Arabidopsis thaliana]
  misc_feature (1)..(197): NCBI GI NO: 30682028 NR Description: expressed protein [Arabidopsis thaliana]
  misc_feature (1)..(196): NCBI GI NO: 40786381 NR Description: Bm44 [Bombyx mori]
  misc_feature (1)..(197): NCBI GI NO: 24585720 NR Description: CG1416-PA [Drosophila melanogaster]
  misc_feature (1)..(167): NCBI GI NO: 22122515 NR Description: AHA1
  misc_feature (1)..(19): NCBI GI NO: 39850089 NR Description: RIKEN cDNA 1110064P04 [Mus musculus]
  misc_feature (63)..(163): NCBI GI NO: 39850089 NR Description: RIKEN cDNA 1110064P04 [Mus musculus]
  misc_feature (1)..(167): NCBI GI NO: 6912280 NR Description: AHA1
  misc_feature (1)..(19): NCBI GI NO: 31982558 NR Description: RIKEN cDNA 1110064P04 [Mus musculus]
MANGGPAKDEIDSKKISTKAAPAAGGAAVAPAPSVKVTAAPVQAPAAKEKKANGKDKEGFKTIEMTEKFNCRSKDIYEILMDDNRWKGFTQSNARISKDVGGQFSLFDGSITGVNEELQEGKLIVQKWRFGSWADGVHSTVRLVFDEPESGVTTIKLKQTDVPEEDRYGNSTVVENTERGWKELIFQRIRAVFGFGV

SEQ ID NO: 13345 - protein, 186 aa, Triticum aestivum
  peptide (1)..(186): Ceres Seq. ID no. 14302823
  misc_feature (36)..(152): Pfam Name: Pfam Description:  Equine herpesvirus glycoprotein gp2
  misc_feature (10)..(163): NCBI GI NO: 32699068 NR Description: hypothetical protein FLJ35107 [Homo sapiens]
  misc_feature (7)..(160): NCBI GI NO: 38175466 NR Description: putative high-affinity potassium transporter
  misc_feature (2)..(163): NCBI GI NO: 32699068 NR Description: hypothetical protein FLJ35107 [Homo sapiens]
  misc_feature (2)..(163): NCBI GI NO: 13592175 NR Description: ppg3 [Leishmania major]
  misc_feature (9)..(159): NCBI GI NO: 11359723 NR Description: proteophosphoglycan, membrane-associated
  misc_feature (2)..(163): NCBI GI NO: 5420387 NR Description: proteophosphoglycan [Leishmania major]
  misc_feature (2)..(163): NCBI GI NO: 11359723 NR Description: proteophosphoglycan, membrane-associated
  misc_feature (2)..(163): NCBI GI NO: 5420387 NR Description: proteophosphoglycan [Leishmania major]
  misc_feature (2)..(186): NCBI GI NO: 25408663 NR Description: En/Spm-like transposon protein
  misc_feature (7)..(160): NCBI GI NO: 9630030 NR Description: unknown
KANRAQPNPSPLPSPWRSSARATLGGSCRSAPTVPTSTTGTGRSATVSTGLARFSPSSSRASPSSPERAASPSAPPPSTSSMARPTSTSARARSSQGTSFPSRSPGRPMPQPSRGSSRSPAPLRYPTSLTRTPTRTPNSASLFAVTTAPSRAGPRMPSSPMASLWLLRRSGIMSPPWRMVAPPRTR

SEQ ID NO: 13346 - DNA, 773 bp, Triticum aestivum
  misc_feature (1)..(773): Ceres Seq. ID no. 15173496
atcaccttcaacaggctcatctaccaacccaacaaactaaaaccccacttcccaagaaaacaattcttagacaagacattgctcaaatggcatcccagctggtcgagagccaccgcgccggtgccgaggtccacaaggggagcgatatctgcaagaagaagacggtcgagcttctcgaagagctcggcctcccaaaaggcctctttcctatggatgacatcgaggaggtcgggcacaactgtgagagtgggtttgtgtggatgcttcagaagaagaagaacgagcacaccttcaacaagctcaaccagaccgtctcctatgacaccgaggtgaccgcttttgtggagaagggcaagatgaagaaggtcaccggggtcaagatcgaggaggtgtctttggtcgaggtctatgtggatgagtcttctgctgataaggtcaccgtcaagaccaacaccggtctgtctgacacccatgatgcggccgtgttcgctcccggagaatagggagctactagttaaaaaggccagaagaataaagtctgtgaatggttcggcactacagttcacatgttatgcagaaatatatgtttccgttttctttgtaatctcataaaggttgttgcatgaatgttgcttcctttcagcccatgttatgcagaaatttatgtttctgttttctttgtaatgtaataaaggatgctgcatgaatgttgcttcctttcggcccgtaagcatacgccaaatgtaatgaataacacttatccctcatcgacc

SEQ ID NO: 13347 - protein, 166 aa, Triticum aestivum
  peptide (1)..(166): Ceres Seq. ID no. 15173497
  misc_feature (32)..(165): Pfam Name: Pfam Description:  Protein of unknown function, DUF538
  misc_feature (29)..(166): NCBI GI NO: 34915410 NR Description: hypothetical protein~similar to Arabidopsisthaliana chromosome1
  misc_feature (29)..(166): NCBI GI NO: 33146557 NR Description: unknown protein
  misc_feature (29)..(166): NCBI GI NO: 34915418 NR Description: hypothetical protein~similar to Arabidopsisthaliana chromosome1
  misc_feature (29)..(166): NCBI GI NO: 34915422 NR Description: hypothetical protein~similar to Arabidopsisthaliana chromosome1
  misc_feature (29)..(166): NCBI GI NO: 34915426 NR Description: hypothetical protein~similar to Arabidopsisthaliana chromosome1
  misc_feature (29)..(166): NCBI GI NO: 34915376 NR Description: hypothetical protein~similar to Oryza sativachromosome 7
  misc_feature (15)..(166): NCBI GI NO: 34915430 NR Description: hypothetical protein~similar to Arabidopsisthaliana chromosome3
HLQQAHLPTQQTKTPLPKKTILRQDIAQMASQLVESHRAGAEVHKGSDICKKKTVELLEELGLPKGLFPMDDIEEVGHNCESGFVWMLQKKKNEHTFNKLNQTVSYDTEVTAFVEKGKMKKVTGVKIEEVSLVEVYVDESSADKVTVKTNTGLSDTHDAAVFAPGE

SEQ ID NO: 13348 - protein, 138 aa, Triticum aestivum
  peptide (1)..(138): Ceres Seq. ID no. 15173498
  misc_feature (4)..(137): Pfam Name: Pfam Description:  Protein of unknown function, DUF538
  misc_feature (1)..(138): NCBI GI NO: 34915410 NR Description: hypothetical protein~similar to Arabidopsisthaliana chromosome1
  misc_feature (1)..(138): NCBI GI NO: 33146557 NR Description: unknown protein
  misc_feature (1)..(138): NCBI GI NO: 34915418 NR Description: hypothetical protein~similar to Arabidopsisthaliana chromosome1
  misc_feature (1)..(138): NCBI GI NO: 34915422 NR Description: hypothetical protein~similar to Arabidopsisthaliana chromosome1
  misc_feature (1)..(138): NCBI GI NO: 34915426 NR Description: hypothetical protein~similar to Arabidopsisthaliana chromosome1
  misc_feature (1)..(138): NCBI GI NO: 34915376 NR Description: hypothetical protein~similar to Oryza sativachromosome 7
  misc_feature (1)..(138): NCBI GI NO: 34915430 NR Description: hypothetical protein~similar to Arabidopsisthaliana chromosome3
MASQLVESHRAGAEVHKGSDICKKKTVELLEELGLPKGLFPMDDIEEVGHNCESGFVWMLQKKKNEHTFNKLNQTVSYDTEVTAFVEKGKMKKVTGVKIEEVSLVEVYVDESSADKVTVKTNTGLSDTHDAAVFAPGE

SEQ ID NO: 13349 - protein, 110 aa, Triticum aestivum
  peptide (1)..(110): Ceres Seq. ID no. 15173499
ITFNRLIYQPNKLKPHFPRKQFLDKTLLKWHPSWSRATAPVPRSTRGAISARRRRSSFSKSSASQKASFLWMTSRRSGTTVRVGLCGCFRRRRTSTPSTSSTRPSPMTPR

SEQ ID NO: 13350 - DNA, 1203 bp, Triticum aestivum
  misc_feature (1)..(1203): Ceres Seq. ID no. 12616221
gatatccctctcggtagacggtacaatcataccgatcaggagccagctgctgcttcttgtgttgtgttggtcccactgccgagatcggcagcagaagcagccgtcggtcctctgtacctctcgttgatcgcttgatccgaggggatccgaggggatccaaggcgagctgcgtgcgtggtggcggcgatgagttcgctgagcatggtggaggcgaggctgccgccgggcttcaggttccacccacgggacgacgagctcgtgctcgactacctgtccaggaagctcggcggcggtggcgccggaggggcggcggccgcggtggcgagcatctacggctgccccgccatggtcgacgtcgacctcaacaagatcgagccctgggacctccccgaaatcgcatgcattggcggcaaggagtggtacttctacagcttaagggacaagaagtacgctacaggccagcgaacaaatagagcaactgaatcaggctactggaaggccacagggaaagaccgtgcgataagccggaaagggttgctagttggcatgagaaaaaccctggtgttttatgaaggtagagcccctaaagggaagaagactgaatgggtcatgcacgaattccgcaaggaagggcaaggcgatctgatgaagttgccactcaaggaggactgggtcttgtgtagggttttttacaagaccaggacaaccattgccaaaccatccacagggagcaactacaacattgacagtgcagccgcaacctcactgcctcctctcattgacaactacattgcctttgaccatcctggaatgtccacggtgcaaaacctagagggttatgagcaagtgccctgcttctccaatggcccctcctctcacccgtcgtcgtcggcctcgatgaacatcccggtgatggcgatggcgcccatggctgccgatcaggagcagcagcacatggggaaggcgatcaaggacgcgctgagccagctcaccaggtttgagcaaggcaacgtgaaaagggaggcgcctgcccagggtggtgtgtttgctcaagatgggttcgagtacttagctgagagtggcttttcacagatgtggaactcactcagttgattttctagctaggggtattattgctagtgctaccaatcaaagatctacattttctccacccgcaaaaataaagatctacattttcttgcg

SEQ ID NO: 13351 - protein, 308 aa, Triticum aestivum
  peptide (1)..(308): Ceres Seq. ID no. 12616222
  misc_feature (11)..(148): Pfam Name: NAM Pfam Description: No apical meristem
  misc_feature (1)..(306): NCBI GI NO: 15148912 NR Description: NAC domain protein NAC1 [Phaseolus vulgaris]
  misc_feature (1)..(245): NCBI GI NO: 38636961 NR Description: putative NAC domain protein NAC1
  misc_feature (2)..(226): NCBI GI NO: 15222818 NR Description: NAC1; protein id: At1g56010
  misc_feature (3)..(270): NCBI GI NO: 15795128 NR Description: NAM (no apical meristem) protein-like
  misc_feature (69)..(149): NCBI GI NO: 5852096 NR Description: zwh19.1 [Oryza sativa (indica cultivar-group)]
  misc_feature (7)..(68): NCBI GI NO: 5852096 NR Description: zwh19.1 [Oryza sativa (indica cultivar-group)]
  misc_feature (8)..(234): NCBI GI NO: 1279640 NR Description: NAM [Petunia x hybrida]
  misc_feature (69)..(149): NCBI GI NO: 5679845 NR Description: l1332.9 [Oryza sativa (indica cultivar-group)]
  misc_feature (7)..(68): NCBI GI NO: 5679845 NR Description: l1332.9 [Oryza sativa (indica cultivar-group)]
  misc_feature (7)..(199): NCBI GI NO: 40737029 NR Description: putative OsNAC1 protein
MSSLSMVEARLPPGFRFHPRDDELVLDYLSRKLGGGGAGGAAAAVASIYGCPAMVDVDLNKIEPWDLPEIACIGGKEWYFYSLRDKKYATGQRTNRATESGYWKATGKDRAISRKGLLVGMRKTLVFYEGRAPKGKKTEWVMHEFRKEGQGDLMKLPLKEDWVLCRVFYKTRTTIAKPSTGSNYNIDSAAATSLPPLIDNYIAFDHPGMSTVQNLEGYEQVPCFSNGPSSHPSSSASMNIPVMAMAPMAADQEQQHMGKAIKDALSQLTRFEQGNVKREAPAQGGVFAQDGFEYLAESGFSQMWNSLS

SEQ ID NO: 13352 - protein, 303 aa, Triticum aestivum
  peptide (1)..(303): Ceres Seq. ID no. 12616223
  misc_feature (6)..(143): Pfam Name: NAM Pfam Description: No apical meristem
  misc_feature (1)..(301): NCBI GI NO: 15148912 NR Description: NAC domain protein NAC1 [Phaseolus vulgaris]
  misc_feature (1)..(240): NCBI GI NO: 38636961 NR Description: putative NAC domain protein NAC1
  misc_feature (1)..(221): NCBI GI NO: 15222818 NR Description: NAC1; protein id: At1g56010
  misc_feature (1)..(265): NCBI GI NO: 15795128 NR Description: NAM (no apical meristem) protein-like
  misc_feature (64)..(144): NCBI GI NO: 5852096 NR Description: zwh19.1 [Oryza sativa (indica cultivar-group)]
  misc_feature (2)..(63): NCBI GI NO: 5852096 NR Description: zwh19.1 [Oryza sativa (indica cultivar-group)]
  misc_feature (3)..(229): NCBI GI NO: 1279640 NR Description: NAM [Petunia x hybrida]
  misc_feature (64)..(144): NCBI GI NO: 5679845 NR Description: l1332.9 [Oryza sativa (indica cultivar-group)]
  misc_feature (2)..(63): NCBI GI NO: 5679845 NR Description: l1332.9 [Oryza sativa (indica cultivar-group)]
  misc_feature (2)..(194): NCBI GI NO: 40737029 NR Description: putative OsNAC1 protein
MVEARLPPGFRFHPRDDELVLDYLSRKLGGGGAGGAAAAVASIYGCPAMVDVDLNKIEPWDLPEIACIGGKEWYFYSLRDKKYATGQRTNRATESGYWKATGKDRAISRKGLLVGMRKTLVFYEGRAPKGKKTEWVMHEFRKEGQGDLMKLPLKEDWVLCRVFYKTRTTIAKPSTGSNYNIDSAAATSLPPLIDNYIAFDHPGMSTVQNLEGYEQVPCFSNGPSSHPSSSASMNIPVMAMAPMAADQEQQHMGKAIKDALSQLTRFEQGNVKREAPAQGGVFAQDGFEYLAESGFSQMWNSLS

SEQ ID NO: 13353 - protein, 255 aa, Triticum aestivum
  peptide (1)..(255): Ceres Seq. ID no. 12616224
  misc_feature (1)..(95): Pfam Name: NAM Pfam Description: No apical meristem
  misc_feature (1)..(253): NCBI GI NO: 15148912 NR Description: NAC domain protein NAC1 [Phaseolus vulgaris]
  misc_feature (1)..(192): NCBI GI NO: 38636961 NR Description: putative NAC domain protein NAC1
  misc_feature (1)..(173): NCBI GI NO: 15222818 NR Description: NAC1; protein id: At1g56010
  misc_feature (1)..(217): NCBI GI NO: 15795128 NR Description: NAM (no apical meristem) protein-like
  misc_feature (16)..(96): NCBI GI NO: 5852096 NR Description: zwh19.1 [Oryza sativa (indica cultivar-group)]
  misc_feature (1)..(15): NCBI GI NO: 5852096 NR Description: zwh19.1 [Oryza sativa (indica cultivar-group)]
  misc_feature (1)..(181): NCBI GI NO: 1279640 NR Description: NAM [Petunia x hybrida]
  misc_feature (16)..(96): NCBI GI NO: 5679845 NR Description: l1332.9 [Oryza sativa (indica cultivar-group)]
  misc_feature (1)..(15): NCBI GI NO: 5679845 NR Description: l1332.9 [Oryza sativa (indica cultivar-group)]
  misc_feature (1)..(146): NCBI GI NO: 40737029 NR Description: putative OsNAC1 protein
MVDVDLNKIEPWDLPEIACIGGKEWYFYSLRDKKYATGQRTNRATESGYWKATGKDRAISRKGLLVGMRKTLVFYEGRAPKGKKTEWVMHEFRKEGQGDLMKLPLKEDWVLCRVFYKTRTTIAKPSTGSNYNIDSAAATSLPPLIDNYIAFDHPGMSTVQNLEGYEQVPCFSNGPSSHPSSSASMNIPVMAMAPMAADQEQQHMGKAIKDALSQLTRFEQGNVKREAPAQGGVFAQDGFEYLAESGFSQMWNSLS

SEQ ID NO: 13354 - DNA, 1539 bp, Triticum aestivum
  misc_feature (1)..(1539): Ceres Seq. ID no. 15226382
ttcctccgtccggccgtccccctttcccctttcacaccgcaagaaaaccctcgcccaaatctacagcaaccaacgcccccgtttcatctacgagagctgcgagctcacaattccgcggagcagctcggccatggcgtcctccgtcgccggcgggttgccgtcgaggtccgccatcgtggccgacacgaccagcgggcaccaccttctcaccatccacggctactcccgcaccaaggacatacccaccggagagcgcgtcaagtctcaccctttcatcatcggcggccatcgctggcggatcgactactaccccggcggcgtgcgcccggaggtcgcggactacgtgtccctctccctgatactagaggaagatggcccggcgccggtgaaggcccagtacgacatctgcctcgttaccaaggaggaggaggcggagcaagccgcgtcgatggcgtcggcaccggtcgacgagttcgctccccggaagggctgggagtactccaagttcgtcaggagggtggagctggagagctcaaagtatctcaccaacgattcgttcaccgtccggtgcgatatcgttgtcgtccatggttaccgcgccgcggccggcatggcggccttggtctctgtgcccccatgtgacctgcgtgagaaccttggcaggctcctcgacaccgggatgggcgccgacgtggtgtttgaggtcggcggcgagaccgtcgcggcacaccggtgcgtgctcgcggcctgctctccggtgtttgccgcccaactctttggacccatgaaggagggtaatgccggcgtcgtgcgcgtggaagacatggacgcggaggtgttcaaggcgttgctccgtttcacatacgccggcttgctgccggagacgttcaaggaagacgcagtcgtatgccagcatctgctcgttgctgcggacaggtatggcatggggcggctaaagctgatctgcgagcagaagctgtgcgagtacatcgacatcggcacggcagcaaccatcctgacgctggccgagcagcaccgctgtgaggggctgaagaaggcctgcttcgattttctcgccgctccaccaaatctgagggaagtcgtggccaccgacggcttccagcatctgatcgcgagctgcccttctcttatggtcgagctcatggctatgtcccctacacattagccaagtgatggatatgcatgcctctgagtgttgtagcaatggtgaaacatggtttctaggctcatgtactaatctgggtacctctcttggtgtatccgtggctctacctagttaacaaccgagatgcaaaaattagcctcatttcgcccctgttttatcagttcattgcatctctaactgtgcctattaaccaggacgtgcgttggaatcagaggtgataaaatgctcaggtttttaggcaatggtagcttgtggtttcaggtctttgttatctgatattgcgcttgtggttccatggtttctgaaccttattgagataatactattatgttcttattatcacctactgtgct

SEQ ID NO: 13355 - protein, 394 aa, Triticum aestivum
  peptide (1)..(394): Ceres Seq. ID no. 15226383
  misc_feature (219)..(330): Pfam Name: Pfam Description:  BTB/POZ domain
  misc_feature (45)..(394): NCBI GI NO: 37534570 NR Description: putative speckle-type protein
  misc_feature (44)..(390): NCBI GI NO: 37534574 NR Description: putative speckle-type protein
  misc_feature (201)..(390): NCBI GI NO: 37534534 NR Description: putative speckle-type protein
  misc_feature (33)..(195): NCBI GI NO: 37534534 NR Description: putative speckle-type protein
  misc_feature (44)..(394): NCBI GI NO: 37534558 NR Description: putative speckle-type protein
  misc_feature (40)..(394): NCBI GI NO: 37534532 NR Description: putative speckle-type protein
  misc_feature (168)..(390): NCBI GI NO: 37534590 NR Description: putative speckle-type protein
  misc_feature (44)..(125): NCBI GI NO: 37534590 NR Description: putative speckle-type protein
  misc_feature (44)..(394): NCBI GI NO: 37534548 NR Description: putative speckle-type protein
  misc_feature (53)..(389): NCBI GI NO: 37534588 NR Description: putative speckle-type protein
SSVRPSPFPLSHRKKTLAQIYSNQRPRFIYESCELTIPRSSSAMASSVAGGLPSRSAIVADTTSGHHLLTIHGYSRTKDIPTGERVKSHPFIIGGHRWRIDYYPGGVRPEVADYVSLSLILEEDGPAPVKAQYDICLVTKEEEAEQAASMASAPVDEFAPRKGWEYSKFVRRVELESSKYLTNDSFTVRCDIVVVHGYRAAAGMAALVSVPPCDLRENLGRLLDTGMGADVVFEVGGETVAAHRCVLAACSPVFAAQLFGPMKEGNAGVVRVEDMDAEVFKALLRFTYAGLLPETFKEDAVVCQHLLVAADRYGMGRLKLICEQKLCEYIDIGTAATILTLAEQHRCEGLKKACFDFLAAPPNLREVVATDGFQHLIASCPSLMVELMAMSPTH

SEQ ID NO: 13356 - protein, 351 aa, Triticum aestivum
  peptide (1)..(351): Ceres Seq. ID no. 15226384
  misc_feature (176)..(287): Pfam Name: Pfam Description:  BTB/POZ domain
  misc_feature (2)..(351): NCBI GI NO: 37534570 NR Description: putative speckle-type protein
  misc_feature (1)..(347): NCBI GI NO: 37534574 NR Description: putative speckle-type protein
  misc_feature (158)..(347): NCBI GI NO: 37534534 NR Description: putative speckle-type protein
  misc_feature (1)..(152): NCBI GI NO: 37534534 NR Description: putative speckle-type protein
  misc_feature (1)..(351): NCBI GI NO: 37534558 NR Description: putative speckle-type protein
  misc_feature (1)..(351): NCBI GI NO: 37534532 NR Description: putative speckle-type protein
  misc_feature (125)..(347): NCBI GI NO: 37534590 NR Description: putative speckle-type protein
  misc_feature (1)..(82): NCBI GI NO: 37534590 NR Description: putative speckle-type protein
  misc_feature (1)..(351): NCBI GI NO: 37534548 NR Description: putative speckle-type protein
  misc_feature (10)..(346): NCBI GI NO: 37534588 NR Description: putative speckle-type protein
MASSVAGGLPSRSAIVADTTSGHHLLTIHGYSRTKDIPTGERVKSHPFIIGGHRWRIDYYPGGVRPEVADYVSLSLILEEDGPAPVKAQYDICLVTKEEEAEQAASMASAPVDEFAPRKGWEYSKFVRRVELESSKYLTNDSFTVRCDIVVVHGYRAAAGMAALVSVPPCDLRENLGRLLDTGMGADVVFEVGGETVAAHRCVLAACSPVFAAQLFGPMKEGNAGVVRVEDMDAEVFKALLRFTYAGLLPETFKEDAVVCQHLLVAADRYGMGRLKLICEQKLCEYIDIGTAATILTLAEQHRCEGLKKACFDFLAAPPNLREVVATDGFQHLIASCPSLMVELMAMSPTH

SEQ ID NO: 13357 - protein, 245 aa, Triticum aestivum
  peptide (1)..(245): Ceres Seq. ID no. 15226385
  misc_feature (70)..(181): Pfam Name: Pfam Description:  BTB/POZ domain
  misc_feature (1)..(245): NCBI GI NO: 37534570 NR Description: putative speckle-type protein
  misc_feature (1)..(241): NCBI GI NO: 37534574 NR Description: putative speckle-type protein
  misc_feature (52)..(241): NCBI GI NO: 37534534 NR Description: putative speckle-type protein
  misc_feature (1)..(46): NCBI GI NO: 37534534 NR Description: putative speckle-type protein
  misc_feature (1)..(245): NCBI GI NO: 37534558 NR Description: putative speckle-type protein
  misc_feature (1)..(245): NCBI GI NO: 37534532 NR Description: putative speckle-type protein
  misc_feature (19)..(241): NCBI GI NO: 37534590 NR Description: putative speckle-type protein
  misc_feature (1)..(245): NCBI GI NO: 37534548 NR Description: putative speckle-type protein
  misc_feature (1)..(240): NCBI GI NO: 37534588 NR Description: putative speckle-type protein
  misc_feature (1)..(239): NCBI GI NO: 37534474 NR Description: hypothetical protein
MASAPVDEFAPRKGWEYSKFVRRVELESSKYLTNDSFTVRCDIVVVHGYRAAAGMAALVSVPPCDLRENLGRLLDTGMGADVVFEVGGETVAAHRCVLAACSPVFAAQLFGPMKEGNAGVVRVEDMDAEVFKALLRFTYAGLLPETFKEDAVVCQHLLVAADRYGMGRLKLICEQKLCEYIDIGTAATILTLAEQHRCEGLKKACFDFLAAPPNLREVVATDGFQHLIASCPSLMVELMAMSPTH

SEQ ID NO: 13358 - DNA, 885 bp, Triticum aestivum
  misc_feature (1)..(885): Ceres Seq. ID no. 13596948
ctaaacctcgcaaaaccctccgccccccgctccccactccctcgccgtacaccaccgccgaagagagcgcggagagacccaccccacggcgatgtcgacggcggcggctacggtgttccgcgggtgccgggccctcatgtccccggcggcggcggcggcaaaggggggcaagaagaccgcatcggcggcggcggcggcggcgaaggggggcaagaagcccgcgccggcggccgcgaagcccaaggcggccaagaagccggtggatccgaacaatctccgcgggatcatgcggccggtgccggtctcggacgccctgcgcaagttcggcggcgccgctcacatctcccgctccggcgtactcaagatcgtctgggactacatcaaggccaatgacctccagaacccactgaacaagagggagatcatctgcgacgagaagctcaaaaccatctttccagggagggacacggttcatatgatggaggtcaccaagctcttgtcccctcatttcgtgaagagtatctaaggctgtcgagttgggggccaacgctggtgctttctgcccagggccagcgttggaatggaaggcttcttttgcgatccctgtccaagtcaaggttctactaggtagttaagttaatacggagttcagacttcagactttgtttgccatttaagggttgggggctcggtgatgcatgtaagaaggattcctcgtgttttgtggttctctcgtgccatcctgcgagggcacacccacatgcacatgcatgttgacgtggttcggtgtttttagtctgttaattccactttgcccttgtcatgtatatcatgcttctctcttggttgcagtggatggtgaatttgtgataagcaggttgtggc

SEQ ID NO: 13359 - protein, 144 aa, Triticum aestivum
  peptide (1)..(144): Ceres Seq. ID no. 13596949
  misc_feature (1)..(143): NCBI GI NO: 21593643 NR Description: unknown [Arabidopsis thaliana]
  misc_feature (1)..(143): NCBI GI NO: 18396594 NR Description: expressed protein [Arabidopsis thaliana]
  misc_feature (33)..(143): NCBI GI NO: 33667910 NR Description: SWIb domain-containing protein [Solanum chacoense]
  misc_feature (64)..(143): NCBI GI NO: 18403898 NR Description: expressed protein [Arabidopsis thaliana]
  misc_feature (18)..(142): NCBI GI NO: 14488372 NR Description: hypothetical protein
  misc_feature (44)..(141): NCBI GI NO: 14423526 NR Description: putative protein [Arabidopsis thaliana]
  misc_feature (44)..(141): NCBI GI NO: 21553903 NR Description: unknown [Arabidopsis thaliana]
  misc_feature (44)..(141): NCBI GI NO: 15235320 NR Description: expressed protein [Arabidopsis thaliana]
  misc_feature (63)..(144): NCBI GI NO: 18398106 NR Description: expressed protein [Arabidopsis thaliana]
  misc_feature (44)..(141): NCBI GI NO: 18397658 NR Description: expressed protein [Arabidopsis thaliana]
MSTAAATVFRGCRALMSPAAAAAKGGKKTASAAAAAAKGGKKPAPAAAKPKAAKKPVDPNNLRGIMRPVPVSDALRKFGGAAHISRSGVLKIVWDYIKANDLQNPLNKREIICDEKLKTIFPGRDTVHMMEVTKLLSPHFVKSI

SEQ ID NO: 13360 - protein, 135 aa, Triticum aestivum
  peptide (1)..(135): Ceres Seq. ID no. 13596950
  misc_feature (48)..(135): Pfam Name: Pfam Description:  TT viral orf 1
  misc_feature (48)..(135): NCBI GI NO: 29250446 NR Description: GLP_39_87477_88058 [Giardia lamblia ATCC 50803]
KPRKTLRPPLPTPSPYTTAEESAERPTPRRCRRRRLRCSAGAGPSCPRRRRRQRGARRPHRRRRRRRRGARSPRRRPRSPRRPRSRWIRTISAGSCGRCRSRTPCASSAAPLTSPAPAYSRSSGTTSRPMTSRTH

SEQ ID NO: 13361 - protein, 130 aa, Triticum aestivum
  peptide (1)..(130): Ceres Seq. ID no. 13596951
  misc_feature (6)..(98): Pfam Name: Pfam Description:  Bindin
  misc_feature (38)..(103): NCBI GI NO: 30793991 NR Description: unknown protein [Arabidopsis thaliana]
  misc_feature (34)..(97): NCBI GI NO: 20152613 NR Description: putative glycine rich protein [Rumex obtusifolius]
  misc_feature (38)..(103): NCBI GI NO: 15224564 NR Description: glycine-rich protein [Arabidopsis thaliana]
LNLAKPSAPRSPLPRRTPPPKRARRDPPHGDVDGGGYGVPRVPGPHVPGGGGGKGGQEDRIGGGGGGEGGQEARAGGREAQGGQEAGGSEQSPRDHAAGAGLGRPAQVRRRRSHLPLRRTQDRLGLHQGQ

SEQ ID NO: 13362 - DNA, 1667 bp, Triticum aestivum
  misc_feature (1)..(1667): Ceres Seq. ID no. 12625388
gcacaaggccccagtacagaacaacatagcggcacgcaacacgccagccgcagcaaagcaccggtgccgcgccgcttcctcaggacccaagtcacctgccatctcctccccagcagcggcaaactcgccaccgcacgcagcgacggcatggcgatgtctcgcgccgcggcagcggtcgggcggcgccggtgcgggccgcgcctgcccgcggcgaggtccatggcgtcgtggttcggccacgtggagccggccgccaaggaccccatcctcggcgtcaccgaggccttcctcgccgacccctcgccggacaaagtgaacgtcggcgtcggtgcgtaccgggacgacgacgggaagcccgtggtgctcgagtgcgtgcgcgaggcggagcggcgcatcgccgggagcaccaacatggagtaccttccaatgggaggaagcgtgaagatgatcgaggagtcgctgaagctggcatacggggaggattctgagttcatcaaggacaagaggattgcggcagtgcaggctctttcagggactggtgcatgtcgcctctttgcagatttccagaaacgcttcttgccggattcacagatctacatacctacgcctacatggtcaaaccatcacaacatttggagggatgcccaggtaccacaaagaacatttgcctactaccacccggaatcaagaggactggactttgcaggcctaatggatgatatcaagaacgctccagagggttccttctttttgcttcatgcatgtgctcacaatcccactggggtcgatccttctgaggaacagtggagagagatatctcaacaattcaaggtgaagaaccatttcccatttttcgacatggcataccaaggatttgccagtggtgacccagagagagatgccaaggcaattcggatctttctcgaagatggacatcaaattggatgtgcacagtcatatgcaaaaaacatgggactttatggccaaagagcaggatgccttagtattctctgcgacgatgaaatacaagcagttgatgtgaagagccagttacaacagattgccagacctatgtacagcaacccaccccttcacggcgcactaattgtttccactatccttggtgatccagcactgaaaagcttatggctgaaagaggtcaagggtatggctgatcgcattattggaatgcgaaaagcacttaaggagagccttgaaaagttgggttcaccattatcatgggaacatattactaatcagattggcatgttttgctacagcgggatgacacctgaacaagttgatcgcttaacaaatgaatttcacatatacatgactcgtaatggcaggataagcatggctggtgtaacaacaggaaatgtcgcatatttggctaacgctattcatgaggtcactaagccaatttaagaccccttcctccctcctgccattttgagaaataagaggagcctttcaacttcaagttgcagtttgcttttaatttccttaaaccttttatgttccaacaatgttgtttttatcaaacaatgtcccatattgttgtgacctatgggtgtgcaaatattgatttgtttcatcggagacacagaaaggaacactttattagtaagaactaaactgatcctaaaaaaaaaaaaaaaaaagct

SEQ ID NO: 13363 - protein, 475 aa, Triticum aestivum
  peptide (1)..(475): Ceres Seq. ID no. 12625389
  misc_feature (155)..(472): Pfam Name: Pfam Description:  Aminotransferase class I and II
  misc_feature (50)..(473): NCBI GI NO: 2130067 NR Description: aspartate transaminase (EC 2
  misc_feature (51)..(473): NCBI GI NO: 100728 NR Description: aspartate transaminase (EC 2
  misc_feature (51)..(473): NCBI GI NO: 100726 NR Description: aspartate transaminase (EC 2
  misc_feature (50)..(473): NCBI GI NO: 15224592 NR Description: aspartate aminotransferase
  misc_feature (65)..(473): NCBI GI NO: 1362046 NR Description: aspartate transaminase (EC 2
  misc_feature (66)..(473): NCBI GI NO: 6980972 NR Description: glutamate oxaloacetate transaminase 2
  misc_feature (66)..(473): NCBI GI NO: 2690302 NR Description: aspartate aminotransferase precursor
  misc_feature (66)..(473): NCBI GI NO: 6754036 NR Description: glutamate oxaloacetate transaminase 2
  misc_feature (50)..(473): NCBI GI NO: 33585662 NR Description: Glutamate oxaloacetate transaminase 2
  misc_feature (66)..(473): NCBI GI NO: 4504069 NR Description: aspartate aminotransferase 2 precursor
AQGPSTEQHSGTQHASRSKAPVPRRFLRTQVTCHLLPSSGKLATARSDGMAMSRAAAAVGRRRCGPRLPAARSMASWFGHVEPAAKDPILGVTEAFLADPSPDKVNVGVGAYRDDDGKPVVLECVREAERRIAGSTNMEYLPMGGSVKMIEESLKLAYGEDSEFIKDKRIAAVQALSGTGACRLFADFQKRFLPDSQIYIPTPTWSNHHNIWRDAQVPQRTFAYYHPESRGLDFAGLMDDIKNAPEGSFFLLHACAHNPTGVDPSEEQWREISQQFKVKNHFPFFDMAYQGFASGDPERDAKAIRIFLEDGHQIGCAQSYAKNMGLYGQRAGCLSILCDDEIQAVDVKSQLQQIARPMYSNPPLHGALIVSTILGDPALKSLWLKEVKGMADRIIGMRKALKESLEKLGSPLSWEHITNQIGMFCYSGMTPEQVDRLTNEFHIYMTRNGRISMAGVTTGNVAYLANAIHEVTKPI

SEQ ID NO: 13364 - protein, 426 aa, Triticum aestivum
  peptide (1)..(426): Ceres Seq. ID no. 12625390
  misc_feature (106)..(423): Pfam Name: Pfam Description:  Aminotransferase class I and II
  misc_feature (1)..(424): NCBI GI NO: 2130067 NR Description: aspartate transaminase (EC 2
  misc_feature (2)..(424): NCBI GI NO: 100728 NR Description: aspartate transaminase (EC 2
  misc_feature (2)..(424): NCBI GI NO: 100726 NR Description: aspartate transaminase (EC 2
  misc_feature (1)..(424): NCBI GI NO: 15224592 NR Description: aspartate aminotransferase
  misc_feature (16)..(424): NCBI GI NO: 1362046 NR Description: aspartate transaminase (EC 2
  misc_feature (17)..(424): NCBI GI NO: 6980972 NR Description: glutamate oxaloacetate transaminase 2
  misc_feature (17)..(424): NCBI GI NO: 2690302 NR Description: aspartate aminotransferase precursor
  misc_feature (17)..(424): NCBI GI NO: 6754036 NR Description: glutamate oxaloacetate transaminase 2
  misc_feature (1)..(424): NCBI GI NO: 33585662 NR Description: Glutamate oxaloacetate transaminase 2
  misc_feature (17)..(424): NCBI GI NO: 4504069 NR Description: aspartate aminotransferase 2 precursor
MAMSRAAAAVGRRRCGPRLPAARSMASWFGHVEPAAKDPILGVTEAFLADPSPDKVNVGVGAYRDDDGKPVVLECVREAERRIAGSTNMEYLPMGGSVKMIEESLKLAYGEDSEFIKDKRIAAVQALSGTGACRLFADFQKRFLPDSQIYIPTPTWSNHHNIWRDAQVPQRTFAYYHPESRGLDFAGLMDDIKNAPEGSFFLLHACAHNPTGVDPSEEQWREISQQFKVKNHFPFFDMAYQGFASGDPERDAKAIRIFLEDGHQIGCAQSYAKNMGLYGQRAGCLSILCDDEIQAVDVKSQLQQIARPMYSNPPLHGALIVSTILGDPALKSLWLKEVKGMADRIIGMRKALKESLEKLGSPLSWEHITNQIGMFCYSGMTPEQVDRLTNEFHIYMTRNGRISMAGVTTGNVAYLANAIHEVTKPI

SEQ ID NO: 13365 - protein, 424 aa, Triticum aestivum
  peptide (1)..(424): Ceres Seq. ID no. 12625391
  misc_feature (104)..(421): Pfam Name: Pfam Description:  Aminotransferase class I and II
  misc_feature (1)..(422): NCBI GI NO: 2130067 NR Description: aspartate transaminase (EC 2
  misc_feature (1)..(422): NCBI GI NO: 100728 NR Description: aspartate transaminase (EC 2
  misc_feature (1)..(422): NCBI GI NO: 100726 NR Description: aspartate transaminase (EC 2
  misc_feature (1)..(422): NCBI GI NO: 15224592 NR Description: aspartate aminotransferase
  misc_feature (14)..(422): NCBI GI NO: 1362046 NR Description: aspartate transaminase (EC 2
  misc_feature (15)..(422): NCBI GI NO: 6980972 NR Description: glutamate oxaloacetate transaminase 2
  misc_feature (15)..(422): NCBI GI NO: 2690302 NR Description: aspartate aminotransferase precursor
  misc_feature (15)..(422): NCBI GI NO: 6754036 NR Description: glutamate oxaloacetate transaminase 2
  misc_feature (1)..(422): NCBI GI NO: 33585662 NR Description: Glutamate oxaloacetate transaminase 2
  misc_feature (15)..(422): NCBI GI NO: 4504069 NR Description: aspartate aminotransferase 2 precursor
MSRAAAAVGRRRCGPRLPAARSMASWFGHVEPAAKDPILGVTEAFLADPSPDKVNVGVGAYRDDDGKPVVLECVREAERRIAGSTNMEYLPMGGSVKMIEESLKLAYGEDSEFIKDKRIAAVQALSGTGACRLFADFQKRFLPDSQIYIPTPTWSNHHNIWRDAQVPQRTFAYYHPESRGLDFAGLMDDIKNAPEGSFFLLHACAHNPTGVDPSEEQWREISQQFKVKNHFPFFDMAYQGFASGDPERDAKAIRIFLEDGHQIGCAQSYAKNMGLYGQRAGCLSILCDDEIQAVDVKSQLQQIARPMYSNPPLHGALIVSTILGDPALKSLWLKEVKGMADRIIGMRKALKESLEKLGSPLSWEHITNQIGMFCYSGMTPEQVDRLTNEFHIYMTRNGRISMAGVTTGNVAYLANAIHEVTKPI

SEQ ID NO: 13366 - DNA, 1547 bp, Triticum aestivum
  misc_feature (1)..(1547): Ceres Seq. ID no. 13662513
ccgtggtcactccccrtcccatttccccmatcccccatccccgctagggttttccaccatggcgtcggcgtcgcgcgcgctcctcctctccagggcctcgcccctccacgccgccgcctcccgcttcctccgcccggtcgcggccgcggggagcctcctcccggcggcgctggtcccgtcchccgccgcggcgccctgggcggcggcgaggcgattcgcgacgcagcccgcgaactcgtcgctgcgggactcgtccccgaactggagcaaccgcccgcccaaggagacgatcctcctcgacggctgcgacttcgagcactggctcgtcgtcatggagccgcccccaggcgacggcgctaaccccgatgtcacccgcgacgagatcatcgacgggtacatcaagaccctcgcccaggtcgtcggaagtgaagacgaagcaaggatgaagatctactctgtgtcaactaggcattattttgcttttggtgccctagtatctgaggaactctcctacaaactcaaagagttgcctaaagtccgttgggttcttcctgattcatacctggatgtcagaaataaggactatggaggagaaccatttatagatggacaagctgttccttacgaccccaaataccatgaggagtgggtgagaaacaatgcccgtgccaatgaaagatcccggcgcaatgacaggcctcgcaactttgacaggtcgaggaactttgaaaggagaagggagaacacacaggcctaccagagtgggcctccaaaccaaatgccaccccatgatgctgctcctccaagtcgcggtgcacagggcccgccgccgccttcaggtgctccaccaaattaccagccccatgcaccaaacccacaggcaggctatgctgcaggaggtggaccaaactatccaaatgcaccaccaccccctggataccgaggtgccccagcccctggctaccaagctggyaaccaaggttaccagggtaatcctggtggcaacatgcacaatggaccmggcccagcctaccatagcaacaaccctggataccagggtggagygccaggaggcaacccgcygccrcctttygcaggtggcaaccagcctcctccctaccawggcggtggtcctagctatggtggtggtgcaccagactaccagggccaaccaggtggtaacccaggctaccaaggtggcggtaactacarcaacgccgcccctcctccctaygagggcagggacgggccagggaggaactaccagtagagaasactggtagaagagcgcygtktaggaagttagtamgagctatgctcgagtcgccctatgttgttctcgtggacttttatgcatatattctctatccatmatggtgttttgagaactagaactactgcaagcttaggtaagaagtgctttgtttttttctctttgtcgaaataaatacaatgctgactatcgtatggarccagagctttgttatttgttgccgtattgtaatagcaacatgttctgtgtgttctattgaatcacttttatattc

SEQ ID NO: 13367 - protein, 422 aa, Triticum aestivum
  peptide (1)..(422): Ceres Seq. ID no. 15220175
  misc_feature (250)..(394): Pfam Name: Pfam Description:  DivIVA protein
  misc_feature (11)..(422): NCBI GI NO: 18400602 NR Description: expressed protein [Arabidopsis thaliana]
  misc_feature (119)..(409): NCBI GI NO: 15219250 NR Description: hypothetical protein [Arabidopsis thaliana]
  misc_feature (30)..(256): NCBI GI NO: 27754695 NR Description: putative DAG protein [Arabidopsis thaliana]
  misc_feature (30)..(256): NCBI GI NO: 15230785 NR Description: DAG protein -related [Arabidopsis thaliana]
  misc_feature (25)..(392): NCBI GI NO: 15235263 NR Description: putative DAG protein [Arabidopsis thaliana]
  misc_feature (18)..(253): NCBI GI NO: 38344141 NR Description: OSJNBa0041A02.8
  misc_feature (83)..(250): NCBI GI NO: 2440029 NR Description: DAL1 protein [Arabidopsis thaliana]
  misc_feature (68)..(227): NCBI GI NO: 15218508 NR Description: DAG-related protein [Arabidopsis thaliana]
  misc_feature (22)..(248): NCBI GI NO: 15226934 NR Description: expressed protein [Arabidopsis thaliana]
  misc_feature (83)..(250): NCBI GI NO: 15226108 NR Description: plastid protein [Arabidopsis thaliana]
  misc_feature (5)..(5): Xaa is any aa, unknown or other
  misc_feature (10)..(10): Xaa is any aa, unknown or other
  misc_feature (61)..(61): Xaa is any aa, unknown or other
  misc_feature (324)..(324): Xaa is any aa, unknown or other
  misc_feature (340)..(340): Xaa is any aa, unknown or other
  misc_feature (355)..(355): Xaa is any aa, unknown or other
  misc_feature (361)..(361): Xaa is any aa, unknown or other
  misc_feature (362)..(362): Xaa is any aa, unknown or other
  misc_feature (364)..(364): Xaa is any aa, unknown or other
  misc_feature (374)..(374): Xaa is any aa, unknown or other
  misc_feature (404)..(404): Xaa is any aa, unknown or other
  misc_feature (411)..(411): Xaa is any aa, unknown or other
RGHSXSHFPXPPSPLGFSTMASASRALLLSRASPLHAAASRFLRPVAAAGSLLPAALVPSXAAAPWAAARRFATQPANSSLRDSSPNWSNRPPKETILLDGCDFEHWLVVMEPPPGDGANPDVTRDEIIDGYIKTLAQVVGSEDEARMKIYSVSTRHYFAFGALVSEELSYKLKELPKVRWVLPDSYLDVRNKDYGGEPFIDGQAVPYDPKYHEEWVRNNARANERSRRNDRPRNFDRSRNFERRRENTQAYQSGPPNQMPPHDAAPPSRGAQGPPPPSGAPPNYQPHAPNPQAGYAAGGGPNYPNAPPPPGYRGAPAPGYQAXNQGYQGNPGGNMHNGXGPAYHSNNPGYQGGXPGGNPXXPXAGGNQPPPYXGGGPSYGGGAPDYQGQPGGNPGYQGGGNYXNAAPPPXEGRDGPGRNYQ

SEQ ID NO: 13368 - protein, 403 aa, Triticum aestivum
  peptide (1)..(403): Ceres Seq. ID no. 15220176
  misc_feature (231)..(375): Pfam Name: Pfam Description:  DivIVA protein
  misc_feature (1)..(403): NCBI GI NO: 18400602 NR Description: expressed protein [Arabidopsis thaliana]
  misc_feature (100)..(390): NCBI GI NO: 15219250 NR Description: hypothetical protein [Arabidopsis thaliana]
  misc_feature (11)..(237): NCBI GI NO: 27754695 NR Description: putative DAG protein [Arabidopsis thaliana]
  misc_feature (11)..(237): NCBI GI NO: 15230785 NR Description: DAG protein -related [Arabidopsis thaliana]
  misc_feature (6)..(373): NCBI GI NO: 15235263 NR Description: putative DAG protein [Arabidopsis thaliana]
  misc_feature (1)..(234): NCBI GI NO: 38344141 NR Description: OSJNBa0041A02.8
  misc_feature (64)..(231): NCBI GI NO: 2440029 NR Description: DAL1 protein [Arabidopsis thaliana]
  misc_feature (49)..(208): NCBI GI NO: 15218508 NR Description: DAG-related protein [Arabidopsis thaliana]
  misc_feature (3)..(229): NCBI GI NO: 15226934 NR Description: expressed protein [Arabidopsis thaliana]
  misc_feature (64)..(231): NCBI GI NO: 15226108 NR Description: plastid protein [Arabidopsis thaliana]
  misc_feature (42)..(42): Xaa is any aa, unknown or other
  misc_feature (305)..(305): Xaa is any aa, unknown or other
  misc_feature (321)..(321): Xaa is any aa, unknown or other
  misc_feature (336)..(336): Xaa is any aa, unknown or other
  misc_feature (342)..(342): Xaa is any aa, unknown or other
  misc_feature (343)..(343): Xaa is any aa, unknown or other
  misc_feature (345)..(345): Xaa is any aa, unknown or other
  misc_feature (355)..(355): Xaa is any aa, unknown or other
  misc_feature (385)..(385): Xaa is any aa, unknown or other
  misc_feature (392)..(392): Xaa is any aa, unknown or other
MASASRALLLSRASPLHAAASRFLRPVAAAGSLLPAALVPSXAAAPWAAARRFATQPANSSLRDSSPNWSNRPPKETILLDGCDFEHWLVVMEPPPGDGANPDVTRDEIIDGYIKTLAQVVGSEDEARMKIYSVSTRHYFAFGALVSEELSYKLKELPKVRWVLPDSYLDVRNKDYGGEPFIDGQAVPYDPKYHEEWVRNNARANERSRRNDRPRNFDRSRNFERRRENTQAYQSGPPNQMPPHDAAPPSRGAQGPPPPSGAPPNYQPHAPNPQAGYAAGGGPNYPNAPPPPGYRGAPAPGYQAXNQGYQGNPGGNMHNGXGPAYHSNNPGYQGGXPGGNPXXPXAGGNQPPPYXGGGPSYGGGAPDYQGQPGGNPGYQGGGNYXNAAPPPXEGRDGPGRNYQ

SEQ ID NO: 13369 - protein, 312 aa, Triticum aestivum
  peptide (1)..(312): Ceres Seq. ID no. 15220177
  misc_feature (140)..(284): Pfam Name: Pfam Description:  DivIVA protein
  misc_feature (1)..(312): NCBI GI NO: 18400602 NR Description: expressed protein [Arabidopsis thaliana]
  misc_feature (9)..(299): NCBI GI NO: 15219250 NR Description: hypothetical protein [Arabidopsis thaliana]
  misc_feature (1)..(146): NCBI GI NO: 27754695 NR Description: putative DAG protein [Arabidopsis thaliana]
  misc_feature (1)..(146): NCBI GI NO: 15230785 NR Description: DAG protein -related [Arabidopsis thaliana]
  misc_feature (1)..(282): NCBI GI NO: 15235263 NR Description: putative DAG protein [Arabidopsis thaliana]
  misc_feature (1)..(143): NCBI GI NO: 38344141 NR Description: OSJNBa0041A02.8
  misc_feature (1)..(140): NCBI GI NO: 2440029 NR Description: DAL1 protein [Arabidopsis thaliana]
  misc_feature (1)..(117): NCBI GI NO: 15218508 NR Description: DAG-related protein [Arabidopsis thaliana]
  misc_feature (1)..(138): NCBI GI NO: 15226934 NR Description: expressed protein [Arabidopsis thaliana]
  misc_feature (1)..(140): NCBI GI NO: 15226108 NR Description: plastid protein [Arabidopsis thaliana]
  misc_feature (214)..(214): Xaa is any aa, unknown or other
  misc_feature (230)..(230): Xaa is any aa, unknown or other
  misc_feature (245)..(245): Xaa is any aa, unknown or other
  misc_feature (251)..(251): Xaa is any aa, unknown or other
  misc_feature (252)..(252): Xaa is any aa, unknown or other
  misc_feature (254)..(254): Xaa is any aa, unknown or other
  misc_feature (264)..(264): Xaa is any aa, unknown or other
  misc_feature (294)..(294): Xaa is any aa, unknown or other
  misc_feature (301)..(301): Xaa is any aa, unknown or other
MEPPPGDGANPDVTRDEIIDGYIKTLAQVVGSEDEARMKIYSVSTRHYFAFGALVSEELSYKLKELPKVRWVLPDSYLDVRNKDYGGEPFIDGQAVPYDPKYHEEWVRNNARANERSRRNDRPRNFDRSRNFERRRENTQAYQSGPPNQMPPHDAAPPSRGAQGPPPPSGAPPNYQPHAPNPQAGYAAGGGPNYPNAPPPPGYRGAPAPGYQAXNQGYQGNPGGNMHNGXGPAYHSNNPGYQGGXPGGNPXXPXAGGNQPPPYXGGGPSYGGGAPDYQGQPGGNPGYQGGGNYXNAAPPPXEGRDGPGRNYQ

SEQ ID NO: 13370 - DNA, 1386 bp, Triticum aestivum
  misc_feature (1)..(1386): Ceres Seq. ID no. 13596954
gaacatcctaatcgaaaaataggcctcttcttagaaaaaaaaagaggacagactaagcggagaatcgagggtttcggcttccttgtcatctcgccgtctccgacgccggcgaccagggagcgagacctccaacccccgtcctctcgccggctgcgtgtttccccgttccgtagaccaggtatgaagagggccgcgccgtcggaggagccggtggagctctcttccggcgacgacctgagctcggattccgacgatgaggccgggaacgggaaaggcgagaactccttccggctgcccatgtcctccaaatctgcagctccagcaaaaggtgcattgatcaggagggctgaaatgtatcaagagtacatgaagcacatcccaattcctgatcactgcagctccttgatcccatccacatcatggctgggactcggaagatcggtgaagcagttgtacgagcagcccttgcattacctcaccaacatcctcttgagacagtgggatcaacagagggttgggagcgataatgagcaccagcctctggatgctatcattcaccctatgaaagctcaagccctcatttgggccactgaagaagtccataggctgaccacctctagtgaccacttagagaaggtctgggctaaagaccccatgtatcatgctaacatagatccagtgttcccttccctaaagttgcattagcaaacatcgcaagttggaccgtcttatcctgtctattttgtttctgcctgctgtgtaatctggcacattttggttgttagcgaagtgatatgaaccatatatcactgatgttaaacgtacgatatgtcatggtcagggtctcttttaacgctgattttagctctctgaacagcgtctttgttgaagaagaagaaacctggtggtgtggatttcagtgctttgagccggcacgggtatcgtggcggaccatctatactgacagttgctcctccaaaggttgaacctaactggacttggtccactgggaaagatcgcaacgagaaggaagttctaaccgagtcttttgaagagcgggaacgcacaagggctgcagtaactgaaggagagaagcttatcggtgtgatgaacccccaaccaaggcagaccgagaaagagaaggatgctgcttcattctcacagaaggagaagcggaagagagaccgtgggcaggccagcaggggtaagaactacgtcgaggaggagaagcggctcctgagggggagtggtgtctactctggcttcgatacttgacagtgtccagaacatatgttatttgtccgtgttagcttccgtcgttactgttggtgtgtctgctgtttagttttgtcgcgaagttcactctggtcaatcggggctatgctt

SEQ ID NO: 13371 - protein, 234 aa, Triticum aestivum
  peptide (1)..(234): Ceres Seq. ID no. 13596955
  misc_feature (67)..(229): NCBI GI NO: 30686741 NR Description: expressed protein [Arabidopsis thaliana]
  misc_feature (67)..(187): NCBI GI NO: 30102560 NR Description: At3g22680 [Arabidopsis thaliana]
EHPNRKIGLFLEKKRGQTKRRIEGFGFLVISPSPTPATRERDLQPPSSRRLRVSPFRRPGMKRAAPSEEPVELSSGDDLSSDSDDEAGNGKGENSFRLPMSSKSAAPAKGALIRRAEMYQEYMKHIPIPDHCSSLIPSTSWLGLGRSVKQLYEQPLHYLTNILLRQWDQQRVGSDNEHQPLDAIIHPMKAQALIWATEEVHRLTTSSDHLEKVWAKDPMYHANIDPVFPSLKLH

SEQ ID NO: 13372 - protein, 174 aa, Triticum aestivum
  peptide (1)..(174): Ceres Seq. ID no. 13596956
  misc_feature (7)..(169): NCBI GI NO: 30686741 NR Description: expressed protein [Arabidopsis thaliana]
  misc_feature (7)..(127): NCBI GI NO: 30102560 NR Description: At3g22680 [Arabidopsis thaliana]
MKRAAPSEEPVELSSGDDLSSDSDDEAGNGKGENSFRLPMSSKSAAPAKGALIRRAEMYQEYMKHIPIPDHCSSLIPSTSWLGLGRSVKQLYEQPLHYLTNILLRQWDQQRVGSDNEHQPLDAIIHPMKAQALIWATEEVHRLTTSSDHLEKVWAKDPMYHANIDPVFPSLKLH

SEQ ID NO: 13373 - protein, 135 aa, Triticum aestivum
  peptide (1)..(135): Ceres Seq. ID no. 13596957
  misc_feature (1)..(130): NCBI GI NO: 30686741 NR Description: expressed protein [Arabidopsis thaliana]
  misc_feature (1)..(88): NCBI GI NO: 30102560 NR Description: At3g22680 [Arabidopsis thaliana]
MSSKSAAPAKGALIRRAEMYQEYMKHIPIPDHCSSLIPSTSWLGLGRSVKQLYEQPLHYLTNILLRQWDQQRVGSDNEHQPLDAIIHPMKAQALIWATEEVHRLTTSSDHLEKVWAKDPMYHANIDPVFPSLKLH

SEQ ID NO: 13374 - DNA, 1500 bp, Triticum aestivum
  misc_feature (1)..(1500): Ceres Seq. ID no. 13655302
acaggtagacgcttgccccgctaccattccaagcacatattcccgcgggcatcccgccacctaaccgcctaccttgcaccgcaattcatcccccattcagcaaacccaaaatagtggagcagccccgattggaatcgtgttatacagatacggatacgggcgtagccggatacagctagctagctggaggcgccatggtgggggtgaggatggtgtgcaatgggaaggctgtggcggcgctgactgcggtgtttgtcgtctgcgccggggtggtctcgccggcggcggcgagcgggcgcgaggaggcccaccaggtgccggcggtctacgtgttcggcgactccacggtggacgtgggcaacaaccagtacctgccggggaacgccgcgctgcagctcccctacggcatcgacttcccgcagtcgcggcccaccgggaggttcagcaacgggttcaacgtcgccgactccatctcgaggctgttgggcttcaagaggagcccgccggcgtacctgtcgctgacgccggagacgagccgccagatcgtcagaggctaccgtggcgtcaactacgcctccggtggatccggcattctcgacaccaccgggaacaccctcacgttgactaagcaggtggagtacttcgcggccaccaagtcaaagatgacggagaagagccctggcatcgacgcgctgctgtccaagtcgctcttcctcatcagcgacggcggcaacgactttttcgccttcctccggcagaacctgacggccagcgacgcgccgtccttctacgcggacatgctgaccaaactacacgaagcacgtgcagacgctgtaccagctgggagcgcggcggttcgggatcgtcgacgtgccgcccatcggctgcgtgccggcggtgcgggtcacctccccggacggcgagaccgcgtgcgtcgaggccgccaacgccctcgccagggggttcaacgacgcgctggggaaggcgatggccaggctcgccgccgcgctgcccgggatgaggtactccgtggggagctcctacaacctgataacgttcatcacggtgcacccgcaggccgccgggttcaaggacgtggccagcgcgtgctgcggcggcgggaggctcggcgcgcagacatggtgcggggcgcccaacgccacctactgcgccgaccgcaacgacaatgtctactgggacgaggtgcacggcacccaggccacctccagcaagggcgccaaggccatcttcgccgcccccgtgaagctcggcttcgccgcgcccatcaacttcaagcagctggtttcttcttgatcgccggtcgaggcattgcaccggacggacacgatctgttgtcagctcttaatttagttgcgagtgttcaccctttgattaagggaggggaaaagaatgggtagcacactttttgattcttttgtagatcggtgaagatgcaatagaatcatagagagggtgcagtgatgcatgcgattttatgtt

SEQ ID NO: 13375 - protein, 407 aa, Triticum aestivum
  peptide (1)..(407): Ceres Seq. ID no. 15219734
  misc_feature (44)..(208): Pfam Name: Pfam Description:  GDSL-like Lipase/Acylhydrolase
  misc_feature (18)..(218): NCBI GI NO: 38345853 NR Description: OSJNBa0084K11.17
  misc_feature (6)..(192): NCBI GI NO: 29837765 NR Description: putative GDSL-like lipase/acylhydrolase
  misc_feature (14)..(208): NCBI GI NO: 34899288 NR Description: similar to GDSL-motif lipase/hydrolase
  misc_feature (31)..(208): NCBI GI NO: 15240452 NR Description: GDSL-motif lipase/hydrolase protein
  misc_feature (13)..(203): NCBI GI NO: 13174242 NR Description: putative proline-rich protein [Oryza sativa]
  misc_feature (40)..(203): NCBI GI NO: 15224005 NR Description: GDSL-motif lipase/hydrolase protein
  misc_feature (41)..(205): NCBI GI NO: 30693763 NR Description: GDSL-motif lipase/hydrolase protein
  misc_feature (45)..(190): NCBI GI NO: 38345537 NR Description: OSJNBa0020J04.12
  misc_feature (38)..(182): NCBI GI NO: 15228189 NR Description: GDSL-motif lipase/hydrolase protein
  misc_feature (36)..(203): NCBI GI NO: 15241626 NR Description: GDSL-motif lipase/hydrolase protein
MVGVRMVCNGKAVAALTAVFVVCAGVVSPAAASGREEAHQVPAVYVFGDSTVDVGNNQYLPGNAALQLPYGIDFPQSRPTGRFSNGFNVADSISRLLGFKRSPPAYLSLTPETSRQIVRGYRGVNYASGGSGILDTTGNTLTLTKQVEYFAATKSKMTEKSPGIDALLSKSLFLISDGGNDFFAFLRQNLTASDAPSFYADMLTKLHEARADAVPAGSAAVRDRRRAAHRLRAGGAGHLPGRRDRVRRGRQRPRQGVQRRAGEGDGQARRRAARDEVLRGELLQPDNVHHGAPAGRRVQGRGQRVLRRREARRADMVRGAQRHLLRRPQRQCLLGRGARHPGHLQQGRQGHLRRPREARLRRAHQLQAAGFFLIAGRGIAPDGHDLLSALNLVASVHPLIKGGEKNG

SEQ ID NO: 13376 - protein, 402 aa, Triticum aestivum
  peptide (1)..(402): Ceres Seq. ID no. 15219735
  misc_feature (39)..(203): Pfam Name: Pfam Description:  GDSL-like Lipase/Acylhydrolase
  misc_feature (13)..(213): NCBI GI NO: 38345853 NR Description: OSJNBa0084K11.17
  misc_feature (1)..(187): NCBI GI NO: 29837765 NR Description: putative GDSL-like lipase/acylhydrolase
  misc_feature (9)..(203): NCBI GI NO: 34899288 NR Description: similar to GDSL-motif lipase/hydrolase
  misc_feature (26)..(203): NCBI GI NO: 15240452 NR Description: GDSL-motif lipase/hydrolase protein
  misc_feature (8)..(198): NCBI GI NO: 13174242 NR Description: putative proline-rich protein [Oryza sativa]
  misc_feature (35)..(198): NCBI GI NO: 15224005 NR Description: GDSL-motif lipase/hydrolase protein
  misc_feature (36)..(200): NCBI GI NO: 30693763 NR Description: GDSL-motif lipase/hydrolase protein
  misc_feature (40)..(185): NCBI GI NO: 38345537 NR Description: OSJNBa0020J04.12
  misc_feature (33)..(177): NCBI GI NO: 15228189 NR Description: GDSL-motif lipase/hydrolase protein
  misc_feature (31)..(198): NCBI GI NO: 15241626 NR Description: GDSL-motif lipase/hydrolase protein
MVCNGKAVAALTAVFVVCAGVVSPAAASGREEAHQVPAVYVFGDSTVDVGNNQYLPGNAALQLPYGIDFPQSRPTGRFSNGFNVADSISRLLGFKRSPPAYLSLTPETSRQIVRGYRGVNYASGGSGILDTTGNTLTLTKQVEYFAATKSKMTEKSPGIDALLSKSLFLISDGGNDFFAFLRQNLTASDAPSFYADMLTKLHEARADAVPAGSAAVRDRRRAAHRLRAGGAGHLPGRRDRVRRGRQRPRQGVQRRAGEGDGQARRRAARDEVLRGELLQPDNVHHGAPAGRRVQGRGQRVLRRREARRADMVRGAQRHLLRRPQRQCLLGRGARHPGHLQQGRQGHLRRPREARLRRAHQLQAAGFFLIAGRGIAPDGHDLLSALNLVASVHPLIKGGEKNG

SEQ ID NO: 13377 - protein, 251 aa, Triticum aestivum
  peptide (1)..(251): Ceres Seq. ID no. 15219736
  misc_feature (1)..(52): Pfam Name: Pfam Description:  GDSL-like Lipase/Acylhydrolase
  misc_feature (1)..(62): NCBI GI NO: 38345853 NR Description: OSJNBa0084K11.17
  misc_feature (1)..(36): NCBI GI NO: 29837765 NR Description: putative GDSL-like lipase/acylhydrolase
  misc_feature (1)..(52): NCBI GI NO: 34899288 NR Description: similar to GDSL-motif lipase/hydrolase
  misc_feature (1)..(52): NCBI GI NO: 15240452 NR Description: GDSL-motif lipase/hydrolase protein
  misc_feature (1)..(47): NCBI GI NO: 13174242 NR Description: putative proline-rich protein [Oryza sativa]
  misc_feature (1)..(47): NCBI GI NO: 15224005 NR Description: GDSL-motif lipase/hydrolase protein
  misc_feature (1)..(49): NCBI GI NO: 30693763 NR Description: GDSL-motif lipase/hydrolase protein
  misc_feature (1)..(34): NCBI GI NO: 38345537 NR Description: OSJNBa0020J04.12
  misc_feature (1)..(26): NCBI GI NO: 15228189 NR Description: GDSL-motif lipase/hydrolase protein
  misc_feature (1)..(47): NCBI GI NO: 15241626 NR Description: GDSL-motif lipase/hydrolase protein
MTEKSPGIDALLSKSLFLISDGGNDFFAFLRQNLTASDAPSFYADMLTKLHEARADAVPAGSAAVRDRRRAAHRLRAGGAGHLPGRRDRVRRGRQRPRQGVQRRAGEGDGQARRRAARDEVLRGELLQPDNVHHGAPAGRRVQGRGQRVLRRREARRADMVRGAQRHLLRRPQRQCLLGRGARHPGHLQQGRQGHLRRPREARLRRAHQLQAAGFFLIAGRGIAPDGHDLLSALNLVASVHPLIKGGEKNG

SEQ ID NO: 13378 - DNA, 1695 bp, Triticum aestivum
  misc_feature (1)..(1695): Ceres Seq. ID no. 13597146
accattaaccagtccacaggcaggcaccggtcgtgaggcagagagagaaccagagccagacatgcagcgcctcgcctcctcccggaggctcctccgggccgccctcgcccccggccgggcgcattccagcctctccgcggccgcggtcgccgccgcgccggagaatggcgccggcgcccccaagatgccgccgttcgcgtacacgccgccgccgtacgacgggccgcgggtggcggagatcgcccagaagcgcgcccagttcctcagcccctcgctcttccacttctacgaccgccctttgaacatagtcgatggaaagatgcagtacctgttcgatgaggatggccgccgctacctggacgctttcggtggcattgcgaccgtttgttgcgggcactgccatcctgatgtgattgaagccatagtcaaccaggcaaagaagatacagcactccacagttctgtatctgaaccatgcaattgccgactttgctgaggctctggcgtccaaaatgcctggtgatctgaaggttgttttcttcacaaattctggcacagaggcaaatgagcttgcactgatgatcgctcggctttacacgggttcccatgacattatttcacttaggaatggataccatgggaatgcagctgcaacaatgggtgccactgctcaatccaactggaaatttaatgttgtccagaccggagtgcaccatgctcttaatccagacccatacagaggcgctttcgggtcagacggagagaaatatgccagagatattcaggaaaccattgactatgggactacaggaagagttgcaggtttcatttcagaggccatacagggagttggtggaatagtggaattagcaccaggatacctgcctgcggcctatgatatggtaaggaaagctggtggcctgtgcatcgccgacgaagttcaggcgggggttgcgcgcactggaagccacttctggggattcgaagggcagggtgtcatccctgatatagtcactatggcaaagggcatagggaacggaataccgataggagcggtcgttaccacacctgagattgctaaggtgttaacccgcagaagctacttcaacaccttcggtggtaaccctgtcagcacagctgccggccacgctgttctcaaggtactggagaaggagaagctgcaggagaatgcgttcgttgttggctcctacctgaaggagaaacttaacgctctgaaagagaagcatgacattatcggcgacgttagggggaaaggcctccttctcggggttgagctggtgaccgatcgccagaagaaaactccggcgaaagctgagatcgcgcaggtcatgaaccacatgaaagatatgggcgtgctggtggggaagggcggtttcttcggcaatgtgttcagggtgacgcctccgttgtgcttctccaaggaggactccgactacatgatcgaggtgatggacattgcgctgtcgaagctgtgaagaggcactgctctcatcgataaataagagacgatctgcgaaacagcacctcgttgtctcgtgttctgtcttgcaaacccatgatgcgcacatgcgatctgcgcctcctgaacattagtatgatgtgctgagtaggagctctatgtgaccaataagttcttcgtaataagatattcagatgtgctatggcagcttttatg

SEQ ID NO: 13379 - protein, 497 aa, Triticum aestivum
  peptide (1)..(497): Ceres Seq. ID no. 13597147
  misc_feature (90)..(497): Pfam Name: Pfam Description:  Aminotransferase class-III
  misc_feature (21)..(497): NCBI GI NO: 15231974 NR Description: alanine--glyoxylate aminotransferase
  misc_feature (21)..(497): NCBI GI NO: 15224499 NR Description: alanine--glyoxylate aminotransferase
  misc_feature (21)..(497): NCBI GI NO: 15028237 NR Description: putative beta-alanine-pyruvate aminotransferase
  misc_feature (24)..(497): NCBI GI NO: 5731259 NR Description: alanine:glyoxylate aminotransferase 2 homolog
  misc_feature (24)..(497): NCBI GI NO: 18420498 NR Description: alanine--glyoxylate aminotransferase
  misc_feature (266)..(483): NCBI GI NO: 7434175 NR Description: hypothetical protein T19P19
  misc_feature (24)..(235): NCBI GI NO: 7434175 NR Description: hypothetical protein T19P19
  misc_feature (253)..(496): NCBI GI NO: 16198011 NR Description: LD24726p [Drosophila melanogaster]
  misc_feature (253)..(496): NCBI GI NO: 28574759 NR Description: CG11241-PA [Drosophila melanogaster]
  misc_feature (24)..(250): NCBI GI NO: 16198011 NR Description: LD24726p [Drosophila melanogaster]
PLTSPQAGTGREAEREPEPDMQRLASSRRLLRAALAPGRAHSSLSAAAVAAAPENGAGAPKMPPFAYTPPPYDGPRVAEIAQKRAQFLSPSLFHFYDRPLNIVDGKMQYLFDEDGRRYLDAFGGIATVCCGHCHPDVIEAIVNQAKKIQHSTVLYLNHAIADFAEALASKMPGDLKVVFFTNSGTEANELALMIARLYTGSHDIISLRNGYHGNAAATMGATAQSNWKFNVVQTGVHHALNPDPYRGAFGSDGEKYARDIQETIDYGTTGRVAGFISEAIQGVGGIVELAPGYLPAAYDMVRKAGGLCIADEVQAGVARTGSHFWGFEGQGVIPDIVTMAKGIGNGIPIGAVVTTPEIAKVLTRRSYFNTFGGNPVSTAAGHAVLKVLEKEKLQENAFVVGSYLKEKLNALKEKHDIIGDVRGKGLLLGVELVTDRQKKTPAKAEIAQVMNHMKDMGVLVGKGGFFGNVFRVTPPLCFSKEDSDYMIEVMDIALSKL

SEQ ID NO: 13380 - protein, 477 aa, Triticum aestivum
  peptide (1)..(477): Ceres Seq. ID no. 13597148
  misc_feature (70)..(477): Pfam Name: Pfam Description:  Aminotransferase class-III
  misc_feature (1)..(477): NCBI GI NO: 15231974 NR Description: alanine--glyoxylate aminotransferase
  misc_feature (1)..(477): NCBI GI NO: 15224499 NR Description: alanine--glyoxylate aminotransferase
  misc_feature (1)..(477): NCBI GI NO: 15028237 NR Description: putative beta-alanine-pyruvate aminotransferase
  misc_feature (4)..(477): NCBI GI NO: 5731259 NR Description: alanine:glyoxylate aminotransferase 2 homolog
  misc_feature (4)..(477): NCBI GI NO: 18420498 NR Description: alanine--glyoxylate aminotransferase
  misc_feature (246)..(463): NCBI GI NO: 7434175 NR Description: hypothetical protein T19P19
  misc_feature (4)..(215): NCBI GI NO: 7434175 NR Description: hypothetical protein T19P19
  misc_feature (233)..(476): NCBI GI NO: 16198011 NR Description: LD24726p [Drosophila melanogaster]
  misc_feature (233)..(476): NCBI GI NO: 28574759 NR Description: CG11241-PA [Drosophila melanogaster]
  misc_feature (4)..(230): NCBI GI NO: 16198011 NR Description: LD24726p [Drosophila melanogaster]
MQRLASSRRLLRAALAPGRAHSSLSAAAVAAAPENGAGAPKMPPFAYTPPPYDGPRVAEIAQKRAQFLSPSLFHFYDRPLNIVDGKMQYLFDEDGRRYLDAFGGIATVCCGHCHPDVIEAIVNQAKKIQHSTVLYLNHAIADFAEALASKMPGDLKVVFFTNSGTEANELALMIARLYTGSHDIISLRNGYHGNAAATMGATAQSNWKFNVVQTGVHHALNPDPYRGAFGSDGEKYARDIQETIDYGTTGRVAGFISEAIQGVGGIVELAPGYLPAAYDMVRKAGGLCIADEVQAGVARTGSHFWGFEGQGVIPDIVTMAKGIGNGIPIGAVVTTPEIAKVLTRRSYFNTFGGNPVSTAAGHAVLKVLEKEKLQENAFVVGSYLKEKLNALKEKHDIIGDVRGKGLLLGVELVTDRQKKTPAKAEIAQVMNHMKDMGVLVGKGGFFGNVFRVTPPLCFSKEDSDYMIEVMDIALSKL

SEQ ID NO: 13381 - protein, 436 aa, Triticum aestivum
  peptide (1)..(436): Ceres Seq. ID no. 13597149
  misc_feature (29)..(436): Pfam Name: Pfam Description:  Aminotransferase class-III
  misc_feature (1)..(436): NCBI GI NO: 15231974 NR Description: alanine--glyoxylate aminotransferase
  misc_feature (1)..(436): NCBI GI NO: 15224499 NR Description: alanine--glyoxylate aminotransferase
  misc_feature (1)..(436): NCBI GI NO: 15028237 NR Description: putative beta-alanine-pyruvate aminotransferase
  misc_feature (1)..(436): NCBI GI NO: 5731259 NR Description: alanine:glyoxylate aminotransferase 2 homolog
  misc_feature (1)..(436): NCBI GI NO: 18420498 NR Description: alanine--glyoxylate aminotransferase
  misc_feature (205)..(422): NCBI GI NO: 7434175 NR Description: hypothetical protein T19P19
  misc_feature (1)..(174): NCBI GI NO: 7434175 NR Description: hypothetical protein T19P19
  misc_feature (192)..(435): NCBI GI NO: 16198011 NR Description: LD24726p [Drosophila melanogaster]
  misc_feature (192)..(435): NCBI GI NO: 28574759 NR Description: CG11241-PA [Drosophila melanogaster]
  misc_feature (1)..(189): NCBI GI NO: 16198011 NR Description: LD24726p [Drosophila melanogaster]
MPPFAYTPPPYDGPRVAEIAQKRAQFLSPSLFHFYDRPLNIVDGKMQYLFDEDGRRYLDAFGGIATVCCGHCHPDVIEAIVNQAKKIQHSTVLYLNHAIADFAEALASKMPGDLKVVFFTNSGTEANELALMIARLYTGSHDIISLRNGYHGNAAATMGATAQSNWKFNVVQTGVHHALNPDPYRGAFGSDGEKYARDIQETIDYGTTGRVAGFISEAIQGVGGIVELAPGYLPAAYDMVRKAGGLCIADEVQAGVARTGSHFWGFEGQGVIPDIVTMAKGIGNGIPIGAVVTTPEIAKVLTRRSYFNTFGGNPVSTAAGHAVLKVLEKEKLQENAFVVGSYLKEKLNALKEKHDIIGDVRGKGLLLGVELVTDRQKKTPAKAEIAQVMNHMKDMGVLVGKGGFFGNVFRVTPPLCFSKEDSDYMIEVMDIALSKL

SEQ ID NO: 13382 - DNA, 1818 bp, Triticum aestivum
  misc_feature (1)..(1818): Ceres Seq. ID no. 12616225
ctcgacactgcgctcctttcccctcgccagacctggccgcgtccccaccgcccccgacccctcccactcctccctggccgcgtcgactgcccggatctccgcgcccagatcgccgggacacctcctcccctggagcagctgccgtcctcaccgcgccggattcctcactctcggaatcaggtggatgctatttgcaggctggtaaagacaactaactttgttgatcctgtgcgcaagaagtaatgatccggcccagctccaaggagtcacttaattatgacaacaatagccagaaagtttatcctcaaccaattgatgaaaatatgaatcagaacatgggcagtatgattggaagaatattcaacaacatatcctctttaaaggctgcatacattcagctgcaggaagctcacaccccatatgacccggacaagatacaaactgctgataagcttgtcatagatgagctcacgagcctttcagaactcaaacatacttacagagagagaaatcctaagccagtagcagcatcacctcaagattcacgcttgctttctgaaatacaggagcagcaaaacttgttaaagacgtacgaggtcatggtaaagaagttccagtcccagatccagaatagagatactgagattacccacttacagcagcaaaccgatgaggccaaacatcggaaaacaaaactggagaagaaattgaagcaaaggggcttacttaacaaggaatcagaggaatctgatgaagaagagagctatttctctgttgagctgacaccaagcttgtttacatctactgctgataacgcataccaatcaatacatgagttctcaaagcccttgatcaacatgatgaaagctgcaggttgggatcttgatgctgctgctaacgcaattgaacctgatgtagtttacacaaggagagctcacaagaagtatgcatttgagtcttatatctgccagagaatcttcagtggtttccatcaagagaacttcttgattgacgctgctaatgccactgtttccaatgaggctttcttccatcaattccttgcagtacgagccatggatcctttggatgtattgagccaaaacccagattcagttttcggaaagttctgcagaagcaaatacctactgcttgtgcacccaaagatggaaggttctttcttcggcaacatggatcagagaaactacgtcatgagtggcgggcatccaaggacacctttctatcaggcatttctcaagttggcgaagtccatatggttgttgcacaggctggcctactctttcgacccaaaggtcagggtcttccaagtgaagaaggcaagcgagttctcagagattcacatggaaagcgttgtgaagaacatcgtcttggatgagaatgccgagaggcctagagtcgacttgatggtgatgcctggtttcttgatcgggactagcgtcatacagtctcgagtgtacctttctggtgtaaagtgtgacgactgataagtgttagggttgcctgagaagattccgggcgtctcacacatcctgcaagatcatcgtacgtcttgtatgtaatgccgcctctccaaaatgttattcgtatgaaatgtggtagcaacacctttttcgtaaaaagcatagtatgctttggtcattcgaagactgtaatgtgtgctttctctgttttgtaatgcatgtaaatcctgtcccaacgtttggtctacatataagttatgaaaaattgtcaatgtggcgtggatgtaccatctatatggtgactgtacagccatttgcaaactggcattcagttcctcgc

SEQ ID NO: 13383 - protein, 419 aa, Triticum aestivum
  peptide (1)..(419): Ceres Seq. ID no. 12616226
  misc_feature (24)..(156): Pfam Name: DUF641 Pfam Description: Plant protein of unknown function
  misc_feature (4)..(416): NCBI GI NO: 15225441 NR Description: hypothetical protein; protein id: At2g45260
  misc_feature (24)..(293): NCBI GI NO: 15235221 NR Description: putative protein; protein id: At4g34080.1
  misc_feature (316)..(380): NCBI GI NO: 15235221 NR Description: putative protein; protein id: At4g34080.1
  misc_feature (24)..(304): NCBI GI NO: 15234143 NR Description: hypothetical protein; protein id: At4g33320.1
  misc_feature (32)..(413): NCBI GI NO: 8777470 NR Description: gb|AAB82637
  misc_feature (32)..(413): NCBI GI NO: 15231944 NR Description: hypothetical protein; protein id: At3g14870.1
  misc_feature (16)..(413): NCBI GI NO: 15219282 NR Description: unknown protein; protein id: At1g53380.1
  misc_feature (34)..(415): NCBI GI NO: 22329840 NR Description: unknown protein; protein id: At1g29300
  misc_feature (34)..(415): NCBI GI NO: 20466324 NR Description: unknown protein [Arabidopsis thaliana]
  misc_feature (28)..(414): NCBI GI NO: 15232398 NR Description: putative protein; protein id: At3g60680.1
MIRPSSKESLNYDNNSQKVYPQPIDENMNQNMGSMIGRIFNNISSLKAAYIQLQEAHTPYDPDKIQTADKLVIDELTSLSELKHTYRERNPKPVAASPQDSRLLSEIQEQQNLLKTYEVMVKKFQSQIQNRDTEITHLQQQTDEAKHRKTKLEKKLKQRGLLNKESEESDEEESYFSVELTPSLFTSTADNAYQSIHEFSKPLINMMKAAGWDLDAAANAIEPDVVYTRRAHKKYAFESYICQRIFSGFHQENFLIDAANATVSNEAFFHQFLAVRAMDPLDVLSQNPDSVFGKFCRSKYLLLVHPKMEGSFFGNMDQRNYVMSGGHPRTPFYQAFLKLAKSIWLLHRLAYSFDPKVRVFQVKKASEFSEIHMESVVKNIVLDENAERPRVDLMVMPGFLIGTSVIQSRVYLSGVKCDD

SEQ ID NO: 13384 - protein, 392 aa, Triticum aestivum
  peptide (1)..(392): Ceres Seq. ID no. 12616227
  misc_feature (1)..(129): Pfam Name: DUF641 Pfam Description: Plant protein of unknown function
  misc_feature (1)..(389): NCBI GI NO: 15225441 NR Description: hypothetical protein; protein id: At2g45260
  misc_feature (1)..(266): NCBI GI NO: 15235221 NR Description: putative protein; protein id: At4g34080.1
  misc_feature (289)..(353): NCBI GI NO: 15235221 NR Description: putative protein; protein id: At4g34080.1
  misc_feature (1)..(277): NCBI GI NO: 15234143 NR Description: hypothetical protein; protein id: At4g33320.1
  misc_feature (5)..(386): NCBI GI NO: 8777470 NR Description: gb|AAB82637
  misc_feature (5)..(386): NCBI GI NO: 15231944 NR Description: hypothetical protein; protein id: At3g14870.1
  misc_feature (1)..(386): NCBI GI NO: 15219282 NR Description: unknown protein; protein id: At1g53380.1
  misc_feature (7)..(388): NCBI GI NO: 22329840 NR Description: unknown protein; protein id: At1g29300
  misc_feature (7)..(388): NCBI GI NO: 20466324 NR Description: unknown protein [Arabidopsis thaliana]
  misc_feature (1)..(387): NCBI GI NO: 15232398 NR Description: putative protein; protein id: At3g60680.1
MNQNMGSMIGRIFNNISSLKAAYIQLQEAHTPYDPDKIQTADKLVIDELTSLSELKHTYRERNPKPVAASPQDSRLLSEIQEQQNLLKTYEVMVKKFQSQIQNRDTEITHLQQQTDEAKHRKTKLEKKLKQRGLLNKESEESDEEESYFSVELTPSLFTSTADNAYQSIHEFSKPLINMMKAAGWDLDAAANAIEPDVVYTRRAHKKYAFESYICQRIFSGFHQENFLIDAANATVSNEAFFHQFLAVRAMDPLDVLSQNPDSVFGKFCRSKYLLLVHPKMEGSFFGNMDQRNYVMSGGHPRTPFYQAFLKLAKSIWLLHRLAYSFDPKVRVFQVKKASEFSEIHMESVVKNIVLDENAERPRVDLMVMPGFLIGTSVIQSRVYLSGVKCDD

SEQ ID NO: 13385 - protein, 388 aa, Triticum aestivum
  peptide (1)..(388): Ceres Seq. ID no. 12616228
  misc_feature (1)..(125): Pfam Name: DUF641 Pfam Description: Plant protein of unknown function
  misc_feature (1)..(385): NCBI GI NO: 15225441 NR Description: hypothetical protein; protein id: At2g45260
  misc_feature (1)..(262): NCBI GI NO: 15235221 NR Description: putative protein; protein id: At4g34080.1
  misc_feature (285)..(349): NCBI GI NO: 15235221 NR Description: putative protein; protein id: At4g34080.1
  misc_feature (1)..(273): NCBI GI NO: 15234143 NR Description: hypothetical protein; protein id: At4g33320.1
  misc_feature (1)..(382): NCBI GI NO: 8777470 NR Description: gb|AAB82637
  misc_feature (1)..(382): NCBI GI NO: 15231944 NR Description: hypothetical protein; protein id: At3g14870.1
  misc_feature (1)..(382): NCBI GI NO: 15219282 NR Description: unknown protein; protein id: At1g53380.1
  misc_feature (3)..(384): NCBI GI NO: 22329840 NR Description: unknown protein; protein id: At1g29300
  misc_feature (3)..(384): NCBI GI NO: 20466324 NR Description: unknown protein [Arabidopsis thaliana]
  misc_feature (1)..(383): NCBI GI NO: 15232398 NR Description: putative protein; protein id: At3g60680.1
MGSMIGRIFNNISSLKAAYIQLQEAHTPYDPDKIQTADKLVIDELTSLSELKHTYRERNPKPVAASPQDSRLLSEIQEQQNLLKTYEVMVKKFQSQIQNRDTEITHLQQQTDEAKHRKTKLEKKLKQRGLLNKESEESDEEESYFSVELTPSLFTSTADNAYQSIHEFSKPLINMMKAAGWDLDAAANAIEPDVVYTRRAHKKYAFESYICQRIFSGFHQENFLIDAANATVSNEAFFHQFLAVRAMDPLDVLSQNPDSVFGKFCRSKYLLLVHPKMEGSFFGNMDQRNYVMSGGHPRTPFYQAFLKLAKSIWLLHRLAYSFDPKVRVFQVKKASEFSEIHMESVVKNIVLDENAERPRVDLMVMPGFLIGTSVIQSRVYLSGVKCDD

SEQ ID NO: 13386 - DNA, 1272 bp, Triticum aestivum
  misc_feature (1)..(1272): Ceres Seq. ID no. 12625392
agacacagaccagagtccacagcacagcagagcaccaccactactaccacccccagtggcaaccctgacaaggctctagcagcttagctgaagatggccgggctactctctgtcaaggccgtcgcgctcgccgccgtgcttgctgccgcgtatgcctcttgcgccgccgccgagcagccgggggcggcggacctcgacgcctccgccgtgtcttacagctccgcgtggcttccggccagagcgacctggtacggagcgcccaacggcgccgggcccgacgacaacggcggcgcgtgcggcttcaagcacgtgaaccagtaccccttctcctccatgacctcctgcggcaaccagcccctgttcaaggacggcaagggctgcggctcctgctaccagatacggtgcagcggcgacaaatcctgctccggcaaaatcgagacggtgatgatcacggacatgaactactacccggtggcgcagtaccacttcgacctgagcggcacggccttcggcgcgctggccaagccggggctcaacgagaagctgcgccactcgggcatcatcgacatccagttccggcgggtgccctgcaacttcccgggcctcaagatcaacttccacgtggtggacggctccaacgcggtgtacctggcggtgctgatcgagtacgaggacatggacggcgacgtgatccaggtggacatgaaggaggccaactccgggtcgtggacgccgatgcgcgagtcctggggctccatctggcggatggactccaaccatcgcctccaggggcccttctccatgcgcatcaccagcgactccggcaagaagctggtggccaacaacgtcatcccggccaactggaggcccaacaccgactaccgctccttcgtccagttcagctgatccgagtccgaccggcccatgggcggccacgtgcggctgcatcatgcgtgcatgcgctctggcggtctggcccctctgctggctacgtacaattaatcgctcggccgatcgaaatcatttgccttattttattttttgtatttgcttgggatcaaggagctcgagatgccgtctgtctggtgtcatatgtggggtcgtcgtcgtctagcgtcttgagcatgtgtgggaaatgcgggagggcatagtttgcatgtgctctcccgcccactgactctgtgtagagtaccatacatgagatgacactaccggtttgtaagcaaatccaagttattataaattatatacgtacagttttttctactactc

SEQ ID NO: 13387 - protein, 270 aa, Triticum aestivum
  peptide (1)..(270): Ceres Seq. ID no. 12625393
  misc_feature (173)..(254): Pfam Name: Pfam Description:  Pollen allergen
  misc_feature (1)..(270): NCBI GI NO: 14330328 NR Description: beta expansin B2 [Festuca pratensis]
  misc_feature (1)..(270): NCBI GI NO: 37536756 NR Description: beta-expansin EXPB6
  misc_feature (1)..(270): NCBI GI NO: 14330330 NR Description: beta expansin B3 [Festuca pratensis]
  misc_feature (1)..(270): NCBI GI NO: 37536760 NR Description: beta-expansin EXPB3
  misc_feature (6)..(270): NCBI GI NO: 37536762 NR Description: beta-expansin EXPB4
  misc_feature (6)..(270): NCBI GI NO: 8118425 NR Description: beta-expansin [Oryza sativa]
  misc_feature (3)..(270): NCBI GI NO: 14193775 NR Description: beta-expansin 8 [Zea mays]
  misc_feature (1)..(269): NCBI GI NO: 14193771 NR Description: beta-expansin 6 [Zea mays]
  misc_feature (4)..(269): NCBI GI NO: 14193773 NR Description: beta-expansin 7 [Zea mays]
  misc_feature (29)..(269): NCBI GI NO: 8118432 NR Description: beta-expansin [Oryza sativa]
MAGLLSVKAVALAAVLAAAYASCAAAEQPGAADLDASAVSYSSAWLPARATWYGAPNGAGPDDNGGACGFKHVNQYPFSSMTSCGNQPLFKDGKGCGSCYQIRCSGDKSCSGKIETVMITDMNYYPVAQYHFDLSGTAFGALAKPGLNEKLRHSGIIDIQFRRVPCNFPGLKINFHVVDGSNAVYLAVLIEYEDMDGDVIQVDMKEANSGSWTPMRESWGSIWRMDSNHRLQGPFSMRITSDSGKKLVANNVIPANWRPNTDYRSFVQFS

SEQ ID NO: 13388 - protein, 190 aa, Triticum aestivum
  peptide (1)..(190): Ceres Seq. ID no. 12625394
  misc_feature (93)..(174): Pfam Name: Pfam Description:  Pollen allergen
  misc_feature (1)..(190): NCBI GI NO: 14330328 NR Description: beta expansin B2 [Festuca pratensis]
  misc_feature (1)..(190): NCBI GI NO: 37536756 NR Description: beta-expansin EXPB6
  misc_feature (1)..(190): NCBI GI NO: 14330330 NR Description: beta expansin B3 [Festuca pratensis]
  misc_feature (1)..(190): NCBI GI NO: 37536760 NR Description: beta-expansin EXPB3
  misc_feature (1)..(190): NCBI GI NO: 37536762 NR Description: beta-expansin EXPB4
  misc_feature (1)..(190): NCBI GI NO: 8118425 NR Description: beta-expansin [Oryza sativa]
  misc_feature (1)..(190): NCBI GI NO: 14193775 NR Description: beta-expansin 8 [Zea mays]
  misc_feature (1)..(189): NCBI GI NO: 14193771 NR Description: beta-expansin 6 [Zea mays]
  misc_feature (1)..(189): NCBI GI NO: 14193773 NR Description: beta-expansin 7 [Zea mays]
  misc_feature (1)..(189): NCBI GI NO: 8118432 NR Description: beta-expansin [Oryza sativa]
MTSCGNQPLFKDGKGCGSCYQIRCSGDKSCSGKIETVMITDMNYYPVAQYHFDLSGTAFGALAKPGLNEKLRHSGIIDIQFRRVPCNFPGLKINFHVVDGSNAVYLAVLIEYEDMDGDVIQVDMKEANSGSWTPMRESWGSIWRMDSNHRLQGPFSMRITSDSGKKLVANNVIPANWRPNTDYRSFVQFS

SEQ ID NO: 13389 - protein, 153 aa, Triticum aestivum
  peptide (1)..(153): Ceres Seq. ID no. 12625395
  misc_feature (56)..(137): Pfam Name: Pfam Description:  Pollen allergen
  misc_feature (1)..(153): NCBI GI NO: 14330328 NR Description: beta expansin B2 [Festuca pratensis]
  misc_feature (1)..(153): NCBI GI NO: 37536756 NR Description: beta-expansin EXPB6
  misc_feature (1)..(153): NCBI GI NO: 14330330 NR Description: beta expansin B3 [Festuca pratensis]
  misc_feature (1)..(153): NCBI GI NO: 37536760 NR Description: beta-expansin EXPB3
  misc_feature (1)..(153): NCBI GI NO: 37536762 NR Description: beta-expansin EXPB4
  misc_feature (1)..(153): NCBI GI NO: 8118425 NR Description: beta-expansin [Oryza sativa]
  misc_feature (1)..(153): NCBI GI NO: 14193775 NR Description: beta-expansin 8 [Zea mays]
  misc_feature (1)..(152): NCBI GI NO: 14193771 NR Description: beta-expansin 6 [Zea mays]
  misc_feature (1)..(152): NCBI GI NO: 14193773 NR Description: beta-expansin 7 [Zea mays]
  misc_feature (1)..(152): NCBI GI NO: 8118432 NR Description: beta-expansin [Oryza sativa]
MITDMNYYPVAQYHFDLSGTAFGALAKPGLNEKLRHSGIIDIQFRRVPCNFPGLKINFHVVDGSNAVYLAVLIEYEDMDGDVIQVDMKEANSGSWTPMRESWGSIWRMDSNHRLQGPFSMRITSDSGKKLVANNVIPANWRPNTDYRSFVQFS

SEQ ID NO: 13390 - DNA, 1184 bp, Triticum aestivum
  misc_feature (1)..(1184): Ceres Seq. ID no. 13596958
  misc_feature (631)..(631): n is a, c, t, g, unknown, or other
accaccaccacaccacacttgctcgtctccctctgcccctccccttcctcctatagcaatcaaaccaccagctccactcccccctccccttcctccgtcctcaccctccccctcctgctactccccagttcatgtcctgctgcttcccatgtcgccgcctctcgagctcgactacataggcctctcggccgccgccggcggccgcccggacgacgacctgaaaggcaccgagctccgcctcggacttcccggctgcgagtcgcccgaccgccgcccggtcgccgccaccaccacactggagctgctgcccgccaagggggccaagcgagggttttcggacgaggtcgtgccgcctgcgccgatttccgccgccgggaaaggcaaggaggcgtccggggatgagaaggacaagaaggtcgccgccccgccgcagcctgctgccaaggctcaggtggtgggatggccaccagtccgcagctaccgcaagaacacgatggcaaccaccaccaaccagctgaagagcagcaaggaggattctgacacgaagcaggggcaagagtttctgtatgtcaaggtcagcatggatgggtgcgccttacctgaggaaggttgacctcaagacatacaaganctataaggacatggttgtggcgctagggaaaatgttcattggcttcaggaccgggaaggatggtgcatctgagaacagaaaggatggtgaatatgtgatgacttacgaagacaaggatggagactggatgctggttggtgacgtcccatgggagatgttcaccgaggcttgccggaggatcagggtcatgaaaagttcagatgtagttgggcttggagttacaagggcaggggttaagtccaagaataagaactaaaacggtcgctgcccacggtttgaagacgaggtcgcacatgccgtctgtactactgcatggttttcctatcccacaagtaaaatcacccgttactctaccgtttaagatttgcgacatctcctagagacttatgctctatattttgttgtgcccacgttgttgtacgcgtgttatttccatccgtgtaaatggttggtaagcagtgcgagagctactgctgtgtttgatgactcctatgtattttgccactcttgtcctgaaccggtcgttcgtcgtaaatgtgaaggttgcaagcct

SEQ ID NO: 13391 - protein, 203 aa, Triticum aestivum
  peptide (1)..(203): Ceres Seq. ID no. 13596959
  misc_feature (72)..(196): Pfam Name: Pfam Description:  AUX/IAA family
  misc_feature (29)..(196): NCBI GI NO: 34904314 NR Description: unnamed protein product
  misc_feature (42)..(135): NCBI GI NO: 34904314 NR Description: unnamed protein product
  misc_feature (50)..(196): NCBI GI NO: 34911088 NR Description: OJ1117_G01.11
  misc_feature (72)..(146): NCBI GI NO: 15235556 NR Description: AUX/IAA family [Arabidopsis thaliana]
  misc_feature (135)..(196): NCBI GI NO: 15235556 NR Description: AUX/IAA family [Arabidopsis thaliana]
  misc_feature (145)..(196): NCBI GI NO: 7442237 NR Description: GH1 protein - soybean (fragment)
  misc_feature (72)..(105): NCBI GI NO: 7442237 NR Description: GH1 protein - soybean (fragment)
  misc_feature (145)..(196): NCBI GI NO: 6136832 NR Description: CS-IAA2 [Cucumis sativus]
  misc_feature (66)..(92): NCBI GI NO: 6136832 NR Description: CS-IAA2 [Cucumis sativus]
  misc_feature (100)..(196): NCBI GI NO: 25989504 NR Description: Aux/IAA protein [Solanum tuberosum]
PPPHHTCSSPSAPPLPPIAIKPPAPLPPPLPPSSPSPSCYSPVHVLLLPMSPPLELDYIGLSAAAGGRPDDDLKGTELRLGLPGCESPDRRPVAATTTLELLPAKGAKRGFSDEVVPPAPISAAGKGKEASGDEKDKKVAAPPQPAAKAQVVGWPPVRSYRKNTMATTTNQLKSSKEDSDTKQGQEFLYVKVSMDGCALPEEG

SEQ ID NO: 13392 - protein, 154 aa, Triticum aestivum
  peptide (1)..(154): Ceres Seq. ID no. 13596960
  misc_feature (23)..(147): Pfam Name: Pfam Description:  AUX/IAA family
  misc_feature (1)..(147): NCBI GI NO: 34904314 NR Description: unnamed protein product
  misc_feature (1)..(86): NCBI GI NO: 34904314 NR Description: unnamed protein product
  misc_feature (1)..(147): NCBI GI NO: 34911088 NR Description: OJ1117_G01.11
  misc_feature (23)..(97): NCBI GI NO: 15235556 NR Description: AUX/IAA family [Arabidopsis thaliana]
  misc_feature (86)..(147): NCBI GI NO: 15235556 NR Description: AUX/IAA family [Arabidopsis thaliana]
  misc_feature (96)..(147): NCBI GI NO: 7442237 NR Description: GH1 protein - soybean (fragment)
  misc_feature (23)..(56): NCBI GI NO: 7442237 NR Description: GH1 protein - soybean (fragment)
  misc_feature (96)..(147): NCBI GI NO: 6136832 NR Description: CS-IAA2 [Cucumis sativus]
  misc_feature (17)..(43): NCBI GI NO: 6136832 NR Description: CS-IAA2 [Cucumis sativus]
  misc_feature (51)..(147): NCBI GI NO: 25989504 NR Description: Aux/IAA protein [Solanum tuberosum]
MSPPLELDYIGLSAAAGGRPDDDLKGTELRLGLPGCESPDRRPVAATTTLELLPAKGAKRGFSDEVVPPAPISAAGKGKEASGDEKDKKVAAPPQPAAKAQVVGWPPVRSYRKNTMATTTNQLKSSKEDSDTKQGQEFLYVKVSMDGCALPEEG

SEQ ID NO: 13393 - protein, 133 aa, Triticum aestivum
  peptide (1)..(133): Ceres Seq. ID no. 13596961
TTTTPHLLVSLCPSPSSYSNQTTSSTPPSPSSVLTLPLLLLPSSCPAASHVAASRARLHRPLGRRRRPPGRRPERHRAPPRTSRLRVARPPPGRRHHHTGAAARQGGQARVFGRGRAACADFRRRERQGGVRG

SEQ ID NO: 13394 - DNA, 1603 bp, Triticum aestivum
  misc_feature (1)..(1603): Ceres Seq. ID no. 13596962
gtcgtataactcggggtccaatttgcaaagagacagacgcccgttcttttactgcgagacctccgcgctcgtgggcaacggcggcggcgatggcggcatcggcgagcacgtccggcgagtggctgaagggcgccctgcaggaactgaggggccgcacggggagcgccctggagctcgacgacggcctcatctccggcctcgtctccttctgcgagctcgcgcctccgcccgacgcggccgactacctcgcgaatattgttggagcagaagctgcgcaggacctcattcaggagtacttgcagaggaggggctacattgacccctcaaaaggagctggaagctcgcagtcgtctaatcttcagccttatttgaagccatctgctgatgcagcaactgcccaaacaaagaaacagacacgtacacaaaaagatccagcatcttcttctagtcagagttccaagagtcaatcagatgctgctgacacccatgctgcctccaagagaggtccaaaaaagaagggaggaaaggccatctcccttgctgaggcagcaaagggctctattgtcttcaagcaggggaaaccttgttcatgccaagcacggctgcacaatcttgttagcaactgtttatcatgtggaaaaattgtgtgtgaacaagagggcgagggaccatgtagtttctgtggctcacttgtcttgatggaaggtagtacatatgcgggtttaagtgatgttggagttcctctttcggacacagaagttgcagctgaagcttatgcaaagaggcttgttgactatgacagaaactctgcggcaagaactaaagtttatgatgaccaaagtgactattttgaaatggaaggaaatagctggctctcatctaaggaaaagacaaacctaaagaaggtgcacgacgaagctcaggatgcagctgaaaaacaaaaggggaaagtgacggtcacatttgatttggtgggccgtaaggtaattttgaacaaggacgaagccgcagagtcggaatctgaccaagggatcatgagaccactagaacagaagcatcaggttcaacgcatacagcccagcccctcgatcagagagcaaccagtcttcgttgaaacaggacctgtgaagccgagaaccgacagggtaaaacagagcaagaaactcggaaagaatggcttgtgcctggaggtaaccggaagggtgcagcatgatgacaaggatccccagagctttcttggtggcaagatgaagaagggtgatcatctcgcgtacagttcctccggtgaagttcgtgaaggtgatgactacgagtgctcccttgattttgattgagcgttactgcaaattttgatgcgctcgagtgccttcacattgtacttgcttatcccatttcatacgggttggattgtggtctggtcaagtttccagctagaggtattttggaaaggtttgcttcgggatcatatcattcaactaaagttgtcaggccgggtaggctttgagggtcttgaacatattaagtaaaagattaagcacggagcttaaaaaattatgatcctgaaaaaaaaaaaaaaaaaagcttatcgataccgtcgacctcg

SEQ ID NO: 13395 - protein, 443 aa, Triticum aestivum
  peptide (1)..(443): Ceres Seq. ID no. 13596963
  misc_feature (191)..(241): Pfam Name: Pfam Description:  Putative zinc finger motif, C2HC5-type
  misc_feature (38)..(443): NCBI GI NO: 15228204 NR Description: expressed protein [Arabidopsis thaliana]
  misc_feature (77)..(231): NCBI GI NO: 37606133 NR Description: SI:dZ221I3
  misc_feature (208)..(329): NCBI GI NO: 37606133 NR Description: SI:dZ221I3
  misc_feature (208)..(374): NCBI GI NO: 34864260 NR Description: similar to ASC-1 [Rattus norvegicus]
  misc_feature (126)..(231): NCBI GI NO: 34864260 NR Description: similar to ASC-1 [Rattus norvegicus]
  misc_feature (167)..(348): NCBI GI NO: 24643521 NR Description: CG11710-PA [Drosophila melanogaster]
  misc_feature (167)..(348): NCBI GI NO: 20129087 NR Description: CG11710-PB [Drosophila melanogaster]
  misc_feature (208)..(340): NCBI GI NO: 703112 NR Description: thyroid receptor interactor
  misc_feature (208)..(340): NCBI GI NO: 26332983 NR Description: unnamed protein product [Mus musculus]
  misc_feature (208)..(340): NCBI GI NO: 9790043 NR Description: thyroid hormone receptor interactor 4
RITRGPICKETDARSFTARPPRSWATAAAMAASASTSGEWLKGALQELRGRTGSALELDDGLISGLVSFCELAPPPDAADYLANIVGAEAAQDLIQEYLQRRGYIDPSKGAGSSQSSNLQPYLKPSADAATAQTKKQTRTQKDPASSSSQSSKSQSDAADTHAASKRGPKKKGGKAISLAEAAKGSIVFKQGKPCSCQARLHNLVSNCLSCGKIVCEQEGEGPCSFCGSLVLMEGSTYAGLSDVGVPLSDTEVAAEAYAKRLVDYDRNSAARTKVYDDQSDYFEMEGNSWLSSKEKTNLKKVHDEAQDAAEKQKGKVTVTFDLVGRKVILNKDEAAESESDQGIMRPLEQKHQVQRIQPSPSIREQPVFVETGPVKPRTDRVKQSKKLGKNGLCLEVTGRVQHDDKDPQSFLGGKMKKGDHLAYSSSGEVREGDDYECSLDFD

SEQ ID NO: 13396 - protein, 414 aa, Triticum aestivum
  peptide (1)..(414): Ceres Seq. ID no. 13596964
  misc_feature (162)..(212): Pfam Name: Pfam Description:  Putative zinc finger motif, C2HC5-type
  misc_feature (9)..(414): NCBI GI NO: 15228204 NR Description: expressed protein [Arabidopsis thaliana]
  misc_feature (48)..(202): NCBI GI NO: 37606133 NR Description: SI:dZ221I3
  misc_feature (179)..(300): NCBI GI NO: 37606133 NR Description: SI:dZ221I3
  misc_feature (179)..(345): NCBI GI NO: 34864260 NR Description: similar to ASC-1 [Rattus norvegicus]
  misc_feature (97)..(202): NCBI GI NO: 34864260 NR Description: similar to ASC-1 [Rattus norvegicus]
  misc_feature (138)..(319): NCBI GI NO: 24643521 NR Description: CG11710-PA [Drosophila melanogaster]
  misc_feature (138)..(319): NCBI GI NO: 20129087 NR Description: CG11710-PB [Drosophila melanogaster]
  misc_feature (179)..(311): NCBI GI NO: 703112 NR Description: thyroid receptor interactor
  misc_feature (179)..(311): NCBI GI NO: 26332983 NR Description: unnamed protein product [Mus musculus]
  misc_feature (179)..(311): NCBI GI NO: 9790043 NR Description: thyroid hormone receptor interactor 4
MAASASTSGEWLKGALQELRGRTGSALELDDGLISGLVSFCELAPPPDAADYLANIVGAEAAQDLIQEYLQRRGYIDPSKGAGSSQSSNLQPYLKPSADAATAQTKKQTRTQKDPASSSSQSSKSQSDAADTHAASKRGPKKKGGKAISLAEAAKGSIVFKQGKPCSCQARLHNLVSNCLSCGKIVCEQEGEGPCSFCGSLVLMEGSTYAGLSDVGVPLSDTEVAAEAYAKRLVDYDRNSAARTKVYDDQSDYFEMEGNSWLSSKEKTNLKKVHDEAQDAAEKQKGKVTVTFDLVGRKVILNKDEAAESESDQGIMRPLEQKHQVQRIQPSPSIREQPVFVETGPVKPRTDRVKQSKKLGKNGLCLEVTGRVQHDDKDPQSFLGGKMKKGDHLAYSSSGEVREGDDYECSLDFD

SEQ ID NO: 13397 - DNA, 1774 bp, Triticum aestivum
  misc_feature (1)..(1774): Ceres Seq. ID no. 12625335
aacctctcgcataggcataggcagagcagacccacccgctgcagacctggaccaccggtcacgaggccacgcgtcagggaaacaccctctccctctccggcagaaaacggaggtggacgtcgtccacctttgccggccccgttcttaatgccgcgcggtaatcgccgcgagcttctactacagtcaccggaggtccggaggccggagcgcactgtgaggcgtcacatgggatgggcttgtacgtacgtacgctagctggcactccacatttattacggcagtcggcaggttgcccatcccctcccatcccctcccgtcgcggccgccgtcccttcccttctcgcctccaggtccaggtcccggcccgctttaaatccgcccctggcctcccttccggcctccctccctccctcgctcgccgctgcttagtggagtagtataatcagtacagataattattggcagccagatattttcgtccgctcagttcagttcaccacccgcggtggccgccagtgcccggatcgccgatcgacagatggacgcggccatatccgccgcccacgaagcgccgcccgctgtcgtcctcgtctccgccggcgccagccactccgtcgccctcctcgcgggcaatgtgctgtgcacgtggggcaggggagaggacgggcagctgggccacggggacgccgaggaccgcctcgtgccgacggtgatcagcggcttcgacgcgccggggatcacgtccgtcatctgcggggcggaccacaccaccgcctactccgaggacgagcaccaggtctacagctggggttggggggatttcgggaggctggggcacggcaactccaccgacgtgttcacgccccagccggtcaaggcgctgcaggggataaagatcaagcagctcgcctgtggggatagccactgtctggccgtcaccatggccggtgaagtgctcagctgggggcgtaaccaaaatggccagcttggtcttggaactactgaagattcgctgctcccacaaacgattcaagcttttgagggtatttctgtgaacatgattgctgctggtgccgaacatactgctgcagtaactgaagatggcgaaatctatggatggggctggggtcggtacggaaacttgggtcttggtgatcggaatgaccgatttgttcctgaaaaagtatcttcggtgtccctggcgccttcacccccacctgcagcaatcagcatgtaccaggcttcattactcaggccgaggagctcaaagccaagggtgtagatgagatcctgcttgtcagcgttaatgacccctttgtcatgaaagcatgggcgaagacatacccagacaacaagcatgtgaagttccttgctgatggagcggcagcatacacaaaagcacttggtcttgagcttgatcttacggagaaaggattgggtcttcgttcgaggcggtttgctctccttgctgacgacctcaaggtcaccgtcgcaaacgtcgaggaaggtggccagttcacaatctctggtgccgaggagatcctcaaggcactgtaggagcttcagcgcttcggaatcgcagcgatcacccaaaccttgtgtcatatcgatgtagtttgaacttgtctgccgaactactagtgggaataaattgtcaatgtgcatttcttcatgtactttatgtgcggtgcaagtgacttcagagttttccggtcaaattgttggttgtgttgcaaacattctgagattgttcaaggaaaatggtgtgggtggt

SEQ ID NO: 13398 - protein, 247 aa, Triticum aestivum
  peptide (1)..(247): Ceres Seq. ID no. 12625336
  misc_feature (137)..(185): Pfam Name: RCC1 Pfam Description: Regulator of chromosome condensation
  misc_feature (2)..(219): NCBI GI NO: 21741206 NR Description: OSJNBb0086G13.1
  misc_feature (7)..(218): NCBI GI NO: 11358913 NR Description: UVB-resistance protein UVR8
  misc_feature (7)..(218): NCBI GI NO: 15237540 NR Description: UVB-resistance protein UVR8 (gb|AAD43920
  misc_feature (18)..(216): NCBI GI NO: 11358913 NR Description: UVB-resistance protein UVR8
  misc_feature (18)..(216): NCBI GI NO: 15237540 NR Description: UVB-resistance protein UVR8 (gb|AAD43920
  misc_feature (1)..(220): NCBI GI NO: 15237540 NR Description: UVB-resistance protein UVR8 (gb|AAD43920
  misc_feature (1)..(220): NCBI GI NO: 11358913 NR Description: UVB-resistance protein UVR8
  misc_feature (19)..(219): NCBI GI NO: 27923092 NR Description: HERC2 [Homo sapiens]
  misc_feature (8)..(221): NCBI GI NO: 11358913 NR Description: UVB-resistance protein UVR8
  misc_feature (15)..(221): NCBI GI NO: 15237540 NR Description: UVB-resistance protein UVR8 (gb|AAD43920
MDAAISAAHEAPPAVVLVSAGASHSVALLAGNVLCTWGRGEDGQLGHGDAEDRLVPTVISGFDAPGITSVICGADHTTAYSEDEHQVYSWGWGDFGRLGHGNSTDVFTPQPVKALQGIKIKQLACGDSHCLAVTMAGEVLSWGRNQNGQLGLGTTEDSLLPQTIQAFEGISVNMIAAGAEHTAAVTEDGEIYGWGWGRYGNLGLGDRNDRFVPEKVSSVSLAPSPPPAAISMYQASLLRPRSSKPRV

SEQ ID NO: 13399 - DNA, 1379 bp, Triticum aestivum
  misc_feature (1)..(1379): Ceres Seq. ID no. 13598413
acgtcttctccttctctaccttctccccatcaagaacccaatccaaacctcagcttcgaacgaatcccaagcgattccccaagaggtttcattttgcgtcagatcaagcccagaatccgccactacccgccgagtgaagtagagcggcgagcggcgaggagggaccatggcgtcgttgccagaggaggaggaggccttcgagcacacgctgctggtggtgcgcgaggtgtcggtgttcaagatcccgccgcgcaccaccagcggcggctacaagtgcggcgagtggctgcagacggacaagatctggacgggccgcctccgcgtggtgtcgtgcggcgaccgctgcgagatccggctcgaggacccgggctccggggacctcttcgccgcctgcttcgtgctgcccggccagagggacagcgccgtcgagaccgtgctcgactcgtcgcgctacttcgtgctccgcatcgaggacggcagggggaagcatgccttcgtcggcctgggcttcggcgagcgcaatgaggccttcgacttcaacgtggccctgtcggatcacgagaagtatgtcaagagggagcaagataaggagaccggtggcgaggaggcagacgacagccagattgacatccacccggcagtgaatcgccggctcaaggaaggtgaaaccattaggataaacgtgaaaaacaagccatcaactggaagtggcatgctttcctctgctggcttatctggtggggccactgaaaaacctaaagcaagcatgcttcttgcaccaccgccaggtgcaaccgggaagcttcggtctccgctcccacctccccctaatgactctgcatctgcaagaatgagttctggacccaatgctggaaccagggcctcaaaagaacctaccaagaaaagcatcgaccccttttcagatatttctgctatagagcgaagcctaccctcgtctactgaactgggacaaacaaaaagcaccggtgccggatgggcagcattttgacaacagaatgccatctgctgtgtcacagacaaagaaaattgtgtgactgaaaaagtacacaaaatttctactcactggagcttgtaccctatgaaatcacatggtgaaaaatgacgatctgcatccacttggtacttgaaaaataaacctttggggaggtgctgttatctatcaaggcatcaacccgcatggattcagggagcttcgaaagtctgaatattttcctgaatagaagtgtgggtttccttgtttgtcatatttgtgtttgccagatctcatatactgatacaagaatcatactgacctccacttgtatttctgtcctgaaagattcgagagtactgtttatgcgaaaagcttgttttattct

SEQ ID NO: 13400 - protein, 280 aa, Triticum aestivum
  peptide (1)..(280): Ceres Seq. ID no. 13598414
  misc_feature (6)..(280): NCBI GI NO: 37535352 NR Description: unknown protein
  misc_feature (6)..(280): NCBI GI NO: 18379172 NR Description: expressed protein [Arabidopsis thaliana]
  misc_feature (6)..(260): NCBI GI NO: 14596175 NR Description: Unknown protein [Arabidopsis thaliana]
  misc_feature (6)..(280): NCBI GI NO: 25406749 NR Description: hypothetical protein
  misc_feature (7)..(280): NCBI GI NO: 10435511 NR Description: unnamed protein product [Homo sapiens]
  misc_feature (7)..(280): NCBI GI NO: 8922416 NR Description: hypothetical protein FLJ10420 [Homo sapiens]
  misc_feature (7)..(280): NCBI GI NO: 13384758 NR Description: RIKEN cDNA 1110005F07 [Mus musculus]
  misc_feature (8)..(263): NCBI GI NO: 27229051 NR Description: RIKEN cDNA 1200016B17 [Mus musculus]
  misc_feature (8)..(263): NCBI GI NO: 34858413 NR Description: similar to RIKEN cDNA 1200016B17
  misc_feature (8)..(280): NCBI GI NO: 37589671 NR Description: Unknown (protein for MGC:73124) [Danio rerio]
MASLPEEEEAFEHTLLVVREVSVFKIPPRTTSGGYKCGEWLQTDKIWTGRLRVVSCGDRCEIRLEDPGSGDLFAACFVLPGQRDSAVETVLDSSRYFVLRIEDGRGKHAFVGLGFGERNEAFDFNVALSDHEKYVKREQDKETGGEEADDSQIDIHPAVNRRLKEGETIRINVKNKPSTGSGMLSSAGLSGGATEKPKASMLLAPPPGATGKLRSPLPPPPNDSASARMSSGPNAGTRASKEPTKKSIDPFSDISAIERSLPSSTELGQTKSTGAGWAAF

SEQ ID NO: 13401 - protein, 174 aa, Triticum aestivum
  peptide (1)..(174): Ceres Seq. ID no. 13598415
TSSPSLPSPHQEPNPNLSFERIPSDSPRGFILRQIKPRIRHYPPSEVERRAARRDHGVVARGGGGLRAHAAGGARGVGVQDPAAHHQRRLQVRRVAADGQDLDGPPPRGVVRRPLRDPARGPGLRGPLRRLLRAARPEGQRRRDRARLVALLRAPHRGRQGEACLRRPGLRRAQ

SEQ ID NO: 13402 - DNA, 462 bp, Triticum aestivum
  misc_feature (1)..(462): Ceres Seq. ID no. 13655305
gcactcccgcctctcccaaatcctagggtttctcgatccacccctccctcacaccccgccgccgccgccgccgccgtcgccgtccgccgcactcccgagggtttctcgatccacccccgcccccttcgcgccccgccgccgccggcccccgcccgcccgcgaagatgttggagctgaggctggtgcaggggagcctgctgaagaaggtgctggaggcgatcaaggagctggtgacggacgccaacttcgactgctccgggacgggcttctcgctgcaggccatggactcctcccacgtcgcgctcgtcgccctgctcctccgctccgagggattcgagcactaccgctgcgaccgcaacctctccatgggcatgaacctcggcaacatggccaagatgctccgctgcgcgggcaacgacgacatcatcaccatcaaggccgacgacggctccgacaccgtca

SEQ ID NO: 13403 - protein, 153 aa, Triticum aestivum
  peptide (1)..(153): Ceres Seq. ID no. 13655306
  misc_feature (16)..(80): Pfam Name: Pfam Description:  TT viral ORF2
HSRLSQILGFLDPPLPHTPPPPPPPSPSAALPRVSRSTPAPFAPRRRRPPPAREDVGAEAGAGEPAEEGAGGDQGAGDGRQLRLLRDGLLAAGHGLLPRRARRPAPPLRGIRALPLRPQPLHGHEPRQHGQDAPLRGQRRHHHHQGRRRLRHR

SEQ ID NO: 13404 - protein, 99 aa, Triticum aestivum
  peptide (1)..(99): Ceres Seq. ID no. 13655307
  misc_feature (1)..(98): Pfam Name: Pfam Description:  Proliferating cell nuclear antigen
  misc_feature (1)..(98): NCBI GI NO: 129697 NR Description: PROLIFERATING CELL NUCLEAR ANTIGEN (PCNA) (CYCLIN)
  misc_feature (1)..(98): NCBI GI NO: 4099508 NR Description: proliferating cell nuclear antigen [Zea mays]
  misc_feature (1)..(98): NCBI GI NO: 2499442 NR Description: PROLIFERATING CELL NUCLEAR ANTIGEN (PCNA)
  misc_feature (1)..(98): NCBI GI NO: 10946427 NR Description: proliferating cell nuclear antigen
  misc_feature (1)..(98): NCBI GI NO: 3608175 NR Description: proliferating cell nuclear antigen [Pisum sativum]
  misc_feature (1)..(98): NCBI GI NO: 3947727 NR Description: proliferating cell nuclear antigen
  misc_feature (1)..(98): NCBI GI NO: 4406225 NR Description: proliferating cell nuclear antigen II
  misc_feature (1)..(98): NCBI GI NO: 15227564 NR Description: proliferating cell nuclear antigen, PCNA -related
  misc_feature (1)..(98): NCBI GI NO: 100160 NR Description: proliferating cell nuclear antigen (clone 4
  misc_feature (1)..(98): NCBI GI NO: 129692 NR Description: PROLIFERATING CELL NUCLEAR ANTIGEN (PCNA) (CYCLIN)
MLELRLVQGSLLKKVLEAIKELVTDANFDCSGTGFSLQAMDSSHVALVALLLRSEGFEHYRCDRNLSMGMNLGNMAKMLRCAGNDDIITIKADDGSDTV

SEQ ID NO: 13405 - DNA, 1146 bp, Triticum aestivum
  misc_feature (1)..(1146): Ceres Seq. ID no. 12616093
atcgcctcgtcatccgcagctccactttccagtccgcagtgaccgccgccgccgccacctccacccgctcctcacctaccccggcggcgaccccccaggtacaccccgaatggcgacggcggtcacggcgtcggccaccgcggcgacccgcttcacgcgcctggcgggcgtcgccctccggcgcagcagctgccgcccccgcaccgcggtgcgcttccagcgcccggggctcaccaccaccgcgctcctcaggcccaccgagctcaagcccaaggaccagggccagcccgagacgctcgactaccgcgtcttcctcgtcgacggcgccgaccgcaaggtgtccccgtggcacgacgtgccgctccgcgccggggacggggcgttccacttcatcgtggagatccccaaggagagcagcgccaagatggaggtcgccaccgacgaggcctacacgcccatcaagcaggacaccaagaagggcaaccttcgttactacccgtacaacatcaactggaactacgggttacttccccagacatgggaggacccgacagctgcaaatgctgatgttgaaggagcacttggagacaatgatcctgttgatgttgtcgagattggtgaaagacgggccaatattggggatgttcttagggtgaaaccattggcagctttagcaatgatcgacgagggagagcttgactggaaaattgtggccatctctctggatgatcccaaagcatctcttgtgaatgatgtagatgatgtcgaggagcattttccgggaacattgactgcaatcagagactggttcagagactacaagataccagacggaaagcccgccaacagattcggcctcggcaacaagcccacaagcaaggaatatgccctgaaggtgatagaagaaaccaacgagtcatgggagaaattggtgaagaggaaaatcccggcgggagagctctcgctagcctagccttttacaggcccatgagaagccaacaacacattctttcagtgacatactactccctcctaagcgtgctgctctttcgtgacgtgtacctacgaacaagcttcttcatctgcagaacattccgtgtgcctgttaaaacaggaataaaaatgaataacctggttgtggagcgg

SEQ ID NO: 13406 - protein, 323 aa, Triticum aestivum
  peptide (1)..(323): Ceres Seq. ID no. 12616094
  misc_feature (129)..(309): Pfam Name: Pfam Description:  Inorganic pyrophosphatase
  misc_feature (38)..(322): NCBI GI NO: 15242465 NR Description: inorganic pyrophosphatase - like protein
  misc_feature (38)..(322): NCBI GI NO: 21592878 NR Description: inorganic pyrophosphatase-like protein
  misc_feature (54)..(322): NCBI GI NO: 14571671 NR Description: inorganic pyrophosphatase precursor
  misc_feature (34)..(317): NCBI GI NO: 17539266 NR Description: Inorganic pyrophosphatase [Caenorhabditis elegans]
  misc_feature (34)..(317): NCBI GI NO: 39585749 NR Description: Hypothetical protein CBG03439
  misc_feature (92)..(317): NCBI GI NO: 25290351 NR Description: protein C47E12.4
  misc_feature (94)..(314): NCBI GI NO: 26353394 NR Description: unnamed protein product [Mus musculus]
  misc_feature (91)..(314): NCBI GI NO: 34852506 NR Description: similar to RIKEN cDNA 2010317E03
  misc_feature (91)..(314): NCBI GI NO: 27754065 NR Description: RIKEN cDNA 2010317E03 [Mus musculus]
  misc_feature (91)..(314): NCBI GI NO: 585322 NR Description: Inorganic pyrophosphatase
SPRHPQLHFPVRSDRRRRHLHPLLTYPGGDPPGTPRMATAVTASATAATRFTRLAGVALRRSSCRPRTAVRFQRPGLTTTALLRPTELKPKDQGQPETLDYRVFLVDGADRKVSPWHDVPLRAGDGAFHFIVEIPKESSAKMEVATDEAYTPIKQDTKKGNLRYYPYNINWNYGLLPQTWEDPTAANADVEGALGDNDPVDVVEIGERRANIGDVLRVKPLAALAMIDEGELDWKIVAISLDDPKASLVNDVDDVEEHFPGTLTAIRDWFRDYKIPDGKPANRFGLGNKPTSKEYALKVIEETNESWEKLVKRKIPAGELSLA

SEQ ID NO: 13407 - protein, 287 aa, Triticum aestivum
  peptide (1)..(287): Ceres Seq. ID no. 12616095
  misc_feature (93)..(273): Pfam Name: Pfam Description:  Inorganic pyrophosphatase
  misc_feature (2)..(286): NCBI GI NO: 15242465 NR Description: inorganic pyrophosphatase - like protein
  misc_feature (2)..(286): NCBI GI NO: 21592878 NR Description: inorganic pyrophosphatase-like protein
  misc_feature (18)..(286): NCBI GI NO: 14571671 NR Description: inorganic pyrophosphatase precursor
  misc_feature (1)..(281): NCBI GI NO: 17539266 NR Description: Inorganic pyrophosphatase [Caenorhabditis elegans]
  misc_feature (1)..(281): NCBI GI NO: 39585749 NR Description: Hypothetical protein CBG03439
  misc_feature (56)..(281): NCBI GI NO: 25290351 NR Description: protein C47E12.4
  misc_feature (58)..(278): NCBI GI NO: 26353394 NR Description: unnamed protein product [Mus musculus]
  misc_feature (55)..(278): NCBI GI NO: 34852506 NR Description: similar to RIKEN cDNA 2010317E03
  misc_feature (55)..(278): NCBI GI NO: 27754065 NR Description: RIKEN cDNA 2010317E03 [Mus musculus]
  misc_feature (55)..(278): NCBI GI NO: 585322 NR Description: Inorganic pyrophosphatase
MATAVTASATAATRFTRLAGVALRRSSCRPRTAVRFQRPGLTTTALLRPTELKPKDQGQPETLDYRVFLVDGADRKVSPWHDVPLRAGDGAFHFIVEIPKESSAKMEVATDEAYTPIKQDTKKGNLRYYPYNINWNYGLLPQTWEDPTAANADVEGALGDNDPVDVVEIGERRANIGDVLRVKPLAALAMIDEGELDWKIVAISLDDPKASLVNDVDDVEEHFPGTLTAIRDWFRDYKIPDGKPANRFGLGNKPTSKEYALKVIEETNESWEKLVKRKIPAGELSLA

SEQ ID NO: 13408 - protein, 217 aa, Triticum aestivum
  peptide (1)..(217): Ceres Seq. ID no. 12616096
  misc_feature (24)..(149): Pfam Name: Pfam Description:  Progesterone receptor
  misc_feature (6)..(183): NCBI GI NO: 23510008 NR Description: hypothetical protein [Plasmodium falciparum 3D7]
  misc_feature (11)..(182): NCBI GI NO: 25143299 NR Description: pre-mRNA splicing SR protein related RSR-1 (68
  misc_feature (5)..(184): NCBI GI NO: 11360318 NR Description: probable mucin DKFZp434C196.1 - human (fragment)
  misc_feature (16)..(172): NCBI GI NO: 11360318 NR Description: probable mucin DKFZp434C196.1 - human (fragment)
  misc_feature (5)..(173): NCBI GI NO: 11360494 NR Description: antifreeze glycopeptide AFGP polyprotein precursor
  misc_feature (5)..(172): NCBI GI NO: 11360318 NR Description: probable mucin DKFZp434C196.1 - human (fragment)
  misc_feature (11)..(173): NCBI GI NO: 11360494 NR Description: antifreeze glycopeptide AFGP polyprotein precursor
  misc_feature (22)..(160): NCBI GI NO: 25143299 NR Description: pre-mRNA splicing SR protein related RSR-1 (68
  misc_feature (7)..(173): NCBI GI NO: 134780 NR Description: SPORE COAT PROTEIN SP96
  misc_feature (7)..(173): NCBI GI NO: 28828093 NR Description: similar to Dictyostelium discoideum (Slime mold)
RLVIRSSTFQSAVTAAAATSTRSSPTPAATPQVHPEWRRRSRRRPPRRPASRAWRASPSGAAAAAPAPRCASSARGSPPPRSSGPPSSSPRTRASPRRSTTASSSSTAPTARCPRGTTCRSAPGTGRSTSSWRSPRRAAPRWRSPPTRPTRPSSRTPRRATFVTTRTTSTGTTGYFPRHGRTRQLQMLMLKEHLETMILLMLSRLVKDGPILGMFLG

SEQ ID NO: 13409 - DNA, 1290 bp, Triticum aestivum
  misc_feature (1)..(1290): Ceres Seq. ID no. 13596993
atccgaatcttcccttgcaacaatcatccgtaaggccgtcatcgccttccgccccgcggccgcggggagacgcgatgcagggactccaccgccgctaccgatggatcaaggagtgggttccgcaggacctcgtcatcgccggcggcccgtgcgcgctttacaagtgggtgcgagaggataggttggctgctcttaagtccaaggacaaggaagaaggggcatgcactgcaaagcctgaccctgccactgaggttcttttcttatgcagctatgatggctgtgggaaaacttttgttgatgcaggtgctcttaggaaacatgcccacgtgcatggggagaggcagtatgtctgtcactacgagggatgtgggaagaaatttttagatagctctaagttgaagaggcattttcttattcatacaggcgagaagaacttcgtctgccctcatgaaggttgtggcaaggctttctcattggattttaatttgaaggcacacatgaaaacccattttgcggataactatcatatgtgtccatacccagaatgtggtcgaagatttacacaggaatctaaactaagggctcatttcagggcacagcatgagaagaatccaggtgggcctgtaatgaaccgcaatgcactaggagatcaccctcataacacagcgaaatctctggtaacaccaccagttccatcagctgatcgtccgtatgtctgcccttacgatgggtgtgccaaggcatacattcacgagtacaaacttaacctccatttgaagaaagagcaccccaaccactattcagatgctggtgctcaagctggtccgtcgaggggcacagtatcgaagaattcccgtagaagcaagccaaacctcacaaccagcatgccactcgccaagatctctaagcgcagcggttatacggtgccatctccagctgtcagtatccctgaggagcatcagtggccaaggaaggtgttgtacgaagatgatagtgaggagaccgaggaagagggagataaccttgaggaggggggattgagatacagagctgctagcgacggcgatgacgatgaggagacggaggaagaagaatgagagctatgggttgctgtgcacatagtttatgatcaccggactggattatagttctgcatacatgtaacaatacatattaagggtggctagttaggcagaaacttgtgggctgcatgtaggtgtctcaatttaaggctattaattaacttattaagaagggtaatagatcatcacgcttccgtgctgagaatcc

SEQ ID NO: 13410 - protein, 364 aa, Triticum aestivum
  peptide (1)..(364): Ceres Seq. ID no. 15222013
  misc_feature (237)..(262): Pfam Name: Pfam Description:  Zinc finger, C2H2 type
  misc_feature (72)..(320): NCBI GI NO: 4927259 NR Description: putative transcription repressor maize TRM protein
  misc_feature (33)..(285): NCBI GI NO: 30680251 NR Description: expressed protein [Arabidopsis thaliana]
  misc_feature (273)..(364): NCBI GI NO: 30680251 NR Description: expressed protein [Arabidopsis thaliana]
  misc_feature (33)..(364): NCBI GI NO: 4519673 NR Description: WREBP-2 [Nicotiana tabacum]
  misc_feature (33)..(337): NCBI GI NO: 18149203 NR Description: unknown protein [Arabidopsis thaliana]
  misc_feature (88)..(207): NCBI GI NO: 2565032 NR Description: transcription activator/repressor proteindelta/YY1
  misc_feature (88)..(203): NCBI GI NO: 30142720 NR Description: RIKEN cDNA 9630032G22 gene [Mus musculus]
  misc_feature (77)..(202): NCBI GI NO: 88893 NR Description: transcription repressor protein YY1 - human
  misc_feature (77)..(202): NCBI GI NO: 189174 NR Description: DNA-binding protein
  misc_feature (77)..(202): NCBI GI NO: 1079317 NR Description: transcription activator/repressor protein delta/YY1
PNLPLQQSSVRPSSPSAPRPRGDAMQGLHRRYRWIKEWVPQDLVIAGGPCALYKWVREDRLAALKSKDKEEGACTAKPDPATEVLFLCSYDGCGKTFVDAGALRKHAHVHGERQYVCHYEGCGKKFLDSSKLKRHFLIHTGEKNFVCPHEGCGKAFSLDFNLKAHMKTHFADNYHMCPYPECGRRFTQESKLRAHFRAQHEKNPGGPVMNRNALGDHPHNTAKSLVTPPVPSADRPYVCPYDGCAKAYIHEYKLNLHLKKEHPNHYSDAGAQAGPSRGTVSKNSRRSKPNLTTSMPLAKISKRSGYTVPSPAVSIPEEHQWPRKVLYEDDSEETEEEGDNLEEGGLRYRAASDGDDDEETEEEE

SEQ ID NO: 13411 - protein, 340 aa, Triticum aestivum
  peptide (1)..(340): Ceres Seq. ID no. 15222014
  misc_feature (213)..(238): Pfam Name: Pfam Description:  Zinc finger, C2H2 type
  misc_feature (48)..(296): NCBI GI NO: 4927259 NR Description: putative transcription repressor maize TRM protein
  misc_feature (9)..(261): NCBI GI NO: 30680251 NR Description: expressed protein [Arabidopsis thaliana]
  misc_feature (249)..(340): NCBI GI NO: 30680251 NR Description: expressed protein [Arabidopsis thaliana]
  misc_feature (9)..(340): NCBI GI NO: 4519673 NR Description: WREBP-2 [Nicotiana tabacum]
  misc_feature (9)..(313): NCBI GI NO: 18149203 NR Description: unknown protein [Arabidopsis thaliana]
  misc_feature (64)..(183): NCBI GI NO: 2565032 NR Description: transcription activator/repressor proteindelta/YY1
  misc_feature (64)..(179): NCBI GI NO: 30142720 NR Description: RIKEN cDNA 9630032G22 gene [Mus musculus]
  misc_feature (53)..(178): NCBI GI NO: 88893 NR Description: transcription repressor protein YY1 - human
  misc_feature (53)..(178): NCBI GI NO: 1079317 NR Description: transcription activator/repressor protein delta/YY1
  misc_feature (53)..(178): NCBI GI NO: 4507955 NR Description: YY1 transcription factor [Homo sapiens]
MQGLHRRYRWIKEWVPQDLVIAGGPCALYKWVREDRLAALKSKDKEEGACTAKPDPATEVLFLCSYDGCGKTFVDAGALRKHAHVHGERQYVCHYEGCGKKFLDSSKLKRHFLIHTGEKNFVCPHEGCGKAFSLDFNLKAHMKTHFADNYHMCPYPECGRRFTQESKLRAHFRAQHEKNPGGPVMNRNALGDHPHNTAKSLVTPPVPSADRPYVCPYDGCAKAYIHEYKLNLHLKKEHPNHYSDAGAQAGPSRGTVSKNSRRSKPNLTTSMPLAKISKRSGYTVPSPAVSIPEEHQWPRKVLYEDDSEETEEEGDNLEEGGLRYRAASDGDDDEETEEEE

SEQ ID NO: 13412 - protein, 199 aa, Triticum aestivum
  peptide (1)..(199): Ceres Seq. ID no. 15222015
  misc_feature (72)..(97): Pfam Name: Pfam Description:  Zinc finger, C2H2 type
  misc_feature (1)..(155): NCBI GI NO: 4927259 NR Description: putative transcription repressor maize TRM protein
  misc_feature (1)..(120): NCBI GI NO: 30680251 NR Description: expressed protein [Arabidopsis thaliana]
  misc_feature (108)..(199): NCBI GI NO: 30680251 NR Description: expressed protein [Arabidopsis thaliana]
  misc_feature (1)..(199): NCBI GI NO: 4519673 NR Description: WREBP-2 [Nicotiana tabacum]
  misc_feature (1)..(172): NCBI GI NO: 18149203 NR Description: unknown protein [Arabidopsis thaliana]
  misc_feature (1)..(42): NCBI GI NO: 2565032 NR Description: transcription activator/repressor proteindelta/YY1
  misc_feature (1)..(38): NCBI GI NO: 30142720 NR Description: RIKEN cDNA 9630032G22 gene [Mus musculus]
  misc_feature (1)..(37): NCBI GI NO: 88893 NR Description: transcription repressor protein YY1 - human
  misc_feature (1)..(37): NCBI GI NO: 4507955 NR Description: YY1 transcription factor [Homo sapiens]
  misc_feature (1)..(37): NCBI GI NO: 27545350 NR Description: YY1 transcription factor [Rattus norvegicus]
MKTHFADNYHMCPYPECGRRFTQESKLRAHFRAQHEKNPGGPVMNRNALGDHPHNTAKSLVTPPVPSADRPYVCPYDGCAKAYIHEYKLNLHLKKEHPNHYSDAGAQAGPSRGTVSKNSRRSKPNLTTSMPLAKISKRSGYTVPSPAVSIPEEHQWPRKVLYEDDSEETEEEGDNLEEGGLRYRAASDGDDDEETEEEE

SEQ ID NO: 13413 - DNA, 1230 bp, Triticum aestivum
  misc_feature (1)..(1230): Ceres Seq. ID no. 13655519
aggttttactagggtttttgctagtttgcgccgtcgatcgccgccgacccccgccacccgccgacgcatccctccttcccggcacagcgtacgggccatgagagacctccacctcccgctgaaccagacccagagggtccgcctcgaggccgcgctccacgagctccagacccttgcccccgcggccgcgtccgccgccgccgtcaccgtcgcggacaacatccccgtcaaccacgaggacaacatcctcaaagggcatggtacgacggatcaggatggggaggtggtggcgacgctgtgcggcgtggtggagcgggtcaacaagctcgtctacgtgaggacgctccgggctaggtataagccagaggttggtgatatcatagttggccgtgtcatcgagattgctccaaagcgctggcggttggagataaactttagccaagatgctgttttaatgctttcttcaatgaatttgcctgatggaattcagagaagaagaactgcggttgatgagcttaatatgcggagtatatttgaagaaaatgatgtcgtctgcgctgaagttcgtggtttccaacatgatggatctcttcatctacaagcaaggagtcaaaaatatggaaagcttcagagaggtcaattgctcacggtgcctgcgtatctggtaaaacgccggaagctgcatttccatcatctagagcagtatgacgtcgacctgatccttggctgcaacggtttcatctgggtcggtgagcacgtcgtggtgcgtgaaattgctgatttgaaggaagacgaacagaagctgagcgccgaagcggagacttttaccccaatagaaacaaggagacacatttgccgtcttgccaatgctgcacgcttgctttcagccctaggattcactctgactgttgagctgataattcagactgcggaagcgagcgtatcatcaaatgtcgagataaacgacatgctcggggctgaattctatgtccagacggcggagggagaggctaagcgtcgaggtgacctcctgggaaagaagaggtaatcatcttggccctgcctgcctggtttgctgtaaactgaaaatgctgacatgtacgggatatgtaaaaggaggtaatgccacccggtgcccttgtagcatacgacgattttgagattttggagcttgctccactgtagtgtgcattcgttttaagatggtattaagatatctgttattctgtc

SEQ ID NO: 13414 - protein, 348 aa, Triticum aestivum
  peptide (1)..(348): Ceres Seq. ID no. 13655520
  misc_feature (33)..(347): NCBI GI NO: 21741863 NR Description: OSJNBa0019D11.5
  misc_feature (33)..(340): NCBI GI NO: 15218790 NR Description: expressed protein [Arabidopsis thaliana]
  misc_feature (76)..(319): NCBI GI NO: 19113896 NR Description: conserved hypothetical protein
  misc_feature (45)..(311): NCBI GI NO: 20378673 NR Description: exonuclease [Phytophthora sojae]
  misc_feature (76)..(327): NCBI GI NO: 21450259 NR Description: homolog of Yeast RRP4
  misc_feature (76)..(327): NCBI GI NO: 19923403 NR Description: homolog of Yeast RRP4
  misc_feature (83)..(322): NCBI GI NO: 39584168 NR Description: Hypothetical protein CBG05449
  misc_feature (83)..(323): NCBI GI NO: 17544090 NR Description: Ribosomal RNA processing like (34.1 kD)
  misc_feature (79)..(249): NCBI GI NO: 21428348 NR Description: GM02257p [Drosophila melanogaster]
  misc_feature (79)..(249): NCBI GI NO: 24762324 NR Description: CG3931-PA [Drosophila melanogaster]
GFTRVFASLRRRSPPTPATRRRIPPSRHSVRAMRDLHLPLNQTQRVRLEAALHELQTLAPAAASAAAVTVADNIPVNHEDNILKGHGTTDQDGEVVATLCGVVERVNKLVYVRTLRARYKPEVGDIIVGRVIEIAPKRWRLEINFSQDAVLMLSSMNLPDGIQRRRTAVDELNMRSIFEENDVVCAEVRGFQHDGSLHLQARSQKYGKLQRGQLLTVPAYLVKRRKLHFHHLEQYDVDLILGCNGFIWVGEHVVVREIADLKEDEQKLSAEAETFTPIETRRHICRLANAARLLSALGFTLTVELIIQTAEASVSSNVEINDMLGAEFYVQTAEGEAKRRGDLLGKKR

SEQ ID NO: 13415 - protein, 316 aa, Triticum aestivum
  peptide (1)..(316): Ceres Seq. ID no. 13655521
  misc_feature (1)..(315): NCBI GI NO: 21741863 NR Description: OSJNBa0019D11.5
  misc_feature (1)..(308): NCBI GI NO: 15218790 NR Description: expressed protein [Arabidopsis thaliana]
  misc_feature (44)..(287): NCBI GI NO: 19113896 NR Description: conserved hypothetical protein
  misc_feature (13)..(279): NCBI GI NO: 20378673 NR Description: exonuclease [Phytophthora sojae]
  misc_feature (44)..(295): NCBI GI NO: 21450259 NR Description: homolog of Yeast RRP4
  misc_feature (44)..(295): NCBI GI NO: 19923403 NR Description: homolog of Yeast RRP4
  misc_feature (51)..(290): NCBI GI NO: 39584168 NR Description: Hypothetical protein CBG05449
  misc_feature (51)..(291): NCBI GI NO: 17544090 NR Description: Ribosomal RNA processing like (34.1 kD)
  misc_feature (47)..(217): NCBI GI NO: 21428348 NR Description: GM02257p [Drosophila melanogaster]
  misc_feature (47)..(217): NCBI GI NO: 24762324 NR Description: CG3931-PA [Drosophila melanogaster]
MRDLHLPLNQTQRVRLEAALHELQTLAPAAASAAAVTVADNIPVNHEDNILKGHGTTDQDGEVVATLCGVVERVNKLVYVRTLRARYKPEVGDIIVGRVIEIAPKRWRLEINFSQDAVLMLSSMNLPDGIQRRRTAVDELNMRSIFEENDVVCAEVRGFQHDGSLHLQARSQKYGKLQRGQLLTVPAYLVKRRKLHFHHLEQYDVDLILGCNGFIWVGEHVVVREIADLKEDEQKLSAEAETFTPIETRRHICRLANAARLLSALGFTLTVELIIQTAEASVSSNVEINDMLGAEFYVQTAEGEAKRRGDLLGKKR

SEQ ID NO: 13416 - protein, 197 aa, Triticum aestivum
  peptide (1)..(197): Ceres Seq. ID no. 13655522
  misc_feature (1)..(196): NCBI GI NO: 21741863 NR Description: OSJNBa0019D11.5
  misc_feature (1)..(189): NCBI GI NO: 15218790 NR Description: expressed protein [Arabidopsis thaliana]
  misc_feature (1)..(168): NCBI GI NO: 19113896 NR Description: conserved hypothetical protein
  misc_feature (1)..(160): NCBI GI NO: 20378673 NR Description: exonuclease [Phytophthora sojae]
  misc_feature (1)..(176): NCBI GI NO: 21450259 NR Description: homolog of Yeast RRP4
  misc_feature (1)..(176): NCBI GI NO: 19923403 NR Description: homolog of Yeast RRP4
  misc_feature (1)..(171): NCBI GI NO: 39584168 NR Description: Hypothetical protein CBG05449
  misc_feature (1)..(172): NCBI GI NO: 17544090 NR Description: Ribosomal RNA processing like (34.1 kD)
  misc_feature (1)..(98): NCBI GI NO: 21428348 NR Description: GM02257p [Drosophila melanogaster]
  misc_feature (1)..(98): NCBI GI NO: 24762324 NR Description: CG3931-PA [Drosophila melanogaster]
MLSSMNLPDGIQRRRTAVDELNMRSIFEENDVVCAEVRGFQHDGSLHLQARSQKYGKLQRGQLLTVPAYLVKRRKLHFHHLEQYDVDLILGCNGFIWVGEHVVVREIADLKEDEQKLSAEAETFTPIETRRHICRLANAARLLSALGFTLTVELIIQTAEASVSSNVEINDMLGAEFYVQTAEGEAKRRGDLLGKKR

SEQ ID NO: 13417 - DNA, 2174 bp, Triticum aestivum
  misc_feature (1)..(2174): Ceres Seq. ID no. 12616176
aaaaacccctaaacccccaaaaaatggcggcgccgccggcacacctccgccgcctcctcctgccgcacctccgccggaaccgcctcttctccgcgctgaccgacaccccctcgcccccgccgcccgccccgacctcagacgccatcctctactcgctccgcggcctcgccaaggacccgccgcaggcgctctccctcttccggcgcgcggcggccgcgggccacccgctcggccccgcggcttacaacctcatgctccgcacgctcgcctccaccccggccgccgcgcgggcccacttctggcccttcctccgcgacatggacgccgccggccactccgtcgaccagggcacctacctcgccgccctcgcctccttcaagcgcgccagcctcgccaccgactacgccaccctctccgcccgcctcgccaagtcccgggacgaccacgccgcccaggccgccgccggcggcacccccgtcacctccctcgccgacgccgtccgcgggctcgacctcgaccagccgggggctgacgaggcgctcgaggagaagctggagggcgtcgccgagcagctgctgccgctcacggaggcggccgtggccggggtgctgcgggaggcgagggacgtcccggccaaggcgctcgctttcttccggtgggccggcaggcagaacggctacgagcacgggtccgtcgcctacaacgcgatggcgagggtgctcggccgggaggagtcgctgcgggagttctgggagctgatccaggagatgaagaccggcgagctgcacatcgacatcgacacctacatgaagctgtccaggcagttccagaagcgccacatgatgaccgaggccgtggagctctacgagctcatgatggacggcccctacaagcccgcgcagcaggacgggccgctgctcctccggcgcatcgccatggggccggagcccgacctcgagctggtgtaccgcgtcgtgaggaagttcgaggccgtctatgagttcaagaccaagaatgtgtttgacgggatccacagggcgctcaccagcaatggcaggttcgacgaggccgcggagatcgtggagaggatgagagccgctggccaccagccggacaacatcacgtatagccagctggtctttgggctgtgcaaggccaccaagtgcgatgaagctcgccaggtgctcgatgaaatggaggctgagggttgcacgccggacctgaagacctggaccatgttgatccaagggcactgtgccgccggggaggtggacaaggctctgcagtacttgacagagatgatcgagaaggacttggaagcagacgccgatttgctggatgtgatggtgaaaggtctgtgcaaacaggaaaagattgacgcggcttacactttgtttgttgagatggtggacactgccaagttgaacccttggcaaggaacttacaagcatatcattgccgagttgctgagggtgaagaaactcgaggaggcactgggccttcttaaatcaatgaaagcccgcaagtttccaccttttgcagaccccttcccttcaaacatcgctgaatacgggacgcttgaagatgccagggactttctgaaggccttgaaaggatcatctaataactatccgcagccccctgtctatgtgcagatgttcaaggcattctttgcagaggggagatactcagaagctcaggatttactctataaatgccccatccatatccgcaggcatcatgacatcaccgagctgtttgaaccaaaaaaagttcaggctactgcttgactgaagaacaataaattgttgagacggacttcctgcgcgatcggatgaaaactatgtggaagacgctgcctggaaggcatatccgatgtggtggtttctgacggagtttggcatgatagggattggcaacagaaacaagtcatatgttgataggtaggtagatatgctccctgcctgggaagatgcttcgtgcatcccacacgctagtactattatccgcagaatgtttatcacatgggcatcttgataattttatatatcctttattatacggttggaaatgtaacagtttatattctggaaagcgagagcacttggttgctgtcaaatttttacaacgcctttgctgcagttagaacttgcaggccttctgctggcagtgtc

SEQ ID NO: 13418 - protein, 595 aa, Triticum aestivum
  peptide (1)..(595): Ceres Seq. ID no. 12616177
  misc_feature (266)..(300): Pfam Name: Pfam Description:  PPR repeat
  misc_feature (24)..(593): NCBI GI NO: 34905990 NR Description: P0518C01.6
  misc_feature (39)..(586): NCBI GI NO: 15228363 NR Description: putative protein; protein id: At3g48250.1
  misc_feature (52)..(590): NCBI GI NO: 15232917 NR Description: unknown protein; protein id: At3g02490.1
  misc_feature (44)..(595): NCBI GI NO: 11357571 NR Description: hypothetical protein F1N13_120 - Arabidopsisthaliana
  misc_feature (44)..(595): NCBI GI NO: 22326834 NR Description: putative protein; protein id: At5g15980
  misc_feature (183)..(567): NCBI GI NO: 15239161 NR Description: putative protein; protein id: At5g65820.1
  misc_feature (194)..(531): NCBI GI NO: 15237375 NR Description: salt-inducible protein-like; protein id:At5g46100
  misc_feature (212)..(520): NCBI GI NO: 32488707 NR Description: OSJNBa0088H09.8
  misc_feature (183)..(565): NCBI GI NO: 15229604 NR Description: putative protein; protein id: At3g49730.1
  misc_feature (190)..(570): NCBI GI NO: 15233383 NR Description: putative protein; protein id: At4g20740.1
KPLNPQKMAAPPAHLRRLLLPHLRRNRLFSALTDTPSPPPPAPTSDAILYSLRGLAKDPPQALSLFRRAAAAGHPLGPAAYNLMLRTLASTPAAARAHFWPFLRDMDAAGHSVDQGTYLAALASFKRASLATDYATLSARLAKSRDDHAAQAAAGGTPVTSLADAVRGLDLDQPGADEALEEKLEGVAEQLLPLTEAAVAGVLREARDVPAKALAFFRWAGRQNGYEHGSVAYNAMARVLGREESLREFWELIQEMKTGELHIDIDTYMKLSRQFQKRHMMTEAVELYELMMDGPYKPAQQDGPLLLRRIAMGPEPDLELVYRVVRKFEAVYEFKTKNVFDGIHRALTSNGRFDEAAEIVERMRAAGHQPDNITYSQLVFGLCKATKCDEARQVLDEMEAEGCTPDLKTWTMLIQGHCAAGEVDKALQYLTEMIEKDLEADADLLDVMVKGLCKQEKIDAAYTLFVEMVDTAKLNPWQGTYKHIIAELLRVKKLEEALGLLKSMKARKFPPFADPFPSNIAEYGTLEDARDFLKALKGSSNNYPQPPVYVQMFKAFFAEGRYSEAQDLLYKCPIHIRRHHDITELFEPKKVQATA

SEQ ID NO: 13419 - protein, 588 aa, Triticum aestivum
  peptide (1)..(588): Ceres Seq. ID no. 12616178
  misc_feature (259)..(293): Pfam Name: Pfam Description:  PPR repeat
  misc_feature (17)..(586): NCBI GI NO: 34905990 NR Description: P0518C01.6
  misc_feature (32)..(579): NCBI GI NO: 15228363 NR Description: putative protein; protein id: At3g48250.1
  misc_feature (45)..(583): NCBI GI NO: 15232917 NR Description: unknown protein; protein id: At3g02490.1
  misc_feature (37)..(588): NCBI GI NO: 11357571 NR Description: hypothetical protein F1N13_120 - Arabidopsisthaliana
  misc_feature (37)..(588): NCBI GI NO: 22326834 NR Description: putative protein; protein id: At5g15980
  misc_feature (176)..(560): NCBI GI NO: 15239161 NR Description: putative protein; protein id: At5g65820.1
  misc_feature (187)..(524): NCBI GI NO: 15237375 NR Description: salt-inducible protein-like; protein id:At5g46100
  misc_feature (205)..(513): NCBI GI NO: 32488707 NR Description: OSJNBa0088H09.8
  misc_feature (176)..(558): NCBI GI NO: 15229604 NR Description: putative protein; protein id: At3g49730.1
  misc_feature (183)..(563): NCBI GI NO: 15233383 NR Description: putative protein; protein id: At4g20740.1
MAAPPAHLRRLLLPHLRRNRLFSALTDTPSPPPPAPTSDAILYSLRGLAKDPPQALSLFRRAAAAGHPLGPAAYNLMLRTLASTPAAARAHFWPFLRDMDAAGHSVDQGTYLAALASFKRASLATDYATLSARLAKSRDDHAAQAAAGGTPVTSLADAVRGLDLDQPGADEALEEKLEGVAEQLLPLTEAAVAGVLREARDVPAKALAFFRWAGRQNGYEHGSVAYNAMARVLGREESLREFWELIQEMKTGELHIDIDTYMKLSRQFQKRHMMTEAVELYELMMDGPYKPAQQDGPLLLRRIAMGPEPDLELVYRVVRKFEAVYEFKTKNVFDGIHRALTSNGRFDEAAEIVERMRAAGHQPDNITYSQLVFGLCKATKCDEARQVLDEMEAEGCTPDLKTWTMLIQGHCAAGEVDKALQYLTEMIEKDLEADADLLDVMVKGLCKQEKIDAAYTLFVEMVDTAKLNPWQGTYKHIIAELLRVKKLEEALGLLKSMKARKFPPFADPFPSNIAEYGTLEDARDFLKALKGSSNNYPQPPVYVQMFKAFFAEGRYSEAQDLLYKCPIHIRRHHDITELFEPKKVQATA

SEQ ID NO: 13420 - protein, 512 aa, Triticum aestivum
  peptide (1)..(512): Ceres Seq. ID no. 12616179
  misc_feature (183)..(217): Pfam Name: Pfam Description:  PPR repeat
  misc_feature (1)..(510): NCBI GI NO: 34905990 NR Description: P0518C01.6
  misc_feature (1)..(503): NCBI GI NO: 15228363 NR Description: putative protein; protein id: At3g48250.1
  misc_feature (1)..(507): NCBI GI NO: 15232917 NR Description: unknown protein; protein id: At3g02490.1
  misc_feature (1)..(512): NCBI GI NO: 11357571 NR Description: hypothetical protein F1N13_120 - Arabidopsisthaliana
  misc_feature (1)..(512): NCBI GI NO: 22326834 NR Description: putative protein; protein id: At5g15980
  misc_feature (100)..(484): NCBI GI NO: 15239161 NR Description: putative protein; protein id: At5g65820.1
  misc_feature (111)..(448): NCBI GI NO: 15237375 NR Description: salt-inducible protein-like; protein id:At5g46100
  misc_feature (129)..(437): NCBI GI NO: 32488707 NR Description: OSJNBa0088H09.8
  misc_feature (100)..(482): NCBI GI NO: 15229604 NR Description: putative protein; protein id: At3g49730.1
  misc_feature (107)..(487): NCBI GI NO: 15233383 NR Description: putative protein; protein id: At4g20740.1
MLRTLASTPAAARAHFWPFLRDMDAAGHSVDQGTYLAALASFKRASLATDYATLSARLAKSRDDHAAQAAAGGTPVTSLADAVRGLDLDQPGADEALEEKLEGVAEQLLPLTEAAVAGVLREARDVPAKALAFFRWAGRQNGYEHGSVAYNAMARVLGREESLREFWELIQEMKTGELHIDIDTYMKLSRQFQKRHMMTEAVELYELMMDGPYKPAQQDGPLLLRRIAMGPEPDLELVYRVVRKFEAVYEFKTKNVFDGIHRALTSNGRFDEAAEIVERMRAAGHQPDNITYSQLVFGLCKATKCDEARQVLDEMEAEGCTPDLKTWTMLIQGHCAAGEVDKALQYLTEMIEKDLEADADLLDVMVKGLCKQEKIDAAYTLFVEMVDTAKLNPWQGTYKHIIAELLRVKKLEEALGLLKSMKARKFPPFADPFPSNIAEYGTLEDARDFLKALKGSSNNYPQPPVYVQMFKAFFAEGRYSEAQDLLYKCPIHIRRHHDITELFEPKKVQATA

SEQ ID NO: 13421 - DNA, 1410 bp, Triticum aestivum
  misc_feature (1)..(1410): Ceres Seq. ID no. 12625507
ctctttggagcgttctccagtctccctccctctctctctctctccctctgaatctccgtaatcactgttccattccgtggttaggagatgagcaagccacggaagaaacgcaagtatctggatgaacattgctactggaaccacacagacgagcaagataagcgtttcttcaaggttatgattggcgacttccatgagagaatggtaagctattttcagatcataccagataggtttgtccaacatttcagggggcaaacaggacgaactattaagctagtatcacgccatggttatacttttgatgttcagattaccaagaatttggagaaactagtccttgattcgggatggaaggcgtttgctcgtgcccataatttgagaacgggggactttcttgtgttcaagtatgatggcaactctgaactgaaggttttgatctttggtccgagcggttgcgagaaaattccggtgtgcaatctcaagaaaaatgctgctcctggtaaagaatggtggggaaactctgctggcattgtaaacacttgtcacaatcttcccatgaaatttccacatagtggaagacaaattaggccaagcaaggataccttaaggcaggggaatgacatcatcaatgtcagctcgtcgagctctgcttcagattcagcagaagatgatcattccctgccaggttgtatcctcgcaaatggcaccctctcgaatctaaatcaggtgcagaagaaccaacttaaagaaaaaatcagagctatgaattccgaaatccccatttatgggtgtgccataaggaagagcagtatttacggaaaaacccgcacccttgaaatatcaagaaaatatgctgaagtataccttccatttgaggaacaaatgctgacccttcagcatcatggcaagaagtgggaagtgagatgtagtgttaagaaaagcaaaggcaaaaggcttttgacaggctggaagcattttgcgtgtggcaacaacttgcagctgggagatgtctgcctctttgagctactgagaaacaaaaagaagtatgcaatgaatgtctatatcattcgcaaatccctttacaagaggaaatgagcatctgaagaaaagctagccacaagattcaagaaacagaagtagcaaaaggagttttgggtaaggccagaagagtggagccctgacaatatactaaaggaaagagctcagagtacataataaagctcaggtccagttagtttcagctgctttttgtgttatcatggatgtaatacttttaaaaccttatgtttacctttatgtttaagtggatgaactgtagtgtcagacaggacaatattatgttagaggttattgcgtggacgtactgtgggtcatgtcaggacagagttacattatggtcagttgctc

SEQ ID NO: 13422 - protein, 336 aa, Triticum aestivum
  peptide (1)..(336): Ceres Seq. ID no. 12625508
  misc_feature (1)..(330): NCBI GI NO: 28201553 NR Description: putative auxin response factor
  misc_feature (145)..(330): NCBI GI NO: 28201561 NR Description: putative auxin response factor
  misc_feature (39)..(127): NCBI GI NO: 28201561 NR Description: putative auxin response factor
  misc_feature (1)..(291): NCBI GI NO: 28201553 NR Description: putative auxin response factor
  misc_feature (16)..(305): NCBI GI NO: 28201553 NR Description: putative auxin response factor
  misc_feature (6)..(195): NCBI GI NO: 28201552 NR Description: putative auxin response factor
  misc_feature (211)..(331): NCBI GI NO: 28201552 NR Description: putative auxin response factor
  misc_feature (184)..(331): NCBI GI NO: 28201552 NR Description: putative auxin response factor
  misc_feature (9)..(148): NCBI GI NO: 28201564 NR Description: putative auxin response factor
  misc_feature (211)..(331): NCBI GI NO: 28201564 NR Description: putative auxin response factor
MSKPRKKRKYLDEHCYWNHTDEQDKRFFKVMIGDFHERMVSYFQIIPDRFVQHFRGQTGRTIKLVSRHGYTFDVQITKNLEKLVLDSGWKAFARAHNLRTGDFLVFKYDGNSELKVLIFGPSGCEKIPVCNLKKNAAPGKEWWGNSAGIVNTCHNLPMKFPHSGRQIRPSKDTLRQGNDIINVSSSSSASDSAEDDHSLPGCILANGTLSNLNQVQKNQLKEKIRAMNSEIPIYGCAIRKSSIYGKTRTLEISRKYAEVYLPFEEQMLTLQHHGKKWEVRCSVKKSKGKRLLTGWKHFACGNNLQLGDVCLFELLRNKKKYAMNVYIIRKSLYKRK

SEQ ID NO: 13423 - protein, 306 aa, Triticum aestivum
  peptide (1)..(306): Ceres Seq. ID no. 12625509
  misc_feature (1)..(300): NCBI GI NO: 28201553 NR Description: putative auxin response factor
  misc_feature (115)..(300): NCBI GI NO: 28201561 NR Description: putative auxin response factor
  misc_feature (9)..(97): NCBI GI NO: 28201561 NR Description: putative auxin response factor
  misc_feature (1)..(261): NCBI GI NO: 28201553 NR Description: putative auxin response factor
  misc_feature (1)..(275): NCBI GI NO: 28201553 NR Description: putative auxin response factor
  misc_feature (1)..(165): NCBI GI NO: 28201552 NR Description: putative auxin response factor
  misc_feature (181)..(301): NCBI GI NO: 28201552 NR Description: putative auxin response factor
  misc_feature (154)..(301): NCBI GI NO: 28201552 NR Description: putative auxin response factor
  misc_feature (1)..(118): NCBI GI NO: 28201564 NR Description: putative auxin response factor
  misc_feature (181)..(301): NCBI GI NO: 28201564 NR Description: putative auxin response factor
MIGDFHERMVSYFQIIPDRFVQHFRGQTGRTIKLVSRHGYTFDVQITKNLEKLVLDSGWKAFARAHNLRTGDFLVFKYDGNSELKVLIFGPSGCEKIPVCNLKKNAAPGKEWWGNSAGIVNTCHNLPMKFPHSGRQIRPSKDTLRQGNDIINVSSSSSASDSAEDDHSLPGCILANGTLSNLNQVQKNQLKEKIRAMNSEIPIYGCAIRKSSIYGKTRTLEISRKYAEVYLPFEEQMLTLQHHGKKWEVRCSVKKSKGKRLLTGWKHFACGNNLQLGDVCLFELLRNKKKYAMNVYIIRKSLYKRK

SEQ ID NO: 13424 - protein, 298 aa, Triticum aestivum
  peptide (1)..(298): Ceres Seq. ID no. 12625510
  misc_feature (1)..(292): NCBI GI NO: 28201553 NR Description: putative auxin response factor
  misc_feature (107)..(292): NCBI GI NO: 28201561 NR Description: putative auxin response factor
  misc_feature (1)..(89): NCBI GI NO: 28201561 NR Description: putative auxin response factor
  misc_feature (1)..(253): NCBI GI NO: 28201553 NR Description: putative auxin response factor
  misc_feature (1)..(267): NCBI GI NO: 28201553 NR Description: putative auxin response factor
  misc_feature (1)..(157): NCBI GI NO: 28201552 NR Description: putative auxin response factor
  misc_feature (173)..(293): NCBI GI NO: 28201552 NR Description: putative auxin response factor
  misc_feature (146)..(293): NCBI GI NO: 28201552 NR Description: putative auxin response factor
  misc_feature (1)..(110): NCBI GI NO: 28201564 NR Description: putative auxin response factor
  misc_feature (173)..(293): NCBI GI NO: 28201564 NR Description: putative auxin response factor
MVSYFQIIPDRFVQHFRGQTGRTIKLVSRHGYTFDVQITKNLEKLVLDSGWKAFARAHNLRTGDFLVFKYDGNSELKVLIFGPSGCEKIPVCNLKKNAAPGKEWWGNSAGIVNTCHNLPMKFPHSGRQIRPSKDTLRQGNDIINVSSSSSASDSAEDDHSLPGCILANGTLSNLNQVQKNQLKEKIRAMNSEIPIYGCAIRKSSIYGKTRTLEISRKYAEVYLPFEEQMLTLQHHGKKWEVRCSVKKSKGKRLLTGWKHFACGNNLQLGDVCLFELLRNKKKYAMNVYIIRKSLYKRK

SEQ ID NO: 13425 - DNA, 1444 bp, Triticum aestivum
  misc_feature (1)..(1444): Ceres Seq. ID no. 12616181
accgcctcagaagttacgcaactgctctgctgcccaaaacctaaccatggcgcgagtccgcagcaatgggcggcgtgccggcggcagtggaggtggaggcggccgcggcggcaagggcaaaggaaaaggaaaaggcccgggcaagtggaagatgccgttgtcggtggcgcggaagcagcaggcggtgctggcgaacgtggaccaggtcaccggcgagaggatccccaagagcttcgtcttctcgcgcggcaagctcccctccacgcttcgtcacctacagcaggacctccgcaagctcatgctcccctacaccgccctcaagctcaaggagaagaagaggaacaacctcaaggacttcgtcaacgttgccagcccattgggtgttacgcatttcttgatcctctcgaacccaaagagcttgccgcacttgcgcttcgccaagtcaccgcagggcccaacctacacttgtcagattttagaatacgctcttgcggctgacatcgcaaactcccaaaagcggccaaggtgtcctgcagagatattcaaaaactcgcctctggtcgtgctcagtggtttcaatggcctgggcgagcctttcaagagttttgttaccttctttaggcatttggtccctgctattgacacagatactgttaagttatcaacctgtcaaagattattattgctacagtatgacaaagagacggaggctatcgatttccggcattactccatcaagctacagcctgttggggtcagccgcaagattagaaaactcatgcagaacaatcaagtgccagacctaagggatcttaaagatgttagtgattatgtgacaaaagctggatatggatcagaaagtgaaccagacgatgaagcagcgactgtaagtctagcaagtgatatagacaaattgaacagagcatcccgaaaaagtgccgtcagactccaagagatcggaccaagaatgaccatgcgcttagttaaggttgaatctgggctatgctcgggcgacatcttgtacccacaatctgttggaaaagaagatgtgaaggagggacaagaggaagaagagatagaagatgctgaggatatgatggagctggatgatgggacggaggaggacgactcggttgacgaagagtagcctagatgagctcgagaggtgctgagcagcagcctatgatgattgctaaaaatgtgaagcaactggtgtattgcgactaacattatgagtttagttgatccttgagaaagcatattctgagaaagcatatccttaacagaagtcactcttgaaaaagagagggataaatctcttgcagtgataatccttattttggtcgaatccgaatggtttttagccctgtaacatgatacatattctgtatttacctaagttttgccttaggagggtgcatataagcactagctgctgcgttcg

SEQ ID NO: 13426 - protein, 381 aa, Triticum aestivum
  peptide (1)..(381): Ceres Seq. ID no. 12616182
  misc_feature (55)..(381): NCBI GI NO: 30697571 NR Description: Peter Pan - like protein [Arabidopsis thaliana]
  misc_feature (55)..(381): NCBI GI NO: 30697573 NR Description: Peter Pan - like protein [Arabidopsis thaliana]
  misc_feature (58)..(349): NCBI GI NO: 21704228 NR Description: similar to peter pan homolog
  misc_feature (58)..(349): NCBI GI NO: 26332985 NR Description: unnamed protein product [Mus musculus]
  misc_feature (57)..(381): NCBI GI NO: 39794499 NR Description: Unknown (protein for MGC:76273)
  misc_feature (46)..(381): NCBI GI NO: 28422433 NR Description: Similar to peter pan homolog (Drosophila)
  misc_feature (57)..(374): NCBI GI NO: 28277332 NR Description: Similar to peter pan homolog (Drosophila)
  misc_feature (58)..(349): NCBI GI NO: 9910566 NR Description: peter pan homolog
  misc_feature (58)..(349): NCBI GI NO: 11877243 NR Description: SSF1/P2Y11 chimeric protein [Homo sapiens]
  misc_feature (75)..(351): NCBI GI NO: 31209775 NR Description: ENSANGP00000012208 [Anopheles gambiae]
PPQKLRNCSAAQNLTMARVRSNGRRAGGSGGGGGRGGKGKGKGKGPGKWKMPLSVARKQQAVLANVDQVTGERIPKSFVFSRGKLPSTLRHLQQDLRKLMLPYTALKLKEKKRNNLKDFVNVASPLGVTHFLILSNPKSLPHLRFAKSPQGPTYTCQILEYALAADIANSQKRPRCPAEIFKNSPLVVLSGFNGLGEPFKSFVTFFRHLVPAIDTDTVKLSTCQRLLLLQYDKETEAIDFRHYSIKLQPVGVSRKIRKLMQNNQVPDLRDLKDVSDYVTKAGYGSESEPDDEAATVSLASDIDKLNRASRKSAVRLQEIGPRMTMRLVKVESGLCSGDILYPQSVGKEDVKEGQEEEEIEDAEDMMELDDGTEEDDSVDEE

SEQ ID NO: 13427 - protein, 366 aa, Triticum aestivum
  peptide (1)..(366): Ceres Seq. ID no. 12616183
  misc_feature (40)..(366): NCBI GI NO: 30697571 NR Description: Peter Pan - like protein [Arabidopsis thaliana]
  misc_feature (40)..(366): NCBI GI NO: 30697573 NR Description: Peter Pan - like protein [Arabidopsis thaliana]
  misc_feature (43)..(334): NCBI GI NO: 21704228 NR Description: similar to peter pan homolog
  misc_feature (43)..(334): NCBI GI NO: 26332985 NR Description: unnamed protein product [Mus musculus]
  misc_feature (42)..(366): NCBI GI NO: 39794499 NR Description: Unknown (protein for MGC:76273)
  misc_feature (31)..(366): NCBI GI NO: 28422433 NR Description: Similar to peter pan homolog (Drosophila)
  misc_feature (42)..(359): NCBI GI NO: 28277332 NR Description: Similar to peter pan homolog (Drosophila)
  misc_feature (43)..(334): NCBI GI NO: 9910566 NR Description: peter pan homolog
  misc_feature (43)..(334): NCBI GI NO: 11877243 NR Description: SSF1/P2Y11 chimeric protein [Homo sapiens]
  misc_feature (60)..(336): NCBI GI NO: 31209775 NR Description: ENSANGP00000012208 [Anopheles gambiae]
MARVRSNGRRAGGSGGGGGRGGKGKGKGKGPGKWKMPLSVARKQQAVLANVDQVTGERIPKSFVFSRGKLPSTLRHLQQDLRKLMLPYTALKLKEKKRNNLKDFVNVASPLGVTHFLILSNPKSLPHLRFAKSPQGPTYTCQILEYALAADIANSQKRPRCPAEIFKNSPLVVLSGFNGLGEPFKSFVTFFRHLVPAIDTDTVKLSTCQRLLLLQYDKETEAIDFRHYSIKLQPVGVSRKIRKLMQNNQVPDLRDLKDVSDYVTKAGYGSESEPDDEAATVSLASDIDKLNRASRKSAVRLQEIGPRMTMRLVKVESGLCSGDILYPQSVGKEDVKEGQEEEEIEDAEDMMELDDGTEEDDSVDEE

SEQ ID NO: 13428 - protein, 331 aa, Triticum aestivum
  peptide (1)..(331): Ceres Seq. ID no. 12616184
  misc_feature (5)..(331): NCBI GI NO: 30697571 NR Description: Peter Pan - like protein [Arabidopsis thaliana]
  misc_feature (5)..(331): NCBI GI NO: 30697573 NR Description: Peter Pan - like protein [Arabidopsis thaliana]
  misc_feature (8)..(299): NCBI GI NO: 21704228 NR Description: similar to peter pan homolog
  misc_feature (8)..(299): NCBI GI NO: 26332985 NR Description: unnamed protein product [Mus musculus]
  misc_feature (7)..(331): NCBI GI NO: 39794499 NR Description: Unknown (protein for MGC:76273)
  misc_feature (1)..(331): NCBI GI NO: 28422433 NR Description: Similar to peter pan homolog (Drosophila)
  misc_feature (7)..(324): NCBI GI NO: 28277332 NR Description: Similar to peter pan homolog (Drosophila)
  misc_feature (8)..(299): NCBI GI NO: 9910566 NR Description: peter pan homolog
  misc_feature (8)..(299): NCBI GI NO: 11877243 NR Description: SSF1/P2Y11 chimeric protein [Homo sapiens]
  misc_feature (25)..(301): NCBI GI NO: 31209775 NR Description: ENSANGP00000012208 [Anopheles gambiae]
MPLSVARKQQAVLANVDQVTGERIPKSFVFSRGKLPSTLRHLQQDLRKLMLPYTALKLKEKKRNNLKDFVNVASPLGVTHFLILSNPKSLPHLRFAKSPQGPTYTCQILEYALAADIANSQKRPRCPAEIFKNSPLVVLSGFNGLGEPFKSFVTFFRHLVPAIDTDTVKLSTCQRLLLLQYDKETEAIDFRHYSIKLQPVGVSRKIRKLMQNNQVPDLRDLKDVSDYVTKAGYGSESEPDDEAATVSLASDIDKLNRASRKSAVRLQEIGPRMTMRLVKVESGLCSGDILYPQSVGKEDVKEGQEEEEIEDAEDMMELDDGTEEDDSVDEE

SEQ ID NO: 13429 - DNA, 1315 bp, Triticum aestivum
  misc_feature (1)..(1315): Ceres Seq. ID no. 13655371
ataaaccgtagcgtagcgcgcatagcactcgcacggagacatagcacattagtatcttagcaccttgctaaaccctgaagcttagagaactcgaagcgccataaatttaatggctagcccgacgaagctcgacatggccggccatggcgacgaggtgacgaggaacaagaaggtggtgctgaggaggtacgtgacaggctacccgacggcggaggacatggaggtggtcgtcacctccgacgtccggctgcgggtgccggaggggtcggcggccgccgtggtggtcaagaacctgtacctgtcctgcgacccgtggatgcgcggccgcatgaccaagcatgacgacggcgacgccgtgccggccgaggacttcgtgcttggagaggccttggtcaatttcaccgtcggcgaggtggtcgactcgacgcacccggagttcgacgccggtgacctcgtatggggcatgagtgcatgggaggagtacaccctcatcacccaaacggagggcctgttcaagatcaaccaccccgagctgccactctcacactacacaggtgttcttggcttggcagggctcactgcatatgctggacttttcgaggttggcaagccaaagcaaggtgaaactgtttttgtgtcggcagcatctggcgccgtcggtcaggttgtcggacagctcgccaagatcgcaggatgctatgtggttggaagtgccggctccgatgagaaggtgagtctcctgaagagcaagatgggcttcgacgacgcgttcaactacaagtcggagggggacaacctcggcgcggcgctcgggcggcgcctcccggacggcatcgacgtctacttcgacaacgtgggtggtgcgacgctggacgcggcattgctgcggatgcggccgggcggcagggtggtggcgtgcgggatgatctcacagtacaatctgtcggagcaccagggggtgcgcaacctgtggtgcatcatcccaaagcgcgtccgggtggagggcttctcctgcatggactaccaccacctgtaccccaggttcgaggaggagatggccgcctatatcaacgcagggaaggtgaccgtcgcggaggacgtcgtccgagggattgagaaggcgcctgaggctctggtgggcctgttttctgggagaaatgtgggcaagctgttggttgctcttgcatgagtcgtgagtgcaagtccatggaatgatgacttctttctgtgttttattgaataagattgtacctgtgggcttataattatgatcatgtaattgtaagctacaaaaattatacacttctgttttggt

SEQ ID NO: 13430 - protein, 359 aa, Triticum aestivum
  peptide (1)..(359): Ceres Seq. ID no. 13655372
  misc_feature (109)..(356): Pfam Name: Pfam Description:  Zinc-binding dehydrogenase
  misc_feature (19)..(359): NCBI GI NO: 38345384 NR Description: OSJNBa0067K08.13
  misc_feature (14)..(359): NCBI GI NO: 6692816 NR Description: allyl alcohol dehydrogenase [Nicotiana tabacum]
  misc_feature (9)..(359): NCBI GI NO: 15228456 NR Description: NADP-dependent oxidoreductase (P2), putative
  misc_feature (19)..(359): NCBI GI NO: 15237888 NR Description: NADP-dependent oxidoreductase (P1), putative
  misc_feature (16)..(359): NCBI GI NO: 15237890 NR Description: allyl alcohol dehydrogenase, putative
  misc_feature (19)..(359): NCBI GI NO: 21539447 NR Description: quinone oxidoreductase-like protein
  misc_feature (19)..(359): NCBI GI NO: 21595408 NR Description: quinone oxidoreductase-like protein
  misc_feature (16)..(359): NCBI GI NO: 21554121 NR Description: quinone oxidoreductase-like protein
  misc_feature (19)..(359): NCBI GI NO: 17529140 NR Description: putative quinone oxidoreductase
  misc_feature (17)..(359): NCBI GI NO: 15237883 NR Description: NADP-dependent oxidoreductase, putative
MASPTKLDMAGHGDEVTRNKKVVLRRYVTGYPTAEDMEVVVTSDVRLRVPEGSAAAVVVKNLYLSCDPWMRGRMTKHDDGDAVPAEDFVLGEALVNFTVGEVVDSTHPEFDAGDLVWGMSAWEEYTLITQTEGLFKINHPELPLSHYTGVLGLAGLTAYAGLFEVGKPKQGETVFVSAASGAVGQVVGQLAKIAGCYVVGSAGSDEKVSLLKSKMGFDDAFNYKSEGDNLGAALGRRLPDGIDVYFDNVGGATLDAALLRMRPGGRVVACGMISQYNLSEHQGVRNLWCIIPKRVRVEGFSCMDYHHLYPRFEEEMAAYINAGKVTVAEDVVRGIEKAPEALVGLFSGRNVGKLLVALA

SEQ ID NO: 13431 - protein, 351 aa, Triticum aestivum
  peptide (1)..(351): Ceres Seq. ID no. 13655373
  misc_feature (101)..(348): Pfam Name: Pfam Description:  Zinc-binding dehydrogenase
  misc_feature (11)..(351): NCBI GI NO: 38345384 NR Description: OSJNBa0067K08.13
  misc_feature (6)..(351): NCBI GI NO: 6692816 NR Description: allyl alcohol dehydrogenase [Nicotiana tabacum]
  misc_feature (1)..(351): NCBI GI NO: 15228456 NR Description: NADP-dependent oxidoreductase (P2), putative
  misc_feature (11)..(351): NCBI GI NO: 15237888 NR Description: NADP-dependent oxidoreductase (P1), putative
  misc_feature (8)..(351): NCBI GI NO: 15237890 NR Description: allyl alcohol dehydrogenase, putative
  misc_feature (11)..(351): NCBI GI NO: 21539447 NR Description: quinone oxidoreductase-like protein
  misc_feature (11)..(351): NCBI GI NO: 21595408 NR Description: quinone oxidoreductase-like protein
  misc_feature (8)..(351): NCBI GI NO: 21554121 NR Description: quinone oxidoreductase-like protein
  misc_feature (11)..(351): NCBI GI NO: 17529140 NR Description: putative quinone oxidoreductase
  misc_feature (9)..(351): NCBI GI NO: 15237883 NR Description: NADP-dependent oxidoreductase, putative
MAGHGDEVTRNKKVVLRRYVTGYPTAEDMEVVVTSDVRLRVPEGSAAAVVVKNLYLSCDPWMRGRMTKHDDGDAVPAEDFVLGEALVNFTVGEVVDSTHPEFDAGDLVWGMSAWEEYTLITQTEGLFKINHPELPLSHYTGVLGLAGLTAYAGLFEVGKPKQGETVFVSAASGAVGQVVGQLAKIAGCYVVGSAGSDEKVSLLKSKMGFDDAFNYKSEGDNLGAALGRRLPDGIDVYFDNVGGATLDAALLRMRPGGRVVACGMISQYNLSEHQGVRNLWCIIPKRVRVEGFSCMDYHHLYPRFEEEMAAYINAGKVTVAEDVVRGIEKAPEALVGLFSGRNVGKLLVALA

SEQ ID NO: 13432 - protein, 323 aa, Triticum aestivum
  peptide (1)..(323): Ceres Seq. ID no. 13655374
  misc_feature (73)..(320): Pfam Name: Pfam Description:  Zinc-binding dehydrogenase
  misc_feature (1)..(323): NCBI GI NO: 38345384 NR Description: OSJNBa0067K08.13
  misc_feature (1)..(323): NCBI GI NO: 6692816 NR Description: allyl alcohol dehydrogenase [Nicotiana tabacum]
  misc_feature (1)..(323): NCBI GI NO: 15228456 NR Description: NADP-dependent oxidoreductase (P2), putative
  misc_feature (1)..(323): NCBI GI NO: 15237888 NR Description: NADP-dependent oxidoreductase (P1), putative
  misc_feature (1)..(323): NCBI GI NO: 15237890 NR Description: allyl alcohol dehydrogenase, putative
  misc_feature (1)..(323): NCBI GI NO: 21539447 NR Description: quinone oxidoreductase-like protein
  misc_feature (1)..(323): NCBI GI NO: 21595408 NR Description: quinone oxidoreductase-like protein
  misc_feature (1)..(323): NCBI GI NO: 21554121 NR Description: quinone oxidoreductase-like protein
  misc_feature (1)..(323): NCBI GI NO: 17529140 NR Description: putative quinone oxidoreductase
  misc_feature (1)..(323): NCBI GI NO: 15237883 NR Description: NADP-dependent oxidoreductase, putative
MEVVVTSDVRLRVPEGSAAAVVVKNLYLSCDPWMRGRMTKHDDGDAVPAEDFVLGEALVNFTVGEVVDSTHPEFDAGDLVWGMSAWEEYTLITQTEGLFKINHPELPLSHYTGVLGLAGLTAYAGLFEVGKPKQGETVFVSAASGAVGQVVGQLAKIAGCYVVGSAGSDEKVSLLKSKMGFDDAFNYKSEGDNLGAALGRRLPDGIDVYFDNVGGATLDAALLRMRPGGRVVACGMISQYNLSEHQGVRNLWCIIPKRVRVEGFSCMDYHHLYPRFEEEMAAYINAGKVTVAEDVVRGIEKAPEALVGLFSGRNVGKLLVALA

SEQ ID NO: 13433 - DNA, 1742 bp, Triticum aestivum
  misc_feature (1)..(1742): Ceres Seq. ID no. 13655375
atccatatagaaatacctcgtctccctccccgcccctgattcgcaaggccaaagcaagaggggcaggagcgccaccgcgaatcccatcccatccccgcaccgccgccgatcccgcccgcccgcccctccgcagatctccccgacattgcccgctccccggccggattcgcccagatccaccgacgcggcgcgcggtgctcccggcggcgtggtccggtcggtctgatcgggaaggcttgatcttttttgttggtgctgttgtctggagggtggtggcagcggagatgggcgtcggaggggagaagttccagctggggacggtgggggcgctgggcctctccgtggtgtcctccgtgtccattgtcatctgcaacaaggccctcatgagctccctcggcttcaccttcgctaccaccttgacgagctggcatctcctggtcactttctgctcccttcatgtggcactatggatgaagttttttgagcacaaggcttttgattcgagaactgtcatgggattcggagtactcaatggcatctccattgggctcctcaatctgagtcttggtttcaattctgttggcttttaccagatgacaaagctggccatcatcccctgcactgttattttggagactcttttcttcaggaagaagttcagccggactatccagatctccctttccgtgcttcttttgggtgtcggtgttgcaaccatgactgatttgcaactcaatgctgtggggtccatactgtccttgctggccattatcacgacttgcatcgctcaaatcatgacaaacactattcagaagaaattcaaggtttcttcaacccagctgctatatcagtcttgtccttaccagtcattgacactgtttcttatcggcccgttccttgatggattcctgactaaccaaaacgtctttgctttcaattacacatctaacgttgtgtttttcatcgtcttgtcgtgtttgatatcggtctcagtaaacttcagcacctttcttgtgatcggaaagacatctcctgttacttaccaagtcctgggccatcttaaaacatgcctagttttgaccttcggctacgttttgcttcatgatccgtttagctggagaaacatacttggcatcctaattgcggttgttgggatggtactatattcatacttctgctcaacagagactcaaccaaaaaataccgatgtctccgcacagcagtcaaaagaaggtgactcggcacctttgatctctgattctttgagcaaagttgaaaatggaggtgatgacgatgagcctttgaaggtaccgatgtggagctcaaagtactcaagggcgtgagaattttgtctcttagacggcggatggcattatacaggattcaatttagtaggcagatagtagggttggaagccaactttccaacccaagtaatgaagcaatggacatttcagttacaattaaaatgatctgattctttggagggttttaccttccaaaattgcagatcgaccatgaaactagatagcagatattgtaaaattgtatctggatatggtccaaatcttctcactgtaacttcacgttgggacactggtctgcagatagactccattctttttgtaccaaaggtcccgaggtcaagaattgtgcaagactttaaagtatttataggttcaagtttgtaactgtactttcagatttaccttggaccatagtaatgcaagtgatgtacatttc

SEQ ID NO: 13434 - protein, 446 aa, Triticum aestivum
  peptide (1)..(446): Ceres Seq. ID no. 13655376
  misc_feature (95)..(446): NCBI GI NO: 13699188 NR Description: putative glucose-6-phosphate/phosphate-tranlocat or
  misc_feature (95)..(446): NCBI GI NO: 34896140 NR Description: P0701D05.25
  misc_feature (99)..(441): NCBI GI NO: 22329373 NR Description: transporter-related [Arabidopsis thaliana]
  misc_feature (100)..(441): NCBI GI NO: 27311731 NR Description: putative integral membrane protein
  misc_feature (100)..(417): NCBI GI NO: 30683853 NR Description: transporter-related [Arabidopsis thaliana]
  misc_feature (99)..(434): NCBI GI NO: 13384378 NR Description: putative phosphate translocator
  misc_feature (198)..(441): NCBI GI NO: 25406945 NR Description: hypothetical protein
  misc_feature (198)..(434): NCBI GI NO: 37535412 NR Description: putative glucose-6-phosphate/phosphate-translocator
  misc_feature (99)..(176): NCBI GI NO: 37535412 NR Description: putative glucose-6-phosphate/phosphate-translocator
  misc_feature (107)..(397): NCBI GI NO: 15238957 NR Description: transporter-related [Arabidopsis thaliana]
PYRNTSSPSPPLIRKAKARGAGAPPRIPSHPRTAADPARPPLRRSPRHCPLPGRIRPDPPTRRAVLPAAWSGRSDREGLIFFVGAVVWRVVAAEMGVGGEKFQLGTVGALGLSVVSSVSIVICNKALMSSLGFTFATTLTSWHLLVTFCSLHVALWMKFFEHKAFDSRTVMGFGVLNGISIGLLNLSLGFNSVGFYQMTKLAIIPCTVILETLFFRKKFSRTIQISLSVLLLGVGVATMTDLQLNAVGSILSLLAIITTCIAQIMTNTIQKKFKVSSTQLLYQSCPYQSLTLFLIGPFLDGFLTNQNVFAFNYTSNVVFFIVLSCLISVSVNFSTFLVIGKTSPVTYQVLGHLKTCLVLTFGYVLLHDPFSWRNILGILIAVVGMVLYSYFCSTETQPKNTDVSAQQSKEGDSAPLISDSLSKVENGGDDDEPLKVPMWSSKYSRA

SEQ ID NO: 13435 - protein, 352 aa, Triticum aestivum
  peptide (1)..(352): Ceres Seq. ID no. 13655377
  misc_feature (1)..(352): NCBI GI NO: 13699188 NR Description: putative glucose-6-phosphate/phosphate-tranlocat or
  misc_feature (1)..(352): NCBI GI NO: 34896140 NR Description: P0701D05.25
  misc_feature (5)..(347): NCBI GI NO: 22329373 NR Description: transporter-related [Arabidopsis thaliana]
  misc_feature (6)..(347): NCBI GI NO: 27311731 NR Description: putative integral membrane protein
  misc_feature (6)..(323): NCBI GI NO: 30683853 NR Description: transporter-related [Arabidopsis thaliana]
  misc_feature (5)..(340): NCBI GI NO: 13384378 NR Description: putative phosphate translocator
  misc_feature (104)..(347): NCBI GI NO: 25406945 NR Description: hypothetical protein
  misc_feature (104)..(340): NCBI GI NO: 37535412 NR Description: putative glucose-6-phosphate/phosphate-translocator
  misc_feature (5)..(82): NCBI GI NO: 37535412 NR Description: putative glucose-6-phosphate/phosphate-translocator
  misc_feature (13)..(303): NCBI GI NO: 15238957 NR Description: transporter-related [Arabidopsis thaliana]
MGVGGEKFQLGTVGALGLSVVSSVSIVICNKALMSSLGFTFATTLTSWHLLVTFCSLHVALWMKFFEHKAFDSRTVMGFGVLNGISIGLLNLSLGFNSVGFYQMTKLAIIPCTVILETLFFRKKFSRTIQISLSVLLLGVGVATMTDLQLNAVGSILSLLAIITTCIAQIMTNTIQKKFKVSSTQLLYQSCPYQSLTLFLIGPFLDGFLTNQNVFAFNYTSNVVFFIVLSCLISVSVNFSTFLVIGKTSPVTYQVLGHLKTCLVLTFGYVLLHDPFSWRNILGILIAVVGMVLYSYFCSTETQPKNTDVSAQQSKEGDSAPLISDSLSKVENGGDDDEPLKVPMWSSKYSRA

SEQ ID NO: 13436 - protein, 319 aa, Triticum aestivum
  peptide (1)..(319): Ceres Seq. ID no. 13655378
  misc_feature (1)..(319): NCBI GI NO: 13699188 NR Description: putative glucose-6-phosphate/phosphate-tranlocat or
  misc_feature (1)..(319): NCBI GI NO: 34896140 NR Description: P0701D05.25
  misc_feature (1)..(314): NCBI GI NO: 22329373 NR Description: transporter-related [Arabidopsis thaliana]
  misc_feature (1)..(314): NCBI GI NO: 27311731 NR Description: putative integral membrane protein
  misc_feature (1)..(290): NCBI GI NO: 30683853 NR Description: transporter-related [Arabidopsis thaliana]
  misc_feature (1)..(307): NCBI GI NO: 13384378 NR Description: putative phosphate translocator
  misc_feature (71)..(314): NCBI GI NO: 25406945 NR Description: hypothetical protein
  misc_feature (71)..(307): NCBI GI NO: 37535412 NR Description: putative glucose-6-phosphate/phosphate-translocator
  misc_feature (1)..(49): NCBI GI NO: 37535412 NR Description: putative glucose-6-phosphate/phosphate-translocator
  misc_feature (1)..(270): NCBI GI NO: 15238957 NR Description: transporter-related [Arabidopsis thaliana]
MSSLGFTFATTLTSWHLLVTFCSLHVALWMKFFEHKAFDSRTVMGFGVLNGISIGLLNLSLGFNSVGFYQMTKLAIIPCTVILETLFFRKKFSRTIQISLSVLLLGVGVATMTDLQLNAVGSILSLLAIITTCIAQIMTNTIQKKFKVSSTQLLYQSCPYQSLTLFLIGPFLDGFLTNQNVFAFNYTSNVVFFIVLSCLISVSVNFSTFLVIGKTSPVTYQVLGHLKTCLVLTFGYVLLHDPFSWRNILGILIAVVGMVLYSYFCSTETQPKNTDVSAQQSKEGDSAPLISDSLSKVENGGDDDEPLKVPMWSSKYSRA

SEQ ID NO: 13437 - DNA, 1087 bp, Triticum aestivum
  misc_feature (1)..(1087): Ceres Seq. ID no. 13597142
gtccacctcctccctcctgttccttcagccaccgtgagcaatggcgcccaagcggaagggtggcaacggccggaagaagaccgtcctcctctcgatcgtcaaggaggacgcccgccatgtatgcttctcaaagcgcaagcggggcctgttcagcaagaccagcgcgctgtccctgctcacgggcgcccaggtggccgccgtcatcttctcgcccggcggcaaggtcttctccttcggccacccctccgtcgacgccgtcgtcaaccgcttcatggcgggggacgccgcggtggtccaggccgccgccgacgacaacgggttgcagacgctgcagctgcagcacggcgacatgcgcaccgagctggcggaccagaagaagcggaagaagcgcgctgaggaggccctggacaaggagcgcgctgggggggaccagattgcctcgtggctccaccccgacgtgcgcgacatggggcatgacgacatggcggccttcgccgccgcgctcttgcaggtccaggccgccgtctccggacgcgccaaccaggttctcgtcgaggcctttcgcgtcgacatcagccgtatgctccaggtgcccccgccgccgccgcctccgctccagctcttcggtgccagcaccattgagttcggtagtagcagcagcagcgccaacgccgggatggagatgcaacagatgcagatggttatggagatgccaccgccgcctgacttccccgcagtgatggggatgcagcagttggttatggagatgccaccacagccaaggttcgaggcagcgatggagatgacgccgctgcaggagttcgtcgccgggatgcagaaggtgcagcggcaggggctcgggccgaacgccgacttcccctactgaggagaagaaagacaccagacagagtccgaccgagtccgagtctcagttactatattctaaataaatcgttcagatccatgtaagatccatctacgtaggtccaagatctatgcattagttggttcaattatcttagtagcaattaaatttatggcattgtaatcttttttgtatcggtagtacaatggctggaaattcgtg

SEQ ID NO: 13438 - protein, 281 aa, Triticum aestivum
  peptide (1)..(281): Ceres Seq. ID no. 13597143
  misc_feature (19)..(67): Pfam Name: DNA-binding and dimerisationdomain Pfam Description: SRF-type transcription factor
  misc_feature (2)..(176): NCBI GI NO: 34906076 NR Description: P0459B04.16
  misc_feature (10)..(159): NCBI GI NO: 15234456 NR Description: MADS-box protein [Arabidopsis thaliana]
  misc_feature (1)..(186): NCBI GI NO: 30682571 NR Description: MADS-box protein [Arabidopsis thaliana]
  misc_feature (4)..(186): NCBI GI NO: 25412255 NR Description: probable MADS-box protein
  misc_feature (6)..(168): NCBI GI NO: 15239333 NR Description: MADS-box protein [Arabidopsis thaliana]
  misc_feature (6)..(168): NCBI GI NO: 32402436 NR Description: MADS-box protein AGL62 [Arabidopsis thaliana]
  misc_feature (10)..(180): NCBI GI NO: 15226309 NR Description: MADS-box protein [Arabidopsis thaliana]
  misc_feature (10)..(127): NCBI GI NO: 15218647 NR Description: MADS-box protein [Arabidopsis thaliana]
  misc_feature (1)..(142): NCBI GI NO: 15218684 NR Description: MADS-box protein [Arabidopsis thaliana]
  misc_feature (10)..(142): NCBI GI NO: 15230767 NR Description: MADS-box protein [Arabidopsis thaliana]
MAPKRKGGNGRKKTVLLSIVKEDARHVCFSKRKRGLFSKTSALSLLTGAQVAAVIFSPGGKVFSFGHPSVDAVVNRFMAGDAAVVQAAADDNGLQTLQLQHGDMRTELADQKKRKKRAEEALDKERAGGDQIASWLHPDVRDMGHDDMAAFAAALLQVQAAVSGRANQVLVEAFRVDISRMLQVPPPPPPPLQLFGASTIEFGSSSSSANAGMEMQQMQMVMEMPPPPDFPAVMGMQQLVMEMPPQPRFEAAMEMTPLQEFVAGMQKVQRQGLGPNADFPY

SEQ ID NO: 13439 - protein, 245 aa, Triticum aestivum
  peptide (1)..(245): Ceres Seq. ID no. 13597144
  misc_feature (4)..(223): NCBI GI NO: 11359723 NR Description: proteophosphoglycan, membrane-associated
  misc_feature (4)..(221): NCBI GI NO: 13592175 NR Description: ppg3 [Leishmania major]
  misc_feature (4)..(221): NCBI GI NO: 13592175 NR Description: ppg3 [Leishmania major]
  misc_feature (4)..(221): NCBI GI NO: 13592175 NR Description: ppg3 [Leishmania major]
  misc_feature (4)..(221): NCBI GI NO: 13592175 NR Description: ppg3 [Leishmania major]
  misc_feature (4)..(221): NCBI GI NO: 13592175 NR Description: ppg3 [Leishmania major]
  misc_feature (4)..(221): NCBI GI NO: 13592175 NR Description: ppg3 [Leishmania major]
  misc_feature (3)..(221): NCBI GI NO: 13592175 NR Description: ppg3 [Leishmania major]
  misc_feature (70)..(202): NCBI GI NO: 7248459 NR Description: arabinogalactan protein [Zea mays]
  misc_feature (4)..(221): NCBI GI NO: 13592175 NR Description: ppg3 [Leishmania major]
PPPPSCSFSHREQWRPSGRVATAGRRPSSSRSSRRTPAMYASQSASGACSARPARCPCSRAPRWPPSSSRPAARSSPSATPPSTPSSTASWRGTPRWSRPPPTTTGCRRCSCSTATCAPSWRTRRSGRSALRRPWTRSALGGTRLPRGSTPTCATWGMTTWRPSPPRSCRSRPPSPDAPTRFSSRPFASTSAVCSRCPRRRRLRSSSSVPAPLSSVVAAAAPTPGWRCNRCRWLWRCHRRLTSPQ

SEQ ID NO: 13440 - protein, 207 aa, Triticum aestivum
  peptide (1)..(207): Ceres Seq. ID no. 13597145
  misc_feature (1)..(185): NCBI GI NO: 11359723 NR Description: proteophosphoglycan, membrane-associated
  misc_feature (1)..(183): NCBI GI NO: 13592175 NR Description: ppg3 [Leishmania major]
  misc_feature (1)..(183): NCBI GI NO: 13592175 NR Description: ppg3 [Leishmania major]
  misc_feature (1)..(183): NCBI GI NO: 13592175 NR Description: ppg3 [Leishmania major]
  misc_feature (1)..(183): NCBI GI NO: 13592175 NR Description: ppg3 [Leishmania major]
  misc_feature (1)..(183): NCBI GI NO: 13592175 NR Description: ppg3 [Leishmania major]
  misc_feature (1)..(183): NCBI GI NO: 13592175 NR Description: ppg3 [Leishmania major]
  misc_feature (1)..(183): NCBI GI NO: 13592175 NR Description: ppg3 [Leishmania major]
  misc_feature (32)..(164): NCBI GI NO: 7248459 NR Description: arabinogalactan protein [Zea mays]
  misc_feature (1)..(183): NCBI GI NO: 13592175 NR Description: ppg3 [Leishmania major]
MYASQSASGACSARPARCPCSRAPRWPPSSSRPAARSSPSATPPSTPSSTASWRGTPRWSRPPPTTTGCRRCSCSTATCAPSWRTRRSGRSALRRPWTRSALGGTRLPRGSTPTCATWGMTTWRPSPPRSCRSRPPSPDAPTRFSSRPFASTSAVCSRCPRRRRLRSSSSVPAPLSSVVAAAAPTPGWRCNRCRWLWRCHRRLTSPQ

SEQ ID NO: 13441 - DNA, 1356 bp, Triticum aestivum
  misc_feature (1)..(1356): Ceres Seq. ID no. 14301482
tttttctccccccaccttccgcgtcccccctctccacctagcaagctccggccgtccgcccgcgcccgtcccgtccgtccacgagcgagccggccgggcgccgccgccgacgccgatgaagaagccgggcaagctcgcgctgccctcccaggactccaccatcggcaagttcctgacgcagagcgggaccttcaaggacggcgacctgctcgtcaacaaggacggcctccgcatcgtcccgcagagcgaggaaggcgaggctcctcctatcaagcctttggataataatcatcagttgagcatagacgatctagattcaatcaaagtgatcgggaaaggtaatagcgggaccgtgcaattggtgcgccacaaatggactggccagttttttgctctcaaggttatacagctcaatattcaggagagcatacgcaagcagatggcccaggagttgaaaataagcttgtttacacagtgccagtatgttgtcacgtgctatcagtgtttctatgtcaatggtgttatttctattgctttggagtacatggatggtggctctctcgctgatttcctcaaggctgttagaaccgttccagaggcctacctggctgcaatttgtaagcaggtgttgaaaggactgatgtacttgcatcatgagaagcgcgttatacaccgagatctgaaaccatcgaatatattgataaatcataggggtgaagtaaagatatcagattttggtgttagtgccatcatttctagttcttctgcacagcgagatacatttactggcacatttaactacatggcgcctgaaagaatcagtgggcagaaacatggtcatctgagtgatatctggagcttgggcctagttatgctggaatgtgccactggcaatttcccatatcctcctcgtgaaagcttttatgaacttcttgaagctgttgtcgaccaaccatcaccttctgcaccatcagaccagttttcaccagagttctgttcattcatttctgcttgtatccaaaaaaatgctgcagataggtcatctgcccaaaccctatcagctcatccattcctgagcatgtacgacgacctgaatatcgatctgtctgactacttcacgactgcaggatcaccgcttgccaccttcaagcaaatcgcgttgtgagacgacaaatgctcaaccatgtgtcatgagctggagctaactgaagcaagtgaatggagttatttttcttttcctgttattcatgaactgggctttgatgatatctttgaaccaaatatgatacaattggcttcataattatacaaatacaagtctgtaaagcatcagcgagcatcgaagttttgcctgtc

SEQ ID NO: 13442 - protein, 387 aa, Triticum aestivum
  peptide (1)..(387): Ceres Seq. ID no. 14301483
  misc_feature (104)..(358): Pfam Name: Pfam Description:  Protein kinase domain
  misc_feature (44)..(382): NCBI GI NO: 37625027 NR Description: putative mitogen-activated protein kinase kinase
  misc_feature (91)..(387): NCBI GI NO: 22797196 NR Description: putative mitogen-activated protein kinase kinase
  misc_feature (44)..(385): NCBI GI NO: 9843771 NR Description: MAP kinase kinase [Lycopersicon esculentum]
  misc_feature (44)..(385): NCBI GI NO: 7434316 NR Description: protein kinase MEK1 - tomato
  misc_feature (44)..(381): NCBI GI NO: 15528441 NR Description: MAP kinase kinase [Medicago sativa subsp. x varia]
  misc_feature (44)..(385): NCBI GI NO: 7682432 NR Description: MAP kinase kinase [Nicotiana tabacum]
  misc_feature (39)..(386): NCBI GI NO: 15233715 NR Description: mitogen-activated protein kinase kinase
  misc_feature (39)..(386): NCBI GI NO: 11259772 NR Description: mitogen-activated protein kinase kinase (EC 2
  misc_feature (42)..(380): NCBI GI NO: 15236108 NR Description: mitogen-activated protein kinase kinase
  misc_feature (38)..(379): NCBI GI NO: 12718822 NR Description: NQK1 MAPKK [Nicotiana tabacum]
FSPPTFRVPPLHLASSGRPPAPVPSVHERAGRAPPPTPMKKPGKLALPSQDSTIGKFLTQSGTFKDGDLLVNKDGLRIVPQSEEGEAPPIKPLDNNHQLSIDDLDSIKVIGKGNSGTVQLVRHKWTGQFFALKVIQLNIQESIRKQMAQELKISLFTQCQYVVTCYQCFYVNGVISIALEYMDGGSLADFLKAVRTVPEAYLAAICKQVLKGLMYLHHEKRVIHRDLKPSNILINHRGEVKISDFGVSAIISSSSAQRDTFTGTFNYMAPERISGQKHGHLSDIWSLGLVMLECATGNFPYPPRESFYELLEAVVDQPSPSAPSDQFSPEFCSFISACIQKNAADRSSAQTLSAHPFLSMYDDLNIDLSDYFTTAGSPLATFKQIAL

SEQ ID NO: 13443 - protein, 349 aa, Triticum aestivum
  peptide (1)..(349): Ceres Seq. ID no. 14301484
  misc_feature (66)..(320): Pfam Name: Pfam Description:  Protein kinase domain
  misc_feature (6)..(344): NCBI GI NO: 37625027 NR Description: putative mitogen-activated protein kinase kinase
  misc_feature (53)..(349): NCBI GI NO: 22797196 NR Description: putative mitogen-activated protein kinase kinase
  misc_feature (6)..(347): NCBI GI NO: 9843771 NR Description: MAP kinase kinase [Lycopersicon esculentum]
  misc_feature (6)..(347): NCBI GI NO: 7434316 NR Description: protein kinase MEK1 - tomato
  misc_feature (6)..(343): NCBI GI NO: 15528441 NR Description: MAP kinase kinase [Medicago sativa subsp. x varia]
  misc_feature (6)..(347): NCBI GI NO: 7682432 NR Description: MAP kinase kinase [Nicotiana tabacum]
  misc_feature (1)..(348): NCBI GI NO: 15233715 NR Description: mitogen-activated protein kinase kinase
  misc_feature (1)..(348): NCBI GI NO: 11259772 NR Description: mitogen-activated protein kinase kinase (EC 2
  misc_feature (4)..(342): NCBI GI NO: 15236108 NR Description: mitogen-activated protein kinase kinase
  misc_feature (1)..(341): NCBI GI NO: 12718822 NR Description: NQK1 MAPKK [Nicotiana tabacum]
MKKPGKLALPSQDSTIGKFLTQSGTFKDGDLLVNKDGLRIVPQSEEGEAPPIKPLDNNHQLSIDDLDSIKVIGKGNSGTVQLVRHKWTGQFFALKVIQLNIQESIRKQMAQELKISLFTQCQYVVTCYQCFYVNGVISIALEYMDGGSLADFLKAVRTVPEAYLAAICKQVLKGLMYLHHEKRVIHRDLKPSNILINHRGEVKISDFGVSAIISSSSAQRDTFTGTFNYMAPERISGQKHGHLSDIWSLGLVMLECATGNFPYPPRESFYELLEAVVDQPSPSAPSDQFSPEFCSFISACIQKNAADRSSAQTLSAHPFLSMYDDLNIDLSDYFTTAGSPLATFKQIAL

SEQ ID NO: 13444 - protein, 241 aa, Triticum aestivum
  peptide (1)..(241): Ceres Seq. ID no. 14301485
  misc_feature (1)..(212): Pfam Name: Pfam Description:  Protein kinase domain
  misc_feature (1)..(236): NCBI GI NO: 37625027 NR Description: putative mitogen-activated protein kinase kinase
  misc_feature (1)..(241): NCBI GI NO: 22797196 NR Description: putative mitogen-activated protein kinase kinase
  misc_feature (1)..(239): NCBI GI NO: 9843771 NR Description: MAP kinase kinase [Lycopersicon esculentum]
  misc_feature (1)..(239): NCBI GI NO: 7434316 NR Description: protein kinase MEK1 - tomato
  misc_feature (1)..(235): NCBI GI NO: 15528441 NR Description: MAP kinase kinase [Medicago sativa subsp. x varia]
  misc_feature (1)..(239): NCBI GI NO: 7682432 NR Description: MAP kinase kinase [Nicotiana tabacum]
  misc_feature (1)..(240): NCBI GI NO: 15233715 NR Description: mitogen-activated protein kinase kinase
  misc_feature (1)..(240): NCBI GI NO: 11259772 NR Description: mitogen-activated protein kinase kinase (EC 2
  misc_feature (1)..(234): NCBI GI NO: 15236108 NR Description: mitogen-activated protein kinase kinase
  misc_feature (1)..(233): NCBI GI NO: 12718822 NR Description: NQK1 MAPKK [Nicotiana tabacum]
MAQELKISLFTQCQYVVTCYQCFYVNGVISIALEYMDGGSLADFLKAVRTVPEAYLAAICKQVLKGLMYLHHEKRVIHRDLKPSNILINHRGEVKISDFGVSAIISSSSAQRDTFTGTFNYMAPERISGQKHGHLSDIWSLGLVMLECATGNFPYPPRESFYELLEAVVDQPSPSAPSDQFSPEFCSFISACIQKNAADRSSAQTLSAHPFLSMYDDLNIDLSDYFTTAGSPLATFKQIAL

SEQ ID NO: 13445 - DNA, 1359 bp, Triticum aestivum
  misc_feature (1)..(1359): Ceres Seq. ID no. 13655381
aattttatcgattatcaggccggcactccgcccacaaatgctcgcctccatctcccgatctctcgctcgccgcctcccgcgccttccgcttgccaccgccgccgccacaacagccatgtcgtcgtccgacaccgccgggagcgtcgccgaccgtccgatctctcctgataccacacgcatcgggtgggtggggacgggcgtcatgggccagtccatggccggccacctcctcgccgccggctacgcgctcaccgtatacaaccgcacgccctccaaggcccagggcctcgtctctagcggcgcccgcctcgtggacagcccgcgcgccgccgcggccgtcgctgacgtcatcttcctcatggtcggcttcccctccgacgtccgctccacgtccctcgacccctccacgggcgctctcgccggcctcgccccaggcggcgtcctcgtcgacatgaccacctccgaccccaccctcgcggccgagatagctgcggccgcggcgggggccggctgcgccgcagtcgacgcccccgtgtcaggcggcgaccggggcgcccgcaacgcctgcctctcgatcttcgccggcggtgacgcggccgtggtggcccgcctggcgcccctcttcaagctgatgggcaacgccctctacatgggcgggccgggcgcggggcagcgcgcgaagctgggcaaccagatcgccatcgcgtccaccatggtgggactggtggagggcatggtgtacgcgcacaaggccgggctggacgtgggcaagtggctggaggccatctccacgggcgccgcggggtccaagtcgctggacctgtacgggaagcggatgctggagcgcgacatggcggccgggttctacgtccggcacttcgtcaaggacctcgggatctgcctgtccgagtgccagaccatggggctggcgctgccggggctcgcgctcgcgcaccagcthtacgtgtcgctgcttgcccacggcgagggcgggctcggcacgcaggcgctgatactggcagtcgagcggctcaacaacacctgccttgacaagaaaggggagtgaaactgtgaaagcctacgagagcttggttgatgcaatgcaacacgagagaattgtctcctgctgtgttcccttgtggatatgggacttctgcatgctctgtctgttcatgctttacagtgctctaaggttcaaataagattgcaaaaatggagtttttcacttgtattgataatattcaactactcctatagtcctatttggcaaatcagtctgtagtgattgtcgatcaacttggcagtgaaactagaatattgaatgtagctcaccctgtgttaacgggttatatttgccgc

SEQ ID NO: 13446 - protein, 354 aa, Triticum aestivum
  peptide (1)..(354): Ceres Seq. ID no. 15219737
  misc_feature (57)..(220): Pfam Name: Pfam Description:  NAD binding domain of 6-phosphogluconate dehydrogenase
  misc_feature (39)..(354): NCBI GI NO: 34909392 NR Description: putative dehydrogenase
  misc_feature (25)..(346): NCBI GI NO: 15233455 NR Description: expressed protein [Arabidopsis thaliana]
  misc_feature (59)..(345): NCBI GI NO: 32472744 NR Description: 3-hydroxyisobutyrate dehydrogenase [Pirellula sp.]
  misc_feature (53)..(345): NCBI GI NO: 18409781 NR Description: dehydrogenase -related [Arabidopsis thaliana]
  misc_feature (53)..(345): NCBI GI NO: 25283629 NR Description: probable dehydrogenase F23N20.17
  misc_feature (53)..(345): NCBI GI NO: 30698779 NR Description: dehydrogenase -related [Arabidopsis thaliana]
  misc_feature (59)..(338): NCBI GI NO: 16803045 NR Description: similar to 3-hydroxyisobutyrate dehydrogenase (B
  misc_feature (59)..(338): NCBI GI NO: 16800073 NR Description: similar to 3-hydroxyisobutyrate dehydrogenase (B
  misc_feature (58)..(338): NCBI GI NO: 15674197 NR Description: 3-hydroxyisobutyrate dehydrogenase
  misc_feature (53)..(337): NCBI GI NO: 23113025 NR Description: hypothetical protein
  misc_feature (320)..(320): Xaa is any aa, unknown or other
ILSIIRPALRPQMLASISRSLARRLPRLPLATAAATTAMSSSDTAGSVADRPISPDTTRIGWVGTGVMGQSMAGHLLAAGYALTVYNRTPSKAQGLVSSGARLVDSPRAAAAVADVIFLMVGFPSDVRSTSLDPSTGALAGLAPGGVLVDMTTSDPTLAAEIAAAAAGAGCAAVDAPVSGGDRGARNACLSIFAGGDAAVVARLAPLFKLMGNALYMGGPGAGQRAKLGNQIAIASTMVGLVEGMVYAHKAGLDVGKWLEAISTGAAGSKSLDLYGKRMLERDMAAGFYVRHFVKDLGICLSECQTMGLALPGLALAHQXYVSLLAHGEGGLGTQALILAVERLNNTCLDKKGE

SEQ ID NO: 13447 - protein, 342 aa, Triticum aestivum
  peptide (1)..(342): Ceres Seq. ID no. 15219738
  misc_feature (45)..(208): Pfam Name: Pfam Description:  NAD binding domain of 6-phosphogluconate dehydrogenase
  misc_feature (27)..(342): NCBI GI NO: 34909392 NR Description: putative dehydrogenase
  misc_feature (13)..(334): NCBI GI NO: 15233455 NR Description: expressed protein [Arabidopsis thaliana]
  misc_feature (47)..(333): NCBI GI NO: 32472744 NR Description: 3-hydroxyisobutyrate dehydrogenase [Pirellula sp.]
  misc_feature (41)..(333): NCBI GI NO: 18409781 NR Description: dehydrogenase -related [Arabidopsis thaliana]
  misc_feature (41)..(333): NCBI GI NO: 25283629 NR Description: probable dehydrogenase F23N20.17
  misc_feature (41)..(333): NCBI GI NO: 30698779 NR Description: dehydrogenase -related [Arabidopsis thaliana]
  misc_feature (47)..(326): NCBI GI NO: 16803045 NR Description: similar to 3-hydroxyisobutyrate dehydrogenase (B
  misc_feature (47)..(326): NCBI GI NO: 16800073 NR Description: similar to 3-hydroxyisobutyrate dehydrogenase (B
  misc_feature (46)..(326): NCBI GI NO: 15674197 NR Description: 3-hydroxyisobutyrate dehydrogenase
  misc_feature (41)..(325): NCBI GI NO: 23113025 NR Description: hypothetical protein
  misc_feature (308)..(308): Xaa is any aa, unknown or other
MLASISRSLARRLPRLPLATAAATTAMSSSDTAGSVADRPISPDTTRIGWVGTGVMGQSMAGHLLAAGYALTVYNRTPSKAQGLVSSGARLVDSPRAAAAVADVIFLMVGFPSDVRSTSLDPSTGALAGLAPGGVLVDMTTSDPTLAAEIAAAAAGAGCAAVDAPVSGGDRGARNACLSIFAGGDAAVVARLAPLFKLMGNALYMGGPGAGQRAKLGNQIAIASTMVGLVEGMVYAHKAGLDVGKWLEAISTGAAGSKSLDLYGKRMLERDMAAGFYVRHFVKDLGICLSECQTMGLALPGLALAHQXYVSLLAHGEGGLGTQALILAVERLNNTCLDKKGE

SEQ ID NO: 13448 - protein, 316 aa, Triticum aestivum
  peptide (1)..(316): Ceres Seq. ID no. 15219739
  misc_feature (19)..(182): Pfam Name: Pfam Description:  NAD binding domain of 6-phosphogluconate dehydrogenase
  misc_feature (1)..(316): NCBI GI NO: 34909392 NR Description: putative dehydrogenase
  misc_feature (1)..(308): NCBI GI NO: 15233455 NR Description: expressed protein [Arabidopsis thaliana]
  misc_feature (21)..(307): NCBI GI NO: 32472744 NR Description: 3-hydroxyisobutyrate dehydrogenase [Pirellula sp.]
  misc_feature (15)..(307): NCBI GI NO: 18409781 NR Description: dehydrogenase -related [Arabidopsis thaliana]
  misc_feature (15)..(307): NCBI GI NO: 25283629 NR Description: probable dehydrogenase F23N20.17
  misc_feature (15)..(307): NCBI GI NO: 30698779 NR Description: dehydrogenase -related [Arabidopsis thaliana]
  misc_feature (21)..(300): NCBI GI NO: 16803045 NR Description: similar to 3-hydroxyisobutyrate dehydrogenase (B
  misc_feature (21)..(300): NCBI GI NO: 16800073 NR Description: similar to 3-hydroxyisobutyrate dehydrogenase (B
  misc_feature (20)..(300): NCBI GI NO: 15674197 NR Description: 3-hydroxyisobutyrate dehydrogenase
  misc_feature (15)..(299): NCBI GI NO: 23113025 NR Description: hypothetical protein
  misc_feature (282)..(282): Xaa is any aa, unknown or other
MSSSDTAGSVADRPISPDTTRIGWVGTGVMGQSMAGHLLAAGYALTVYNRTPSKAQGLVSSGARLVDSPRAAAAVADVIFLMVGFPSDVRSTSLDPSTGALAGLAPGGVLVDMTTSDPTLAAEIAAAAAGAGCAAVDAPVSGGDRGARNACLSIFAGGDAAVVARLAPLFKLMGNALYMGGPGAGQRAKLGNQIAIASTMVGLVEGMVYAHKAGLDVGKWLEAISTGAAGSKSLDLYGKRMLERDMAAGFYVRHFVKDLGICLSECQTMGLALPGLALAHQXYVSLLAHGEGGLGTQALILAVERLNNTCLDKKGE

SEQ ID NO: 13449 - DNA, 1394 bp, Triticum aestivum
  misc_feature (1)..(1394): Ceres Seq. ID no. 13655382
aacactcgccgccgtccccgacagcaagaatcgcctagcgaaaatccttgcggctcggattccggcggccgccgccgcgatgaagctcgtccaccgcaacctcacccgcaacgggcccggctccgccaagctgctgccggaggaggaggacgacctgtggcacgcgtacaatctcatcgccgtaggggacagcctccaggccgtcactgtccggaaagttctgagagattctgcttcgggaggacgtgatgcggagcgcgtgaagctaaagttggagattgtagttgagtctgtagattatgacaaggaagggaacgttttgcgcgtccgtggcaaaaatattactgagaatgatcacgtgaagattggccagtttcatactttagaacttgagctgaagagaccttttgttctacgaaaggaatattgggattggttagcacttgataccatccaacaagcatgtgatcctactgcaagtgctgatctagcagttattcttatgcaagaaggacttgcccacttattccttattgggagaagcataacagcaacaaggtcacgtattgaaacctcgattcctaggaaacatggacctgccattgctggttacgagtcggctctcaagaagttctttgagcatgttttgcaagccttgctgaagcacattgattttgaagtggtccagtgtgttgtaattgcaagcccaggttttactaaggatcagtttcgtgattacatgcatcttgaagctgcacggcgagacttgagagtaataattgagaacaaatcacgcattattcttgcacatgcaccttcaggctacaagcatagtttgaaggaagttttggacaccccaggtgtgatgtcactgataaaagatacaaaagcggcacaggaggactcagcccgagcgtgttatggacctaagcacgttgaggtcgcacatgaacgtcttgcaatacaaactcttctgatgacagatactttgtttcggaacacggacatcgctagcaggagaaagtatgtgaacttggttgagtcagtcaagaaatatggtggtacagtgcacatattttcttcgatgcatgtctccggcgaccaattggctcagttgacaggaatagcagcaatacttcgtttccccctgccagatttggaggacatcgagatgtgattagtccagacctccggagctgcctaacatttgttgtaccaacctgttaacctatagctgatcaagtgtaataataatataacagttggttctatttaggtagcaacagaaagaaattctgatgacattttaatatatccttgttgtaaatggttagctatgccacatctattggttattcttgacttaataataagggccctctccattttttttc

SEQ ID NO: 13450 - protein, 391 aa, Triticum aestivum
  peptide (1)..(391): Ceres Seq. ID no. 13655383
  misc_feature (162)..(294): Pfam Name: Pfam Description:  eRF1 domain 2
  misc_feature (27)..(391): NCBI GI NO: 38345200 NR Description: OSJNBa0015K02.10
  misc_feature (27)..(391): NCBI GI NO: 30687676 NR Description: pelota (PEL1) [Arabidopsis thaliana]
  misc_feature (85)..(391): NCBI GI NO: 15231020 NR Description: pelota-related protein [Arabidopsis thaliana]
  misc_feature (27)..(90): NCBI GI NO: 15231020 NR Description: pelota-related protein [Arabidopsis thaliana]
  misc_feature (136)..(391): NCBI GI NO: 19387279 NR Description: putative pelota
  misc_feature (27)..(388): NCBI GI NO: 1352736 NR Description: PELOTA PROTEIN
  misc_feature (27)..(388): NCBI GI NO: 17136914 NR Description: pelota CG3959-PA [Drosophila melanogaster]
  misc_feature (27)..(388): NCBI GI NO: 31222612 NR Description: ENSANGP00000006742 [Anopheles gambiae]
  misc_feature (27)..(390): NCBI GI NO: 34854171 NR Description: similar to Pelo protein [Rattus norvegicus]
  misc_feature (27)..(390): NCBI GI NO: 34980901 NR Description: Pelo protein [Mus musculus]
TLAAVPDSKNRLAKILAARIPAAAAAMKLVHRNLTRNGPGSAKLLPEEEDDLWHAYNLIAVGDSLQAVTVRKVLRDSASGGRDAERVKLKLEIVVESVDYDKEGNVLRVRGKNITENDHVKIGQFHTLELELKRPFVLRKEYWDWLALDTIQQACDPTASADLAVILMQEGLAHLFLIGRSITATRSRIETSIPRKHGPAIAGYESALKKFFEHVLQALLKHIDFEVVQCVVIASPGFTKDQFRDYMHLEAARRDLRVIIENKSRIILAHAPSGYKHSLKEVLDTPGVMSLIKDTKAAQEDSARACYGPKHVEVAHERLAIQTLLMTDTLFRNTDIASRRKYVNLVESVKKYGGTVHIFSSMHVSGDQLAQLTGIAAILRFPLPDLEDIEM

SEQ ID NO: 13451 - protein, 365 aa, Triticum aestivum
  peptide (1)..(365): Ceres Seq. ID no. 13655384
  misc_feature (136)..(268): Pfam Name: Pfam Description:  eRF1 domain 2
  misc_feature (1)..(365): NCBI GI NO: 38345200 NR Description: OSJNBa0015K02.10
  misc_feature (1)..(365): NCBI GI NO: 30687676 NR Description: pelota (PEL1) [Arabidopsis thaliana]
  misc_feature (59)..(365): NCBI GI NO: 15231020 NR Description: pelota-related protein [Arabidopsis thaliana]
  misc_feature (1)..(64): NCBI GI NO: 15231020 NR Description: pelota-related protein [Arabidopsis thaliana]
  misc_feature (110)..(365): NCBI GI NO: 19387279 NR Description: putative pelota
  misc_feature (1)..(362): NCBI GI NO: 1352736 NR Description: PELOTA PROTEIN
  misc_feature (1)..(362): NCBI GI NO: 17136914 NR Description: pelota CG3959-PA [Drosophila melanogaster]
  misc_feature (1)..(362): NCBI GI NO: 31222612 NR Description: ENSANGP00000006742 [Anopheles gambiae]
  misc_feature (1)..(364): NCBI GI NO: 34854171 NR Description: similar to Pelo protein [Rattus norvegicus]
  misc_feature (1)..(364): NCBI GI NO: 34980901 NR Description: Pelo protein [Mus musculus]
MKLVHRNLTRNGPGSAKLLPEEEDDLWHAYNLIAVGDSLQAVTVRKVLRDSASGGRDAERVKLKLEIVVESVDYDKEGNVLRVRGKNITENDHVKIGQFHTLELELKRPFVLRKEYWDWLALDTIQQACDPTASADLAVILMQEGLAHLFLIGRSITATRSRIETSIPRKHGPAIAGYESALKKFFEHVLQALLKHIDFEVVQCVVIASPGFTKDQFRDYMHLEAARRDLRVIIENKSRIILAHAPSGYKHSLKEVLDTPGVMSLIKDTKAAQEDSARACYGPKHVEVAHERLAIQTLLMTDTLFRNTDIASRRKYVNLVESVKKYGGTVHIFSSMHVSGDQLAQLTGIAAILRFPLPDLEDIEM

SEQ ID NO: 13452 - protein, 224 aa, Triticum aestivum
  peptide (1)..(224): Ceres Seq. ID no. 13655385
  misc_feature (1)..(127): Pfam Name: Pfam Description:  eRF1 domain 2
  misc_feature (1)..(224): NCBI GI NO: 38345200 NR Description: OSJNBa0015K02.10
  misc_feature (1)..(224): NCBI GI NO: 30687676 NR Description: pelota (PEL1) [Arabidopsis thaliana]
  misc_feature (1)..(224): NCBI GI NO: 15231020 NR Description: pelota-related protein [Arabidopsis thaliana]
  misc_feature (1)..(224): NCBI GI NO: 19387279 NR Description: putative pelota
  misc_feature (1)..(221): NCBI GI NO: 1352736 NR Description: PELOTA PROTEIN
  misc_feature (1)..(221): NCBI GI NO: 17136914 NR Description: pelota CG3959-PA [Drosophila melanogaster]
  misc_feature (1)..(221): NCBI GI NO: 31222612 NR Description: ENSANGP00000006742 [Anopheles gambiae]
  misc_feature (1)..(223): NCBI GI NO: 34854171 NR Description: similar to Pelo protein [Rattus norvegicus]
  misc_feature (1)..(223): NCBI GI NO: 34980901 NR Description: Pelo protein [Mus musculus]
  misc_feature (1)..(223): NCBI GI NO: 13543461 NR Description: pelota (Drosophila) homolog [Homo sapiens]
MQEGLAHLFLIGRSITATRSRIETSIPRKHGPAIAGYESALKKFFEHVLQALLKHIDFEVVQCVVIASPGFTKDQFRDYMHLEAARRDLRVIIENKSRIILAHAPSGYKHSLKEVLDTPGVMSLIKDTKAAQEDSARACYGPKHVEVAHERLAIQTLLMTDTLFRNTDIASRRKYVNLVESVKKYGGTVHIFSSMHVSGDQLAQLTGIAAILRFPLPDLEDIEM

SEQ ID NO: 13453 - DNA, 1273 bp, Triticum aestivum
  misc_feature (1)..(1273): Ceres Seq. ID no. 13596965
gtgttcttctcttcgaatcgagatcacgaccgcgagtggacagagaggcgacgcgaatcccccgaacctcatatttgccacccgccctcttccaaagatggctgcttcggcggccttcgcggcggtggcggtcatgatgctggtggcagcgcacttggccgttgcggcggcagctccggtgacggccccggcgttcctctgggcgcctgagaactatggttcccacgagactaaaggagtagtccactatcagacaatgccaccggcaagtctagcaaaatctgttcttgatgaaggtggctggtcaaacttggtgtgttcaagggagggctcttataagaatgttgacattgcagttgtttttcttggctcgaagctacaatcgtcagacatctctagagataagcaagctgatccatctttggctgacacactaaagctctccttcacaggctcagagttttccatggcattcccttatgttgctttgacagataatgacaaattggagagctcattgctatctggacttgctgagaattgtgacaatgattttcgcggaaaccacatcacatacacagacacgtgtactgtaagtggtgaagatctgaagaaacatcaaagcatggattctattcgcgacttagtgatgtcacggaagagaagcaatccaaggggaaagactgatctaattgtcttctgtaatggcggtttcaaggatttagataatgcaaaatcagaaggggagttgctttccgagctggtttctgtgctgaaaatgtctgaggccagatatacagttctttatgcttcccaaccctatggtttactggagaacccttccaacctaccattagccaggtatcttgcagagaagaccaacactactactaaatctggcctaggcaaatgtgatggggagtgcctagtaaaatcaagtcttctggaaggaacttttgttggactagtgctgctgatcattttgatatcaggactctgctgtatgatgggaatcgataccccctcgaggtttgaggctccccaggattaggtaggagagtacaaatcccattgaagcctgccagatatgaaagctcaaggcaggcgtgagaaatacaaatagtcaatttgcactgtggatataagttgcctcatatatgttaccaagacacgtgaccgattttttgtataatattattacatctcggacgtacgaccgaccagaaagatgtagctgagctcaaaacatattcttatgccaggcttgtgttat

SEQ ID NO: 13454 - protein, 349 aa, Triticum aestivum
  peptide (1)..(349): Ceres Seq. ID no. 13596966
  misc_feature (41)..(349): NCBI GI NO: 30682651 NR Description: expressed protein [Arabidopsis thaliana]
  misc_feature (41)..(349): NCBI GI NO: 24417230 NR Description: unknown [Arabidopsis thaliana]
  misc_feature (149)..(349): NCBI GI NO: 21618303 NR Description: unknown [Arabidopsis thaliana]
  misc_feature (86)..(146): NCBI GI NO: 25405838 NR Description: hypothetical protein T5A14.4
CSSLRIEITTASGQRGDANPPNLIFATRPLPKMAASAAFAAVAVMMLVAAHLAVAAAAPVTAPAFLWAPENYGSHETKGVVHYQTMPPASLAKSVLDEGGWSNLVCSREGSYKNVDIAVVFLGSKLQSSDISRDKQADPSLADTLKLSFTGSEFSMAFPYVALTDNDKLESSLLSGLAENCDNDFRGNHITYTDTCTVSGEDLKKHQSMDSIRDLVMSRKRSNPRGKTDLIVFCNGGFKDLDNAKSEGELLSELVSVLKMSEARYTVLYASQPYGLLENPSNLPLARYLAEKTNTTTKSGLGKCDGECLVKSSLLEGTFVGLVLLIILISGLCCMMGIDTPSRFEAPQD

SEQ ID NO: 13455 - protein, 317 aa, Triticum aestivum
  peptide (1)..(317): Ceres Seq. ID no. 13596967
  misc_feature (9)..(317): NCBI GI NO: 30682651 NR Description: expressed protein [Arabidopsis thaliana]
  misc_feature (9)..(317): NCBI GI NO: 24417230 NR Description: unknown [Arabidopsis thaliana]
  misc_feature (117)..(317): NCBI GI NO: 21618303 NR Description: unknown [Arabidopsis thaliana]
  misc_feature (54)..(114): NCBI GI NO: 25405838 NR Description: hypothetical protein T5A14.4
MAASAAFAAVAVMMLVAAHLAVAAAAPVTAPAFLWAPENYGSHETKGVVHYQTMPPASLAKSVLDEGGWSNLVCSREGSYKNVDIAVVFLGSKLQSSDISRDKQADPSLADTLKLSFTGSEFSMAFPYVALTDNDKLESSLLSGLAENCDNDFRGNHITYTDTCTVSGEDLKKHQSMDSIRDLVMSRKRSNPRGKTDLIVFCNGGFKDLDNAKSEGELLSELVSVLKMSEARYTVLYASQPYGLLENPSNLPLARYLAEKTNTTTKSGLGKCDGECLVKSSLLEGTFVGLVLLIILISGLCCMMGIDTPSRFEAPQD

SEQ ID NO: 13456 - protein, 305 aa, Triticum aestivum
  peptide (1)..(305): Ceres Seq. ID no. 13596968
  misc_feature (1)..(305): NCBI GI NO: 30682651 NR Description: expressed protein [Arabidopsis thaliana]
  misc_feature (1)..(305): NCBI GI NO: 24417230 NR Description: unknown [Arabidopsis thaliana]
  misc_feature (105)..(305): NCBI GI NO: 21618303 NR Description: unknown [Arabidopsis thaliana]
  misc_feature (42)..(102): NCBI GI NO: 25405838 NR Description: hypothetical protein T5A14.4
MMLVAAHLAVAAAAPVTAPAFLWAPENYGSHETKGVVHYQTMPPASLAKSVLDEGGWSNLVCSREGSYKNVDIAVVFLGSKLQSSDISRDKQADPSLADTLKLSFTGSEFSMAFPYVALTDNDKLESSLLSGLAENCDNDFRGNHITYTDTCTVSGEDLKKHQSMDSIRDLVMSRKRSNPRGKTDLIVFCNGGFKDLDNAKSEGELLSELVSVLKMSEARYTVLYASQPYGLLENPSNLPLARYLAEKTNTTTKSGLGKCDGECLVKSSLLEGTFVGLVLLIILISGLCCMMGIDTPSRFEAPQD

SEQ ID NO: 13457 - DNA, 978 bp, Triticum aestivum
  misc_feature (1)..(978): Ceres Seq. ID no. 12616101
aacacatctttgacatccccacgaccgcactcgagtagcagccgcagacagatctttctcgacacccaccggcggctaagcggatatggcggcctcaccggcaacatcgtccgcggccgcgagggcctccaccttcgcacggctatccaacgcgcccctgcgtgcgcccagagccgccgccgtctcgttcccgtctcccaactccgctcgtccggccgcgctggtcgcggatgctcgggcttcccggctccccgtcgtggccgcagccgccggagggcaccagcggctgatggggtcgctgaccaacaccgaggggctcaggttcggcgtggttgtggcacggttcaatgagatagtgaccaacttgcttctgcagggggctttagaggcattcgagcgatactctgtcaaagcagaaaatatcaccgttgttagtgttcctggcagctttgaaattcctgttgcagcacagaagcttgggaagtctggaaagtatgatgcaattttgtgcattggggctgtgattagaggtgacacaacccactatgatgctgttgcaaactctgctgcttcaggtgtactcaatgctggattgtctgctggcgtcccctgcgtatttggtgttctgacctgtgatgacatggaccaggcgctaaatcgtgctggtggcaaggctggaaacaaaggtgctgagaccgccataactgctattgagatggcctcgctgtttcggcatcacttagcctgatgacaccgaatgctatggtcggcgagccagcaagattttctcccctgttcgcggctatcggagtttttcccccacatttgttttaaaatttcttttttcttgctgcaggctagtgtttgacatgtcgtttctaaattattttggtctgtacgtatgtactctgattgcctgttcgcctttgcccgcaagaaacttgcaagtttagagcatgaataaactttttttcctgc

SEQ ID NO: 13458 - protein, 220 aa, Triticum aestivum
  peptide (1)..(220): Ceres Seq. ID no. 12616102
  misc_feature (76)..(218): Pfam Name: Pfam Description:  6,7-dimethyl-8-ribityllumazine synthase
  misc_feature (2)..(220): NCBI GI NO: 38345388 NR Description: OSJNBa0067K08.17
  misc_feature (33)..(219): NCBI GI NO: 15224809 NR Description: 6,7-dimethyl-8-ribityllumazine synthase precursor
  misc_feature (24)..(219): NCBI GI NO: 20139859 NR Description: 6
  misc_feature (66)..(219): NCBI GI NO: 5532608 NR Description: 6,7-dimethyl-8-ribityllumazine synthase precursor
  misc_feature (68)..(219): NCBI GI NO: 9954974 NR Description: Chain A
  misc_feature (68)..(216): NCBI GI NO: 2497762 NR Description: 6,7-dimethyl-8-ribityllumazine synthase
  misc_feature (70)..(217): NCBI GI NO: 21402167 NR Description: DMRL_synthase
  misc_feature (70)..(216): NCBI GI NO: 39996791 NR Description: riboflavin synthase, beta subunit
  misc_feature (70)..(216): NCBI GI NO: 15672978 NR Description: ribiflavin synthase beta chain (EC 2.5.1.9)
  misc_feature (68)..(216): NCBI GI NO: 22549962 NR Description: 6,7-dimethyl-8-ribityllumazine synthase
MAASPATSSAAARASTFARLSNAPLRAPRAAAVSFPSPNSARPAALVADARASRLPVVAAAAGGHQRLMGSLTNTEGLRFGVVVARFNEIVTNLLLQGALEAFERYSVKAENITVVSVPGSFEIPVAAQKLGKSGKYDAILCIGAVIRGDTTHYDAVANSAASGVLNAGLSAGVPCVFGVLTCDDMDQALNRAGGKAGNKGAETAITAIEMASLFRHHLA

SEQ ID NO: 13459 - protein, 152 aa, Triticum aestivum
  peptide (1)..(152): Ceres Seq. ID no. 12616103
  misc_feature (8)..(150): Pfam Name: Pfam Description:  6,7-dimethyl-8-ribityllumazine synthase
  misc_feature (1)..(152): NCBI GI NO: 38345388 NR Description: OSJNBa0067K08.17
  misc_feature (1)..(151): NCBI GI NO: 15224809 NR Description: 6,7-dimethyl-8-ribityllumazine synthase precursor
  misc_feature (1)..(151): NCBI GI NO: 20139859 NR Description: 6
  misc_feature (1)..(151): NCBI GI NO: 5532608 NR Description: 6,7-dimethyl-8-ribityllumazine synthase precursor
  misc_feature (1)..(151): NCBI GI NO: 9954974 NR Description: Chain A
  misc_feature (1)..(148): NCBI GI NO: 2497762 NR Description: 6,7-dimethyl-8-ribityllumazine synthase
  misc_feature (2)..(149): NCBI GI NO: 21402167 NR Description: DMRL_synthase
  misc_feature (2)..(148): NCBI GI NO: 39996791 NR Description: riboflavin synthase, beta subunit
  misc_feature (2)..(148): NCBI GI NO: 15672978 NR Description: ribiflavin synthase beta chain (EC 2.5.1.9)
  misc_feature (1)..(148): NCBI GI NO: 22549962 NR Description: 6,7-dimethyl-8-ribityllumazine synthase
MGSLTNTEGLRFGVVVARFNEIVTNLLLQGALEAFERYSVKAENITVVSVPGSFEIPVAAQKLGKSGKYDAILCIGAVIRGDTTHYDAVANSAASGVLNAGLSAGVPCVFGVLTCDDMDQALNRAGGKAGNKGAETAITAIEMASLFRHHLA

SEQ ID NO: 13460 - protein, 116 aa, Triticum aestivum
  peptide (1)..(116): Ceres Seq. ID no. 12616104
NTSLTSPRPHSSSSRRQIFLDTHRRLSGYGGLTGNIVRGREGLHLRTAIQRAPACAQSRRRLVPVSQLRSSGRAGRGCSGFPAPRRGRSRRRAPAADGVADQHRGAQVRRGCGTVQ

SEQ ID NO: 13461 - DNA, 1116 bp, Triticum aestivum
  misc_feature (1)..(1116): Ceres Seq. ID no. 13597006
gagatctcgacttgggaactctcacaagaagacgccgagaggagaggagaggatgctgctgaggagctcctccacgccattcctgcgctccttcctcacctcctcctcctcccctacgcccccttcctccctccagctccggcgggccttctccgacggccacctcccttcgctcaacccctcctcctccggcgacaacgacagcaacagaaccaccggcctccacaccgagctctccttctctgtctacaacaccttcagcaaggccaagctggagccccaccaggagcaggagatggaggaggagcaggagcaggcgccgcagcctgagctgccggagctgccgctgttcctggcgaggggcatggggatcgaccgcctcgcctccggcctcttcaccgccggcatgggctccgaggctgccctggccaggatggccagcggggtggaccagaaggcggtgctggcgctggacgcccagtacaaggagatggtggacgagcagcccggcaacgccctgttcctacgcaactacgcgcagttcctgcacgaggtgaagtgtgactcgagaagggcggaggagtactactcgcgcgcgatgctcgccgacccaaccgacggcgagatcatgtcgcagtacgcgaagctggtgtgggcggtgcaccgcgaccacgaaaggtccctcacctacttccagaagtcggtgcaggcggccccgcgggacagccacgtcctcgcggcgtacgccagcttcctgtgggagcaggacgaggacgaggacgacgacggtggtcttgggggaggcgagcagggatcacccgggcgtgctacgcagccgaggcagctggcttccacggccgtttgactaccagggtggccgagatgggctaacgatgtgcttgctgaggatgatcatgcttgtagtattgtgtttccgtgtaacctgcaaaatgtttggacggtcgaggtgcgtgcacttgctacagaataaagaacgtaaacggttgagggaatggaaggctggacctgtaaacattggtgattccgtctgcagatgctaagttgtcactatgtttattggctaaattataggagtactaagggggtgtttgttcc

SEQ ID NO: 13462 - protein, 287 aa, Triticum aestivum
  peptide (1)..(287): Ceres Seq. ID no. 13597007
  misc_feature (7)..(270): NCBI GI NO: 18412668 NR Description: expressed protein [Arabidopsis thaliana]
  misc_feature (130)..(262): NCBI GI NO: 15241290 NR Description: expressed protein [Arabidopsis thaliana]
  misc_feature (112)..(269): NCBI GI NO: 18390404 NR Description: expressed protein [Arabidopsis thaliana]
  misc_feature (112)..(269): NCBI GI NO: 21555875 NR Description: unknown [Arabidopsis thaliana]
  misc_feature (161)..(262): NCBI GI NO: 7487766 NR Description: hypothetical protein T6K21
  misc_feature (161)..(262): NCBI GI NO: 18414994 NR Description: expressed protein [Arabidopsis thaliana]
  misc_feature (161)..(262): NCBI GI NO: 21592868 NR Description: unknown [Arabidopsis thaliana]
  misc_feature (156)..(262): NCBI GI NO: 14532728 NR Description: unknown protein [Arabidopsis thaliana]
  misc_feature (156)..(262): NCBI GI NO: 15236755 NR Description: expressed protein [Arabidopsis thaliana]
  misc_feature (161)..(262): NCBI GI NO: 37537130 NR Description: unknown protein
RSRLGNSHKKTPRGEERMLLRSSSTPFLRSFLTSSSSPTPPSSLQLRRAFSDGHLPSLNPSSSGDNDSNRTTGLHTELSFSVYNTFSKAKLEPHQEQEMEEEQEQAPQPELPELPLFLARGMGIDRLASGLFTAGMGSEAALARMASGVDQKAVLALDAQYKEMVDEQPGNALFLRNYAQFLHEVKCDSRRAEEYYSRAMLADPTDGEIMSQYAKLVWAVHRDHERSLTYFQKSVQAAPRDSHVLAAYASFLWEQDEDEDDDGGLGGGEQGSPGRATQPRQLASTAV

SEQ ID NO: 13463 - protein, 270 aa, Triticum aestivum
  peptide (1)..(270): Ceres Seq. ID no. 13597008
  misc_feature (1)..(253): NCBI GI NO: 18412668 NR Description: expressed protein [Arabidopsis thaliana]
  misc_feature (113)..(245): NCBI GI NO: 15241290 NR Description: expressed protein [Arabidopsis thaliana]
  misc_feature (95)..(252): NCBI GI NO: 18390404 NR Description: expressed protein [Arabidopsis thaliana]
  misc_feature (95)..(252): NCBI GI NO: 21555875 NR Description: unknown [Arabidopsis thaliana]
  misc_feature (144)..(245): NCBI GI NO: 7487766 NR Description: hypothetical protein T6K21
  misc_feature (144)..(245): NCBI GI NO: 18414994 NR Description: expressed protein [Arabidopsis thaliana]
  misc_feature (144)..(245): NCBI GI NO: 21592868 NR Description: unknown [Arabidopsis thaliana]
  misc_feature (139)..(245): NCBI GI NO: 14532728 NR Description: unknown protein [Arabidopsis thaliana]
  misc_feature (139)..(245): NCBI GI NO: 15236755 NR Description: expressed protein [Arabidopsis thaliana]
  misc_feature (144)..(245): NCBI GI NO: 37537130 NR Description: unknown protein
MLLRSSSTPFLRSFLTSSSSPTPPSSLQLRRAFSDGHLPSLNPSSSGDNDSNRTTGLHTELSFSVYNTFSKAKLEPHQEQEMEEEQEQAPQPELPELPLFLARGMGIDRLASGLFTAGMGSEAALARMASGVDQKAVLALDAQYKEMVDEQPGNALFLRNYAQFLHEVKCDSRRAEEYYSRAMLADPTDGEIMSQYAKLVWAVHRDHERSLTYFQKSVQAAPRDSHVLAAYASFLWEQDEDEDDDGGLGGGEQGSPGRATQPRQLASTAV

SEQ ID NO: 13464 - protein, 189 aa, Triticum aestivum
  peptide (1)..(189): Ceres Seq. ID no. 13597009
  misc_feature (1)..(172): NCBI GI NO: 18412668 NR Description: expressed protein [Arabidopsis thaliana]
  misc_feature (32)..(164): NCBI GI NO: 15241290 NR Description: expressed protein [Arabidopsis thaliana]
  misc_feature (14)..(171): NCBI GI NO: 18390404 NR Description: expressed protein [Arabidopsis thaliana]
  misc_feature (14)..(171): NCBI GI NO: 21555875 NR Description: unknown [Arabidopsis thaliana]
  misc_feature (63)..(164): NCBI GI NO: 7487766 NR Description: hypothetical protein T6K21
  misc_feature (63)..(164): NCBI GI NO: 21592868 NR Description: unknown [Arabidopsis thaliana]
  misc_feature (63)..(164): NCBI GI NO: 18414994 NR Description: expressed protein [Arabidopsis thaliana]
  misc_feature (58)..(164): NCBI GI NO: 14532728 NR Description: unknown protein [Arabidopsis thaliana]
  misc_feature (58)..(164): NCBI GI NO: 15236755 NR Description: expressed protein [Arabidopsis thaliana]
  misc_feature (63)..(164): NCBI GI NO: 37537130 NR Description: unknown protein
MEEEQEQAPQPELPELPLFLARGMGIDRLASGLFTAGMGSEAALARMASGVDQKAVLALDAQYKEMVDEQPGNALFLRNYAQFLHEVKCDSRRAEEYYSRAMLADPTDGEIMSQYAKLVWAVHRDHERSLTYFQKSVQAAPRDSHVLAAYASFLWEQDEDEDDDGGLGGGEQGSPGRATQPRQLASTAV

SEQ ID NO: 13465 - DNA, 1002 bp, Triticum aestivum
  misc_feature (1)..(1002): Ceres Seq. ID no. 13598416
actttattctacttctccgcccacgcccagcgagcacgagactgacgacgagacccgagagaggccgagacctggaagatccgaatccatcgccgctcccccacgcgacgagatgtcttcacccgcagagtactacaattcacttccaccagtaagcaaggcatatgggacattgtgtttctttaccacagtgctggttcagctccagatactagacccaggccttctttatttatcttatccccatgtgttcaagagttttcagatatggaggctatttacaagcttctttttcctcggcaagttctccatcaactttggtattcgccttctgatgatagcaagatatggtgtgcagttggagaagggttcatttgagaagcggacagcagatttcttgtggatgatgatatttggtgcaatctcgttactggtactgtctgctattccctatctcgagacttatttgttgggtattcctatggttagcatgcttctttatgtctggagccgagagtacccaaactctcagataagcatgtatggcctcgtccaattgaggtcattttatctaccatgggctatgcttggattggatgtgatatttggctctccaatattgcctggccttttgggcattatggttggacatctgtactacttctttacagtgttgtatccgctagctagcggaaagaactacctcaagactcctatgtgggtacacaagattgttgctcgattcaggttgggcgtgcaggcaaactctccagtccggccagctaacacaggccctactgccttcagaggaagaggctatagactcaatcagtagactgctgcgacgcctggcgatgtacaagaggcatgaacaggttaacatggattcgatctaaactctgtggcagctctaggaatctgggttgggatttttcccattgaatctgtaatgtcctcatcgaataactacagatgtgcacttgcattgtacctgcgaagtgc

SEQ ID NO: 13466 - protein, 277 aa, Triticum aestivum
  peptide (1)..(277): Ceres Seq. ID no. 15222337
  misc_feature (48)..(238): Pfam Name: Pfam Description:  Der1-like family
  misc_feature (44)..(277): NCBI GI NO: 9187743 NR Description: putative NADH oxidoreductase [Zea mays]
  misc_feature (38)..(272): NCBI GI NO: 22329014 NR Description: expressed protein [Arabidopsis thaliana]
  misc_feature (44)..(272): NCBI GI NO: 25407607 NR Description: hypothetical protein AT4g29330
  misc_feature (42)..(238): NCBI GI NO: 15777933 NR Description: putative NADH oxidoreductase complex I subunithomolog
  misc_feature (42)..(238): NCBI GI NO: 35505512 NR Description: FLJ43842 protein [Homo sapiens]
  misc_feature (48)..(238): NCBI GI NO: 13435738 NR Description: RIKEN cDNA 1810063P04 gene [Mus musculus]
  misc_feature (48)..(238): NCBI GI NO: 18859601 NR Description: RIKEN cDNA 1810063P04 [Mus musculus musculus]
  misc_feature (48)..(241): NCBI GI NO: 34852394 NR Description: similar to carcinoma related gene
  misc_feature (45)..(275): NCBI GI NO: 16151831 NR Description: F-LANa [Mus musculus]
  misc_feature (45)..(238): NCBI GI NO: 15808990 NR Description: carcinoma related gene [Mus musculus]
LYSTSPPTPSEHETDDETRERPRPGRSESIAAPPRDEMSSPAEYYNSLPPVSKAYGTLCFFTTVLVQLQILDPGLLYLSYPHVFKSFQIWRLFTSFFFLGKFSINFGIRLLMIARYGVQLEKGSFEKRTADFLWMMIFGAISLLVLSAIPYLETYLLGIPMVSMLLYVWSREYPNSQISMYGLVQLRSFYLPWAMLGLDVIFGSPILPGLLGIMVGHLYYFFTVLYPLASGKNYLKTPMWVHKIVARFRLGVQANSPVRPANTGPTAFRGRGYRLNQ

SEQ ID NO: 13467 - protein, 240 aa, Triticum aestivum
  peptide (1)..(240): Ceres Seq. ID no. 15222338
  misc_feature (11)..(201): Pfam Name: Pfam Description:  Der1-like family
  misc_feature (7)..(240): NCBI GI NO: 9187743 NR Description: putative NADH oxidoreductase [Zea mays]
  misc_feature (1)..(235): NCBI GI NO: 22329014 NR Description: expressed protein [Arabidopsis thaliana]
  misc_feature (7)..(235): NCBI GI NO: 25407607 NR Description: hypothetical protein AT4g29330
  misc_feature (5)..(201): NCBI GI NO: 15777933 NR Description: putative NADH oxidoreductase complex I subunithomolog
  misc_feature (5)..(201): NCBI GI NO: 35505512 NR Description: FLJ43842 protein [Homo sapiens]
  misc_feature (11)..(201): NCBI GI NO: 13435738 NR Description: RIKEN cDNA 1810063P04 gene [Mus musculus]
  misc_feature (11)..(201): NCBI GI NO: 18859601 NR Description: RIKEN cDNA 1810063P04 [Mus musculus musculus]
  misc_feature (11)..(204): NCBI GI NO: 34852394 NR Description: similar to carcinoma related gene
  misc_feature (8)..(238): NCBI GI NO: 16151831 NR Description: F-LANa [Mus musculus]
  misc_feature (8)..(201): NCBI GI NO: 15808990 NR Description: carcinoma related gene [Mus musculus]
MSSPAEYYNSLPPVSKAYGTLCFFTTVLVQLQILDPGLLYLSYPHVFKSFQIWRLFTSFFFLGKFSINFGIRLLMIARYGVQLEKGSFEKRTADFLWMMIFGAISLLVLSAIPYLETYLLGIPMVSMLLYVWSREYPNSQISMYGLVQLRSFYLPWAMLGLDVIFGSPILPGLLGIMVGHLYYFFTVLYPLASGKNYLKTPMWVHKIVARFRLGVQANSPVRPANTGPTAFRGRGYRLNQ

SEQ ID NO: 13468 - protein, 166 aa, Triticum aestivum
  peptide (1)..(166): Ceres Seq. ID no. 15222339
  misc_feature (1)..(127): Pfam Name: Pfam Description:  Der1-like family
  misc_feature (1)..(166): NCBI GI NO: 9187743 NR Description: putative NADH oxidoreductase [Zea mays]
  misc_feature (1)..(161): NCBI GI NO: 22329014 NR Description: expressed protein [Arabidopsis thaliana]
  misc_feature (1)..(161): NCBI GI NO: 25407607 NR Description: hypothetical protein AT4g29330
  misc_feature (1)..(127): NCBI GI NO: 15777933 NR Description: putative NADH oxidoreductase complex I subunithomolog
  misc_feature (1)..(127): NCBI GI NO: 35505512 NR Description: FLJ43842 protein [Homo sapiens]
  misc_feature (1)..(127): NCBI GI NO: 13435738 NR Description: RIKEN cDNA 1810063P04 gene [Mus musculus]
  misc_feature (1)..(127): NCBI GI NO: 18859601 NR Description: RIKEN cDNA 1810063P04 [Mus musculus musculus]
  misc_feature (1)..(130): NCBI GI NO: 34852394 NR Description: similar to carcinoma related gene
  misc_feature (1)..(164): NCBI GI NO: 16151831 NR Description: F-LANa [Mus musculus]
  misc_feature (1)..(127): NCBI GI NO: 15808990 NR Description: carcinoma related gene [Mus musculus]
MIARYGVQLEKGSFEKRTADFLWMMIFGAISLLVLSAIPYLETYLLGIPMVSMLLYVWSREYPNSQISMYGLVQLRSFYLPWAMLGLDVIFGSPILPGLLGIMVGHLYYFFTVLYPLASGKNYLKTPMWVHKIVARFRLGVQANSPVRPANTGPTAFRGRGYRLNQ

SEQ ID NO: 13469 - DNA, 1241 bp, Triticum aestivum
  misc_feature (1)..(1241): Ceres Seq. ID no. 13596969
cgaaaaacccacagccacatttgtcctacttagagacccagctagatcaccatggcttcctcggctgctcgtctcctgcttgtcttcgcgacagctctggtgctgagctctgtgtctgcagcagcggtgggggctggtggctcgccgccgctggccaagggcctgtcgttcgagttctaccgcgccaggtgcccgcaggcggaggccatcgtcttcgccttcctcaaggacgccatccgcaaggacgtcggcctcgccgccgcgctcctccgcatccacttccacgactgcttcgtgcagggctgcgacggctccgtgctcctcgacaagaccaacggcgtcgacagcgagaaggtgtctcccccgaacgtcacgctgcgtccgtcggcgttcaaggccatcaacgccatccgcgcgctcctccagaaggcgtgcggcgggcccgtcgtctcctgcgccgacatcgccgcgctcgccgcccgcgactccgtccagctggccggcgggccgcggtacgccgtcccgctcggccgccgcgacgggctcgcccccgcttccctggacaccatcctgggcgcgctcccgccgccgacctccaaggtgcccgtgctcctcagcttcctcgccaagatcggcctcaacgccgacgacctggtggcgctctccggcgcgcacacgctcgggatcgcgcactgcggctccttcgaggagcggctgtttcccaaggtcgaccccaccatggacaagtttttcgccggccacctcaagctcacctgcccgcggctcaaggtggacaacttcaccgccaacgacatccgcacgcctgacgtgttcgacaacaagttctacgtcgacctgctcaaccggcagggtctcttcacctccgaccaggacctgcacaccgacgccaagaccaagcccatggtcaccaggttcgccgtcgaccaggccgccttcttcgaccagttcgtcaagtccatggtgaaaatggggcagatcaacgtgctcactggcaaccagggtcagatccgcacggactgctccattcccaacgccgcccgcagtgccggcgacgagctgccgtggtccgtcgtcgagaccgccgtggagagcttggtgttgtaggtagtagtagggtttagtccatggatctcaagcttgttttatgttttggcaaggtttggactttggaagtcagagtgcatgcgtgtttagtttgttgagcaagaccgaaccagttg

SEQ ID NO: 13470 - protein, 357 aa, Triticum aestivum
  peptide (1)..(357): Ceres Seq. ID no. 13596970
  misc_feature (54)..(298): Pfam Name: Pfam Description:  Peroxidase
  misc_feature (1)..(354): NCBI GI NO: 34905826 NR Description: putative peroxidase
  misc_feature (2)..(357): NCBI GI NO: 34905834 NR Description: putative peroxidase
  misc_feature (1)..(356): NCBI GI NO: 34905838 NR Description: putative peroxidase
  misc_feature (15)..(354): NCBI GI NO: 22001285 NR Description: peroxidase 1 [Triticum aestivum]
  misc_feature (3)..(336): NCBI GI NO: 34905830 NR Description: putative peroxidase
  misc_feature (9)..(353): NCBI GI NO: 82410 NR Description: peroxidase (EC 1.11.1.7) BP1 precursor - barley
  misc_feature (11)..(355): NCBI GI NO: 1389835 NR Description: peroxidase [Linum usitatissimum]
  misc_feature (1)..(356): NCBI GI NO: 478409 NR Description: peroxidase (EC 1.11.1.7), cationic - adzuki bean
  misc_feature (32)..(334): NCBI GI NO: 2624498 NR Description: Crystal Structure Of Barley Grain Peroxidase 1
  misc_feature (1)..(336): NCBI GI NO: 14031049 NR Description: peroxidase [Nicotiana tabacum]
MASSAARLLLVFATALVLSSVSAAAVGAGGSPPLAKGLSFEFYRARCPQAEAIVFAFLKDAIRKDVGLAAALLRIHFHDCFVQGCDGSVLLDKTNGVDSEKVSPPNVTLRPSAFKAINAIRALLQKACGGPVVSCADIAALAARDSVQLAGGPRYAVPLGRRDGLAPASLDTILGALPPPTSKVPVLLSFLAKIGLNADDLVALSGAHTLGIAHCGSFEERLFPKVDPTMDKFFAGHLKLTCPRLKVDNFTANDIRTPDVFDNKFYVDLLNRQGLFTSDQDLHTDAKTKPMVTRFAVDQAAFFDQFVKSMVKMGQINVLTGNQGQIRTDCSIPNAARSAGDELPWSVVETAVESLVL

SEQ ID NO: 13471 - protein, 274 aa, Triticum aestivum
  peptide (1)..(274): Ceres Seq. ID no. 13596971
KNPQPHLSYLETQLDHHGFLGCSSPACLRDSSGAELCVCSSGGGWWLAAAGQGPVVRVLPRQVPAGGGHRLRLPQGRHPQGRRPRRRAPPHPLPRLLRAGLRRLRAPRQDQRRRQREGVSPERHAASVGVQGHQRHPRAPPEGVRRARRLLRRHRRARRPRLRPAGRRAAVRRPARPPRRARPRFPGHHPGRAPAADLQGARAPQLPRQDRPQRRRPGGALRRAHARDRALRLLRGAAVSQGRPHHGQVFRRPPQAHLPAAQGGQLHRQRHPHA

SEQ ID NO: 13472 - DNA, 1177 bp, Triticum aestivum
  misc_feature (1)..(1177): Ceres Seq. ID no. 14302454
accccccactccccatctatccccgccccgcccgtcccggatccacaccgccgccgcgatgccgtcgttcaaggccccggcgccgggcttctccgtccgcttcagcccgttccacgagcatcgcctcctcgctgccacctcgcagcacttcggtctcgtcggcaacgggcacctcctggttctcgacctctccgccgccgggcccggcgggcccggcctcaccccgctcttctccttccccacctccgacgcgctcttcgactgcgcgtggtccgagtcccacgactccctctgcgccgccgcgtcgggggacggctccgtgcggctcttcgacgtcacgctgccgccggcgcagaaccccgtccgcctcctccgggagcacgcgcgggaggtccacgggatcgactggaaccccgtccgccgcgacgccttcctctccgcctcctgggacgacaccctcaagctctggtcccccgaccgccccgcctccgtccgcaccttccgcggccacgagtactgcgtctacgccgccgcgtggtcggcccggcacccggacgtcttcgcgtcggcgtccggcgaccacacggcccgcgtctgggacgtgcgggagccggggcccaccctcgtcatcccggcccacgaccacgaggtgctctccctggattgggacaagtacgacccgtccatcctggccaccggctccgtcgacaagtcgatccgcatctgggacgtccgctcgccgcaggcgcccctcgcccagctcgcggggcacgggtacgccgtcaagcgcgtcaagttctcgccgcatcggcagggcatgctcatgtcctgctcctacgacatgacggtctgcatgtgggattaccggaaagaggacgccctgctgcaaaggtacggccaccacaccgagttcgtagctgggatcgacatgagcgtgctcaccgatgggctgctggccagcaccggctgggacgagatgatctacgtttggccatttgggagtgatcccagagcaatgtaacacaacatattttgataatctgtatcatgtctgttgagtcgatcttacattggctgtgatacatatggaatggaatggaagtaaacacctggtgagttgaagttggaataatgctacggtaccattgtttgcttcacaaattggttaagtttttag

SEQ ID NO: 13473 - protein, 339 aa, Triticum aestivum
  peptide (1)..(339): Ceres Seq. ID no. 14302455
  misc_feature (250)..(287): Pfam Name: Pfam Description:  WD domain, G-beta repeat
  misc_feature (20)..(338): NCBI GI NO: 4689316 NR Description: peroxisomal targeting signal type 2 receptor
  misc_feature (20)..(338): NCBI GI NO: 15218882 NR Description: peroxisomal targeting signal type 2 receptor
  misc_feature (20)..(338): NCBI GI NO: 28195239 NR Description: peroxisomal targeting signal type 2 receptor
  misc_feature (20)..(338): NCBI GI NO: 16611997 NR Description: peroxisomal targeting signal 2 receptor
  misc_feature (29)..(330): NCBI GI NO: 4505731 NR Description: peroxisomal biogenesis factor 7
  misc_feature (18)..(330): NCBI GI NO: 34852639 NR Description: similar to peroxisomal PTS2 receptor
  misc_feature (18)..(330): NCBI GI NO: 6679283 NR Description: peroxisome biogenesis factor 7 [Mus musculus]
  misc_feature (18)..(330): NCBI GI NO: 25090901 NR Description: Peroxisomal targeting signal 2 receptor
  misc_feature (29)..(330): NCBI GI NO: 31216935 NR Description: ENSANGP00000020634 [Anopheles gambiae]
  misc_feature (29)..(213): NCBI GI NO: 40746753 NR Description: hypothetical protein AN0880.2
PPTPHLSPPRPSRIHTAAAMPSFKAPAPGFSVRFSPFHEHRLLAATSQHFGLVGNGHLLVLDLSAAGPGGPGLTPLFSFPTSDALFDCAWSESHDSLCAAASGDGSVRLFDVTLPPAQNPVRLLREHAREVHGIDWNPVRRDAFLSASWDDTLKLWSPDRPASVRTFRGHEYCVYAAAWSARHPDVFASASGDHTARVWDVREPGPTLVIPAHDHEVLSLDWDKYDPSILATGSVDKSIRIWDVRSPQAPLAQLAGHGYAVKRVKFSPHRQGMLMSCSYDMTVCMWDYRKEDALLQRYGHHTEFVAGIDMSVLTDGLLASTGWDEMIYVWPFGSDPRAM

SEQ ID NO: 13474 - protein, 334 aa, Triticum aestivum
  peptide (1)..(334): Ceres Seq. ID no. 14302456
  misc_feature (1)..(228): Pfam Name: Pfam Description:  Formin Homology 2 Domain
TPHSPSIPAPPVPDPHRRRDAVVQGPGAGLLRPLQPVPRASPPRCHLAALRSRRQRAPPGSRPLRRRARRARPHPALLLPHLRRALRLRVVRVPRLPLRRRVGGRLRAALRRHAAAGAEPRPPPPGARAGGPRDRLEPRPPRRLPLRLLGRHPQALVPRPPRLRPHLPRPRVLRLRRRVVGPAPGRLRVGVRRPHGPRLGRAGAGAHPRHPGPRPRGALPGLGQVRPVHPGHRLRRQVDPHLGRPLAAGAPRPARGARVRRQARQVLAASAGHAHVLLLRHDGLHVGLPERGRPAAKVRPPHRVRSWDRHERAHRWAAGQHRLGRDDLRLAIWE

SEQ ID NO: 13475 - protein, 320 aa, Triticum aestivum
  peptide (1)..(320): Ceres Seq. ID no. 14302457
  misc_feature (231)..(268): Pfam Name: Pfam Description:  WD domain, G-beta repeat
  misc_feature (1)..(319): NCBI GI NO: 4689316 NR Description: peroxisomal targeting signal type 2 receptor
  misc_feature (1)..(319): NCBI GI NO: 15218882 NR Description: peroxisomal targeting signal type 2 receptor
  misc_feature (1)..(319): NCBI GI NO: 28195239 NR Description: peroxisomal targeting signal type 2 receptor
  misc_feature (1)..(319): NCBI GI NO: 16611997 NR Description: peroxisomal targeting signal 2 receptor
  misc_feature (10)..(311): NCBI GI NO: 4505731 NR Description: peroxisomal biogenesis factor 7
  misc_feature (1)..(311): NCBI GI NO: 34852639 NR Description: similar to peroxisomal PTS2 receptor
  misc_feature (1)..(311): NCBI GI NO: 6679283 NR Description: peroxisome biogenesis factor 7 [Mus musculus]
  misc_feature (1)..(311): NCBI GI NO: 25090901 NR Description: Peroxisomal targeting signal 2 receptor
  misc_feature (10)..(311): NCBI GI NO: 31216935 NR Description: ENSANGP00000020634 [Anopheles gambiae]
  misc_feature (10)..(194): NCBI GI NO: 40746753 NR Description: hypothetical protein AN0880.2
MPSFKAPAPGFSVRFSPFHEHRLLAATSQHFGLVGNGHLLVLDLSAAGPGGPGLTPLFSFPTSDALFDCAWSESHDSLCAAASGDGSVRLFDVTLPPAQNPVRLLREHAREVHGIDWNPVRRDAFLSASWDDTLKLWSPDRPASVRTFRGHEYCVYAAAWSARHPDVFASASGDHTARVWDVREPGPTLVIPAHDHEVLSLDWDKYDPSILATGSVDKSIRIWDVRSPQAPLAQLAGHGYAVKRVKFSPHRQGMLMSCSYDMTVCMWDYRKEDALLQRYGHHTEFVAGIDMSVLTDGLLASTGWDEMIYVWPFGSDPRAM

SEQ ID NO: 13476 - DNA, 1340 bp, Triticum aestivum
  misc_feature (1)..(1340): Ceres Seq. ID no. 13585282
cacacccgccgccgccgccgccgtctccctccctccctctctctcccccccgacgccgccggctccaagccacatcccaccccgccccgccgtcacccggtctctcgtctcctgcggcggtccgcctccattcgcctctcgttcgcttcgcagacgcgttcttccgtccgcctagcgggctcgctggggagagcggcagcagccatggccatcgggtctctcgtcgcagccgcgtccaggtccagccgccacgccctcgcctccgccgccatctcccaggcggcttacagggcgcgccagcacgccggagtgcctcctctgctctcgcggcttgcaccactcgcccgcgccttcagctcaagccctgcagcagccgatgtcgattcagatctccctgtcatggaagtgcagaaacggcgggtgggcaaaaaggccaagggcgcgaaaagcggaaaagccatgatgttcccactccatttccactatgaagatgtgttgcgtgaggatctgttgctcaaactgaaccacaccaacaccatggaggtccctggattgtttgagatccgactggtgcccaagtctaccaccggtgccaaaatccagtttgggaaactggccatggagattctgtgcggccagaggtgcatacaggcagaactgcctgcccatctgaaagggaaggcgaccaacgcatacctggggtcccagaaagacgccgtgtccctgaggcagagcatcatccgagggcacgggatgtacaacttcctggtcagggtcctgacggtgatgtctatgctggactccaaggtggcgatcgagcaggggaactgcgtaaagttcttcatggccacggagttctgcgagttctcccccgagatagaggaccactttgagatctttgagaccatcggagggttcaacgtgaccatcgtcaccacggcctgctcgaaggaggagacctcgctgctgtggagcggcttcttgctcaaggatgaaggtgagatcagctaagtaagatgctggatgagatcatgagcattgtgactaaagacaaactctggtggaagcttctatcgttttgtgatccgatctttgctagctagagtcaatggccagcttttctttctagagcaatcttgttccggaatgaaactgagttcccctgttatgtctatcttcagaagaggctcgtttttcttctgatatgcagagattcattggtttctacggtttcaaaaaaattctagatggtgatcctcctagttttgtatcctgataggctttggtcatcctcttcatgtgaagagaactaaataataatgcatttgattaaatctgcg

SEQ ID NO: 13477 - protein, 336 aa, Triticum aestivum
  peptide (1)..(336): Ceres Seq. ID no. 13585283
  misc_feature (178)..(228): Pfam Name: Pfam Description:  Ribosomal protein L5
  misc_feature (155)..(334): NCBI GI NO: 5688943 NR Description: ribosomal protein L5
  misc_feature (154)..(334): NCBI GI NO: 27803142 NR Description: ribosomal protein L5 [Triticum aestivum]
  misc_feature (149)..(334): NCBI GI NO: 30351950 NR Description: mitochondrial ribosomal protein L5 [Zea mays]
  misc_feature (155)..(334): NCBI GI NO: 37591117 NR Description: ribosomal protein L5 [Brassica napus]
  misc_feature (155)..(334): NCBI GI NO: 1173079 NR Description: MITOCHONDRIAL 60S RIBOSOMAL PROTEIN L5
  misc_feature (155)..(334): NCBI GI NO: 730588 NR Description: MITOCHONDRIAL 60S RIBOSOMAL PROTEIN L5
  misc_feature (155)..(334): NCBI GI NO: 9838430 NR Description: ribosomal protein L5 [Beta vulgaris]
  misc_feature (155)..(334): NCBI GI NO: 421897 NR Description: ribosomal protein L5
  misc_feature (155)..(334): NCBI GI NO: 4164412 NR Description: ribosomal protein L5 [Pisum sativum]
  misc_feature (155)..(334): NCBI GI NO: 13449308 NR Description: ribosomal protein L5 [Arabidopsis thaliana]
HTRRRRRRLPPSLSLPPDAAGSKPHPTPPRRHPVSRLLRRSASIRLSFASQTRSSVRLAGSLGRAAAAMAIGSLVAAASRSSRHALASAAISQAAYRARQHAGVPPLLSRLAPLARAFSSSPAAADVDSDLPVMEVQKRRVGKKAKGAKSGKAMMFPLHFHYEDVLREDLLLKLNHTNTMEVPGLFEIRLVPKSTTGAKIQFGKLAMEILCGQRCIQAELPAHLKGKATNAYLGSQKDAVSLRQSIIRGHGMYNFLVRVLTVMSMLDSKVAIEQGNCVKFFMATEFCEFSPEIEDHFEIFETIGGFNVTIVTTACSKEETSLLWSGFLLKDEGEIS

SEQ ID NO: 13478 - protein, 268 aa, Triticum aestivum
  peptide (1)..(268): Ceres Seq. ID no. 13585284
  misc_feature (110)..(160): Pfam Name: Pfam Description:  Ribosomal protein L5
  misc_feature (87)..(266): NCBI GI NO: 5688943 NR Description: ribosomal protein L5
  misc_feature (86)..(266): NCBI GI NO: 27803142 NR Description: ribosomal protein L5 [Triticum aestivum]
  misc_feature (81)..(266): NCBI GI NO: 30351950 NR Description: mitochondrial ribosomal protein L5 [Zea mays]
  misc_feature (87)..(266): NCBI GI NO: 37591117 NR Description: ribosomal protein L5 [Brassica napus]
  misc_feature (87)..(266): NCBI GI NO: 1173079 NR Description: MITOCHONDRIAL 60S RIBOSOMAL PROTEIN L5
  misc_feature (87)..(266): NCBI GI NO: 730588 NR Description: MITOCHONDRIAL 60S RIBOSOMAL PROTEIN L5
  misc_feature (87)..(266): NCBI GI NO: 9838430 NR Description: ribosomal protein L5 [Beta vulgaris]
  misc_feature (87)..(266): NCBI GI NO: 421897 NR Description: ribosomal protein L5
  misc_feature (87)..(266): NCBI GI NO: 4164412 NR Description: ribosomal protein L5 [Pisum sativum]
  misc_feature (87)..(266): NCBI GI NO: 13449308 NR Description: ribosomal protein L5 [Arabidopsis thaliana]
MAIGSLVAAASRSSRHALASAAISQAAYRARQHAGVPPLLSRLAPLARAFSSSPAAADVDSDLPVMEVQKRRVGKKAKGAKSGKAMMFPLHFHYEDVLREDLLLKLNHTNTMEVPGLFEIRLVPKSTTGAKIQFGKLAMEILCGQRCIQAELPAHLKGKATNAYLGSQKDAVSLRQSIIRGHGMYNFLVRVLTVMSMLDSKVAIEQGNCVKFFMATEFCEFSPEIEDHFEIFETIGGFNVTIVTTACSKEETSLLWSGFLLKDEGEIS

SEQ ID NO: 13479 - protein, 203 aa, Triticum aestivum
  peptide (1)..(203): Ceres Seq. ID no. 13585285
  misc_feature (45)..(95): Pfam Name: Pfam Description:  Ribosomal protein L5
  misc_feature (22)..(201): NCBI GI NO: 5688943 NR Description: ribosomal protein L5
  misc_feature (21)..(201): NCBI GI NO: 27803142 NR Description: ribosomal protein L5 [Triticum aestivum]
  misc_feature (16)..(201): NCBI GI NO: 30351950 NR Description: mitochondrial ribosomal protein L5 [Zea mays]
  misc_feature (22)..(201): NCBI GI NO: 37591117 NR Description: ribosomal protein L5 [Brassica napus]
  misc_feature (22)..(201): NCBI GI NO: 1173079 NR Description: MITOCHONDRIAL 60S RIBOSOMAL PROTEIN L5
  misc_feature (22)..(201): NCBI GI NO: 730588 NR Description: MITOCHONDRIAL 60S RIBOSOMAL PROTEIN L5
  misc_feature (22)..(201): NCBI GI NO: 9838430 NR Description: ribosomal protein L5 [Beta vulgaris]
  misc_feature (22)..(201): NCBI GI NO: 421897 NR Description: ribosomal protein L5
  misc_feature (22)..(201): NCBI GI NO: 4164412 NR Description: ribosomal protein L5 [Pisum sativum]
  misc_feature (22)..(201): NCBI GI NO: 13449308 NR Description: ribosomal protein L5 [Arabidopsis thaliana]
MEVQKRRVGKKAKGAKSGKAMMFPLHFHYEDVLREDLLLKLNHTNTMEVPGLFEIRLVPKSTTGAKIQFGKLAMEILCGQRCIQAELPAHLKGKATNAYLGSQKDAVSLRQSIIRGHGMYNFLVRVLTVMSMLDSKVAIEQGNCVKFFMATEFCEFSPEIEDHFEIFETIGGFNVTIVTTACSKEETSLLWSGFLLKDEGEIS

SEQ ID NO: 13480 - DNA, 1569 bp, Triticum aestivum
  misc_feature (1)..(1569): Ceres Seq. ID no. 13598460
caggtccgtttacgcgtgtgctgggtttgggcacctctgctccatagcgcgaagagcgaaaggcacggccgccgccacgcaccaccccccctgccgccaacacgctgtaggtccgccgccggcaacattgaaggggcaccacagcacacaaagcagagagtaatggcgtcaacaaccatatcgtcctgcgcatatcaggcagtgcaaggcgcccaccgattgaagatctgtcagtttagtcacggtattgttggcatggacgtcaatgctgatggtttcatccgctccagcaccttcagggttgggggattcgactgggctatcttgtactacccagagggttatggcgacgacagtgagggattcatatcagtttttgttgagttcatgagcaagtatgggaaggcgccagcggtcgtcgacataagactgattgatcaagtcactggaaagcccaaatcgttattgtcaagtgtattctttgaagaggatgaggagccatttcgattcaaatctgacagcttcgcagaggctacctggggtaaggagaggtgtataagaagggaggcgttggaggattcagtgtatgtccgagatgactgccttgtgatcgaatgtgtcatcactgttttaggccaattaagggtgtctgaaactaaaccattgtgtgaaattgatgtgccaccccctaacgcactacagcattttcgcaagatgttagaggatacgtccgcagcagatgtgaccttcgacgttcaacaagaaacatttgctgcccacagggcggtgcttgctgcgcggtcacctgtcttccggaagcagttcagcgaacccatgaaggagaagatgagccgcataaccatcaactctgtggaaccagcggttttcaaggctctcctccatttcatttacaccgattccttgcctgtgatggatgatttcactagagctgaaagcaatgctgttttccagcatctacttgcagctgcggatcaatatggtttagagaggttgaagcttatgtgtgcaggcaccttggttatgaaccttaatgtggagaatgtggctagtgcactatggctagctgataagtacaattgccagaagcttaaagaagcttgtgtcaattttatggccccttccaacagagtcgatgctgtggtggcaagccaagggtaccagcttctgaaaagaggttctccttctccattagcagatgtgtgggagaagaggagccgtgctcgccaaagctttctttagagcagatccaaaagctacaatgctagattatgagtgcttctgtcagcagaatgactggtatgatgaaagcagttccaccaaaatttattgtgcgtatctagatcctgtgctttgaaaaatcatctaagcagtccctggtaactctttagctttttgcgagaaactattaatgtcatgttggtcatgtatgtgtagctgtgaaatgttgatctttagatgcattcctgggtcaatttagcggatatgctccagcaagtatgttccgaatgatgtgtgatctgttgatttgcagcttgttttgatttgggc

SEQ ID NO: 13481 - protein, 419 aa, Triticum aestivum
  peptide (1)..(419): Ceres Seq. ID no. 13598461
  misc_feature (238)..(350): Pfam Name: Pfam Description:  BTB/POZ domain
  misc_feature (55)..(417): NCBI GI NO: 29467516 NR Description: P0582D05.6
  misc_feature (50)..(416): NCBI GI NO: 38175683 NR Description: putative speckle-type POZ protein
  misc_feature (59)..(418): NCBI GI NO: 29467523 NR Description: P0582D05.13
  misc_feature (57)..(412): NCBI GI NO: 38636861 NR Description: putative speckle-type POZ protein
  misc_feature (59)..(417): NCBI GI NO: 38636858 NR Description: zinc finger POZ domain protein-like
  misc_feature (29)..(409): NCBI GI NO: 23617108 NR Description: contains ESTsAU056959
  misc_feature (51)..(405): NCBI GI NO: 24059967 NR Description: contains ESTsAU095258
  misc_feature (59)..(417): NCBI GI NO: 18405153 NR Description: expressed protein [Arabidopsis thaliana]
  misc_feature (59)..(417): NCBI GI NO: 21595740 NR Description: unknown [Arabidopsis thaliana]
  misc_feature (43)..(419): NCBI GI NO: 18397497 NR Description: expressed protein [Arabidopsis thaliana]
QVRLRVCWVWAPLLHSAKSERHGRRHAPPPLPPTRCRSAAGNIEGAPQHTKQRVMASTTISSCAYQAVQGAHRLKICQFSHGIVGMDVNADGFIRSSTFRVGGFDWAILYYPEGYGDDSEGFISVFVEFMSKYGKAPAVVDIRLIDQVTGKPKSLLSSVFFEEDEEPFRFKSDSFAEATWGKERCIRREALEDSVYVRDDCLVIECVITVLGQLRVSETKPLCEIDVPPPNALQHFRKMLEDTSAADVTFDVQQETFAAHRAVLAARSPVFRKQFSEPMKEKMSRITINSVEPAVFKALLHFIYTDSLPVMDDFTRAESNAVFQHLLAAADQYGLERLKLMCAGTLVMNLNVENVASALWLADKYNCQKLKEACVNFMAPSNRVDAVVASQGYQLLKRGSPSPLADVWEKRSRARQSFL

SEQ ID NO: 13482 - protein, 365 aa, Triticum aestivum
  peptide (1)..(365): Ceres Seq. ID no. 13598462
  misc_feature (184)..(296): Pfam Name: Pfam Description:  BTB/POZ domain
  misc_feature (1)..(363): NCBI GI NO: 29467516 NR Description: P0582D05.6
  misc_feature (1)..(362): NCBI GI NO: 38175683 NR Description: putative speckle-type POZ protein
  misc_feature (5)..(364): NCBI GI NO: 29467523 NR Description: P0582D05.13
  misc_feature (3)..(358): NCBI GI NO: 38636861 NR Description: putative speckle-type POZ protein
  misc_feature (5)..(363): NCBI GI NO: 38636858 NR Description: zinc finger POZ domain protein-like
  misc_feature (1)..(355): NCBI GI NO: 23617108 NR Description: contains ESTsAU056959
  misc_feature (1)..(351): NCBI GI NO: 24059967 NR Description: contains ESTsAU095258
  misc_feature (5)..(363): NCBI GI NO: 18405153 NR Description: expressed protein [Arabidopsis thaliana]
  misc_feature (5)..(363): NCBI GI NO: 21595740 NR Description: unknown [Arabidopsis thaliana]
  misc_feature (1)..(365): NCBI GI NO: 18397497 NR Description: expressed protein [Arabidopsis thaliana]
MASTTISSCAYQAVQGAHRLKICQFSHGIVGMDVNADGFIRSSTFRVGGFDWAILYYPEGYGDDSEGFISVFVEFMSKYGKAPAVVDIRLIDQVTGKPKSLLSSVFFEEDEEPFRFKSDSFAEATWGKERCIRREALEDSVYVRDDCLVIECVITVLGQLRVSETKPLCEIDVPPPNALQHFRKMLEDTSAADVTFDVQQETFAAHRAVLAARSPVFRKQFSEPMKEKMSRITINSVEPAVFKALLHFIYTDSLPVMDDFTRAESNAVFQHLLAAADQYGLERLKLMCAGTLVMNLNVENVASALWLADKYNCQKLKEACVNFMAPSNRVDAVVASQGYQLLKRGSPSPLADVWEKRSRARQSFL

SEQ ID NO: 13483 - protein, 334 aa, Triticum aestivum
  peptide (1)..(334): Ceres Seq. ID no. 13598463
  misc_feature (153)..(265): Pfam Name: Pfam Description:  BTB/POZ domain
  misc_feature (1)..(332): NCBI GI NO: 29467516 NR Description: P0582D05.6
  misc_feature (1)..(331): NCBI GI NO: 38175683 NR Description: putative speckle-type POZ protein
  misc_feature (1)..(333): NCBI GI NO: 29467523 NR Description: P0582D05.13
  misc_feature (1)..(327): NCBI GI NO: 38636861 NR Description: putative speckle-type POZ protein
  misc_feature (1)..(332): NCBI GI NO: 38636858 NR Description: zinc finger POZ domain protein-like
  misc_feature (1)..(324): NCBI GI NO: 23617108 NR Description: contains ESTsAU056959
  misc_feature (1)..(320): NCBI GI NO: 24059967 NR Description: contains ESTsAU095258
  misc_feature (1)..(332): NCBI GI NO: 18405153 NR Description: expressed protein [Arabidopsis thaliana]
  misc_feature (1)..(332): NCBI GI NO: 21595740 NR Description: unknown [Arabidopsis thaliana]
  misc_feature (1)..(334): NCBI GI NO: 18397497 NR Description: expressed protein [Arabidopsis thaliana]
MDVNADGFIRSSTFRVGGFDWAILYYPEGYGDDSEGFISVFVEFMSKYGKAPAVVDIRLIDQVTGKPKSLLSSVFFEEDEEPFRFKSDSFAEATWGKERCIRREALEDSVYVRDDCLVIECVITVLGQLRVSETKPLCEIDVPPPNALQHFRKMLEDTSAADVTFDVQQETFAAHRAVLAARSPVFRKQFSEPMKEKMSRITINSVEPAVFKALLHFIYTDSLPVMDDFTRAESNAVFQHLLAAADQYGLERLKLMCAGTLVMNLNVENVASALWLADKYNCQKLKEACVNFMAPSNRVDAVVASQGYQLLKRGSPSPLADVWEKRSRARQSFL

SEQ ID NO: 13484 - DNA, 1778 bp, Triticum aestivum
  misc_feature (1)..(1778): Ceres Seq. ID no. 15170666
aactctcgtctcgttctagtattcttgctcccacacggcgacgtcgccatcgacatcgctgccgctctctcctcagcagcgctcctctaccaccacctcctctaggcaggggttagcggccgccccctccgcgtgcgccgtcccaaaccctagcatatccccctccccgactcctctgcgccggagcttccctccgaccgcgcagatcgccggcgatggggtccaaggaccaggacctggccgcgtcgtcgggcggtggcggaggcttcttctcctcgatcgccgcgggcgtgcgcagctggggcaccgccgtgcacaaatcggtcaacgggttggttggctatgaagggcttgaagttatcaacccagatggaggcacagacgatgcggaagcagaggctatgaaggggcgatggaaacaggaggatcgcgacagttactggaagatgatgaacaagtacataggatcagatgtaacgtcacttgttacacttccagtcatcatctttgagccgatgtcaatgcttcagaaaatggcagagttgatggaatattgtgacctgttagacaaagcagatgaatgtgaggatccacacatgcggatggtatatgcttctacatgggctttgtcagcctacctagcctaccaccgtacgtggaagcctttcaatcccatccttggagagacatatgagatggttaaccaccagggtattacatttattgctgagcaggtaagccatcatcctccgatgggtgcagctcactgtgagaatgatcattttacttacgacatcacatcaaagttgaagacaaagttcttgggaaactcagtggaagtgtatccagttggaaggactagagtgacacttaaaaaatccggtgtcgtgttggaactggtaccaccactgacgaaggtcaacaacttgatatttgggcgcacatgggttgactcttttggagagatggtcttgacaaatctgacaactggagacaaagctgtgctgtatttccagccatgcggctggtttggggctgggcgattcgaggtggatgggtatgtatatactgcagctgaagaaccgaaaataatgatgacaggaaaatggaacaagtccatgagttaccagccttgtgatcaagaaggtgatcctcttccagggacggagctaaaagaggtctggaaagctgctcctgctccaccgaatgacaagtaccagtatacatactttgcgcacaaaataaatagctttgatacagcacctaagaagctcttgccttcagactcccgattaaggcccgacagatatgcccttgagaagggcgacatgtctaaatctggggcacacaagagcaggcttgaagaacaacaaagagctgagaagaaaattcgggacaccaagggggagcaatttactccaaaatggttcaagatgacggaagacatctcccctaccccgtggggcgacctggaggtgtatgaatacaatggcagatacgccgagcaccgggctgcgatagacagctctagcgtcgctgccaaggagaaggacgtcagctccatcgagttcaacccgtggcagtatggcgacttgccttcccaatgatttcaaagggtctgaaaccacccatatattattttctcatcgaaaacgctttcaggccttgtgctgatgcataccggcggtttccgtgccttgtagtattacatgactttccaccttttctcttcgtgctgtgatacagttcaggatgtgattgtgtatttgatgtagtcc

SEQ ID NO: 13485 - protein, 463 aa, Triticum aestivum
  peptide (1)..(463): Ceres Seq. ID no. 15170667
  misc_feature (30)..(433): Pfam Name: Pfam Description:  Oxysterol-binding protein
  misc_feature (10)..(460): NCBI GI NO: 15232633 NR Description: oxysterol-binding protein -related
  misc_feature (17)..(463): NCBI GI NO: 15238398 NR Description: oxysterol-binding protein - like
  misc_feature (15)..(460): NCBI GI NO: 15241681 NR Description: expressed protein [Arabidopsis thaliana]
  misc_feature (1)..(459): NCBI GI NO: 38639323 NR Description: oxysterol-binding protein [Solanum tuberosum]
  misc_feature (17)..(463): NCBI GI NO: 8885548 NR Description: oxysterol-binding protein [Arabidopsis thaliana]
  misc_feature (83)..(301): NCBI GI NO: 38639321 NR Description: putative oxysterol-binding protein
  misc_feature (74)..(306): NCBI GI NO: 19718746 NR Description: oxysterol-binding protein-like 1A isoform A
  misc_feature (314)..(428): NCBI GI NO: 19718746 NR Description: oxysterol-binding protein-like 1A isoform A
  misc_feature (74)..(306): NCBI GI NO: 17529997 NR Description: oxysterol-binding protein-like protein OSBPL1A
  misc_feature (314)..(428): NCBI GI NO: 17529997 NR Description: oxysterol-binding protein-like protein OSBPL1A
MGSKDQDLAASSGGGGGFFSSIAAGVRSWGTAVHKSVNGLVGYEGLEVINPDGGTDDAEAEAMKGRWKQEDRDSYWKMMNKYIGSDVTSLVTLPVIIFEPMSMLQKMAELMEYCDLLDKADECEDPHMRMVYASTWALSAYLAYHRTWKPFNPILGETYEMVNHQGITFIAEQVSHHPPMGAAHCENDHFTYDITSKLKTKFLGNSVEVYPVGRTRVTLKKSGVVLELVPPLTKVNNLIFGRTWVDSFGEMVLTNLTTGDKAVLYFQPCGWFGAGRFEVDGYVYTAAEEPKIMMTGKWNKSMSYQPCDQEGDPLPGTELKEVWKAAPAPPNDKYQYTYFAHKINSFDTAPKKLLPSDSRLRPDRYALEKGDMSKSGAHKSRLEEQQRAEKKIRDTKGEQFTPKWFKMTEDISPTPWGDLEVYEYNGRYAEHRAAIDSSSVAAKEKDVSSIEFNPWQYGDLPSQ

SEQ ID NO: 13486 - protein, 401 aa, Triticum aestivum
  peptide (1)..(401): Ceres Seq. ID no. 15170668
  misc_feature (1)..(371): Pfam Name: Pfam Description:  Oxysterol-binding protein
  misc_feature (1)..(398): NCBI GI NO: 15232633 NR Description: oxysterol-binding protein -related
  misc_feature (1)..(401): NCBI GI NO: 15238398 NR Description: oxysterol-binding protein - like
  misc_feature (1)..(398): NCBI GI NO: 15241681 NR Description: expressed protein [Arabidopsis thaliana]
  misc_feature (1)..(397): NCBI GI NO: 38639323 NR Description: oxysterol-binding protein [Solanum tuberosum]
  misc_feature (1)..(401): NCBI GI NO: 8885548 NR Description: oxysterol-binding protein [Arabidopsis thaliana]
  misc_feature (21)..(239): NCBI GI NO: 38639321 NR Description: putative oxysterol-binding protein
  misc_feature (12)..(244): NCBI GI NO: 19718746 NR Description: oxysterol-binding protein-like 1A isoform A
  misc_feature (252)..(366): NCBI GI NO: 19718746 NR Description: oxysterol-binding protein-like 1A isoform A
  misc_feature (12)..(244): NCBI GI NO: 17529997 NR Description: oxysterol-binding protein-like protein OSBPL1A
  misc_feature (252)..(366): NCBI GI NO: 17529997 NR Description: oxysterol-binding protein-like protein OSBPL1A
MKGRWKQEDRDSYWKMMNKYIGSDVTSLVTLPVIIFEPMSMLQKMAELMEYCDLLDKADECEDPHMRMVYASTWALSAYLAYHRTWKPFNPILGETYEMVNHQGITFIAEQVSHHPPMGAAHCENDHFTYDITSKLKTKFLGNSVEVYPVGRTRVTLKKSGVVLELVPPLTKVNNLIFGRTWVDSFGEMVLTNLTTGDKAVLYFQPCGWFGAGRFEVDGYVYTAAEEPKIMMTGKWNKSMSYQPCDQEGDPLPGTELKEVWKAAPAPPNDKYQYTYFAHKINSFDTAPKKLLPSDSRLRPDRYALEKGDMSKSGAHKSRLEEQQRAEKKIRDTKGEQFTPKWFKMTEDISPTPWGDLEVYEYNGRYAEHRAAIDSSSVAAKEKDVSSIEFNPWQYGDLPSQ

SEQ ID NO: 13487 - protein, 386 aa, Triticum aestivum
  peptide (1)..(386): Ceres Seq. ID no. 15170669
  misc_feature (1)..(356): Pfam Name: Pfam Description:  Oxysterol-binding protein
  misc_feature (1)..(383): NCBI GI NO: 15232633 NR Description: oxysterol-binding protein -related
  misc_feature (1)..(386): NCBI GI NO: 15238398 NR Description: oxysterol-binding protein - like
  misc_feature (1)..(383): NCBI GI NO: 15241681 NR Description: expressed protein [Arabidopsis thaliana]
  misc_feature (1)..(382): NCBI GI NO: 38639323 NR Description: oxysterol-binding protein [Solanum tuberosum]
  misc_feature (1)..(386): NCBI GI NO: 8885548 NR Description: oxysterol-binding protein [Arabidopsis thaliana]
  misc_feature (6)..(224): NCBI GI NO: 38639321 NR Description: putative oxysterol-binding protein
  misc_feature (1)..(229): NCBI GI NO: 19718746 NR Description: oxysterol-binding protein-like 1A isoform A
  misc_feature (237)..(351): NCBI GI NO: 19718746 NR Description: oxysterol-binding protein-like 1A isoform A
  misc_feature (1)..(229): NCBI GI NO: 17529997 NR Description: oxysterol-binding protein-like protein OSBPL1A
  misc_feature (237)..(351): NCBI GI NO: 17529997 NR Description: oxysterol-binding protein-like protein OSBPL1A
MMNKYIGSDVTSLVTLPVIIFEPMSMLQKMAELMEYCDLLDKADECEDPHMRMVYASTWALSAYLAYHRTWKPFNPILGETYEMVNHQGITFIAEQVSHHPPMGAAHCENDHFTYDITSKLKTKFLGNSVEVYPVGRTRVTLKKSGVVLELVPPLTKVNNLIFGRTWVDSFGEMVLTNLTTGDKAVLYFQPCGWFGAGRFEVDGYVYTAAEEPKIMMTGKWNKSMSYQPCDQEGDPLPGTELKEVWKAAPAPPNDKYQYTYFAHKINSFDTAPKKLLPSDSRLRPDRYALEKGDMSKSGAHKSRLEEQQRAEKKIRDTKGEQFTPKWFKMTEDISPTPWGDLEVYEYNGRYAEHRAAIDSSSVAAKEKDVSSIEFNPWQYGDLPSQ

SEQ ID NO: 13488 - DNA, 1239 bp, Triticum aestivum
  misc_feature (1)..(1239): Ceres Seq. ID no. 12616212
acccgttcacccccggcggcgccccttcgctcccccgacacatttccgcgagcagctggtgcgcgcgcggagcggaggccatggcgatggcgaaggccaaatccaccgccctctccgccgccgaaaagtgccggaacatcctgggcgccagttgggaagcccacctcaacaccatcaaagccgacgccaagggaagcaagggggaggtttacacgtcgagagtgcactacatggtccaaaagggcatgccctacttgatcgtgcccgagaacgacatgcacaacattaacattataatcgacgagcggggttctctctcggtgtccagtccagtcccaggtcgccttgccagcttgctcaagtcactcaacaagttgcctccccgggttgctatgaccggcgatgtcctgcgcatgaaggagacaaaggttccagttatagctgagagccttaagaaagctattctgaaggaacataaagctgctagcgaagctacttatggggtttcaacggtattgtcttccgcaagtgctacttgtaggtcgcgcagtgaaggtctccttagcttactcaatgaagagagctcctacaatatcttgaagtttgaaattggctcgtgtgtcttcatagattcaatggggagcagccataatatcaagttggatacttttgaaccaccaaaagccgacctgctattgccattctcttcgaggcttattgatggtatcaacaggagtgacccaaggcggagagcacttatacttttctgtttcgagtattttgatgtgactgccagagatgcactcttgctctccgttgatcaccatggatttgaggtgctcgccagggttcctgaaagagctaccgcacctgatgtccctcagcagtaccattggaaagagttcaggttcacattcaaggaagcagtcaaggatgttgaagacttctgccgcatgttggttgagctagaagaagaagctctgcacagcgtaaagagctatagcggattaggttgaaggggatagtagctctttctcaaaccaaagggcacaagattcagatcttcagttatgataatataaatcatctgaagaatataacttgaatccatttttgtagatggtttgcattgtaaactgacatcattcgattgagaatcaacagttaggtttgtatgtcaccataattttcagcctctgtttggtacttatttacaaatcagaaaggaaacttctctgc

SEQ ID NO: 13489 - protein, 337 aa, Triticum aestivum
  peptide (1)..(337): Ceres Seq. ID no. 12616213
  misc_feature (98)..(336): NCBI GI NO: 15229211 NR Description: unknown protein; protein id: At3g04020.1
PFTPGGAPSLPRHISASSWCARGAEAMAMAKAKSTALSAAEKCRNILGASWEAHLNTIKADAKGSKGEVYTSRVHYMVQKGMPYLIVPENDMHNINIIIDERGSLSVSSPVPGRLASLLKSLNKLPPRVAMTGDVLRMKETKVPVIAESLKKAILKEHKAASEATYGVSTVLSSASATCRSRSEGLLSLLNEESSYNILKFEIGSCVFIDSMGSSHNIKLDTFEPPKADLLLPFSSRLIDGINRSDPRRRALILFCFEYFDVTARDALLLSVDHHGFEVLARVPERATAPDVPQQYHWKEFRFTFKEAVKDVEDFCRMLVELEEEALHSVKSYSGLG

SEQ ID NO: 13490 - protein, 311 aa, Triticum aestivum
  peptide (1)..(311): Ceres Seq. ID no. 12616214
  misc_feature (72)..(310): NCBI GI NO: 15229211 NR Description: unknown protein; protein id: At3g04020.1
MAMAKAKSTALSAAEKCRNILGASWEAHLNTIKADAKGSKGEVYTSRVHYMVQKGMPYLIVPENDMHNINIIIDERGSLSVSSPVPGRLASLLKSLNKLPPRVAMTGDVLRMKETKVPVIAESLKKAILKEHKAASEATYGVSTVLSSASATCRSRSEGLLSLLNEESSYNILKFEIGSCVFIDSMGSSHNIKLDTFEPPKADLLLPFSSRLIDGINRSDPRRRALILFCFEYFDVTARDALLLSVDHHGFEVLARVPERATAPDVPQQYHWKEFRFTFKEAVKDVEDFCRMLVELEEEALHSVKSYSGLG

SEQ ID NO: 13491 - protein, 309 aa, Triticum aestivum
  peptide (1)..(309): Ceres Seq. ID no. 12616215
  misc_feature (70)..(308): NCBI GI NO: 15229211 NR Description: unknown protein; protein id: At3g04020.1
MAKAKSTALSAAEKCRNILGASWEAHLNTIKADAKGSKGEVYTSRVHYMVQKGMPYLIVPENDMHNINIIIDERGSLSVSSPVPGRLASLLKSLNKLPPRVAMTGDVLRMKETKVPVIAESLKKAILKEHKAASEATYGVSTVLSSASATCRSRSEGLLSLLNEESSYNILKFEIGSCVFIDSMGSSHNIKLDTFEPPKADLLLPFSSRLIDGINRSDPRRRALILFCFEYFDVTARDALLLSVDHHGFEVLARVPERATAPDVPQQYHWKEFRFTFKEAVKDVEDFCRMLVELEEEALHSVKSYSGLG

SEQ ID NO: 13492 - DNA, 1593 bp, Triticum aestivum
  misc_feature (1)..(1593): Ceres Seq. ID no. 13655712
ctctcagtttctctctcacacacagctctctctctctctctctccttctctccctctctcaaatactccccatgcccatcgccgtcctcctttgaagaagccaatggccagcaatggcatggcgtcctctccctccgccttcttccctccgaatttcctcctccacatgcagcaagcaccaccgcagcatgacccccaagaacaccaccagcagcaccaccaccaccaccatgagcaccacctccctcctccccatccccagcacaaccccttcctcccctccccccaatgcccctccctccaggacttccgtggcggtctgtcgccaatgctggggaagcgcccggcgatgtacgggggcggcggcgacgggggctgcggcggcgacgaggtgaccggcggaggcgcgaacgaggaggagacgtcggacgacgggtcgcagctgggcggcgagaagaagcggcggctgaacgtggagcaggtgcggacgctggagaagaacttcgaggtggccaacaagctggagccggagcgcaagatgcagctggcccgcgcgctggggctgcagccgcggcaggtggccatctggttccagaaccgccgcgcccggtggaagacaaagcagctggagaaggactacgacgtgctcaagcgccagttcgacgccgtcaaggccgagaacgacgccctcctctcccacaacaagaagctccagtccgagatactgggactgaagggatgcagggaggcggcgtcggagctgatcaacctcaacaaggagacggaggcgtcctgcagcaaccgcagcgagaacagctccgagatcaacctcgacatctcgcgcacgccgccgtccgacggccccatggacgctccgccctcgcaccagcagggcggcgggggcgggggcatgatccccttctacccctccgtcgcgcgccccgcgggcgtcgacatcgaccatctcctccacgcctccgtccccaagatggagcaccaccacggcggccccgacacgcccagcttcggcaacctgctgtgcggcgtcgacgagccgccgccgttctggccgtgggcggatcaccagcagttcaactgatcgcccggtcggtcgatcgggacgatatatatctttgttgcagtcaatgacgtctgctttgcttgcatggtcagcaatgagcgtgcataaatattcgatgcgtttggattcttgatgaggacgtacgtacggtggagacggttgtacatgcatgtttgatgagaggcaagttcagttcatccatgaggtacctactgaagacgatggtgatgcgatttgagtcatggatcgatcgagttgatgatgaatagtggggctacgtgtaggggaataagtccggtgtgtgtgaagcgtgtgtaggtagattttggagttgaatagtacctacctttggtattcttattattttttcttgttttttcatttttcctcttccttttgttcccatacataaatttgtgaattgtgaggcggtgttgatccgttgttgtataggttaatggtgcatgtggtgcttattccccctatttatatatggattatgtgaagactgt

SEQ ID NO: 13493 - protein, 365 aa, Triticum aestivum
  peptide (1)..(365): Ceres Seq. ID no. 13655713
  misc_feature (152)..(206): Pfam Name: Pfam Description:  Homeobox domain
  misc_feature (35)..(336): NCBI GI NO: 19071644 NR Description: putative DNA-binding protein
  misc_feature (35)..(323): NCBI GI NO: 37534178 NR Description: putative homeotic protein
  misc_feature (78)..(365): NCBI GI NO: 7446247 NR Description: homeotic protein - common sunflower
  misc_feature (85)..(365): NCBI GI NO: 15222452 NR Description: homeobox-leucine zipper protein ATHB-13
  misc_feature (85)..(365): NCBI GI NO: 21555784 NR Description: homeobox gene 13 protein [Arabidopsis thaliana]
  misc_feature (47)..(365): NCBI GI NO: 1435022 NR Description: DNA-binding protein [Daucus carota]
  misc_feature (47)..(365): NCBI GI NO: 7446243 NR Description: homeotic protein - carrot
  misc_feature (152)..(365): NCBI GI NO: 6175248 NR Description: jasmonic acid 1 [Lycopersicon esculentum]
  misc_feature (63)..(294): NCBI GI NO: 25386233 NR Description: hypothetical protein T2P11
  misc_feature (341)..(365): NCBI GI NO: 25386233 NR Description: hypothetical protein T2P11
SQFLSHTQLSLSLSPSLPLSNTPHAHRRPPLKKPMASNGMASSPSAFFPPNFLLHMQQAPPQHDPQEHHQQHHHHHHEHHLPPPHPQHNPFLPSPQCPSLQDFRGGLSPMLGKRPAMYGGGGDGGCGGDEVTGGGANEEETSDDGSQLGGEKKRRLNVEQVRTLEKNFEVANKLEPERKMQLARALGLQPRQVAIWFQNRRARWKTKQLEKDYDVLKRQFDAVKAENDALLSHNKKLQSEILGLKGCREAASELINLNKETEASCSNRSENSSEINLDISRTPPSDGPMDAPPSHQQGGGGGGMIPFYPSVARPAGVDIDHLLHASVPKMEHHHGGPDTPSFGNLLCGVDEPPPFWPWADHQQFN

SEQ ID NO: 13494 - protein, 331 aa, Triticum aestivum
  peptide (1)..(331): Ceres Seq. ID no. 13655714
  misc_feature (118)..(172): Pfam Name: Pfam Description:  Homeobox domain
  misc_feature (1)..(302): NCBI GI NO: 19071644 NR Description: putative DNA-binding protein
  misc_feature (1)..(289): NCBI GI NO: 37534178 NR Description: putative homeotic protein
  misc_feature (44)..(331): NCBI GI NO: 7446247 NR Description: homeotic protein - common sunflower
  misc_feature (51)..(331): NCBI GI NO: 15222452 NR Description: homeobox-leucine zipper protein ATHB-13
  misc_feature (51)..(331): NCBI GI NO: 21555784 NR Description: homeobox gene 13 protein [Arabidopsis thaliana]
  misc_feature (13)..(331): NCBI GI NO: 1435022 NR Description: DNA-binding protein [Daucus carota]
  misc_feature (13)..(331): NCBI GI NO: 7446243 NR Description: homeotic protein - carrot
  misc_feature (118)..(331): NCBI GI NO: 6175248 NR Description: jasmonic acid 1 [Lycopersicon esculentum]
  misc_feature (29)..(260): NCBI GI NO: 25386233 NR Description: hypothetical protein T2P11
  misc_feature (307)..(331): NCBI GI NO: 25386233 NR Description: hypothetical protein T2P11
MASNGMASSPSAFFPPNFLLHMQQAPPQHDPQEHHQQHHHHHHEHHLPPPHPQHNPFLPSPQCPSLQDFRGGLSPMLGKRPAMYGGGGDGGCGGDEVTGGGANEEETSDDGSQLGGEKKRRLNVEQVRTLEKNFEVANKLEPERKMQLARALGLQPRQVAIWFQNRRARWKTKQLEKDYDVLKRQFDAVKAENDALLSHNKKLQSEILGLKGCREAASELINLNKETEASCSNRSENSSEINLDISRTPPSDGPMDAPPSHQQGGGGGGMIPFYPSVARPAGVDIDHLLHASVPKMEHHHGGPDTPSFGNLLCGVDEPPPFWPWADHQQFN

SEQ ID NO: 13495 - protein, 326 aa, Triticum aestivum
  peptide (1)..(326): Ceres Seq. ID no. 13655715
  misc_feature (113)..(167): Pfam Name: Pfam Description:  Homeobox domain
  misc_feature (1)..(297): NCBI GI NO: 19071644 NR Description: putative DNA-binding protein
  misc_feature (1)..(284): NCBI GI NO: 37534178 NR Description: putative homeotic protein
  misc_feature (39)..(326): NCBI GI NO: 7446247 NR Description: homeotic protein - common sunflower
  misc_feature (46)..(326): NCBI GI NO: 15222452 NR Description: homeobox-leucine zipper protein ATHB-13
  misc_feature (46)..(326): NCBI GI NO: 21555784 NR Description: homeobox gene 13 protein [Arabidopsis thaliana]
  misc_feature (8)..(326): NCBI GI NO: 1435022 NR Description: DNA-binding protein [Daucus carota]
  misc_feature (8)..(326): NCBI GI NO: 7446243 NR Description: homeotic protein - carrot
  misc_feature (113)..(326): NCBI GI NO: 6175248 NR Description: jasmonic acid 1 [Lycopersicon esculentum]
  misc_feature (24)..(255): NCBI GI NO: 25386233 NR Description: hypothetical protein T2P11
  misc_feature (302)..(326): NCBI GI NO: 25386233 NR Description: hypothetical protein T2P11
MASSPSAFFPPNFLLHMQQAPPQHDPQEHHQQHHHHHHEHHLPPPHPQHNPFLPSPQCPSLQDFRGGLSPMLGKRPAMYGGGGDGGCGGDEVTGGGANEEETSDDGSQLGGEKKRRLNVEQVRTLEKNFEVANKLEPERKMQLARALGLQPRQVAIWFQNRRARWKTKQLEKDYDVLKRQFDAVKAENDALLSHNKKLQSEILGLKGCREAASELINLNKETEASCSNRSENSSEINLDISRTPPSDGPMDAPPSHQQGGGGGGMIPFYPSVARPAGVDIDHLLHASVPKMEHHHGGPDTPSFGNLLCGVDEPPPFWPWADHQQFN

SEQ ID NO: 13496 - DNA, 826 bp, Triticum aestivum
  misc_feature (1)..(826): Ceres Seq. ID no. 15173959
tccgctccggccccagtccagtactgtgcgcgcatctctcctcctttttctcccccctgagaggctttctttgcttcacgcggggctccggatattcgttgtcctcgcggctcagccaccgcggaatccatccagcgcagctcagggggaagaggcggtcgaagctggaggtggaagaggggctcgccatgggctccgagggatccgcgccggtcgtagttcccagaaactttagacttttggaagaacttgagagaggtgagaagggcattggtgatggaactgtgagctatgggatggatgatgctgatgacatatatatgcgctcctggacaggaactattatcggtccacccaatactgttcacgagggacgaatctatcaattgaagttgttctgtgatacagattatccagacaaaccaccgactgtccggttccaggctagggtcaatatgacatgtgtgaatcaagaaactggaatggttgatccaagacgatttcctatgcttggaaactggaaaagggaacatacaatggaggatatcctcatcagccttaaaaaggagatgtcaacccctcagaaccgcaggctccaccagcctcatgaaggcaacgatgatcagagagtggagcagaaagggctagcagctagatgtgtcgttatgtaagatacgcgcattgcaatgtacagtgttacactgagtagcatcagaacgcagaagctgaggaaacccaggaggaaatcatgtaatttgacagtcgctagtcgctactttggatcgaaactgctctattgccgaaataaaatgccaatgacttcgtc

SEQ ID NO: 13497 - protein, 222 aa, Triticum aestivum
  peptide (1)..(222): Ceres Seq. ID no. 15173960
  misc_feature (63)..(222): NCBI GI NO: 13324790 NR Description: putative DNA-binding protein [Oryza sativa]
  misc_feature (63)..(222): NCBI GI NO: 18395221 NR Description: ubiquitin-conjugating enzyme family
  misc_feature (63)..(222): NCBI GI NO: 18409647 NR Description: ubiquitin-conjugating enzyme family
  misc_feature (63)..(222): NCBI GI NO: 21593918 NR Description: E2, ubiquitin-conjugating enzyme, putative
  misc_feature (61)..(204): NCBI GI NO: 18409633 NR Description: ubiquitin-conjugating enzyme family
  misc_feature (61)..(204): NCBI GI NO: 30693656 NR Description: ubiquitin-conjugating enzyme family
  misc_feature (63)..(222): NCBI GI NO: 25326240 NR Description: protein F26F24.10
  misc_feature (61)..(204): NCBI GI NO: 18404032 NR Description: ubiquitin-conjugating enzyme family
  misc_feature (61)..(204): NCBI GI NO: 30686662 NR Description: ubiquitin-conjugating enzyme family
  misc_feature (61)..(204): NCBI GI NO: 32488709 NR Description: OSJNBa0088H09.10
RSGPSPVLCAHLSSFFSPLRGFLCFTRGSGYSLSSRLSHRGIHPAQLRGKRRSKLEVEEGLAMGSEGSAPVVVPRNFRLLEELERGEKGIGDGTVSYGMDDADDIYMRSWTGTIIGPPNTVHEGRIYQLKLFCDTDYPDKPPTVRFQARVNMTCVNQETGMVDPRRFPMLGNWKREHTMEDILISLKKEMSTPQNRRLHQPHEGNDDQRVEQKGLAARCVVM

SEQ ID NO: 13498 - protein, 160 aa, Triticum aestivum
  peptide (1)..(160): Ceres Seq. ID no. 15173961
  misc_feature (1)..(160): NCBI GI NO: 13324790 NR Description: putative DNA-binding protein [Oryza sativa]
  misc_feature (1)..(160): NCBI GI NO: 18395221 NR Description: ubiquitin-conjugating enzyme family
  misc_feature (1)..(160): NCBI GI NO: 18409647 NR Description: ubiquitin-conjugating enzyme family
  misc_feature (1)..(160): NCBI GI NO: 21593918 NR Description: E2, ubiquitin-conjugating enzyme, putative
  misc_feature (1)..(142): NCBI GI NO: 18409633 NR Description: ubiquitin-conjugating enzyme family
  misc_feature (1)..(142): NCBI GI NO: 30693656 NR Description: ubiquitin-conjugating enzyme family
  misc_feature (1)..(160): NCBI GI NO: 25326240 NR Description: protein F26F24.10
  misc_feature (1)..(142): NCBI GI NO: 18404032 NR Description: ubiquitin-conjugating enzyme family
  misc_feature (1)..(142): NCBI GI NO: 30686662 NR Description: ubiquitin-conjugating enzyme family
  misc_feature (1)..(142): NCBI GI NO: 32488709 NR Description: OSJNBa0088H09.10
MGSEGSAPVVVPRNFRLLEELERGEKGIGDGTVSYGMDDADDIYMRSWTGTIIGPPNTVHEGRIYQLKLFCDTDYPDKPPTVRFQARVNMTCVNQETGMVDPRRFPMLGNWKREHTMEDILISLKKEMSTPQNRRLHQPHEGNDDQRVEQKGLAARCVVM

SEQ ID NO: 13499 - protein, 124 aa, Triticum aestivum
  peptide (1)..(124): Ceres Seq. ID no. 15173962
  misc_feature (1)..(124): NCBI GI NO: 13324790 NR Description: putative DNA-binding protein [Oryza sativa]
  misc_feature (1)..(124): NCBI GI NO: 18395221 NR Description: ubiquitin-conjugating enzyme family
  misc_feature (1)..(124): NCBI GI NO: 18409647 NR Description: ubiquitin-conjugating enzyme family
  misc_feature (1)..(124): NCBI GI NO: 21593918 NR Description: E2, ubiquitin-conjugating enzyme, putative
  misc_feature (1)..(106): NCBI GI NO: 18409633 NR Description: ubiquitin-conjugating enzyme family
  misc_feature (1)..(106): NCBI GI NO: 30693656 NR Description: ubiquitin-conjugating enzyme family
  misc_feature (1)..(124): NCBI GI NO: 25326240 NR Description: protein F26F24.10
  misc_feature (1)..(106): NCBI GI NO: 18404032 NR Description: ubiquitin-conjugating enzyme family
  misc_feature (1)..(106): NCBI GI NO: 30686662 NR Description: ubiquitin-conjugating enzyme family
  misc_feature (1)..(106): NCBI GI NO: 32488709 NR Description: OSJNBa0088H09.10
MDDADDIYMRSWTGTIIGPPNTVHEGRIYQLKLFCDTDYPDKPPTVRFQARVNMTCVNQETGMVDPRRFPMLGNWKREHTMEDILISLKKEMSTPQNRRLHQPHEGNDDQRVEQKGLAARCVVM

SEQ ID NO: 13500 - DNA, 1152 bp, Triticum aestivum
  misc_feature (1)..(1152): Ceres Seq. ID no. 13597357
acatcctaatcgaaaagccgagagatcacaccgcagcacgcagacaaagcagacggggacagcacacggaaagagaggagagaggggagagagatcggagaggtgaccaccaccgccgcgccgagatgctggccgtgttcgaccagacggtggccaagtgcccggagggcctccgcagcccgccggcggccgggggagggggtacggcggcaggagggggcggaggcgcggccgcgctcatgaagggcttcgccgacgccaacgacgccgcggtcaccgtcagcctcggcgccgccggcgccctcgcctactcctcggccaacaagaaccccctcgtccccaggatgtttggttctgtgaacgacatattttgcctgttccaagggcatgttgagaacattggcaacctgaagcaacactatggtctgagcaagacagcaaatgaggttaccatcctgattgaggcctacagaaccctccgggacaggggcccgctcccagccagccaggtcgtgagagatctcagtggaaggttcgcttttatcctgtacgacaccgtgtcgaaatccaccttcgtcgctgctgatgctgatggcagtatccccttcttctggggcgtcgactctgaagaccaccttgtgttctctgacgacaatgagcttctcaaggcaggctgtggaaactcatttgcgccattccccaaaggctgcttctacaccacatctggagggctgcagagcttcgagcacccgctgaacgagctgaaggccgtgccacgtgtggacagccagggccagatgtgcggctccaccttcaaggtcgacagcgaggccaagaaggactcggggatccctcgcgtcggtagtgctgctgattggtctaaccactactagcttgatgacccttgttgtaaactgccaatcttgacactgaatcgctgagacaccgcactgcatctgcattttatttttgagcagtttacgacgctctagacaatgctgtttcaataaatgtactgtctgatgggtaatgatactgctgtaagtttaccgatactcgaacaaactctgatgccaccacctggtggtagaggtttatcagccaccctatatatgtctcgataaatagagttcagtgaaggcttagtttgtt

SEQ ID NO: 13501 - protein, 296 aa, Triticum aestivum
  peptide (1)..(296): Ceres Seq. ID no. 13597358
  misc_feature (14)..(296): NCBI GI NO: 30017570 NR Description: unknown protein
  misc_feature (42)..(295): NCBI GI NO: 15239993 NR Description: aluminum-induced protein-related
  misc_feature (42)..(293): NCBI GI NO: 15228883 NR Description: expressed protein [Arabidopsis thaliana]
  misc_feature (42)..(295): NCBI GI NO: 20340249 NR Description: aluminum-induced protein-like protein
  misc_feature (42)..(294): NCBI GI NO: 542200 NR Description: hypothetical protein - garden asparagus
  misc_feature (42)..(274): NCBI GI NO: 15239658 NR Description: aluminium-induced protein - like
  misc_feature (42)..(276): NCBI GI NO: 7488440 NR Description: aluminum-induced protein - rape
  misc_feature (42)..(293): NCBI GI NO: 18400774 NR Description: expressed protein [Arabidopsis thaliana]
  misc_feature (92)..(293): NCBI GI NO: 18416995 NR Description: expressed protein [Arabidopsis thaliana]
  misc_feature (42)..(292): NCBI GI NO: 9857931 NR Description: unknown [Glycine max]
ILIEKPRDHTAARRQSRRGQHTEREERGERDRRGDHHRRAEMLAVFDQTVAKCPEGLRSPPAAGGGGTAAGGGGGAAALMKGFADANDAAVTVSLGAAGALAYSSANKNPLVPRMFGSVNDIFCLFQGHVENIGNLKQHYGLSKTANEVTILIEAYRTLRDRGPLPASQVVRDLSGRFAFILYDTVSKSTFVAADADGSIPFFWGVDSEDHLVFSDDNELLKAGCGNSFAPFPKGCFYTTSGGLQSFEHPLNELKAVPRVDSQGQMCGSTFKVDSEAKKDSGIPRVGSAADWSNHY

SEQ ID NO: 13502 - protein, 255 aa, Triticum aestivum
  peptide (1)..(255): Ceres Seq. ID no. 13597359
  misc_feature (1)..(255): NCBI GI NO: 30017570 NR Description: unknown protein
  misc_feature (1)..(254): NCBI GI NO: 15239993 NR Description: aluminum-induced protein-related
  misc_feature (1)..(252): NCBI GI NO: 15228883 NR Description: expressed protein [Arabidopsis thaliana]
  misc_feature (1)..(254): NCBI GI NO: 20340249 NR Description: aluminum-induced protein-like protein
  misc_feature (1)..(253): NCBI GI NO: 542200 NR Description: hypothetical protein - garden asparagus
  misc_feature (1)..(233): NCBI GI NO: 15239658 NR Description: aluminium-induced protein - like
  misc_feature (1)..(235): NCBI GI NO: 7488440 NR Description: aluminum-induced protein - rape
  misc_feature (1)..(252): NCBI GI NO: 18400774 NR Description: expressed protein [Arabidopsis thaliana]
  misc_feature (51)..(252): NCBI GI NO: 18416995 NR Description: expressed protein [Arabidopsis thaliana]
  misc_feature (1)..(251): NCBI GI NO: 9857931 NR Description: unknown [Glycine max]
MLAVFDQTVAKCPEGLRSPPAAGGGGTAAGGGGGAAALMKGFADANDAAVTVSLGAAGALAYSSANKNPLVPRMFGSVNDIFCLFQGHVENIGNLKQHYGLSKTANEVTILIEAYRTLRDRGPLPASQVVRDLSGRFAFILYDTVSKSTFVAADADGSIPFFWGVDSEDHLVFSDDNELLKAGCGNSFAPFPKGCFYTTSGGLQSFEHPLNELKAVPRVDSQGQMCGSTFKVDSEAKKDSGIPRVGSAADWSNHY

SEQ ID NO: 13503 - protein, 217 aa, Triticum aestivum
  peptide (1)..(217): Ceres Seq. ID no. 13597360
  misc_feature (1)..(217): NCBI GI NO: 30017570 NR Description: unknown protein
  misc_feature (1)..(216): NCBI GI NO: 15239993 NR Description: aluminum-induced protein-related
  misc_feature (1)..(214): NCBI GI NO: 15228883 NR Description: expressed protein [Arabidopsis thaliana]
  misc_feature (1)..(216): NCBI GI NO: 20340249 NR Description: aluminum-induced protein-like protein
  misc_feature (1)..(215): NCBI GI NO: 542200 NR Description: hypothetical protein - garden asparagus
  misc_feature (1)..(195): NCBI GI NO: 15239658 NR Description: aluminium-induced protein - like
  misc_feature (1)..(197): NCBI GI NO: 7488440 NR Description: aluminum-induced protein - rape
  misc_feature (1)..(214): NCBI GI NO: 18400774 NR Description: expressed protein [Arabidopsis thaliana]
  misc_feature (13)..(214): NCBI GI NO: 18416995 NR Description: expressed protein [Arabidopsis thaliana]
  misc_feature (1)..(213): NCBI GI NO: 9857931 NR Description: unknown [Glycine max]
MKGFADANDAAVTVSLGAAGALAYSSANKNPLVPRMFGSVNDIFCLFQGHVENIGNLKQHYGLSKTANEVTILIEAYRTLRDRGPLPASQVVRDLSGRFAFILYDTVSKSTFVAADADGSIPFFWGVDSEDHLVFSDDNELLKAGCGNSFAPFPKGCFYTTSGGLQSFEHPLNELKAVPRVDSQGQMCGSTFKVDSEAKKDSGIPRVGSAADWSNHY

SEQ ID NO: 13504 - DNA, 1249 bp, Triticum aestivum
  misc_feature (1)..(1249): Ceres Seq. ID no. 13598507
aatttcgtcccatagaaaaaccacagccacgaatcaggggaaatccggcagcgccgcgtgtgcgaagacgagtccaaacacggaacaaagccggcgattagcggcacactgagctggcatcttgtgcttctccgtccgtccgcgtccacaccggagctaggaggagaggagggggaagaagaaggcgtcgaggaggcgatggcgacggagtcgccgttccgggcggacgtgctgaagggcaaggcggcgctggtcaccggcggcggctccggcatctgcttcgagatcgccgcccagctcgcccgccacggcgcccacgtcgccatcatgggccgccgccgcgaggtcctcgacaaggccgtcgccgccctccgctccgagggccttcgggctgttggatttcagggagatgtacgtaaccaggaggatgcagcgagagtgcttgcgtcgaccgttgagcatttcggcaagcttgacattcttgtcaacggtgcagcgggcaacttccttgcatccccggaggatctcacacccaagggattccggacagttcttgagattgacactgtgggtacatacacaatgtgctacgaagccctgaagtatctgaaaaaaggtgggccagggaggggtccctccactggtggcctcatcattaacataagcgcgacactgcattacactgcttcttggtaccaaattcatgtctccgccgctaaggcaggtgttgatagtatcacaagaacgctggctctggaatggggaacagattatgaaattagggtcaatggaattgcaccaggaccaatcggaggcactccaggtctgaggaagcttgcacctgatgaaatgggcaaggggaaaagggaaatgatgcctttatttaagttgggggagacacaggacatagcaatggccgcgctctatcttgcttccgatgctggcaaatatgtaaatgggactacgctggtggttgatggagggctttggttgagtcaccctcgccacatccccaaggaggaagtgaaggagctctcaaaggtgatcgagaagaaggttagggcctctggtgtaggtgtaccctccagcaaattgtgatgacatccttggtttatgtcactgtctcacacatgtcatgtaccaccaccctcagtatttgctgtcagcggctcagcaccaactttattgtgtacgtggatcttgtaacctgctgagaacaattggtttcaaatgagcaacttcagtattt

SEQ ID NO: 13505 - protein, 299 aa, Triticum aestivum
  peptide (1)..(299): Ceres Seq. ID no. 13598508
  misc_feature (1)..(299): NCBI GI NO: 38347363 NR Description: OSJNBa0070C17.24
  misc_feature (4)..(299): NCBI GI NO: 30682333 NR Description: expressed protein [Arabidopsis thaliana]
  misc_feature (129)..(274): NCBI GI NO: 15226036 NR Description: hypothetical protein [Arabidopsis thaliana]
  misc_feature (7)..(262): NCBI GI NO: 15805153 NR Description: oxidoreductase
  misc_feature (11)..(271): NCBI GI NO: 39795780 NR Description: Unknown (protein for IMAGE:5307739)
  misc_feature (7)..(271): NCBI GI NO: 6753622 NR Description: 2-4-dienoyl-Coenzyme A reductase 2, peroxisomal
  misc_feature (14)..(264): NCBI GI NO: 23026255 NR Description: hypothetical protein
  misc_feature (7)..(271): NCBI GI NO: 25282441 NR Description: 2-4-dienoyl-Coenzyme A reductase 2, peroxisomal
  misc_feature (1)..(271): NCBI GI NO: 10190704 NR Description: 2,4-dienoyl CoA reductase 2, peroxisomal
  misc_feature (12)..(265): NCBI GI NO: 15614707 NR Description: 2,4-dienoyl-CoA reductase (NADPH)
MATESPFRADVLKGKAALVTGGGSGICFEIAAQLARHGAHVAIMGRRREVLDKAVAALRSEGLRAVGFQGDVRNQEDAARVLASTVEHFGKLDILVNGAAGNFLASPEDLTPKGFRTVLEIDTVGTYTMCYEALKYLKKGGPGRGPSTGGLIINISATLHYTASWYQIHVSAAKAGVDSITRTLALEWGTDYEIRVNGIAPGPIGGTPGLRKLAPDEMGKGKREMMPLFKLGETQDIAMAALYLASDAGKYVNGTTLVVDGGLWLSHPRHIPKEEVKELSKVIEKKVRASGVGVPSSKL

SEQ ID NO: 13506 - protein, 256 aa, Triticum aestivum
  peptide (1)..(256): Ceres Seq. ID no. 13598509
  misc_feature (1)..(256): NCBI GI NO: 38347363 NR Description: OSJNBa0070C17.24
  misc_feature (1)..(256): NCBI GI NO: 30682333 NR Description: expressed protein [Arabidopsis thaliana]
  misc_feature (86)..(231): NCBI GI NO: 15226036 NR Description: hypothetical protein [Arabidopsis thaliana]
  misc_feature (1)..(219): NCBI GI NO: 15805153 NR Description: oxidoreductase
  misc_feature (1)..(228): NCBI GI NO: 39795780 NR Description: Unknown (protein for IMAGE:5307739)
  misc_feature (1)..(228): NCBI GI NO: 6753622 NR Description: 2-4-dienoyl-Coenzyme A reductase 2, peroxisomal
  misc_feature (1)..(221): NCBI GI NO: 23026255 NR Description: hypothetical protein
  misc_feature (1)..(228): NCBI GI NO: 25282441 NR Description: 2-4-dienoyl-Coenzyme A reductase 2, peroxisomal
  misc_feature (1)..(228): NCBI GI NO: 10190704 NR Description: 2,4-dienoyl CoA reductase 2, peroxisomal
  misc_feature (1)..(222): NCBI GI NO: 15614707 NR Description: 2,4-dienoyl-CoA reductase (NADPH)
MGRRREVLDKAVAALRSEGLRAVGFQGDVRNQEDAARVLASTVEHFGKLDILVNGAAGNFLASPEDLTPKGFRTVLEIDTVGTYTMCYEALKYLKKGGPGRGPSTGGLIINISATLHYTASWYQIHVSAAKAGVDSITRTLALEWGTDYEIRVNGIAPGPIGGTPGLRKLAPDEMGKGKREMMPLFKLGETQDIAMAALYLASDAGKYVNGTTLVVDGGLWLSHPRHIPKEEVKELSKVIEKKVRASGVGVPSSKL

SEQ ID NO: 13507 - protein, 171 aa, Triticum aestivum
  peptide (1)..(171): Ceres Seq. ID no. 13598510
  misc_feature (1)..(171): NCBI GI NO: 38347363 NR Description: OSJNBa0070C17.24
  misc_feature (1)..(171): NCBI GI NO: 30682333 NR Description: expressed protein [Arabidopsis thaliana]
  misc_feature (1)..(146): NCBI GI NO: 15226036 NR Description: hypothetical protein [Arabidopsis thaliana]
  misc_feature (1)..(134): NCBI GI NO: 15805153 NR Description: oxidoreductase
  misc_feature (1)..(143): NCBI GI NO: 39795780 NR Description: Unknown (protein for IMAGE:5307739)
  misc_feature (1)..(143): NCBI GI NO: 6753622 NR Description: 2-4-dienoyl-Coenzyme A reductase 2, peroxisomal
  misc_feature (1)..(136): NCBI GI NO: 23026255 NR Description: hypothetical protein
  misc_feature (1)..(143): NCBI GI NO: 25282441 NR Description: 2-4-dienoyl-Coenzyme A reductase 2, peroxisomal
  misc_feature (1)..(143): NCBI GI NO: 10190704 NR Description: 2,4-dienoyl CoA reductase 2, peroxisomal
  misc_feature (1)..(137): NCBI GI NO: 15614707 NR Description: 2,4-dienoyl-CoA reductase (NADPH)
MCYEALKYLKKGGPGRGPSTGGLIINISATLHYTASWYQIHVSAAKAGVDSITRTLALEWGTDYEIRVNGIAPGPIGGTPGLRKLAPDEMGKGKREMMPLFKLGETQDIAMAALYLASDAGKYVNGTTLVVDGGLWLSHPRHIPKEEVKELSKVIEKKVRASGVGVPSSKL

SEQ ID NO: 13508 - DNA, 1226 bp, Triticum aestivum
  misc_feature (1)..(1226): Ceres Seq. ID no. 12617197
gtctgctgtccacttcagcgcagcgtggcgagacgcggagcaaccaaactccgcacagcagaggggactagccggagcggggagaaaaaacagcatggcggcggcggcggcggcgaggaagagcgtgtgcgtgaccggcgcagggggcttcgtcgcctcgtggctcgtcaagctcctcctctctaagggccactacgcggtccgcggcaccgtgcgcgatcccggtaatgctaagaatgctcaccttaaggcgctagaaggtgctggggaaaggttggagctgctcagcgccgacctgctgaactacgacagcattgcgtcagcggttgctggctgtgagggcgtctttcatgttgctagccctgtcccttctggcagatcaaccaatcctgaggaagaagttatagcccctgctgtaacaggcacactgaatgtcttgaaggcttgctacgaggcgaaagttaagcgagttgtcatggtgtcttcagttgctgctgtgtccaataatcctaactggcctaaggataaattatttgatgaagatagctggtcagacgaggatctctgcagaaagggtgaggattggtatttcctttccaaaacactcgcagagcgtgaggcttttgcttatgcagcaaaaactgggctggatattgtaactatttgcccgtcgttggtaattggccccttgatgcagtctacagtaaatacaagcagtaacattctccttaattacctcaaaggagaacgtgatactgtagaaaataaactcaggaatgtagtggatgtccgtgatgttgccgatgctcttctattggcatatgaaaatccagaggcgtctggacggtacatctgcagttcaaaaccagtaaaagtctctgatatgataagcgtactgaagaccttatatccaatgtacacttatcccaaaaactttacggaagtggaagaaaataccatttatagttcagagaaacttcagaagctagggtggaccttcaggcctttagagaagaccctgggggacagcgtggaatcctacaaagcatctggcgtcctgaactgagcatccaaccagggaaagtttggctgttaatgcttgcaaactccttgtggttcatgtaagcagtgaaacaaaataagttggtgacacaatcgtcacgagagtctgtgtgaacatgaacaaagcatgaatcgtatgcgcgcctttcttttggtgtgtcttg

SEQ ID NO: 13509 - protein, 354 aa, Triticum aestivum
  peptide (1)..(354): Ceres Seq. ID no. 12617198
  misc_feature (39)..(299): Pfam Name: Pfam Description:  3-beta hydroxysteroid dehydrogenase/ isomerase family
  misc_feature (35)..(354): NCBI GI NO: 15226135 NR Description: putative cinnamoyl-CoA reductase
  misc_feature (42)..(354): NCBI GI NO: 15226134 NR Description: putative cinnamoyl-CoA reductase
  misc_feature (37)..(353): NCBI GI NO: 15223068 NR Description: putative cinnamoyl-CoA reductase
  misc_feature (37)..(353): NCBI GI NO: 6554472 NR Description: putative cinnamoyl-CoA reductase; 14056-15506
  misc_feature (24)..(353): NCBI GI NO: 7431410 NR Description: cinnamoyl CoA reductase - maize
  misc_feature (40)..(351): NCBI GI NO: 17978649 NR Description: cinnamoyl-CoA reductase [Pinus taeda]
  misc_feature (24)..(353): NCBI GI NO: 3242328 NR Description: cinnamoyl-CoA reductase [Zea mays]
  misc_feature (40)..(353): NCBI GI NO: 9998901 NR Description: cinnamoyl-CoA reductase
  misc_feature (40)..(353): NCBI GI NO: 3341511 NR Description: cinnamoyl-CoA reductase [Saccharum officinarum]
  misc_feature (40)..(353): NCBI GI NO: 9964087 NR Description: cinnamoyl CoA reductase [Lolium perenne]
SAVHFSAAWRDAEQPNSAQQRGLAGAGRKNSMAAAAAARKSVCVTGAGGFVASWLVKLLLSKGHYAVRGTVRDPGNAKNAHLKALEGAGERLELLSADLLNYDSIASAVAGCEGVFHVASPVPSGRSTNPEEEVIAPAVTGTLNVLKACYEAKVKRVVMVSSVAAVSNNPNWPKDKLFDEDSWSDEDLCRKGEDWYFLSKTLAEREAFAYAAKTGLDIVTICPSLVIGPLMQSTVNTSSNILLNYLKGERDTVENKLRNVVDVRDVADALLLAYENPEASGRYICSSKPVKVSDMISVLKTLYPMYTYPKNFTEVEENTIYSSEKLQKLGWTFRPLEKTLGDSVESYKASGVLN

SEQ ID NO: 13510 - protein, 323 aa, Triticum aestivum
  peptide (1)..(323): Ceres Seq. ID no. 12617199
  misc_feature (8)..(268): Pfam Name: Pfam Description:  3-beta hydroxysteroid dehydrogenase/ isomerase family
  misc_feature (4)..(323): NCBI GI NO: 15226135 NR Description: putative cinnamoyl-CoA reductase
  misc_feature (11)..(323): NCBI GI NO: 15226134 NR Description: putative cinnamoyl-CoA reductase
  misc_feature (6)..(322): NCBI GI NO: 15223068 NR Description: putative cinnamoyl-CoA reductase
  misc_feature (6)..(322): NCBI GI NO: 6554472 NR Description: putative cinnamoyl-CoA reductase; 14056-15506
  misc_feature (1)..(322): NCBI GI NO: 7431410 NR Description: cinnamoyl CoA reductase - maize
  misc_feature (9)..(320): NCBI GI NO: 17978649 NR Description: cinnamoyl-CoA reductase [Pinus taeda]
  misc_feature (1)..(322): NCBI GI NO: 3242328 NR Description: cinnamoyl-CoA reductase [Zea mays]
  misc_feature (9)..(322): NCBI GI NO: 9998901 NR Description: cinnamoyl-CoA reductase
  misc_feature (9)..(322): NCBI GI NO: 3341511 NR Description: cinnamoyl-CoA reductase [Saccharum officinarum]
  misc_feature (9)..(322): NCBI GI NO: 9964087 NR Description: cinnamoyl CoA reductase [Lolium perenne]
MAAAAAARKSVCVTGAGGFVASWLVKLLLSKGHYAVRGTVRDPGNAKNAHLKALEGAGERLELLSADLLNYDSIASAVAGCEGVFHVASPVPSGRSTNPEEEVIAPAVTGTLNVLKACYEAKVKRVVMVSSVAAVSNNPNWPKDKLFDEDSWSDEDLCRKGEDWYFLSKTLAEREAFAYAAKTGLDIVTICPSLVIGPLMQSTVNTSSNILLNYLKGERDTVENKLRNVVDVRDVADALLLAYENPEASGRYICSSKPVKVSDMISVLKTLYPMYTYPKNFTEVEENTIYSSEKLQKLGWTFRPLEKTLGDSVESYKASGVLN

SEQ ID NO: 13511 - protein, 196 aa, Triticum aestivum
  peptide (1)..(196): Ceres Seq. ID no. 12617200
  misc_feature (1)..(141): Pfam Name: Pfam Description:  3-beta hydroxysteroid dehydrogenase/ isomerase family
  misc_feature (1)..(196): NCBI GI NO: 15226135 NR Description: putative cinnamoyl-CoA reductase
  misc_feature (1)..(196): NCBI GI NO: 15226134 NR Description: putative cinnamoyl-CoA reductase
  misc_feature (1)..(195): NCBI GI NO: 15223068 NR Description: putative cinnamoyl-CoA reductase
  misc_feature (1)..(195): NCBI GI NO: 6554472 NR Description: putative cinnamoyl-CoA reductase; 14056-15506
  misc_feature (1)..(195): NCBI GI NO: 7431410 NR Description: cinnamoyl CoA reductase - maize
  misc_feature (1)..(193): NCBI GI NO: 17978649 NR Description: cinnamoyl-CoA reductase [Pinus taeda]
  misc_feature (1)..(195): NCBI GI NO: 3242328 NR Description: cinnamoyl-CoA reductase [Zea mays]
  misc_feature (1)..(195): NCBI GI NO: 9998901 NR Description: cinnamoyl-CoA reductase
  misc_feature (1)..(195): NCBI GI NO: 3341511 NR Description: cinnamoyl-CoA reductase [Saccharum officinarum]
  misc_feature (1)..(195): NCBI GI NO: 9964087 NR Description: cinnamoyl CoA reductase [Lolium perenne]
MVSSVAAVSNNPNWPKDKLFDEDSWSDEDLCRKGEDWYFLSKTLAEREAFAYAAKTGLDIVTICPSLVIGPLMQSTVNTSSNILLNYLKGERDTVENKLRNVVDVRDVADALLLAYENPEASGRYICSSKPVKVSDMISVLKTLYPMYTYPKNFTEVEENTIYSSEKLQKLGWTFRPLEKTLGDSVESYKASGVLN

SEQ ID NO: 13512 - DNA, 1782 bp, Triticum aestivum
  misc_feature (1)..(1782): Ceres Seq. ID no. 13655716
gaacatcctaatcccctttggactttggcgttatatccgtcctcgagcccctcccgtcccgtcccggccctcgccctctctcccgaccccgcctgattccagtggcgctgctgcttcttctccgccgggacagacgagacacacgctggttgcggaggagctagcggcggaggtgctttcttcatcatggagtcgcagcagcagcagcagcagatggaggcggtttctgcgccggccgcctccacgaacgggggcggggagctgatcgggtacgtggacgtgcacgtgcggagcgcgcgggacatccagaacatctgcatctaccacaagcaggacgtgtacgcgcgcctctcgctgccgggggagggcgcgccggcggcgtccacgcaggtcatcaatggcggcggccgcaacccggtgtttgaccagtccgtgcgcgtcggcgtgcgcgcgggggacgtcgacgccgcgctccgctgcgaggtctggatgctcagccgggtcaagaactacctgcaggaccagctgctgggcttcgcgctcgtgccgctcccggacgtcgtcgccgccgagggtggcacgctcgcgcgcgagttcccgctctccaccaacgacctcttccactccccggccgggttcttggagctcgagctctcgtacatcggggtcgtgcccgatgtcattcccgtctcgcccacgcccaagcctgcgctggccgatccggatgagtgcgagaacgccggcggcggagccggcgctggcgcagggaaggactacgagaacatggagttccctgacatgaatcttgtggaggaaaaccagattatgctctcggaatatgttgggctgccgtgcacggccatggaaacgcagagctccgagagcctcctgacctcggaggacgtggatggcgccgccaccgagtcccacgacgctggcgtgcgcgtcgtgcagagcttctccacggactacagcaccgccgactcggccggcgccttccggagcgagacggcagccagcagcgtgtccaccacggagtccccggccgcggccgtcccggccaccccgcagtccaacccgtccgagccgtcaggaaacgccctctcatcagcaggccagaaggagaaggcctcggacgcggcggaggtcgattcgtctcccaccgttcaggagagcccggcggtgaactcgcccagcaccgtgtctgagaacgcggtggacaagccgccgccggcgatgagcttcaacttcgcggaggaggtgcaggtgaaccagaaggagatcatggacatgtacatgaagagcatgcagcagttcacggagtcgctggccaagatgaagctcccgctggacatggacaatggcagcgacaagagcgggagcggccccgccgccgcctcgcccacggattccagcggcaccgactcgagcgcggcgacgaagaaaccgacggccggggctgcgcaggagaaatctcccaaggtgttctacggaagccgagccttcttctagttctaggaggaaggaagccggagtagtgccgccggacggaccccggactagaagatggcatttgcagccatccgtctcagctgaaaacttggtagcgcagaggaataacacttttctcatgctgttgttttacttaggcttcgtcagatcccaagacacatgcggaaattagctgccctgtatgtcttacttttaatgtatcgctactctaatgagaaatgcttggcttcttttgcttgagtatacacatctgaattacttttaattcgc

SEQ ID NO: 13513 - protein, 441 aa, Triticum aestivum
  peptide (1)..(441): Ceres Seq. ID no. 15219766
  misc_feature (30)..(119): Pfam Name: Pfam Description:  C2 domain
  misc_feature (1)..(441): NCBI GI NO: 34901084 NR Description: contains ESTsAU183957
  misc_feature (22)..(329): NCBI GI NO: 9758185 NR Description: gene_id:MTE17
  misc_feature (22)..(329): NCBI GI NO: 28393796 NR Description: unknown protein [Arabidopsis thaliana]
  misc_feature (22)..(329): NCBI GI NO: 30696612 NR Description: C2 domain-containing protein
  misc_feature (27)..(385): NCBI GI NO: 24414275 NR Description: Unknown protein
  misc_feature (27)..(281): NCBI GI NO: 21593485 NR Description: unknown [Arabidopsis thaliana]
  misc_feature (27)..(285): NCBI GI NO: 18403117 NR Description: C2 domain-containing protein
  misc_feature (27)..(285): NCBI GI NO: 25405379 NR Description: unknown protein [imported] - Arabidopsis thaliana
  misc_feature (29)..(329): NCBI GI NO: 34906644 NR Description: P0431G06.18
  misc_feature (28)..(267): NCBI GI NO: 18416832 NR Description: C2 domain-containing protein
MESQQQQQQMEAVSAPAASTNGGGELIGYVDVHVRSARDIQNICIYHKQDVYARLSLPGEGAPAASTQVINGGGRNPVFDQSVRVGVRAGDVDAALRCEVWMLSRVKNYLQDQLLGFALVPLPDVVAAEGGTLAREFPLSTNDLFHSPAGFLELELSYIGVVPDVIPVSPTPKPALADPDECENAGGGAGAGAGKDYENMEFPDMNLVEENQIMLSEYVGLPCTAMETQSSESLLTSEDVDGAATESHDAGVRVVQSFSTDYSTADSAGAFRSETAASSVSTTESPAAAVPATPQSNPSEPSGNALSSAGQKEKASDAAEVDSSPTVQESPAVNSPSTVSENAVDKPPPAMSFNFAEEVQVNQKEIMDMYMKSMQQFTESLAKMKLPLDMDNGSDKSGSGPAAASPTDSSGTDSSAATKKPTAGAAQEKSPKVFYGSRAFF

SEQ ID NO: 13514 - protein, 432 aa, Triticum aestivum
  peptide (1)..(432): Ceres Seq. ID no. 15219767
  misc_feature (21)..(110): Pfam Name: Pfam Description:  C2 domain
  misc_feature (1)..(432): NCBI GI NO: 34901084 NR Description: contains ESTsAU183957
  misc_feature (13)..(320): NCBI GI NO: 9758185 NR Description: gene_id:MTE17
  misc_feature (13)..(320): NCBI GI NO: 28393796 NR Description: unknown protein [Arabidopsis thaliana]
  misc_feature (13)..(320): NCBI GI NO: 30696612 NR Description: C2 domain-containing protein
  misc_feature (18)..(376): NCBI GI NO: 24414275 NR Description: Unknown protein
  misc_feature (18)..(272): NCBI GI NO: 21593485 NR Description: unknown [Arabidopsis thaliana]
  misc_feature (18)..(276): NCBI GI NO: 18403117 NR Description: C2 domain-containing protein
  misc_feature (18)..(276): NCBI GI NO: 25405379 NR Description: unknown protein [imported] - Arabidopsis thaliana
  misc_feature (20)..(320): NCBI GI NO: 34906644 NR Description: P0431G06.18
  misc_feature (19)..(258): NCBI GI NO: 18416832 NR Description: C2 domain-containing protein
MEAVSAPAASTNGGGELIGYVDVHVRSARDIQNICIYHKQDVYARLSLPGEGAPAASTQVINGGGRNPVFDQSVRVGVRAGDVDAALRCEVWMLSRVKNYLQDQLLGFALVPLPDVVAAEGGTLAREFPLSTNDLFHSPAGFLELELSYIGVVPDVIPVSPTPKPALADPDECENAGGGAGAGAGKDYENMEFPDMNLVEENQIMLSEYVGLPCTAMETQSSESLLTSEDVDGAATESHDAGVRVVQSFSTDYSTADSAGAFRSETAASSVSTTESPAAAVPATPQSNPSEPSGNALSSAGQKEKASDAAEVDSSPTVQESPAVNSPSTVSENAVDKPPPAMSFNFAEEVQVNQKEIMDMYMKSMQQFTESLAKMKLPLDMDNGSDKSGSGPAAASPTDSSGTDSSAATKKPTAGAAQEKSPKVFYGSRAFF

SEQ ID NO: 13515 - protein, 340 aa, Triticum aestivum
  peptide (1)..(340): Ceres Seq. ID no. 15219768
  misc_feature (1)..(340): NCBI GI NO: 34901084 NR Description: contains ESTsAU183957
  misc_feature (1)..(228): NCBI GI NO: 9758185 NR Description: gene_id:MTE17
  misc_feature (1)..(228): NCBI GI NO: 30696612 NR Description: C2 domain-containing protein
  misc_feature (1)..(228): NCBI GI NO: 28393796 NR Description: unknown protein [Arabidopsis thaliana]
  misc_feature (1)..(284): NCBI GI NO: 24414275 NR Description: Unknown protein
  misc_feature (1)..(180): NCBI GI NO: 21593485 NR Description: unknown [Arabidopsis thaliana]
  misc_feature (1)..(184): NCBI GI NO: 18403117 NR Description: C2 domain-containing protein
  misc_feature (1)..(184): NCBI GI NO: 25405379 NR Description: unknown protein [imported] - Arabidopsis thaliana
  misc_feature (1)..(228): NCBI GI NO: 34906644 NR Description: P0431G06.18
  misc_feature (1)..(166): NCBI GI NO: 18416832 NR Description: C2 domain-containing protein
MLSRVKNYLQDQLLGFALVPLPDVVAAEGGTLAREFPLSTNDLFHSPAGFLELELSYIGVVPDVIPVSPTPKPALADPDECENAGGGAGAGAGKDYENMEFPDMNLVEENQIMLSEYVGLPCTAMETQSSESLLTSEDVDGAATESHDAGVRVVQSFSTDYSTADSAGAFRSETAASSVSTTESPAAAVPATPQSNPSEPSGNALSSAGQKEKASDAAEVDSSPTVQESPAVNSPSTVSENAVDKPPPAMSFNFAEEVQVNQKEIMDMYMKSMQQFTESLAKMKLPLDMDNGSDKSGSGPAAASPTDSSGTDSSAATKKPTAGAAQEKSPKVFYGSRAFF

SEQ ID NO: 13516 - DNA, 1298 bp, Triticum aestivum
  misc_feature (1)..(1298): Ceres Seq. ID no. 14302434
agaacatcctaatcgaaaatcatcgagctcgcatcacaggagttatctctggctagtcacgtcgcatcaaagccgaagaagcaatggccgccttcgccaccaggtccgcggccttccttggcctcgccgtcgtgctctgtttcctcgccggcgcggcgagcgcgcagcagctctctcccaacttctactcgaggtcttgccccaacctggcgtccatcgtgcggtcggggatgaccgccgcattgcagacggagaggcggatgggcgcgtccatcctccgcctcttcttccacgactgcttcgtcaatgggtgtgacggctcgattctgcttgacgacacctcgacgttcaccggcgagaagaacgccgggccgaacgccaactcggcgcgtgggttcgaggtgatcgacgccatcaagacccgggtcgaagccgcgtgcagggccaccgtctcctgcgccgacatcctcgcgctcgccgcccgtgacggtgtcaacctgctcggaggtcccacgtggagcgtgccgctggggcgcaaggactcgcgcacggcgagccagagcgcggccaacgcgaacctcccggggccggggtccagcctcgccacgctcatcgccatgttcggcaacaagaacctgtcgccgcgggacatgacggcgctctccggcgcgcacaccatcgggcgctcgcagtgccagttcttccgcaaccgcatctacaacgagcgcaacatcaacgccagcttcgcggcgctgcggcagcggacgtgcccgcggtcgggcggcgacggcaacctcgcgcccttcgacgtgcagaccgccgacgggttcgacaacgcctactaccagaacctggtcgggcagcgcggcctcctgcactcggaccaggagctcttcaacggcgggtcgcaggacgcgctggtgcggcagtacagcagcagccccagccagttctccgccgacttcgtcacggccatgctgaagatgggcggcctgctgccgtcgtccgggacgcagacggaggtcaggttgaactgcaggagacccaactaaaaagtacacacataacaagtgtgctaaataatgattgatgccttggaaaaccaggcattggtcaggttcacgtatgtatgtgtatgtatgatgaagaacaccaaatgtacaaacgctcgtttgctcaatccggggcgaacgtgcaaactacaaagtatcaaaatgtatgttggtcgtaaaagtgtatcatgatcatcatcatcaatacagaacaatgggatggtgcaatcatcataattaaagaat

SEQ ID NO: 13517 - protein, 322 aa, Triticum aestivum
  peptide (1)..(322): Ceres Seq. ID no. 14302435
  misc_feature (46)..(286): Pfam Name: Pfam Description:  Peroxidase
  misc_feature (14)..(322): NCBI GI NO: 5453379 NR Description: bacterial-induced peroxidase precursor
  misc_feature (18)..(322): NCBI GI NO: 7433049 NR Description: peroxidase (EC 1.11.1.7) - flax (fragment)
  misc_feature (5)..(322): NCBI GI NO: 32351452 NR Description: class III peroxidase [Gossypium hirsutum]
  misc_feature (9)..(322): NCBI GI NO: 34903770 NR Description: unnamed protein product
  misc_feature (29)..(322): NCBI GI NO: 15239075 NR Description: peroxidase, putative [Arabidopsis thaliana]
  misc_feature (29)..(322): NCBI GI NO: 464365 NR Description: Peroxidase P7 (TP7)
  misc_feature (16)..(319): NCBI GI NO: 7433047 NR Description: probable peroxidase (EC 1
  misc_feature (14)..(322): NCBI GI NO: 5381253 NR Description: peroxidase [Nicotiana tabacum]
  misc_feature (8)..(322): NCBI GI NO: 2117618 NR Description: peroxidase (EC 1.11.1.7) 1 precursor - wheat
  misc_feature (14)..(322): NCBI GI NO: 7433058 NR Description: peroxidase (EC 1.11.1.7) - radish
MAAFATRSAAFLGLAVVLCFLAGAASAQQLSPNFYSRSCPNLASIVRSGMTAALQTERRMGASILRLFFHDCFVNGCDGSILLDDTSTFTGEKNAGPNANSARGFEVIDAIKTRVEAACRATVSCADILALAARDGVNLLGGPTWSVPLGRKDSRTASQSAANANLPGPGSSLATLIAMFGNKNLSPRDMTALSGAHTIGRSQCQFFRNRIYNERNINASFAALRQRTCPRSGGDGNLAPFDVQTADGFDNAYYQNLVGQRGLLHSDQELFNGGSQDALVRQYSSSPSQFSADFVTAMLKMGGLLPSSGTQTEVRLNCRRPN

SEQ ID NO: 13518 - protein, 273 aa, Triticum aestivum
  peptide (1)..(273): Ceres Seq. ID no. 14302436
  misc_feature (1)..(237): Pfam Name: Pfam Description:  Peroxidase
  misc_feature (1)..(273): NCBI GI NO: 5453379 NR Description: bacterial-induced peroxidase precursor
  misc_feature (1)..(273): NCBI GI NO: 7433049 NR Description: peroxidase (EC 1.11.1.7) - flax (fragment)
  misc_feature (1)..(273): NCBI GI NO: 32351452 NR Description: class III peroxidase [Gossypium hirsutum]
  misc_feature (1)..(273): NCBI GI NO: 34903770 NR Description: unnamed protein product
  misc_feature (1)..(273): NCBI GI NO: 15239075 NR Description: peroxidase, putative [Arabidopsis thaliana]
  misc_feature (1)..(273): NCBI GI NO: 464365 NR Description: Peroxidase P7 (TP7)
  misc_feature (1)..(270): NCBI GI NO: 7433047 NR Description: probable peroxidase (EC 1
  misc_feature (1)..(273): NCBI GI NO: 5381253 NR Description: peroxidase [Nicotiana tabacum]
  misc_feature (1)..(273): NCBI GI NO: 2117618 NR Description: peroxidase (EC 1.11.1.7) 1 precursor - wheat
  misc_feature (1)..(273): NCBI GI NO: 7433058 NR Description: peroxidase (EC 1.11.1.7) - radish
MTAALQTERRMGASILRLFFHDCFVNGCDGSILLDDTSTFTGEKNAGPNANSARGFEVIDAIKTRVEAACRATVSCADILALAARDGVNLLGGPTWSVPLGRKDSRTASQSAANANLPGPGSSLATLIAMFGNKNLSPRDMTALSGAHTIGRSQCQFFRNRIYNERNINASFAALRQRTCPRSGGDGNLAPFDVQTADGFDNAYYQNLVGQRGLLHSDQELFNGGSQDALVRQYSSSPSQFSADFVTAMLKMGGLLPSSGTQTEVRLNCRRPN

SEQ ID NO: 13519 - protein, 263 aa, Triticum aestivum
  peptide (1)..(263): Ceres Seq. ID no. 14302437
  misc_feature (1)..(227): Pfam Name: Pfam Description:  Peroxidase
  misc_feature (1)..(263): NCBI GI NO: 5453379 NR Description: bacterial-induced peroxidase precursor
  misc_feature (1)..(263): NCBI GI NO: 7433049 NR Description: peroxidase (EC 1.11.1.7) - flax (fragment)
  misc_feature (1)..(263): NCBI GI NO: 32351452 NR Description: class III peroxidase [Gossypium hirsutum]
  misc_feature (1)..(263): NCBI GI NO: 34903770 NR Description: unnamed protein product
  misc_feature (1)..(263): NCBI GI NO: 15239075 NR Description: peroxidase, putative [Arabidopsis thaliana]
  misc_feature (1)..(263): NCBI GI NO: 464365 NR Description: Peroxidase P7 (TP7)
  misc_feature (1)..(260): NCBI GI NO: 7433047 NR Description: probable peroxidase (EC 1
  misc_feature (1)..(263): NCBI GI NO: 5381253 NR Description: peroxidase [Nicotiana tabacum]
  misc_feature (1)..(263): NCBI GI NO: 2117618 NR Description: peroxidase (EC 1.11.1.7) 1 precursor - wheat
  misc_feature (1)..(263): NCBI GI NO: 7433058 NR Description: peroxidase (EC 1.11.1.7) - radish
MGASILRLFFHDCFVNGCDGSILLDDTSTFTGEKNAGPNANSARGFEVIDAIKTRVEAACRATVSCADILALAARDGVNLLGGPTWSVPLGRKDSRTASQSAANANLPGPGSSLATLIAMFGNKNLSPRDMTALSGAHTIGRSQCQFFRNRIYNERNINASFAALRQRTCPRSGGDGNLAPFDVQTADGFDNAYYQNLVGQRGLLHSDQELFNGGSQDALVRQYSSSPSQFSADFVTAMLKMGGLLPSSGTQTEVRLNCRRPN

SEQ ID NO: 13520 - DNA, 1136 bp, Triticum aestivum
  misc_feature (1)..(1136): Ceres Seq. ID no. 12616324
atccataattgcattcaaaggcgagcgcacaaaagagtgagactacctagagcactcagcaccgtcgtaggctcttcgccatccgttgagtgtcccaggttctcagcgtgcacgtctgatctgatggcggtaccagcaggagattcctccggcggcgacaagtacaggtctcacctggccggcgagggcgagaagaacaccgtgtggcggcacggcgcgccacccacgtacgacgccgtgaacagcctcttcgaggccgggaggactcaggagtgggcgaaggggtcgcttgaggaggtggtgcagaacgcgatcaagacgtgggagatggagctgtcgcacaaggcccgcatcgaggacttcaagtcggtgagccccggccggttcaccctgtccgtgaacggcgggcgggccctgacgggggaggagacgctggccatgggcagctacaacgcgctgctcgccagcccgatcctgccgggcaccggcgcgtacgacgccaccgccgagacgttcgagtcctcgcacgacctgttccgctccgccttcccgcgcgggttcgcgtgggaggtggtcaaggtctactccggcccgccggtgatcgccttcaagttccggcactggggccacatggaggggccctacaagggccacgcccccaccggggacaaagtcgagttctacggcgtcgccgtgctcaaggtggacgagcagctgcgggcggaggacgtggaggtgttctacgacccgggggagcttctcgcggggcttatcaagggtcccaaggaggaagacgaggcggcggcggcgctcgccgggaggctccgcgaggcggctacggtgtccgcatcaggtgctgacgcgcagccgcaggcctgccccttccttggctctggaaagcaggggtgatcgagtggcctcgtcgaataaaacgtgtcaagcctccagtcttcagggtgttgctgttgcatcactgttttgcaatcagatagatctttttcgtcagctttggagaccaactgaaagctcagttcaacgtgtaatcgtactgttaagtgcttgttgtttgttggaagttgttgggtccagatcagatcgatcgggatcagtgagtacagctctgtgaagaagtggtt

SEQ ID NO: 13521 - protein, 302 aa, Triticum aestivum
  peptide (1)..(302): Ceres Seq. ID no. 12616325
  misc_feature (42)..(301): NCBI GI NO: 34910862 NR Description: putative pathogenesis related protein
  misc_feature (46)..(301): NCBI GI NO: 34910864 NR Description: putative pathogenesis related protein
  misc_feature (53)..(295): NCBI GI NO: 18412106 NR Description: expressed protein; protein id: At1g78780
  misc_feature (62)..(295): NCBI GI NO: 25372796 NR Description: hypothetical protein F9K20.18
  misc_feature (46)..(268): NCBI GI NO: 1346809 NR Description: Pathogen-related protein
  misc_feature (46)..(273): NCBI GI NO: 34904652 NR Description: putative pathogenesis related protein
  misc_feature (46)..(270): NCBI GI NO: 34904656 NR Description: putative pathogenesis related protein
  misc_feature (110)..(295): NCBI GI NO: 30699354 NR Description: expressed protein [Arabidopsis thaliana]
  misc_feature (46)..(188): NCBI GI NO: 100602 NR Description: infection-related protein - barley
  misc_feature (69)..(269): NCBI GI NO: 17227713 NR Description: similar to pathogenesis related protein
IHNCIQRRAHKRVRLPRALSTVVGSSPSVECPRFSACTSDLMAVPAGDSSGGDKYRSHLAGEGEKNTVWRHGAPPTYDAVNSLFEAGRTQEWAKGSLEEVVQNAIKTWEMELSHKARIEDFKSVSPGRFTLSVNGGRALTGEETLAMGSYNALLASPILPGTGAYDATAETFESSHDLFRSAFPRGFAWEVVKVYSGPPVIAFKFRHWGHMEGPYKGHAPTGDKVEFYGVAVLKVDEQLRAEDVEVFYDPGELLAGLIKGPKEEDEAAAALAGRLREAATVSASGADAQPQACPFLGSGKQG

SEQ ID NO: 13522 - protein, 261 aa, Triticum aestivum
  peptide (1)..(261): Ceres Seq. ID no. 12616326
  misc_feature (1)..(260): NCBI GI NO: 34910862 NR Description: putative pathogenesis related protein
  misc_feature (5)..(260): NCBI GI NO: 34910864 NR Description: putative pathogenesis related protein
  misc_feature (12)..(254): NCBI GI NO: 18412106 NR Description: expressed protein; protein id: At1g78780
  misc_feature (21)..(254): NCBI GI NO: 25372796 NR Description: hypothetical protein F9K20.18
  misc_feature (5)..(227): NCBI GI NO: 1346809 NR Description: Pathogen-related protein
  misc_feature (5)..(232): NCBI GI NO: 34904652 NR Description: putative pathogenesis related protein
  misc_feature (5)..(229): NCBI GI NO: 34904656 NR Description: putative pathogenesis related protein
  misc_feature (69)..(254): NCBI GI NO: 30699354 NR Description: expressed protein [Arabidopsis thaliana]
  misc_feature (5)..(147): NCBI GI NO: 100602 NR Description: infection-related protein - barley
  misc_feature (28)..(228): NCBI GI NO: 17227713 NR Description: similar to pathogenesis related protein
MAVPAGDSSGGDKYRSHLAGEGEKNTVWRHGAPPTYDAVNSLFEAGRTQEWAKGSLEEVVQNAIKTWEMELSHKARIEDFKSVSPGRFTLSVNGGRALTGEETLAMGSYNALLASPILPGTGAYDATAETFESSHDLFRSAFPRGFAWEVVKVYSGPPVIAFKFRHWGHMEGPYKGHAPTGDKVEFYGVAVLKVDEQLRAEDVEVFYDPGELLAGLIKGPKEEDEAAAALAGRLREAATVSASGADAQPQACPFLGSGKQG

SEQ ID NO: 13523 - protein, 193 aa, Triticum aestivum
  peptide (1)..(193): Ceres Seq. ID no. 12616327
  misc_feature (1)..(192): NCBI GI NO: 34910862 NR Description: putative pathogenesis related protein
  misc_feature (1)..(192): NCBI GI NO: 34910864 NR Description: putative pathogenesis related protein
  misc_feature (1)..(186): NCBI GI NO: 18412106 NR Description: expressed protein; protein id: At1g78780
  misc_feature (1)..(186): NCBI GI NO: 25372796 NR Description: hypothetical protein F9K20.18
  misc_feature (1)..(159): NCBI GI NO: 1346809 NR Description: Pathogen-related protein
  misc_feature (1)..(164): NCBI GI NO: 34904652 NR Description: putative pathogenesis related protein
  misc_feature (1)..(161): NCBI GI NO: 34904656 NR Description: putative pathogenesis related protein
  misc_feature (1)..(186): NCBI GI NO: 30699354 NR Description: expressed protein [Arabidopsis thaliana]
  misc_feature (1)..(79): NCBI GI NO: 100602 NR Description: infection-related protein - barley
  misc_feature (1)..(160): NCBI GI NO: 17227713 NR Description: similar to pathogenesis related protein
MELSHKARIEDFKSVSPGRFTLSVNGGRALTGEETLAMGSYNALLASPILPGTGAYDATAETFESSHDLFRSAFPRGFAWEVVKVYSGPPVIAFKFRHWGHMEGPYKGHAPTGDKVEFYGVAVLKVDEQLRAEDVEVFYDPGELLAGLIKGPKEEDEAAAALAGRLREAATVSASGADAQPQACPFLGSGKQG

SEQ ID NO: 13524 - DNA, 1276 bp, Triticum aestivum
  misc_feature (1)..(1276): Ceres Seq. ID no. 13598238
ttttttctcattaaaaaaaactcttggatcgatcaaaccctagagagagagatgagagagactcatcttccatggccggcggcgattcttctcccgtggcggcggcggctgcggcgagaaagtgggagtgggaccaagaagagtatcggtgcgagtcgccggagtattcattggacccgcgatacagcgagtacgaccccaagcagggtcgtttcatatacgtccgctacttcttcaacggcaaactcgacctggacgaggagtcacctgttggtcccatgcgacatactggtaaaatcttcaaagagggattccggctcaaaaattcagtcaatgttgtctccatcaagattgtttcctctgactatggctacccactctatgtctacggtaccatcatagccagggatagtctggatagaaaatgtgtctatatattccggcgcgaccaggatgattgccagctcatcagctcaaaggatgattcattgattttgactggacccaagagaggattcatggtatgcgatgatatattcttcgaaatcaatctgaaggtgaaggatgtgcatgggatgactgtcgatgatgatagactcagtaaaggcctgatggaggtggatgctatccgcaggctggaatatagtcccagatatgtggttgatacggaaacacttgtcagcatgcacagcatattagatttaaactatacattcattaggaggtcggtggagggcactgttgagatcaagaaccttgagggacctgatgaattccatgggaagattgttgcttccactaccagcattccatgcgacattgtgctacatgatagcaaagtgagtggtgcgctaactgcgggtgaaaatggagtcctacaaatggcgcgacgcgtagtaggagtctctgtggatgaggtgctggtgttgactgttgctgctgctgtcggtgatgatgagttatctgcccgcactgttcagtttactccaaggcgcaatggttacgatgatgagagtatcacctgcggggactacaagatgcttctgaaggtcacttggtcgattgtgtatttctgatgtaactcttagttattcagtcacggcagtctgccagattctctagatacttaggatgcaatgaagtttcattatgggaaccagttatggtacatgctaaaacaatatatgtattccagcgtgtattgtatctattctgactcttctccctgatgtaagctagttttactggaagtgcttgcagtacatttatgaaattc

SEQ ID NO: 13525 - protein, 334 aa, Triticum aestivum
  peptide (1)..(334): Ceres Seq. ID no. 13598239
  misc_feature (1)..(332): NCBI GI NO: 38345621 NR Description: OSJNBb0003B01.17
  misc_feature (64)..(331): NCBI GI NO: 14719325 NR Description: hypothetical protein [Oryza sativa]
  misc_feature (85)..(330): NCBI GI NO: 14719321 NR Description: hypothetical protein [Oryza sativa]
  misc_feature (40)..(229): NCBI GI NO: 34906344 NR Description: unnamed protein product
  misc_feature (62)..(307): NCBI GI NO: 20161235 NR Description: P0408G07.8
  misc_feature (101)..(293): NCBI GI NO: 5777618 NR Description: CAA30376.1 protein [Oryza sativa]
  misc_feature (83)..(332): NCBI GI NO: 21913313 NR Description: csAtPR5 [Aegilops tauschii]
MAGGDSSPVAAAAAARKWEWDQEEYRCESPEYSLDPRYSEYDPKQGRFIYVRYFFNGKLDLDEESPVGPMRHTGKIFKEGFRLKNSVNVVSIKIVSSDYGYPLYVYGTIIARDSLDRKCVYIFRRDQDDCQLISSKDDSLILTGPKRGFMVCDDIFFEINLKVKDVHGMTVDDDRLSKGLMEVDAIRRLEYSPRYVVDTETLVSMHSILDLNYTFIRRSVEGTVEIKNLEGPDEFHGKIVASTTSIPCDIVLHDSKVSGALTAGENGVLQMARRVVGVSVDEVLVLTVAAAVGDDELSARTVQFTPRRNGYDDESITCGDYKMLLKVTWSIVYF

SEQ ID NO: 13526 - protein, 265 aa, Triticum aestivum
  peptide (1)..(265): Ceres Seq. ID no. 13598240
  misc_feature (1)..(263): NCBI GI NO: 38345621 NR Description: OSJNBb0003B01.17
  misc_feature (1)..(262): NCBI GI NO: 14719325 NR Description: hypothetical protein [Oryza sativa]
  misc_feature (16)..(261): NCBI GI NO: 14719321 NR Description: hypothetical protein [Oryza sativa]
  misc_feature (1)..(160): NCBI GI NO: 34906344 NR Description: unnamed protein product
  misc_feature (1)..(238): NCBI GI NO: 20161235 NR Description: P0408G07.8
  misc_feature (32)..(224): NCBI GI NO: 5777618 NR Description: CAA30376.1 protein [Oryza sativa]
  misc_feature (14)..(263): NCBI GI NO: 21913313 NR Description: csAtPR5 [Aegilops tauschii]
MRHTGKIFKEGFRLKNSVNVVSIKIVSSDYGYPLYVYGTIIARDSLDRKCVYIFRRDQDDCQLISSKDDSLILTGPKRGFMVCDDIFFEINLKVKDVHGMTVDDDRLSKGLMEVDAIRRLEYSPRYVVDTETLVSMHSILDLNYTFIRRSVEGTVEIKNLEGPDEFHGKIVASTTSIPCDIVLHDSKVSGALTAGENGVLQMARRVVGVSVDEVLVLTVAAAVGDDELSARTVQFTPRRNGYDDESITCGDYKMLLKVTWSIVYF

SEQ ID NO: 13527 - protein, 185 aa, Triticum aestivum
  peptide (1)..(185): Ceres Seq. ID no. 13598241
  misc_feature (1)..(183): NCBI GI NO: 38345621 NR Description: OSJNBb0003B01.17
  misc_feature (1)..(182): NCBI GI NO: 14719325 NR Description: hypothetical protein [Oryza sativa]
  misc_feature (1)..(181): NCBI GI NO: 14719321 NR Description: hypothetical protein [Oryza sativa]
  misc_feature (1)..(80): NCBI GI NO: 34906344 NR Description: unnamed protein product
  misc_feature (1)..(158): NCBI GI NO: 20161235 NR Description: P0408G07.8
  misc_feature (1)..(144): NCBI GI NO: 5777618 NR Description: CAA30376.1 protein [Oryza sativa]
  misc_feature (1)..(183): NCBI GI NO: 21913313 NR Description: csAtPR5 [Aegilops tauschii]
MVCDDIFFEINLKVKDVHGMTVDDDRLSKGLMEVDAIRRLEYSPRYVVDTETLVSMHSILDLNYTFIRRSVEGTVEIKNLEGPDEFHGKIVASTTSIPCDIVLHDSKVSGALTAGENGVLQMARRVVGVSVDEVLVLTVAAAVGDDELSARTVQFTPRRNGYDDESITCGDYKMLLKVTWSIVYF

SEQ ID NO: 13528 - DNA, 1241 bp, Triticum aestivum
  misc_feature (1)..(1241): Ceres Seq. ID no. 13655720
gtccgtgtccaaaaccgagcaaaacctcaaagcgcagacaagagaaggtcgctcgccaccgaggggaatggcggcgccgccggacagcaagtctgataaatccccagaggagctcctgtgcgcggcggcggaggccggtaacgacgatgctatcgccgagatcatttcctctggcgccgaccccacctacttcgacgcctccggcatgacgccactcatgcgcgcggcctccggcggccacgccgctgccgcgcggctcctgctcgatgccggcgcgccctggaacgcgctctcccccgaaggtctctccgcgggtgaccttacctccgaccccgccacatacgacctgctcctcgaccacgccctgcgctccgagctcatcctcggcaccgtcgcccgccgccaggcggcctccgcgaactcctccgacggcgtccccgccgagacctacctcgactcgagggtttcgttcagcgaggaccgggtgatggatgcggagagcaaggcggtgatgatggagtgggagcgtccgctgatggaggcgcacgcgcgggcggtgtgcgccgccggcggcggcaaggtgctcaacgtggggttcgggatggggctcgtggaccaggcgatacagaggtacgagcccgaggagcacaccatcatcgaggcccacccggaggtttacgcccggatgctcaagcttgggtggggtgagaagaagaacgtcaggatcctcttcgggcgatggcaggatgtgatcccgcagctcggctcgtatgatggtatattcttcgacacctacggggagtactacgaggacatgagggagttccacgagcacctcccgaagctgctgaatccgggaggggtctactcctacttcaatgggctgtgcggcgacaatgccttcttccacgtggtgtactgccagctggtggcgatggagctggcgagcctcgggtactcgacgcagttcgtccctctccccgtcagggactgcctcaaggcggaggtgtgggagggggtgaagcagaagtactggcagctcgacacctaccacctcccggtctgccaggccgaatctgaatcagagtagaatttctaccgtgttgctactgatcgagttttcgctagctcttcgctgctgctgtaagtttgttcaggtcttcaggatcaggtcaagcttgcctgcgtgcgtgtttgtggattgcagtcgatgatagaactcccgtggaaaatttggttcc

SEQ ID NO: 13529 - protein, 362 aa, Triticum aestivum
  peptide (1)..(362): Ceres Seq. ID no. 13655721
  misc_feature (67)..(99): Pfam Name: Pfam Description:  Ankyrin repeat
  misc_feature (23)..(362): NCBI GI NO: 14488376 NR Description: putative methyltransferase
  misc_feature (39)..(356): NCBI GI NO: 15239183 NR Description: hypothetical protein [Arabidopsis thaliana]
  misc_feature (87)..(354): NCBI GI NO: 12644401 NR Description: Hypothetical protein C26A3.17c in chromosome I
  misc_feature (87)..(354): NCBI GI NO: 25777560 NR Description: hypothetical protein SPAC26A3
  misc_feature (87)..(354): NCBI GI NO: 19115072 NR Description: hypothetical protein [Schizosaccharomyces pombe]
  misc_feature (127)..(356): NCBI GI NO: 40738857 NR Description: hypothetical protein AN6072.2
  misc_feature (85)..(353): NCBI GI NO: 6320673 NR Description: Protein Arginine Methyltransferase
  misc_feature (130)..(328): NCBI GI NO: 32416678 NR Description: hypothetical protein [Neurospora crassa]
  misc_feature (241)..(355): NCBI GI NO: 32416678 NR Description: hypothetical protein [Neurospora crassa]
  misc_feature (152)..(293): NCBI GI NO: 27924205 NR Description: Similar to Guanidinoacetate methyltransferase
SVSKTEQNLKAQTREGRSPPRGMAAPPDSKSDKSPEELLCAAAEAGNDDAIAEIISSGADPTYFDASGMTPLMRAASGGHAAAARLLLDAGAPWNALSPEGLSAGDLTSDPATYDLLLDHALRSELILGTVARRQAASANSSDGVPAETYLDSRVSFSEDRVMDAESKAVMMEWERPLMEAHARAVCAAGGGKVLNVGFGMGLVDQAIQRYEPEEHTIIEAHPEVYARMLKLGWGEKKNVRILFGRWQDVIPQLGSYDGIFFDTYGEYYEDMREFHEHLPKLLNPGGVYSYFNGLCGDNAFFHVVYCQLVAMELASLGYSTQFVPLPVRDCLKAEVWEGVKQKYWQLDTYHLPVCQAESESE

SEQ ID NO: 13530 - protein, 340 aa, Triticum aestivum
  peptide (1)..(340): Ceres Seq. ID no. 13655722
  misc_feature (45)..(77): Pfam Name: Pfam Description:  Ankyrin repeat
  misc_feature (1)..(340): NCBI GI NO: 14488376 NR Description: putative methyltransferase
  misc_feature (17)..(334): NCBI GI NO: 15239183 NR Description: hypothetical protein [Arabidopsis thaliana]
  misc_feature (65)..(332): NCBI GI NO: 12644401 NR Description: Hypothetical protein C26A3.17c in chromosome I
  misc_feature (65)..(332): NCBI GI NO: 19115072 NR Description: hypothetical protein [Schizosaccharomyces pombe]
  misc_feature (65)..(332): NCBI GI NO: 25777560 NR Description: hypothetical protein SPAC26A3
  misc_feature (105)..(334): NCBI GI NO: 40738857 NR Description: hypothetical protein AN6072.2
  misc_feature (63)..(331): NCBI GI NO: 6320673 NR Description: Protein Arginine Methyltransferase
  misc_feature (108)..(306): NCBI GI NO: 32416678 NR Description: hypothetical protein [Neurospora crassa]
  misc_feature (219)..(333): NCBI GI NO: 32416678 NR Description: hypothetical protein [Neurospora crassa]
  misc_feature (130)..(271): NCBI GI NO: 27924205 NR Description: Similar to Guanidinoacetate methyltransferase
MAAPPDSKSDKSPEELLCAAAEAGNDDAIAEIISSGADPTYFDASGMTPLMRAASGGHAAAARLLLDAGAPWNALSPEGLSAGDLTSDPATYDLLLDHALRSELILGTVARRQAASANSSDGVPAETYLDSRVSFSEDRVMDAESKAVMMEWERPLMEAHARAVCAAGGGKVLNVGFGMGLVDQAIQRYEPEEHTIIEAHPEVYARMLKLGWGEKKNVRILFGRWQDVIPQLGSYDGIFFDTYGEYYEDMREFHEHLPKLLNPGGVYSYFNGLCGDNAFFHVVYCQLVAMELASLGYSTQFVPLPVRDCLKAEVWEGVKQKYWQLDTYHLPVCQAESESE

SEQ ID NO: 13531 - protein, 294 aa, Triticum aestivum
  peptide (1)..(294): Ceres Seq. ID no. 13655723
  misc_feature (1)..(31): Pfam Name: Pfam Description:  Ankyrin repeat
  misc_feature (1)..(294): NCBI GI NO: 14488376 NR Description: putative methyltransferase
  misc_feature (1)..(288): NCBI GI NO: 15239183 NR Description: hypothetical protein [Arabidopsis thaliana]
  misc_feature (19)..(286): NCBI GI NO: 12644401 NR Description: Hypothetical protein C26A3.17c in chromosome I
  misc_feature (19)..(286): NCBI GI NO: 25777560 NR Description: hypothetical protein SPAC26A3
  misc_feature (19)..(286): NCBI GI NO: 19115072 NR Description: hypothetical protein [Schizosaccharomyces pombe]
  misc_feature (59)..(288): NCBI GI NO: 40738857 NR Description: hypothetical protein AN6072.2
  misc_feature (17)..(285): NCBI GI NO: 6320673 NR Description: Protein Arginine Methyltransferase
  misc_feature (62)..(260): NCBI GI NO: 32416678 NR Description: hypothetical protein [Neurospora crassa]
  misc_feature (173)..(287): NCBI GI NO: 32416678 NR Description: hypothetical protein [Neurospora crassa]
  misc_feature (84)..(225): NCBI GI NO: 27924205 NR Description: Similar to Guanidinoacetate methyltransferase
MTPLMRAASGGHAAAARLLLDAGAPWNALSPEGLSAGDLTSDPATYDLLLDHALRSELILGTVARRQAASANSSDGVPAETYLDSRVSFSEDRVMDAESKAVMMEWERPLMEAHARAVCAAGGGKVLNVGFGMGLVDQAIQRYEPEEHTIIEAHPEVYARMLKLGWGEKKNVRILFGRWQDVIPQLGSYDGIFFDTYGEYYEDMREFHEHLPKLLNPGGVYSYFNGLCGDNAFFHVVYCQLVAMELASLGYSTQFVPLPVRDCLKAEVWEGVKQKYWQLDTYHLPVCQAESESE

SEQ ID NO: 13532 - DNA, 1368 bp, Triticum aestivum
  misc_feature (1)..(1368): Ceres Seq. ID no. 13597205
actcctcccctaaaagaactccggtggcgtactactagaaaacagcagagacggctgtgccctgctcctccttctcgccggtgccttctgctggaggcaaacgaaactcctcctcctcctcctgcccctctctcccacgcttcccccttcgtctccgtcgacaggaagcaaccaggagaggcgaggcggcgacgatgcagatgaagcagaaggtctacgagctctacaaggggacggtggagcgggtcacgggcccgcgcaccgtctcggcgttcctcgagaagggcgtcctctccgtccccgagttcatcctcgccggcgacaacctcgtatccaagtgcccaacctggtcctgggaggcgggcgatccgagcaagaggaagccatacctcccctccgataagcagttcctcgtcaccaggaacgtgccctgcctaagacgagctgtggcggtcgaggaagagtatgatgcagcgggagctgaggttgttctcgatgatgatgaggatggcgaaggctggctcgcaacacatgggctgcaagcatcagagtcaaaagaggaggaagacataccgtctatggatacattggacatagggaaagtcgaagagatcaaatctatcccctcctactttggtgctagtgaaaagccagatgaggaggaggatatacctgacatggacacctatgaagacacaggagatcattctacagctacccctcagccttcatattttgtcgcagaagagcctgatgatgacaacattcttctcaccagaacatatgatgttagcatcacatatgacaagtactaccaaactccacgtgtctggcttacaggctatgatgaggcaagaatgccattaaagcctgaacttgtgtttcaagatatcagtcaagaccatgcacacaaaacggtgactatcgaagaccatcctcacttgttagtgggacagcacgcttccgtgcatccttgcaagcacgctgctgtgatgaaaaagatcattgatgttatagtgtctcaaggaggtgcaccagaagttgacaagtaccttttcatatttctcaaattcatggcttctgtcatacccaccattgagtatgattacactatggatttcgatctgggcagtacaagcacataagccgcccattgaagaaaagctgaaactcccgagaaggtgagctgttcatggtcgccgaataattgctgctcttcggaaggatctgtacattgtgtccgtgtgtgttggttcgtttggaaatgaactttcaattgtaaactctgatgctctgcaggaagattgtcctgattggtcctcttacggtgtggtgccgcactgatatgacatttgtgattcttcgccg

SEQ ID NO: 13533 - protein, 316 aa, Triticum aestivum
  peptide (1)..(316): Ceres Seq. ID no. 13597206
  misc_feature (6)..(161): Pfam Name: Pfam Description:  Autophagocytosis associated protein
  misc_feature (1)..(315): NCBI GI NO: 34903638 NR Description: B1015E06.2
  misc_feature (1)..(316): NCBI GI NO: 18424474 NR Description: autophagocytosis protein - like
  misc_feature (1)..(316): NCBI GI NO: 21595613 NR Description: autophagocytosis protein-like
  misc_feature (1)..(311): NCBI GI NO: 9758466 NR Description: autophagocytosis protein AUT1-like
  misc_feature (1)..(235): NCBI GI NO: 37536838 NR Description: autophagocytosis protein AUT1-like
  misc_feature (4)..(167): NCBI GI NO: 28828597 NR Description: hypothetical protein [Dictyostelium discoideum]
  misc_feature (155)..(310): NCBI GI NO: 28828597 NR Description: hypothetical protein [Dictyostelium discoideum]
  misc_feature (13)..(311): NCBI GI NO: 34785406 NR Description: Unknown (protein for MGC:64156) [Danio rerio]
  misc_feature (5)..(311): NCBI GI NO: 13385890 NR Description: RIKEN cDNA 2610016C12 [Mus musculus]
  misc_feature (5)..(311): NCBI GI NO: 19705511 NR Description: preconditioning-inducible gene 1 protein
MQMKQKVYELYKGTVERVTGPRTVSAFLEKGVLSVPEFILAGDNLVSKCPTWSWEAGDPSKRKPYLPSDKQFLVTRNVPCLRRAVAVEEEYDAAGAEVVLDDDEDGEGWLATHGLQASESKEEEDIPSMDTLDIGKVEEIKSIPSYFGASEKPDEEEDIPDMDTYEDTGDHSTATPQPSYFVAEEPDDDNILLTRTYDVSITYDKYYQTPRVWLTGYDEARMPLKPELVFQDISQDHAHKTVTIEDHPHLLVGQHASVHPCKHAAVMKKIIDVIVSQGGAPEVDKYLFIFLKFMASVIPTIEYDYTMDFDLGSTST

SEQ ID NO: 13534 - protein, 314 aa, Triticum aestivum
  peptide (1)..(314): Ceres Seq. ID no. 13597207
  misc_feature (4)..(159): Pfam Name: Pfam Description:  Autophagocytosis associated protein
  misc_feature (1)..(313): NCBI GI NO: 34903638 NR Description: B1015E06.2
  misc_feature (1)..(314): NCBI GI NO: 18424474 NR Description: autophagocytosis protein - like
  misc_feature (1)..(314): NCBI GI NO: 21595613 NR Description: autophagocytosis protein-like
  misc_feature (1)..(309): NCBI GI NO: 9758466 NR Description: autophagocytosis protein AUT1-like
  misc_feature (1)..(233): NCBI GI NO: 37536838 NR Description: autophagocytosis protein AUT1-like
  misc_feature (2)..(165): NCBI GI NO: 28828597 NR Description: hypothetical protein [Dictyostelium discoideum]
  misc_feature (153)..(308): NCBI GI NO: 28828597 NR Description: hypothetical protein [Dictyostelium discoideum]
  misc_feature (11)..(309): NCBI GI NO: 34785406 NR Description: Unknown (protein for MGC:64156) [Danio rerio]
  misc_feature (3)..(309): NCBI GI NO: 13385890 NR Description: RIKEN cDNA 2610016C12 [Mus musculus]
  misc_feature (3)..(309): NCBI GI NO: 19705511 NR Description: preconditioning-inducible gene 1 protein
MKQKVYELYKGTVERVTGPRTVSAFLEKGVLSVPEFILAGDNLVSKCPTWSWEAGDPSKRKPYLPSDKQFLVTRNVPCLRRAVAVEEEYDAAGAEVVLDDDEDGEGWLATHGLQASESKEEEDIPSMDTLDIGKVEEIKSIPSYFGASEKPDEEEDIPDMDTYEDTGDHSTATPQPSYFVAEEPDDDNILLTRTYDVSITYDKYYQTPRVWLTGYDEARMPLKPELVFQDISQDHAHKTVTIEDHPHLLVGQHASVHPCKHAAVMKKIIDVIVSQGGAPEVDKYLFIFLKFMASVIPTIEYDYTMDFDLGSTST

SEQ ID NO: 13535 - protein, 188 aa, Triticum aestivum
  peptide (1)..(188): Ceres Seq. ID no. 13597208
  misc_feature (61)..(179): Pfam Name: Pfam Description:  Autophagocytosis associated protein
  misc_feature (1)..(187): NCBI GI NO: 34903638 NR Description: B1015E06.2
  misc_feature (1)..(188): NCBI GI NO: 18424474 NR Description: autophagocytosis protein - like
  misc_feature (1)..(188): NCBI GI NO: 21595613 NR Description: autophagocytosis protein-like
  misc_feature (1)..(183): NCBI GI NO: 9758466 NR Description: autophagocytosis protein AUT1-like
  misc_feature (1)..(107): NCBI GI NO: 37536838 NR Description: autophagocytosis protein AUT1-like
  misc_feature (1)..(39): NCBI GI NO: 28828597 NR Description: hypothetical protein [Dictyostelium discoideum]
  misc_feature (27)..(182): NCBI GI NO: 28828597 NR Description: hypothetical protein [Dictyostelium discoideum]
  misc_feature (1)..(183): NCBI GI NO: 34785406 NR Description: Unknown (protein for MGC:64156) [Danio rerio]
  misc_feature (1)..(183): NCBI GI NO: 13385890 NR Description: RIKEN cDNA 2610016C12 [Mus musculus]
  misc_feature (1)..(183): NCBI GI NO: 19705511 NR Description: preconditioning-inducible gene 1 protein
MDTLDIGKVEEIKSIPSYFGASEKPDEEEDIPDMDTYEDTGDHSTATPQPSYFVAEEPDDDNILLTRTYDVSITYDKYYQTPRVWLTGYDEARMPLKPELVFQDISQDHAHKTVTIEDHPHLLVGQHASVHPCKHAAVMKKIIDVIVSQGGAPEVDKYLFIFLKFMASVIPTIEYDYTMDFDLGSTST

SEQ ID NO: 13536 - DNA, 1732 bp, Triticum aestivum
  misc_feature (1)..(1732): Ceres Seq. ID no. 13655724
cacagatagcctagagagacagggtccgcaaagcaagcaccgcccggcaaaggcaagaaagagccatccatccatccatcatccccttcctcgtgcgctgctgcctcttgcttctttcttcttcgtctagtaccaagctcaagctagatagatatccatggtttttctctccttgcttgcttgcgaattgctgcaggttgtaagtagataggtgttatacgtagtaggagctactagtagataggcggcgggtgggagaggagatgaagctccatctcctgctgaaggtcctgttcggccccgtgccggtctacttctcggcgctggccatcctcatcctgctgaccaacgcgcagtacttcgggctcggcggcgtcggcgtgccgcgcgccaccaagctggcctcctccacgcaggtggtgagcgtgatgaagtactgcgacatcttccgcggcgagtgggtgcccgacgcggaggcgccctactacaaccacaagacgtgcggcatgatccaggagcaccagaactgcctcaagtacggccgaccggacctcggcttcctcaagtggcgctggaggccgtccggctgcgagctgccgcgcttcgaccccgtccagttcctgcagttcgtccgccacaagtccctcgccttcgtcggggactccctggctcgcaaccatatgcagtccttgctctgcctcctctcacaggtggcgtatcccaaggacatctcggcgaacccgacggaccagaacaaggtgtaccactaccgggcgtacaacttcaccatcaacatgttctggtcgccgttcctggtgcgggcgcgggagcccgaccacgacgacccggcgcacacggggcactacagcctctacctggacgagccggacgacaagtgggtgtcgcaggtgccccggttcgactacgtgctggtgtcggcggccaactggttctcccgcccctcgctcttctacgagaagcggcggctgatcgggtgcagcttctgcagccggcagtacggcgtgccggacctgacgctctactactcgcagcgcaaggcgtggcgggtggcgctgcgggcgatcaacgccctggagggcaaggtgaaggcgcgggtgattgtgcggatgctgtcgcccatgtcgcacttcgagaacgggacctgggaccagggcggcaactgcaagcgcacggaaccggtccggagcaaccagacggtgatggaggggcgggacctgcagttctacacggcgcagatggaggagtaccgcgcggcggagaagaccgcgcggacaaaggggctgcggctgatgctcatggacgccacggccgccatgctgatgcggcccgacggccaccccagccggtacgggcactggcccaacgagaaggtgcagctctacaacgactgcatccattggtgcctccccggccccatcgacatctggaacgacctcttgttccagatgatgctcgtctagcccagtcccgttcccgtccatcggcacacagatctgatcaaaggatatgctccaaggcaattttgataatgaattgttccatctcatctcatctccctcctttcattcttccctactactaccagtcgatccgctttccattcctttgattgatgggtgtggtggtggtaactattgacgacgccaacttttttgtcggtcgtcacggaaagagtgagcaaaagaagctcctctccccttttcttcgtttg

SEQ ID NO: 13537 - protein, 405 aa, Triticum aestivum
  peptide (1)..(405): Ceres Seq. ID no. 15219769
  misc_feature (230)..(403): Pfam Name: Pfam Description:  Arabidopsis proteins of unknown function
  misc_feature (1)..(405): NCBI GI NO: 34911880 NR Description: OSJNBb0032K15.17
  misc_feature (5)..(403): NCBI GI NO: 34911888 NR Description: OSJNBb0032K15.21
  misc_feature (19)..(404): NCBI GI NO: 34898638 NR Description: contains ESTsAU089699
  misc_feature (44)..(403): NCBI GI NO: 15237211 NR Description: expressed protein [Arabidopsis thaliana]
  misc_feature (52)..(403): NCBI GI NO: 15237213 NR Description: expressed protein [Arabidopsis thaliana]
  misc_feature (47)..(404): NCBI GI NO: 30678135 NR Description: expressed protein [Arabidopsis thaliana]
  misc_feature (59)..(403): NCBI GI NO: 15232914 NR Description: expressed protein [Arabidopsis thaliana]
  misc_feature (16)..(404): NCBI GI NO: 15234058 NR Description: expressed protein [Arabidopsis thaliana]
  misc_feature (16)..(404): NCBI GI NO: 28393189 NR Description: unknown protein [Arabidopsis thaliana]
  misc_feature (51)..(404): NCBI GI NO: 7486743 NR Description: hypothetical protein F9D16
MKLHLLLKVLFGPVPVYFSALAILILLTNAQYFGLGGVGVPRATKLASSTQVVSVMKYCDIFRGEWVPDAEAPYYNHKTCGMIQEHQNCLKYGRPDLGFLKWRWRPSGCELPRFDPVQFLQFVRHKSLAFVGDSLARNHMQSLLCLLSQVAYPKDISANPTDQNKVYHYRAYNFTINMFWSPFLVRAREPDHDDPAHTGHYSLYLDEPDDKWVSQVPRFDYVLVSAANWFSRPSLFYEKRRLIGCSFCSRQYGVPDLTLYYSQRKAWRVALRAINALEGKVKARVIVRMLSPMSHFENGTWDQGGNCKRTEPVRSNQTVMEGRDLQFYTAQMEEYRAAEKTARTKGLRLMLMDATAAMLMRPDGHPSRYGHWPNEKVQLYNDCIHWCLPGPIDIWNDLLFQMMLV

SEQ ID NO: 13538 - protein, 350 aa, Triticum aestivum
  peptide (1)..(350): Ceres Seq. ID no. 15219770
  misc_feature (175)..(348): Pfam Name: Pfam Description:  Arabidopsis proteins of unknown function
  misc_feature (1)..(350): NCBI GI NO: 34911880 NR Description: OSJNBb0032K15.17
  misc_feature (1)..(348): NCBI GI NO: 34911888 NR Description: OSJNBb0032K15.21
  misc_feature (1)..(349): NCBI GI NO: 34898638 NR Description: contains ESTsAU089699
  misc_feature (1)..(348): NCBI GI NO: 15237211 NR Description: expressed protein [Arabidopsis thaliana]
  misc_feature (1)..(348): NCBI GI NO: 15237213 NR Description: expressed protein [Arabidopsis thaliana]
  misc_feature (1)..(349): NCBI GI NO: 30678135 NR Description: expressed protein [Arabidopsis thaliana]
  misc_feature (4)..(348): NCBI GI NO: 15232914 NR Description: expressed protein [Arabidopsis thaliana]
  misc_feature (1)..(349): NCBI GI NO: 15234058 NR Description: expressed protein [Arabidopsis thaliana]
  misc_feature (1)..(349): NCBI GI NO: 28393189 NR Description: unknown protein [Arabidopsis thaliana]
  misc_feature (1)..(349): NCBI GI NO: 7486743 NR Description: hypothetical protein F9D16
MKYCDIFRGEWVPDAEAPYYNHKTCGMIQEHQNCLKYGRPDLGFLKWRWRPSGCELPRFDPVQFLQFVRHKSLAFVGDSLARNHMQSLLCLLSQVAYPKDISANPTDQNKVYHYRAYNFTINMFWSPFLVRAREPDHDDPAHTGHYSLYLDEPDDKWVSQVPRFDYVLVSAANWFSRPSLFYEKRRLIGCSFCSRQYGVPDLTLYYSQRKAWRVALRAINALEGKVKARVIVRMLSPMSHFENGTWDQGGNCKRTEPVRSNQTVMEGRDLQFYTAQMEEYRAAEKTARTKGLRLMLMDATAAMLMRPDGHPSRYGHWPNEKVQLYNDCIHWCLPGPIDIWNDLLFQMMLV

SEQ ID NO: 13539 - protein, 324 aa, Triticum aestivum
  peptide (1)..(324): Ceres Seq. ID no. 15219771
  misc_feature (149)..(322): Pfam Name: Pfam Description:  Arabidopsis proteins of unknown function
  misc_feature (1)..(324): NCBI GI NO: 34911880 NR Description: OSJNBb0032K15.17
  misc_feature (1)..(322): NCBI GI NO: 34911888 NR Description: OSJNBb0032K15.21
  misc_feature (1)..(323): NCBI GI NO: 34898638 NR Description: contains ESTsAU089699
  misc_feature (1)..(322): NCBI GI NO: 15237211 NR Description: expressed protein [Arabidopsis thaliana]
  misc_feature (1)..(322): NCBI GI NO: 15237213 NR Description: expressed protein [Arabidopsis thaliana]
  misc_feature (1)..(323): NCBI GI NO: 30678135 NR Description: expressed protein [Arabidopsis thaliana]
  misc_feature (1)..(322): NCBI GI NO: 15232914 NR Description: expressed protein [Arabidopsis thaliana]
  misc_feature (1)..(323): NCBI GI NO: 15234058 NR Description: expressed protein [Arabidopsis thaliana]
  misc_feature (1)..(323): NCBI GI NO: 28393189 NR Description: unknown protein [Arabidopsis thaliana]
  misc_feature (1)..(323): NCBI GI NO: 7486743 NR Description: hypothetical protein F9D16
MIQEHQNCLKYGRPDLGFLKWRWRPSGCELPRFDPVQFLQFVRHKSLAFVGDSLARNHMQSLLCLLSQVAYPKDISANPTDQNKVYHYRAYNFTINMFWSPFLVRAREPDHDDPAHTGHYSLYLDEPDDKWVSQVPRFDYVLVSAANWFSRPSLFYEKRRLIGCSFCSRQYGVPDLTLYYSQRKAWRVALRAINALEGKVKARVIVRMLSPMSHFENGTWDQGGNCKRTEPVRSNQTVMEGRDLQFYTAQMEEYRAAEKTARTKGLRLMLMDATAAMLMRPDGHPSRYGHWPNEKVQLYNDCIHWCLPGPIDIWNDLLFQMMLV

SEQ ID NO: 13540 - DNA, 1542 bp, Triticum aestivum
  misc_feature (1)..(1542): Ceres Seq. ID no. 13597389
acattttgccacttgatcattaatggtctcccccttcgtcacccctaaacagaaatcaaatctgcctccctaaaccgcaaagcttcaagcaccagcgacctccctccatctccgtcccttctactcttctcacccatctcccctccctcccatggctggagtaaacacgaaccacaaggatagtacaaagtagtgcagcggagtggcgtggggagctggtcaagcgcagcagcctagctcagctccatcctcacagcatccaacctccaaccaccgccgcgaccatgcgtgccgccgtggcgctcctcctcgccgccgtcctctgcctcggcggcggcggtgcggcgtccgcgtcgccggactttgactacccggcggcgttcaacttcggcgactccaactccgacacgggcggccgcatcgccgcgggcttcgagcccatgcccccgccctacggctccaccttcttcggcgccccctccggccgcttctccgacggccgcctcatcctcgacttcctcatggatgcgatggatatgccattcctcaatgcatacttggattctcttggtgcgcctaacttccgggcaggtgttaattttgctcaagctggctgttcgattactccagcaagtgcaacatctgtcagcccgttttcatttggtcttcagattaagcaattctttgccttcaaggaaaaagtcactagcctgctctccaaaggagataggtaccgtcggtatattcctcagttggattacttttcgaagggactctacatgtttgatataggtcaaaatgaccttgctggtcaattctactccagaacagaggaccaagtcattgcatccattccgactattttgttggaatttgaaactgggctcaagactctatacgatcagggtgccaggaagttctggattcacaacacaggtcctcttggctgcttacctcaaaacatagatctttttggcaaagacccaacacaactggatgaacttcattgtgtagcaaagcacaatcgtgctgcaaagattttcaacttacagctgcatgcactttgcacaaagttgagaggccagtttgctggagctaatatcacttacatcgacatctactccatcaaatatgccctgattggcaattactctcgatatggatttgaaagtcccaccgaagcatgctgtggatacggaggaccacccctgaattatgatggccgagtgccgtgtggacagacgaaatctgttaacggtaatctcgtaaccgcgaaaggatgcagtgacagcactgagtatgtcaactgggatggaatacattacacggaagctgcaaatttccacgttacatcgcagattctgaccgggaagtactcagatcctccgttcgtcgacaagatgccattccttataaaaccgaggttctaatgagcgggtatttattcccacaactgaattagtaaaccaatgtaatgttgtattgaccacaacagatgtattatttatcacatgtcaataatcacatatagcttcttttttc

SEQ ID NO: 13541 - protein, 381 aa, Triticum aestivum
  peptide (1)..(381): Ceres Seq. ID no. 13597390
  misc_feature (34)..(359): Pfam Name: Pfam Description:  GDSL-like Lipase/Acylhydrolase
  misc_feature (29)..(381): NCBI GI NO: 25405771 NR Description: hypothetical protein T22H22.20
  misc_feature (22)..(381): NCBI GI NO: 18405064 NR Description: GDSL-motif lipase/hydrolase protein
  misc_feature (22)..(381): NCBI GI NO: 21537184 NR Description: early nodule-specific protein, putative
  misc_feature (28)..(366): NCBI GI NO: 21553789 NR Description: putative nodulin [Arabidopsis thaliana]
  misc_feature (28)..(366): NCBI GI NO: 15229919 NR Description: GDSL-motif lipase/hydrolase protein
  misc_feature (28)..(366): NCBI GI NO: 23397291 NR Description: putative nodulin [Arabidopsis thaliana]
  misc_feature (1)..(368): NCBI GI NO: 33147015 NR Description: putative early nodulin 8 precursor
  misc_feature (1)..(293): NCBI GI NO: 34901120 NR Description: contains ESTsAU172828
  misc_feature (293)..(368): NCBI GI NO: 34901120 NR Description: contains ESTsAU172828
  misc_feature (3)..(368): NCBI GI NO: 33147016 NR Description: putative early nodulin 8 precursor
MRAAVALLLAAVLCLGGGGAASASPDFDYPAAFNFGDSNSDTGGRIAAGFEPMPPPYGSTFFGAPSGRFSDGRLILDFLMDAMDMPFLNAYLDSLGAPNFRAGVNFAQAGCSITPASATSVSPFSFGLQIKQFFAFKEKVTSLLSKGDRYRRYIPQLDYFSKGLYMFDIGQNDLAGQFYSRTEDQVIASIPTILLEFETGLKTLYDQGARKFWIHNTGPLGCLPQNIDLFGKDPTQLDELHCVAKHNRAAKIFNLQLHALCTKLRGQFAGANITYIDIYSIKYALIGNYSRYGFESPTEACCGYGGPPLNYDGRVPCGQTKSVNGNLVTAKGCSDSTEYVNWDGIHYTEAANFHVTSQILTGKYSDPPFVDKMPFLIKPRF

SEQ ID NO: 13542 - protein, 329 aa, Triticum aestivum
  peptide (1)..(329): Ceres Seq. ID no. 13597391
  misc_feature (1)..(307): Pfam Name: Pfam Description:  GDSL-like Lipase/Acylhydrolase
  misc_feature (1)..(329): NCBI GI NO: 25405771 NR Description: hypothetical protein T22H22.20
  misc_feature (1)..(329): NCBI GI NO: 18405064 NR Description: GDSL-motif lipase/hydrolase protein
  misc_feature (1)..(329): NCBI GI NO: 21537184 NR Description: early nodule-specific protein, putative
  misc_feature (1)..(314): NCBI GI NO: 21553789 NR Description: putative nodulin [Arabidopsis thaliana]
  misc_feature (1)..(314): NCBI GI NO: 15229919 NR Description: GDSL-motif lipase/hydrolase protein
  misc_feature (1)..(314): NCBI GI NO: 23397291 NR Description: putative nodulin [Arabidopsis thaliana]
  misc_feature (1)..(316): NCBI GI NO: 33147015 NR Description: putative early nodulin 8 precursor
  misc_feature (1)..(241): NCBI GI NO: 34901120 NR Description: contains ESTsAU172828
  misc_feature (241)..(316): NCBI GI NO: 34901120 NR Description: contains ESTsAU172828
  misc_feature (1)..(316): NCBI GI NO: 33147016 NR Description: putative early nodulin 8 precursor
MPPPYGSTFFGAPSGRFSDGRLILDFLMDAMDMPFLNAYLDSLGAPNFRAGVNFAQAGCSITPASATSVSPFSFGLQIKQFFAFKEKVTSLLSKGDRYRRYIPQLDYFSKGLYMFDIGQNDLAGQFYSRTEDQVIASIPTILLEFETGLKTLYDQGARKFWIHNTGPLGCLPQNIDLFGKDPTQLDELHCVAKHNRAAKIFNLQLHALCTKLRGQFAGANITYIDIYSIKYALIGNYSRYGFESPTEACCGYGGPPLNYDGRVPCGQTKSVNGNLVTAKGCSDSTEYVNWDGIHYTEAANFHVTSQILTGKYSDPPFVDKMPFLIKPRF

SEQ ID NO: 13543 - protein, 302 aa, Triticum aestivum
  peptide (1)..(302): Ceres Seq. ID no. 13597392
  misc_feature (1)..(280): Pfam Name: Pfam Description:  GDSL-like Lipase/Acylhydrolase
  misc_feature (1)..(302): NCBI GI NO: 25405771 NR Description: hypothetical protein T22H22.20
  misc_feature (1)..(302): NCBI GI NO: 18405064 NR Description: GDSL-motif lipase/hydrolase protein
  misc_feature (1)..(302): NCBI GI NO: 21537184 NR Description: early nodule-specific protein, putative
  misc_feature (1)..(287): NCBI GI NO: 21553789 NR Description: putative nodulin [Arabidopsis thaliana]
  misc_feature (1)..(287): NCBI GI NO: 15229919 NR Description: GDSL-motif lipase/hydrolase protein
  misc_feature (1)..(287): NCBI GI NO: 23397291 NR Description: putative nodulin [Arabidopsis thaliana]
  misc_feature (1)..(289): NCBI GI NO: 33147015 NR Description: putative early nodulin 8 precursor
  misc_feature (1)..(214): NCBI GI NO: 34901120 NR Description: contains ESTsAU172828
  misc_feature (214)..(289): NCBI GI NO: 34901120 NR Description: contains ESTsAU172828
  misc_feature (1)..(289): NCBI GI NO: 33147016 NR Description: putative early nodulin 8 precursor
MDAMDMPFLNAYLDSLGAPNFRAGVNFAQAGCSITPASATSVSPFSFGLQIKQFFAFKEKVTSLLSKGDRYRRYIPQLDYFSKGLYMFDIGQNDLAGQFYSRTEDQVIASIPTILLEFETGLKTLYDQGARKFWIHNTGPLGCLPQNIDLFGKDPTQLDELHCVAKHNRAAKIFNLQLHALCTKLRGQFAGANITYIDIYSIKYALIGNYSRYGFESPTEACCGYGGPPLNYDGRVPCGQTKSVNGNLVTAKGCSDSTEYVNWDGIHYTEAANFHVTSQILTGKYSDPPFVDKMPFLIKPRF

SEQ ID NO: 13544 - DNA, 1470 bp, Triticum aestivum
  misc_feature (1)..(1470): Ceres Seq. ID no. 13584001
aaaaaaaacagagcagggaggtcggccgcgacctaggagctcggcggcggcgaccaccacgagcatcggcggctgcgcagccatgcttggccatctccggcgatcctctggcattctgcgccgcctaccgatcgccagcttcgctccctccgaccctgccgctgcatactcgggatggagttcacacgccgagtcactctcgtttgtttcatgttggtgtggcaagcatgctaccaggaatttctctacagatgataaagttaccaatggtcgtcgagggtatcggcaaaaggagttgaagaagccaagtacggccgtgaaggataatgatgcaatcattgatcgcatacaaaagagcacaagggggttgaaaaaagggccggttgggcacaccctttcatcagcagagaaaaggaaattccttatcaacactcttcttgatcttgaagactcaaaagaagctgtttacagcacccttgatgcatggatcgcctttgagcaggactttccactcgcctcattaaagcaagcaattgtagctcttgaaaaggaggaacaatggcatagagttgtccaagtaataaaatggatgttgagcaaagggcaaggaaataccatcagaacatacgagcaattagtgcgtgcacttgagaaggacaacagagcagaggaagcacataaaatctgggagaagaaaatagcccatgacctgcattcagttccttggcgtttctgcggtcttatgttggcaatttactacagaaacaatatgctagataggcttatcaagctcttcggtgcccttgaagcatgtggtcgcaagtgtcctagtaaagaatatatacggaaagttgaagttgcatatgaaatgcttggtctattagaagagaagaaggatttgcttgaaaagtacaaggatttgtacaataagccatcaaatagtgatagaaagaaagatcgacggttcaagaaggctgagaagaaagctgctgatgatggcagcaaacaattggagatggaaacatctgaaaacttaccagttaactcatgcccttcagataaggaactggttgccagcagttagtcaagataagaaatacaacaccgatggtgagatcagtatcagccaagaacgtgatgcagctagtaatctctaccagtaacacttactgggccaaccaatagtccattactaataggaaagaagcatgaacattgaaacccccttattcttccataaatcattgaagtgcggtgacttccatgttgccttggacaaatatttccgagtgttatcgttcgccaaaaaagttgtaatgtctgaatattggaataagtgggcgcataactgtagtcaacgaagggattacatgaggaaaccagtactttatctcatgtactcagtgtgagaattgttgtgctgacatttctgttttcatactagaaagccaaattcctgttatccatcgc

SEQ ID NO: 13545 - protein, 360 aa, Triticum aestivum
  peptide (1)..(360): Ceres Seq. ID no. 13584002
  misc_feature (102)..(345): NCBI GI NO: 18390413 NR Description: expressed protein [Arabidopsis thaliana]
  misc_feature (102)..(345): NCBI GI NO: 30678929 NR Description: expressed protein [Arabidopsis thaliana]
  misc_feature (140)..(345): NCBI GI NO: 25406795 NR Description: hypothetical protein
  misc_feature (131)..(355): NCBI GI NO: 18415645 NR Description: pentatricopeptide (PPR) repeat-containing protein
  misc_feature (131)..(355): NCBI GI NO: 7486589 NR Description: hypothetical protein F7J7
  misc_feature (109)..(322): NCBI GI NO: 18415213 NR Description: pentatricopeptide (PPR) repeat-containing protein
  misc_feature (109)..(308): NCBI GI NO: 7485419 NR Description: hypothetical protein F13C5
  misc_feature (134)..(321): NCBI GI NO: 34393638 NR Description: pentatricopeptide
  misc_feature (148)..(349): NCBI GI NO: 34909686 NR Description: B1131G08.1
KKTEQGGRPRPRSSAAATTTSIGGCAAMLGHLRRSSGILRRLPIASFAPSDPAAAYSGWSSHAESLSFVSCWCGKHATRNFSTDDKVTNGRRGYRQKELKKPSTAVKDNDAIIDRIQKSTRGLKKGPVGHTLSSAEKRKFLINTLLDLEDSKEAVYSTLDAWIAFEQDFPLASLKQAIVALEKEEQWHRVVQVIKWMLSKGQGNTIRTYEQLVRALEKDNRAEEAHKIWEKKIAHDLHSVPWRFCGLMLAIYYRNNMLDRLIKLFGALEACGRKCPSKEYIRKVEVAYEMLGLLEEKKDLLEKYKDLYNKPSNSDRKKDRRFKKAEKKAADDGSKQLEMETSENLPVNSCPSDKELVASS

SEQ ID NO: 13546 - protein, 333 aa, Triticum aestivum
  peptide (1)..(333): Ceres Seq. ID no. 13584003
  misc_feature (75)..(318): NCBI GI NO: 18390413 NR Description: expressed protein [Arabidopsis thaliana]
  misc_feature (75)..(318): NCBI GI NO: 30678929 NR Description: expressed protein [Arabidopsis thaliana]
  misc_feature (113)..(318): NCBI GI NO: 25406795 NR Description: hypothetical protein
  misc_feature (104)..(328): NCBI GI NO: 18415645 NR Description: pentatricopeptide (PPR) repeat-containing protein
  misc_feature (104)..(328): NCBI GI NO: 7486589 NR Description: hypothetical protein F7J7
  misc_feature (82)..(295): NCBI GI NO: 18415213 NR Description: pentatricopeptide (PPR) repeat-containing protein
  misc_feature (82)..(281): NCBI GI NO: 7485419 NR Description: hypothetical protein F13C5
  misc_feature (107)..(294): NCBI GI NO: 34393638 NR Description: pentatricopeptide
  misc_feature (121)..(322): NCBI GI NO: 34909686 NR Description: B1131G08.1
MLGHLRRSSGILRRLPIASFAPSDPAAAYSGWSSHAESLSFVSCWCGKHATRNFSTDDKVTNGRRGYRQKELKKPSTAVKDNDAIIDRIQKSTRGLKKGPVGHTLSSAEKRKFLINTLLDLEDSKEAVYSTLDAWIAFEQDFPLASLKQAIVALEKEEQWHRVVQVIKWMLSKGQGNTIRTYEQLVRALEKDNRAEEAHKIWEKKIAHDLHSVPWRFCGLMLAIYYRNNMLDRLIKLFGALEACGRKCPSKEYIRKVEVAYEMLGLLEEKKDLLEKYKDLYNKPSNSDRKKDRRFKKAEKKAADDGSKQLEMETSENLPVNSCPSDKELVASS

SEQ ID NO: 13547 - DNA, 1181 bp, Triticum aestivum
  misc_feature (1)..(1181): Ceres Seq. ID no. 13597057
agaacatcctaatcgaaaagaaccggaggaatctacccagacctaggggtcaagtagggccgtaccttaggaagtagccgttgcgaggttcgaatcgactggaatcggggggaagagcagagcaaatcatctgcggaagggtaaggattggcgtgcaggattcggagcgggagtaatctgagtaaagatggctgaagtgaggattgccagcaggacggctgtagccgatcgctctggcggtggattcttcgtcaggagggtggcgtctcccggagccgtggtggacaagggcgccgtcaagccgcttgctcgtcgggtcccgtcaccgtccagcaacaaggagaacgtgccaccagcgtgggctgcgtgggctgcacccaagaggaggagctccctgcccgagtggtacccaaggaccccactccgtgatatcacatcagtcatcaaggctgttgagaggaaaagccggctgcgagatgctgcggctcggcagcagctccagtgggatgaagaagactcctcggagcctgaggatccagcacaaacagacgagggtattcatggaagcacagcaccaacaaatgaaaccctgggtgttggctgggctaaagttgttgaaaccaccgcagcatcagcaacctgcttgggcgagggcgagagcaccacggtggtgaaggcatctgatgactgctccttgcagtctacatccagaccaagtggagaagtaggcgtggagaagcaactggccagctccatagatgcgattgagaagatggtgagccggaacctcaagcgaactgatcccgaggctactcggccttccaagaccccggctgtccagaggcgcaccctgatgtctatgcgctgagctgatgtctgctgctttcttagcggctagtcctaactaatcatggtgctcggttctctgcttgaggagtggtgttgtgctcatggttctctgcttgaggacttggggtatgggcggtggtagctgtggctctctgcttgagggcacatgtaggattacatcaccagacttgattgtgttactgtgttttgtcattcagctgatctccttgtttgttgttccactgtaactaacggtaactaataagacgatagatatggtgcatcttctgttgtggagcaaaataatatcttgttggtacgtgacatacctt

SEQ ID NO: 13548 - protein, 226 aa, Triticum aestivum
  peptide (1)..(226): Ceres Seq. ID no. 15222025
  misc_feature (1)..(226): NCBI GI NO: 38344815 NR Description: OSJNBb0022F23.8
  misc_feature (51)..(226): NCBI GI NO: 15230880 NR Description: expressed protein [Arabidopsis thaliana]
MAEVRIASRTAVADRSGGGFFVRRVASPGAVVDKGAVKPLARRVPSPSSNKENVPPAWAAWAAPKRRSSLPEWYPRTPLRDITSVIKAVERKSRLRDAAARQQLQWDEEDSSEPEDPAQTDEGIHGSTAPTNETLGVGWAKVVETTAASATCLGEGESTTVVKASDDCSLQSTSRPSGEVGVEKQLASSIDAIEKMVSRNLKRTDPEATRPSKTPAVQRRTLMSMR

SEQ ID NO: 13549 - DNA, 1056 bp, Triticum aestivum
  misc_feature (1)..(1056): Ceres Seq. ID no. 15226227
gaggaacttttcgttggatccttcgcttttggggacgaaggaggagaaggtctctgtccctctccacccccacctccacctccgcctcccttcttggctggagaggagcaggaggaggagatgttcccccctggcctgatccaccaccgcacggacggccccgggcccggcgaggtgccgcgctccggcggcgcccccagcctcgtgctcacggcggaccccaagccccgcctccgctggacggccgacctccacgagcgcttcgtcgacgccgtcgcccagctcggcgggcccgagaaagcaacaccaaaaactatcttaaggacaatgggtgtaaagggactaacgcttttccacttgaagagtcatcttcagaaatacagaatgggaaaacaaactgggaaggagacgccggagcaatctaaagatgggtcctaccttcttgatgctcaaggtggaatgagcctgtctcccagagtttctactcaagatgcgaaagaaagccaagaagttaaagaagccctgagagcacagatggagatgcaacgaagcctgcatgaacaagtggaggttcagaagcatgtggacatcaggatggacgcgtacacgacgtacatcaacaccctgctggagaaggcctgcaagatcgtctcagagcagttcgcctcgagcggcttcagcgtctccgaccagagcctcccggagctgtcctccggcggtatcatgtgcggcaccgccaccgacgcgctgagctcctccgtgttccaccagctctccgtcagctcgatcaacatgcacagcccagggggcaagccttctccctcgggcatggaaggccagctgcttctccagaggtcacccgagttcaaacgcaagtcatcctgctgagtccaaaaatctgggtggaaaagttagcttaatcgtctgctgtagacatgtcgaatctcggccaatctgtaaactgacgccaatctgtaaactgactcttgtttctcttgccactgcatgccaagaagcaaggttttttatcgattaatcgtcgacctatgtttatac

SEQ ID NO: 13550 - protein, 295 aa, Triticum aestivum
  peptide (1)..(295): Ceres Seq. ID no. 15226228
  misc_feature (77)..(128): Pfam Name: Pfam Description:  Myb-like DNA-binding domain
  misc_feature (41)..(293): NCBI GI NO: 29647444 NR Description: transfactor-like
  misc_feature (48)..(237): NCBI GI NO: 18404044 NR Description: transfactor -related [Arabidopsis thaliana]
  misc_feature (68)..(237): NCBI GI NO: 18414049 NR Description: expressed protein [Arabidopsis thaliana]
  misc_feature (48)..(237): NCBI GI NO: 11994231 NR Description: contains similarity to transfactor~gene_id:MUJ8.2
  misc_feature (64)..(224): NCBI GI NO: 25406584 NR Description: hypothetical protein T8K14.15
  misc_feature (64)..(224): NCBI GI NO: 30699418 NR Description: transfactor -related [Arabidopsis thaliana]
  misc_feature (68)..(237): NCBI GI NO: 7485694 NR Description: hypothetical protein F18A5
  misc_feature (68)..(248): NCBI GI NO: 32470629 NR Description: putative phosphate starvation response regulator
  misc_feature (68)..(159): NCBI GI NO: 15242435 NR Description: hypothetical protein [Arabidopsis thaliana]
  misc_feature (173)..(215): NCBI GI NO: 15242435 NR Description: hypothetical protein [Arabidopsis thaliana]
EELFVGSFAFGDEGGEGLCPSPPPPPPPPPFLAGEEQEEEMFPPGLIHHRTDGPGPGEVPRSGGAPSLVLTADPKPRLRWTADLHERFVDAVAQLGGPEKATPKTILRTMGVKGLTLFHLKSHLQKYRMGKQTGKETPEQSKDGSYLLDAQGGMSLSPRVSTQDAKESQEVKEALRAQMEMQRSLHEQVEVQKHVDIRMDAYTTYINTLLEKACKIVSEQFASSGFSVSDQSLPELSSGGIMCGTATDALSSSVFHQLSVSSINMHSPGGKPSPSGMEGQLLLQRSPEFKRKSSC

SEQ ID NO: 13551 - protein, 255 aa, Triticum aestivum
  peptide (1)..(255): Ceres Seq. ID no. 15226229
  misc_feature (37)..(88): Pfam Name: Pfam Description:  Myb-like DNA-binding domain
  misc_feature (1)..(253): NCBI GI NO: 29647444 NR Description: transfactor-like
  misc_feature (8)..(197): NCBI GI NO: 18404044 NR Description: transfactor -related [Arabidopsis thaliana]
  misc_feature (28)..(197): NCBI GI NO: 18414049 NR Description: expressed protein [Arabidopsis thaliana]
  misc_feature (8)..(197): NCBI GI NO: 11994231 NR Description: contains similarity to transfactor~gene_id:MUJ8.2
  misc_feature (24)..(184): NCBI GI NO: 25406584 NR Description: hypothetical protein T8K14.15
  misc_feature (24)..(184): NCBI GI NO: 30699418 NR Description: transfactor -related [Arabidopsis thaliana]
  misc_feature (28)..(197): NCBI GI NO: 7485694 NR Description: hypothetical protein F18A5
  misc_feature (28)..(208): NCBI GI NO: 32470629 NR Description: putative phosphate starvation response regulator
  misc_feature (28)..(119): NCBI GI NO: 15242435 NR Description: hypothetical protein [Arabidopsis thaliana]
  misc_feature (133)..(175): NCBI GI NO: 15242435 NR Description: hypothetical protein [Arabidopsis thaliana]
MFPPGLIHHRTDGPGPGEVPRSGGAPSLVLTADPKPRLRWTADLHERFVDAVAQLGGPEKATPKTILRTMGVKGLTLFHLKSHLQKYRMGKQTGKETPEQSKDGSYLLDAQGGMSLSPRVSTQDAKESQEVKEALRAQMEMQRSLHEQVEVQKHVDIRMDAYTTYINTLLEKACKIVSEQFASSGFSVSDQSLPELSSGGIMCGTATDALSSSVFHQLSVSSINMHSPGGKPSPSGMEGQLLLQRSPEFKRKSSC

SEQ ID NO: 13552 - protein, 186 aa, Triticum aestivum
  peptide (1)..(186): Ceres Seq. ID no. 15226230
  misc_feature (1)..(184): NCBI GI NO: 29647444 NR Description: transfactor-like
  misc_feature (1)..(128): NCBI GI NO: 18404044 NR Description: transfactor -related [Arabidopsis thaliana]
  misc_feature (1)..(128): NCBI GI NO: 18414049 NR Description: expressed protein [Arabidopsis thaliana]
  misc_feature (1)..(128): NCBI GI NO: 11994231 NR Description: contains similarity to transfactor~gene_id:MUJ8.2
  misc_feature (1)..(115): NCBI GI NO: 25406584 NR Description: hypothetical protein T8K14.15
  misc_feature (1)..(115): NCBI GI NO: 30699418 NR Description: transfactor -related [Arabidopsis thaliana]
  misc_feature (1)..(128): NCBI GI NO: 7485694 NR Description: hypothetical protein F18A5
  misc_feature (1)..(139): NCBI GI NO: 32470629 NR Description: putative phosphate starvation response regulator
  misc_feature (1)..(50): NCBI GI NO: 15242435 NR Description: hypothetical protein [Arabidopsis thaliana]
  misc_feature (64)..(106): NCBI GI NO: 15242435 NR Description: hypothetical protein [Arabidopsis thaliana]
MGVKGLTLFHLKSHLQKYRMGKQTGKETPEQSKDGSYLLDAQGGMSLSPRVSTQDAKESQEVKEALRAQMEMQRSLHEQVEVQKHVDIRMDAYTTYINTLLEKACKIVSEQFASSGFSVSDQSLPELSSGGIMCGTATDALSSSVFHQLSVSSINMHSPGGKPSPSGMEGQLLLQRSPEFKRKSSC

SEQ ID NO: 13553 - DNA, 1193 bp, Triticum aestivum
  misc_feature (1)..(1193): Ceres Seq. ID no. 14302004
ctcccatcaccggtttcgaaatccatccatccaaaccagcggaagaagaagaaaagaaaaagagaaaaatccacgcgaaagggcgagcgcaggacagggacgaacaaccttgcgtgcgaggcgaggccgctccgattcgacagacgcaggcgcagcgcagggatggacgccttctactcgacctcgtcggcggcggccagcggatggggctacgactccctcaagaacttccgcgagatctcccccgccgtgcagtcccacctcaagctcgtttacctgaccctatgctttgccctggcctcatctgccgtgggtgcttacctgcacattgccctgaacattggcgggatgctgacaatgctcgcgtgtatcggaaccatcgcctggatgttctcggtgccagtctatgaggagaggaagaggtttgggctgctgatgggtgcagccctcctggaaggggcttcagttggacctctgattgagcttgccatagactttgacccaagcatcctcgtgacagggtttgtcggaaccgccatcgccttcgggtgcttctctggcgccgccatcatcgccaagcgcagggagtacctgtacctcggcggcctgctctcctctggcctgtcgatcctgctctggctgcagtttgccacgtccatctttggccactcctctggcagcttcatgtttgaggtttactttggcctgttgatcttcctggggtacatggtgtacgacacgcaggagatcatcgagagggcgcaccacggtgacatggactacatcaagcacgcgctcaccctcttcaccgacttcgtcgccgtcctcgtccgcatcctcatcatcatgctcaagaacgcaggcgacaagtcggaggacaagaagaagaggaagaggaggtcctgaacgtgtcctctgcacatcgtagataccatcaccaccgcgctactggtaccaccaccactgctaagtacttgtaggaattaagctggcgcagtaacttggcgccgtgccacccttgttaattcgcgctcgtgtgaacattgtgtgagtttgatgctgctgatgaagcatttgcagatgctgtctgcgttccggatctcttgtgttcctgttaccgtcacgataatagaaacctgagacgatttggtttggtttacgaagaacatggctatgcttgtttgtgattgaag

SEQ ID NO: 13554 - protein, 301 aa, Triticum aestivum
  peptide (1)..(301): Ceres Seq. ID no. 14302005
  misc_feature (78)..(287): Pfam Name: Pfam Description:  Uncharacterised protein family UPF0005
  misc_feature (55)..(301): NCBI GI NO: 13940165 NR Description: BAX inhibitor 1 [Hordeum vulgare subsp. vulgare]
  misc_feature (55)..(299): NCBI GI NO: 12229685 NR Description: Bax inhibitor-1 (BI-1) (OsBI-1)
  misc_feature (58)..(298): NCBI GI NO: 14719276 NR Description: Bax inhibitor 1 [Nicotiana tabacum]
  misc_feature (55)..(298): NCBI GI NO: 21593125 NR Description: Bax inhibitor-1 like [Arabidopsis thaliana]
  misc_feature (55)..(298): NCBI GI NO: 15238017 NR Description: Bax inhibitor-1 (BI-1), putative
  misc_feature (55)..(299): NCBI GI NO: 14719274 NR Description: Bax inhibitor 1 [Brassica napus]
  misc_feature (55)..(297): NCBI GI NO: 17981376 NR Description: bax inhibitor-like protein [Brassica oleracea]
  misc_feature (61)..(206): NCBI GI NO: 27526517 NR Description: putative BAX inhibitor 1
  misc_feature (69)..(295): NCBI GI NO: 15236582 NR Description: Bax inhibitor-1 (BI1) family
  misc_feature (71)..(295): NCBI GI NO: 21311961 NR Description: testis enhanced gene transcript; Bax inhibitor-1
LPSPVSKSIHPNQRKKKKRKREKSTRKGERRTGTNNLACEARPLRFDRRRRSAGMDAFYSTSSAAASGWGYDSLKNFREISPAVQSHLKLVYLTLCFALASSAVGAYLHIALNIGGMLTMLACIGTIAWMFSVPVYEERKRFGLLMGAALLEGASVGPLIELAIDFDPSILVTGFVGTAIAFGCFSGAAIIAKRREYLYLGGLLSSGLSILLWLQFATSIFGHSSGSFMFEVYFGLLIFLGYMVYDTQEIIERAHHGDMDYIKHALTLFTDFVAVLVRILIIMLKNAGDKSEDKKKRKRRS

SEQ ID NO: 13555 - protein, 247 aa, Triticum aestivum
  peptide (1)..(247): Ceres Seq. ID no. 14302006
  misc_feature (24)..(233): Pfam Name: Pfam Description:  Uncharacterised protein family UPF0005
  misc_feature (1)..(247): NCBI GI NO: 13940165 NR Description: BAX inhibitor 1 [Hordeum vulgare subsp. vulgare]
  misc_feature (1)..(245): NCBI GI NO: 12229685 NR Description: Bax inhibitor-1 (BI-1) (OsBI-1)
  misc_feature (4)..(244): NCBI GI NO: 14719276 NR Description: Bax inhibitor 1 [Nicotiana tabacum]
  misc_feature (1)..(244): NCBI GI NO: 21593125 NR Description: Bax inhibitor-1 like [Arabidopsis thaliana]
  misc_feature (1)..(244): NCBI GI NO: 15238017 NR Description: Bax inhibitor-1 (BI-1), putative
  misc_feature (1)..(245): NCBI GI NO: 14719274 NR Description: Bax inhibitor 1 [Brassica napus]
  misc_feature (1)..(243): NCBI GI NO: 17981376 NR Description: bax inhibitor-like protein [Brassica oleracea]
  misc_feature (7)..(152): NCBI GI NO: 27526517 NR Description: putative BAX inhibitor 1
  misc_feature (15)..(241): NCBI GI NO: 15236582 NR Description: Bax inhibitor-1 (BI1) family
  misc_feature (17)..(241): NCBI GI NO: 21311961 NR Description: testis enhanced gene transcript; Bax inhibitor-1
MDAFYSTSSAAASGWGYDSLKNFREISPAVQSHLKLVYLTLCFALASSAVGAYLHIALNIGGMLTMLACIGTIAWMFSVPVYEERKRFGLLMGAALLEGASVGPLIELAIDFDPSILVTGFVGTAIAFGCFSGAAIIAKRREYLYLGGLLSSGLSILLWLQFATSIFGHSSGSFMFEVYFGLLIFLGYMVYDTQEIIERAHHGDMDYIKHALTLFTDFVAVLVRILIIMLKNAGDKSEDKKKRKRRS

SEQ ID NO: 13556 - protein, 185 aa, Triticum aestivum
  peptide (1)..(185): Ceres Seq. ID no. 14302007
  misc_feature (1)..(171): Pfam Name: Pfam Description:  Uncharacterised protein family UPF0005
  misc_feature (1)..(185): NCBI GI NO: 13940165 NR Description: BAX inhibitor 1 [Hordeum vulgare subsp. vulgare]
  misc_feature (1)..(183): NCBI GI NO: 12229685 NR Description: Bax inhibitor-1 (BI-1) (OsBI-1)
  misc_feature (1)..(182): NCBI GI NO: 14719276 NR Description: Bax inhibitor 1 [Nicotiana tabacum]
  misc_feature (1)..(182): NCBI GI NO: 21593125 NR Description: Bax inhibitor-1 like [Arabidopsis thaliana]
  misc_feature (1)..(182): NCBI GI NO: 15238017 NR Description: Bax inhibitor-1 (BI-1), putative
  misc_feature (1)..(183): NCBI GI NO: 14719274 NR Description: Bax inhibitor 1 [Brassica napus]
  misc_feature (1)..(181): NCBI GI NO: 17981376 NR Description: bax inhibitor-like protein [Brassica oleracea]
  misc_feature (1)..(90): NCBI GI NO: 27526517 NR Description: putative BAX inhibitor 1
  misc_feature (1)..(179): NCBI GI NO: 15236582 NR Description: Bax inhibitor-1 (BI1) family
  misc_feature (1)..(179): NCBI GI NO: 21311961 NR Description: testis enhanced gene transcript; Bax inhibitor-1
MLTMLACIGTIAWMFSVPVYEERKRFGLLMGAALLEGASVGPLIELAIDFDPSILVTGFVGTAIAFGCFSGAAIIAKRREYLYLGGLLSSGLSILLWLQFATSIFGHSSGSFMFEVYFGLLIFLGYMVYDTQEIIERAHHGDMDYIKHALTLFTDFVAVLVRILIIMLKNAGDKSEDKKKRKRRS

SEQ ID NO: 13557 - DNA, 1300 bp, Triticum aestivum
  misc_feature (1)..(1300): Ceres Seq. ID no. 14302021
ccacccagccttcctcctctccacaccgcaggctccagggaaagggaagacctcgcctcgccttgctgccgccgaagccaccagcggagggagcatgaaggtctccgtcgtgtcccggagcggccgcgaggtcgtcaagggcggcatcgagctcaaggactcggccaaggtcgcggatctgcaggaggccatccacgccaagactaagaagtattatcctgccaggcaacggctcaccctccctgcacaacctggaaaatctggaaagccagttgtcctcaatcaaaaggccagcctatcggaatactgcgagaaaggttccggttccctgacagtggtcttcaaagatttgggcccacaggtctactacagcacgctcttcttctgggaatacgtcggccctcttatcatgtaccccatcttctattacctgcctgtctacaaatactttggatatgagggagagcgggtcatccaccctgtccagacctatgccatgtactacttctgcttccactacttcaagaggatcatggagaccttcttcgtccaccgcttcagccacgcaacttcccccgtgtcaaacgtcttcaggaactgcgcctactactggacctttggagcctacattgcctactactgcaaccacccgctttacacccccgtgagtgacctgcagatgaagattgggttcggcatcggggtcgtgtgccagatcgcaaacttctactgccacatcctgctgaggaacctcaggagcccgaccggcagcggcggctaccagatcccacggggtttcctgttcaacattgtgacatgcgcaaactacaccaccgagatctaccaatggctggggttcaacatcgccacacagaccgtggcgggctacgtcttcctcgctgtggccgctgctatcatgaccaactgggcgctcggaaagcacagccgcctgaggaagctcttcgacggtaaggacgggcggcccaagtacccccgccgatgggtgattcttcctccattcctgtgaagaagtcacggtgctcgcaaggcctgcatctggagattcaacatttattctgttccagcgttccaaagttaaaagccatcagtcgatttcactcaaacattcctactaatcgtgccttgtaccagctgtcaaacctcaattatgtagtccaaatgttcttatccaaaggatgtattttcttactccatattgttgaaaaactttctctggggtttatttacgccacaccgcgacgtgttgtcatagtcaagtccaacactaagatgattcatc

SEQ ID NO: 13558 - protein, 341 aa, Triticum aestivum
  peptide (1)..(341): Ceres Seq. ID no. 14302022
  misc_feature (189)..(341): Pfam Name: Pfam Description:  3-oxo-5-alpha-steroid 4-dehydrogenase
  misc_feature (32)..(341): NCBI GI NO: 34895848 NR Description: putative glycoprotein
  misc_feature (32)..(341): NCBI GI NO: 15233250 NR Description: 3-oxo-5-alpha-steroid 4-dehydrogenase
  misc_feature (32)..(341): NCBI GI NO: 25004880 NR Description: steroid 5-alpha reductase [Cicer arietinum]
  misc_feature (33)..(341): NCBI GI NO: 13111809 NR Description: Unknown (protein for IMAGE:2901253) [Homo sapiens]
  misc_feature (33)..(341): NCBI GI NO: 24475816 NR Description: glycoprotein, synaptic 2
  misc_feature (33)..(341): NCBI GI NO: 30585427 NR Description: Homo sapiens glycoprotein, synaptic 2
  misc_feature (50)..(341): NCBI GI NO: 19924091 NR Description: synaptic glycoprotein SC2 [Rattus norvegicus]
  misc_feature (50)..(341): NCBI GI NO: 19923070 NR Description: synaptic glycoprotein SC2
  misc_feature (33)..(341): NCBI GI NO: 33585860 NR Description: Glycoprotein, synaptic 2 [Xenopus laevis]
  misc_feature (50)..(338): NCBI GI NO: 31418870 NR Description: Unknown (protein for MGC:64025) [Danio rerio]
HPAFLLSTPQAPGKGKTSPRLAAAEATSGGSMKVSVVSRSGREVVKGGIELKDSAKVADLQEAIHAKTKKYYPARQRLTLPAQPGKSGKPVVLNQKASLSEYCEKGSGSLTVVFKDLGPQVYYSTLFFWEYVGPLIMYPIFYYLPVYKYFGYEGERVIHPVQTYAMYYFCFHYFKRIMETFFVHRFSHATSPVSNVFRNCAYYWTFGAYIAYYCNHPLYTPVSDLQMKIGFGIGVVCQIANFYCHILLRNLRSPTGSGGYQIPRGFLFNIVTCANYTTEIYQWLGFNIATQTVAGYVFLAVAAAIMTNWALGKHSRLRKLFDGKDGRPKYPRRWVILPPFL

SEQ ID NO: 13559 - protein, 310 aa, Triticum aestivum
  peptide (1)..(310): Ceres Seq. ID no. 14302023
  misc_feature (158)..(310): Pfam Name: Pfam Description:  3-oxo-5-alpha-steroid 4-dehydrogenase
  misc_feature (1)..(310): NCBI GI NO: 34895848 NR Description: putative glycoprotein
  misc_feature (1)..(310): NCBI GI NO: 15233250 NR Description: 3-oxo-5-alpha-steroid 4-dehydrogenase
  misc_feature (1)..(310): NCBI GI NO: 25004880 NR Description: steroid 5-alpha reductase [Cicer arietinum]
  misc_feature (2)..(310): NCBI GI NO: 13111809 NR Description: Unknown (protein for IMAGE:2901253) [Homo sapiens]
  misc_feature (2)..(310): NCBI GI NO: 24475816 NR Description: glycoprotein, synaptic 2
  misc_feature (2)..(310): NCBI GI NO: 30585427 NR Description: Homo sapiens glycoprotein, synaptic 2
  misc_feature (19)..(310): NCBI GI NO: 19924091 NR Description: synaptic glycoprotein SC2 [Rattus norvegicus]
  misc_feature (19)..(310): NCBI GI NO: 19923070 NR Description: synaptic glycoprotein SC2
  misc_feature (2)..(310): NCBI GI NO: 33585860 NR Description: Glycoprotein, synaptic 2 [Xenopus laevis]
  misc_feature (19)..(307): NCBI GI NO: 31418870 NR Description: Unknown (protein for MGC:64025) [Danio rerio]
MKVSVVSRSGREVVKGGIELKDSAKVADLQEAIHAKTKKYYPARQRLTLPAQPGKSGKPVVLNQKASLSEYCEKGSGSLTVVFKDLGPQVYYSTLFFWEYVGPLIMYPIFYYLPVYKYFGYEGERVIHPVQTYAMYYFCFHYFKRIMETFFVHRFSHATSPVSNVFRNCAYYWTFGAYIAYYCNHPLYTPVSDLQMKIGFGIGVVCQIANFYCHILLRNLRSPTGSGGYQIPRGFLFNIVTCANYTTEIYQWLGFNIATQTVAGYVFLAVAAAIMTNWALGKHSRLRKLFDGKDGRPKYPRRWVILPPFL

SEQ ID NO: 13560 - protein, 205 aa, Triticum aestivum
  peptide (1)..(205): Ceres Seq. ID no. 14302024
  misc_feature (53)..(205): Pfam Name: Pfam Description:  3-oxo-5-alpha-steroid 4-dehydrogenase
  misc_feature (1)..(205): NCBI GI NO: 34895848 NR Description: putative glycoprotein
  misc_feature (1)..(205): NCBI GI NO: 15233250 NR Description: 3-oxo-5-alpha-steroid 4-dehydrogenase
  misc_feature (1)..(205): NCBI GI NO: 25004880 NR Description: steroid 5-alpha reductase [Cicer arietinum]
  misc_feature (1)..(205): NCBI GI NO: 13111809 NR Description: Unknown (protein for IMAGE:2901253) [Homo sapiens]
  misc_feature (1)..(205): NCBI GI NO: 30585427 NR Description: Homo sapiens glycoprotein, synaptic 2
  misc_feature (1)..(205): NCBI GI NO: 24475816 NR Description: glycoprotein, synaptic 2
  misc_feature (1)..(205): NCBI GI NO: 19924091 NR Description: synaptic glycoprotein SC2 [Rattus norvegicus]
  misc_feature (1)..(205): NCBI GI NO: 19923070 NR Description: synaptic glycoprotein SC2
  misc_feature (1)..(205): NCBI GI NO: 33585860 NR Description: Glycoprotein, synaptic 2 [Xenopus laevis]
  misc_feature (1)..(202): NCBI GI NO: 31418870 NR Description: Unknown (protein for MGC:64025) [Danio rerio]
MYPIFYYLPVYKYFGYEGERVIHPVQTYAMYYFCFHYFKRIMETFFVHRFSHATSPVSNVFRNCAYYWTFGAYIAYYCNHPLYTPVSDLQMKIGFGIGVVCQIANFYCHILLRNLRSPTGSGGYQIPRGFLFNIVTCANYTTEIYQWLGFNIATQTVAGYVFLAVAAAIMTNWALGKHSRLRKLFDGKDGRPKYPRRWVILPPFL

SEQ ID NO: 13561 - DNA, 1249 bp, Triticum aestivum
  misc_feature (1)..(1249): Ceres Seq. ID no. 13584416
caaaccaaatcaagcgcttcctccgccgctgcccaacagctcgcacccggctcccattcattctcttggcaaatcgcccagttcatcctaaattaccagctctcctcggcttcccttcctccaaatcgtcggcgttttcttcctctggttctctgcctgtgtgtccgagtttcttgatcgacaagggcatggcgacgacggtggactggcgcagctataggcccgatcttcctgccgcgatgtatcacatggtggacagcagggaccaggtaatgcacgcgtttgctccggcgacggcgcagggcgcggctccgaccatctcgttcgccttcccctgccccggcgcggagcagagcgccggcctgcttcgtggcgccagctacctcactcccgcgcaaatcctccagctccagtcgcagctgcaccacgtgcgccgggcgccgggcgcggccatggccgcggtggggcagccgatgaagcggcacggcgtggcagcgctcccggcgcggccggcgaccaagctttaccgcggcgtaaggcagcggcattgggggaagtgggtcgccgagatccgcctgccccgcaaccgcacccgcctctggctcggcaccttcgacaccgccgacgaggccgcgctggcctacgacgccgccgccttccggctccgcggcgagtccgccaggctcaacttccccgagctcaggcgcggcggcgagcaccacggcccgccgctcgacgccgcgatcgacgccaagctccgctccatctgccacggggaagacatgccccagagccagagcgatgagacgccggcgccgacgacgacactgacgccgatttctttcccggacgtcaagagcgagccagtctgctccgtctccgagagctcgtcgtcggctgacggcgaggtgtcctcgtgctccgacgtcgtcccggagatgcagcttcttgatttctcggaggctccatgggacgagttcctgctgcgcaagtacccgtcgctcgagatcgactgggacgcgatcctttcttgaatcaagttcatgcttgatccacagctcgtccaaagtgattacttctgctttcattaggctcttggataggttattatgggtttggtcaagtattcatgtgtaacatcaacccctgctctgcttggtttttgaatggcattgccaggaaggaggttttatgtagaaatttaagtctgtcatgtagttttgtgattcaataaagatacactttggtt

SEQ ID NO: 13562 - protein, 343 aa, Triticum aestivum
  peptide (1)..(343): Ceres Seq. ID no. 15222791
  misc_feature (173)..(236): Pfam Name: Pfam Description:  AP2 domain
  misc_feature (111)..(343): NCBI GI NO: 37572971 NR Description: AP2-domain DRE binding factor DBF1
  misc_feature (136)..(343): NCBI GI NO: 21908036 NR Description: DRE binding factor 1 [Zea mays]
  misc_feature (117)..(343): NCBI GI NO: 13877779 NR Description: putative AP2 domain-containing protein
  misc_feature (117)..(343): NCBI GI NO: 6573771 NR Description: F28K19.29 [Arabidopsis thaliana]
  misc_feature (117)..(343): NCBI GI NO: 15218204 NR Description: AP2 domain transcription factor RAP2.4
  misc_feature (87)..(341): NCBI GI NO: 15236020 NR Description: AP2 domain transcription factor, putative
  misc_feature (64)..(307): NCBI GI NO: 37533596 NR Description: putative AP2-domain transcriptional regulator
  misc_feature (124)..(341): NCBI GI NO: 15238359 NR Description: AP2 domain transcription factor, putative
  misc_feature (164)..(343): NCBI GI NO: 2281633 NR Description: AP2 domain containing protein RAP2.4
  misc_feature (107)..(341): NCBI GI NO: 27436378 NR Description: dehydration-responsive element binding protein 3
NQIKRFLRRCPTARTRLPFILLANRPVHPKLPALLGFPSSKSSAFSSSGSLPVCPSFLIDKGMATTVDWRSYRPDLPAAMYHMVDSRDQVMHAFAPATAQGAAPTISFAFPCPGAEQSAGLLRGASYLTPAQILQLQSQLHHVRRAPGAAMAAVGQPMKRHGVAALPARPATKLYRGVRQRHWGKWVAEIRLPRNRTRLWLGTFDTADEAALAYDAAAFRLRGESARLNFPELRRGGEHHGPPLDAAIDAKLRSICHGEDMPQSQSDETPAPTTTLTPISFPDVKSEPVCSVSESSSSADGEVSSCSDVVPEMQLLDFSEAPWDEFLLRKYPSLEIDWDAILS

SEQ ID NO: 13563 - protein, 281 aa, Triticum aestivum
  peptide (1)..(281): Ceres Seq. ID no. 15222792
  misc_feature (111)..(174): Pfam Name: Pfam Description:  AP2 domain
  misc_feature (49)..(281): NCBI GI NO: 37572971 NR Description: AP2-domain DRE binding factor DBF1
  misc_feature (74)..(281): NCBI GI NO: 21908036 NR Description: DRE binding factor 1 [Zea mays]
  misc_feature (55)..(281): NCBI GI NO: 13877779 NR Description: putative AP2 domain-containing protein
  misc_feature (55)..(281): NCBI GI NO: 6573771 NR Description: F28K19.29 [Arabidopsis thaliana]
  misc_feature (55)..(281): NCBI GI NO: 15218204 NR Description: AP2 domain transcription factor RAP2.4
  misc_feature (25)..(279): NCBI GI NO: 15236020 NR Description: AP2 domain transcription factor, putative
  misc_feature (2)..(245): NCBI GI NO: 37533596 NR Description: putative AP2-domain transcriptional regulator
  misc_feature (62)..(279): NCBI GI NO: 15238359 NR Description: AP2 domain transcription factor, putative
  misc_feature (102)..(281): NCBI GI NO: 2281633 NR Description: AP2 domain containing protein RAP2.4
  misc_feature (45)..(279): NCBI GI NO: 27436378 NR Description: dehydration-responsive element binding protein 3
MATTVDWRSYRPDLPAAMYHMVDSRDQVMHAFAPATAQGAAPTISFAFPCPGAEQSAGLLRGASYLTPAQILQLQSQLHHVRRAPGAAMAAVGQPMKRHGVAALPARPATKLYRGVRQRHWGKWVAEIRLPRNRTRLWLGTFDTADEAALAYDAAAFRLRGESARLNFPELRRGGEHHGPPLDAAIDAKLRSICHGEDMPQSQSDETPAPTTTLTPISFPDVKSEPVCSVSESSSSADGEVSSCSDVVPEMQLLDFSEAPWDEFLLRKYPSLEIDWDAILS

SEQ ID NO: 13564 - protein, 264 aa, Triticum aestivum
  peptide (1)..(264): Ceres Seq. ID no. 15222793
  misc_feature (94)..(157): Pfam Name: Pfam Description:  AP2 domain
  misc_feature (32)..(264): NCBI GI NO: 37572971 NR Description: AP2-domain DRE binding factor DBF1
  misc_feature (57)..(264): NCBI GI NO: 21908036 NR Description: DRE binding factor 1 [Zea mays]
  misc_feature (38)..(264): NCBI GI NO: 13877779 NR Description: putative AP2 domain-containing protein
  misc_feature (38)..(264): NCBI GI NO: 6573771 NR Description: F28K19.29 [Arabidopsis thaliana]
  misc_feature (38)..(264): NCBI GI NO: 15218204 NR Description: AP2 domain transcription factor RAP2.4
  misc_feature (8)..(262): NCBI GI NO: 15236020 NR Description: AP2 domain transcription factor, putative
  misc_feature (1)..(228): NCBI GI NO: 37533596 NR Description: putative AP2-domain transcriptional regulator
  misc_feature (45)..(262): NCBI GI NO: 15238359 NR Description: AP2 domain transcription factor, putative
  misc_feature (85)..(264): NCBI GI NO: 2281633 NR Description: AP2 domain containing protein RAP2.4
  misc_feature (28)..(262): NCBI GI NO: 27436378 NR Description: dehydration-responsive element binding protein 3
MYHMVDSRDQVMHAFAPATAQGAAPTISFAFPCPGAEQSAGLLRGASYLTPAQILQLQSQLHHVRRAPGAAMAAVGQPMKRHGVAALPARPATKLYRGVRQRHWGKWVAEIRLPRNRTRLWLGTFDTADEAALAYDAAAFRLRGESARLNFPELRRGGEHHGPPLDAAIDAKLRSICHGEDMPQSQSDETPAPTTTLTPISFPDVKSEPVCSVSESSSSADGEVSSCSDVVPEMQLLDFSEAPWDEFLLRKYPSLEIDWDAILS

SEQ ID NO: 13565 - DNA, 1359 bp, Triticum aestivum
  misc_feature (1)..(1359): Ceres Seq. ID no. 13584004
acgtccctcggcagtagatcgaagtacgtcagaggatctcgttcccccctcccctcccgtccgccgccgcctttctaccccactttcccggcgccagcttgttagatcccggcgccagcttcagccacgatattcaactattgggtgtgttaaattctcgaggatgatgaatcgtcagtttgcgaatatgatagtacacaattaccccaagggagtttattccctgcgccggatcaacctcatggagtatctcttctacccttcaacagaagctgccgaaaaggcagaagtgaataagaagggatggttatccaccatgttgaaagggagccccaagcagagtctgcccaagacgaacatcaacttctcatcactgcctaacatggccgacttaactaccaggcatttcttctccctgctgagagggcagggggagggctctgtcatgtttgtcagccctaacgtccacacgatgatgtacgacactagcacggacttcgtctttggcatgccacaagccaacttctgtaagcagagtgactcaatcgccctgtccatcactcggcggagctatggccaggacaaccacaagctctatgtcataggaaaaggagaggacaatgccttgttcgaggtcttgaactataccaggacaactgatctgaacaactcgtcttggtactggcgacctctaccctgcccgccactgtttcggccgtgcctgcctggcagcaacagcaaagtttgtcctccctctgcagccgctgtgttggatgccgccacaatatgtgtctcatctgtggatgctggagcctgcgccttctttgacacggcaacgcgcgagtggaggcaggctggcagctgggtgctgcccatccacggtgcggcggagtatgtccctgagtttgacctctggtttggcctcgacgatgtcattggcaaccccaaccattgcctgcgtgcttttgacttcgattcctccaggcgaccggtggtgcggcactcctggaactatctcagcgtcctgcccgatgagtggttgccgcggcagaggcacctgctaaacatgggctcaggcaagttctgcatcgccaccagctttcgaaatctcttgaggcacacctcgtgcagaccacttcatggtgcagtcaatgagcttactgtcttgaccggcgtggaggtggtgcgcaatgtcaatggtttccagatcatcaagcacaagtctgaatgttacagcttggaggacaatagaatccactgtgtgctctgaggaaaacttatctatgtttcactgttattggatggatccttccatgttttttcttctcagatgtgaatgaaaatatttgcttacctttt

SEQ ID NO: 13566 - protein, 422 aa, Triticum aestivum
  peptide (1)..(422): Ceres Seq. ID no. 13584005
  misc_feature (56)..(367): NCBI GI NO: 34904128 NR Description: unnamed protein product
  misc_feature (59)..(394): NCBI GI NO: 15451604 NR Description: Hypothetical protein [Oryza sativa]
  misc_feature (210)..(408): NCBI GI NO: 34902348 NR Description: Hypothetical protein
  misc_feature (188)..(408): NCBI GI NO: 15451605 NR Description: Hypothetical protein [Oryza sativa]
  misc_feature (194)..(422): NCBI GI NO: 38344193 NR Description: OSJNBa0064G10.9
  misc_feature (148)..(394): NCBI GI NO: 37531434 NR Description: hypothetical protein
  misc_feature (56)..(397): NCBI GI NO: 34907072 NR Description: OSJNBa0093F16.25
  misc_feature (210)..(340): NCBI GI NO: 34907070 NR Description: OSJNBa0093F16.24
  misc_feature (268)..(400): NCBI GI NO: 38345446 NR Description: OSJNBa0042L16.1
  misc_feature (275)..(367): NCBI GI NO: 27818009 NR Description: OSJNBb0041J06.17
RPSAVDRSTSEDLVPPSPPVRRRLSTPLSRRQLVRSRRQLQPRYSTIGCVKFSRMMNRQFANMIVHNYPKGVYSLRRINLMEYLFYPSTEAAEKAEVNKKGWLSTMLKGSPKQSLPKTNINFSSLPNMADLTTRHFFSLLRGQGEGSVMFVSPNVHTMMYDTSTDFVFGMPQANFCKQSDSIALSITRRSYGQDNHKLYVIGKGEDNALFEVLNYTRTTDLNNSSWYWRPLPCPPLFRPCLPGSNSKVCPPSAAAVLDAATICVSSVDAGACAFFDTATREWRQAGSWVLPIHGAAEYVPEFDLWFGLDDVIGNPNHCLRAFDFDSSRRPVVRHSWNYLSVLPDEWLPRQRHLLNMGSGKFCIATSFRNLLRHTSCRPLHGAVNELTVLTGVEVVRNVNGFQIIKHKSECYSLEDNRIHCVL

SEQ ID NO: 13567 - protein, 368 aa, Triticum aestivum
  peptide (1)..(368): Ceres Seq. ID no. 13584006
  misc_feature (2)..(313): NCBI GI NO: 34904128 NR Description: unnamed protein product
  misc_feature (5)..(340): NCBI GI NO: 15451604 NR Description: Hypothetical protein [Oryza sativa]
  misc_feature (156)..(354): NCBI GI NO: 34902348 NR Description: Hypothetical protein
  misc_feature (134)..(354): NCBI GI NO: 15451605 NR Description: Hypothetical protein [Oryza sativa]
  misc_feature (140)..(368): NCBI GI NO: 38344193 NR Description: OSJNBa0064G10.9
  misc_feature (94)..(340): NCBI GI NO: 37531434 NR Description: hypothetical protein
  misc_feature (2)..(343): NCBI GI NO: 34907072 NR Description: OSJNBa0093F16.25
  misc_feature (156)..(286): NCBI GI NO: 34907070 NR Description: OSJNBa0093F16.24
  misc_feature (214)..(346): NCBI GI NO: 38345446 NR Description: OSJNBa0042L16.1
  misc_feature (221)..(313): NCBI GI NO: 27818009 NR Description: OSJNBb0041J06.17
MMNRQFANMIVHNYPKGVYSLRRINLMEYLFYPSTEAAEKAEVNKKGWLSTMLKGSPKQSLPKTNINFSSLPNMADLTTRHFFSLLRGQGEGSVMFVSPNVHTMMYDTSTDFVFGMPQANFCKQSDSIALSITRRSYGQDNHKLYVIGKGEDNALFEVLNYTRTTDLNNSSWYWRPLPCPPLFRPCLPGSNSKVCPPSAAAVLDAATICVSSVDAGACAFFDTATREWRQAGSWVLPIHGAAEYVPEFDLWFGLDDVIGNPNHCLRAFDFDSSRRPVVRHSWNYLSVLPDEWLPRQRHLLNMGSGKFCIATSFRNLLRHTSCRPLHGAVNELTVLTGVEVVRNVNGFQIIKHKSECYSLEDNRIHCVL

SEQ ID NO: 13568 - protein, 367 aa, Triticum aestivum
  peptide (1)..(367): Ceres Seq. ID no. 13584007
  misc_feature (1)..(312): NCBI GI NO: 34904128 NR Description: unnamed protein product
  misc_feature (4)..(339): NCBI GI NO: 15451604 NR Description: Hypothetical protein [Oryza sativa]
  misc_feature (155)..(353): NCBI GI NO: 34902348 NR Description: Hypothetical protein
  misc_feature (133)..(353): NCBI GI NO: 15451605 NR Description: Hypothetical protein [Oryza sativa]
  misc_feature (139)..(367): NCBI GI NO: 38344193 NR Description: OSJNBa0064G10.9
  misc_feature (93)..(339): NCBI GI NO: 37531434 NR Description: hypothetical protein
  misc_feature (1)..(342): NCBI GI NO: 34907072 NR Description: OSJNBa0093F16.25
  misc_feature (155)..(285): NCBI GI NO: 34907070 NR Description: OSJNBa0093F16.24
  misc_feature (213)..(345): NCBI GI NO: 38345446 NR Description: OSJNBa0042L16.1
  misc_feature (220)..(312): NCBI GI NO: 27818009 NR Description: OSJNBb0041J06.17
MNRQFANMIVHNYPKGVYSLRRINLMEYLFYPSTEAAEKAEVNKKGWLSTMLKGSPKQSLPKTNINFSSLPNMADLTTRHFFSLLRGQGEGSVMFVSPNVHTMMYDTSTDFVFGMPQANFCKQSDSIALSITRRSYGQDNHKLYVIGKGEDNALFEVLNYTRTTDLNNSSWYWRPLPCPPLFRPCLPGSNSKVCPPSAAAVLDAATICVSSVDAGACAFFDTATREWRQAGSWVLPIHGAAEYVPEFDLWFGLDDVIGNPNHCLRAFDFDSSRRPVVRHSWNYLSVLPDEWLPRQRHLLNMGSGKFCIATSFRNLLRHTSCRPLHGAVNELTVLTGVEVVRNVNGFQIIKHKSECYSLEDNRIHCVL

SEQ ID NO: 13569 - DNA, 1460 bp, Triticum aestivum
  misc_feature (1)..(1460): Ceres Seq. ID no. 12586366
aaagcgaaagaaaaagtgagacctcatctctttcagctaagctcgcaatggagctcccatggggtgccctgctgctggcgctgctcaccgtctccgcctcctccgccgtcgccacgctcgccgtcaccgctccccctccggcccctgcccgtgctcctgcccccgtcaccgcccctgccccggcccatgcatctcctcaagctcaggacgctgaaggtctgctgatgaacggcaacttcgagacggcgccgaggaaggtgaacaagaccctcatcgtgggccgccactcgctgccggggtggacgctgcggggccacgtcgagtacgtgtcggcggggccgcagccgggcggcatgttcttcgcggtgccgcacggcgtgcacgcgctccgcctcggcagccacgcgtcggcgtcgcagaacgtgtccgtgcgccccggctcgctctacgcgctcaccttcgccgccacccgcacctgcgcgcaggacgaggccctgcgcatcgccgtctccccgtcgctctccgcccccgccgacgtcgccgtccgcaccctctacagcgccgacaccgccgacacctgggcctggggcttccgcgcctcctcccctgtcgcggaggtcaccttcagcaaccccggcgtgcaggaggacgccgcgtgcggcccgctcatcgacgccgtcgccatcaaggagctccccacgccctaccccaccaaagataacctgatcaagaacgacggcttcgagatcgggccgcaggtgttcaagaactcgagcgttggcgtgctgctgccgccgaagcagaaggacgtgacgtcgccgctgccgggctggatcatcgagtcgctcaaggcggtgcggtacatcgacgccgcccacttctcggtgccggcgggccagtacgcggtggagctggtggcggggcgggagagcgccatcgcgcaggtcatccgcaccgtgcccaaccgcgcctacaacctctcctacgtcgtcggcgacgccaagaacggctgccacggctccatgctcgtggaggccttcgccgccaacgtcacgcagaaggtgccgttccagtccacgggcaagggcgggttcaaggcggcgagcctcaggttcgtggccgccggagtccgcaccagggtcaccttctacagctcctactaccacaccaaggtcaccgacggcgtctcgctctgcggccccgtgctcgaccaggtcaagatcatgccgctcaagctctagtcgtctatcggagtagaccagaagctcagatcaatcctgtcgcgttgattcggcatcgtcctctcgtctactatgtagtagtagtgggtatgtaatttgtgacattgatggacctctctctaatcgtgtgccagcgtggtggaatgaattgcctgtgctgtgcgtgaacctgcgagctccgtcaatttgtttgggatttgcgtaggctttctactagtt

SEQ ID NO: 13570 - protein, 412 aa, Triticum aestivum
  peptide (1)..(412): Ceres Seq. ID no. 12586367
  misc_feature (86)..(407): Pfam Name: Pfam Description:  Protein of unknown function, DUF642
  misc_feature (16)..(411): NCBI GI NO: 30102997 NR Description: unknown protein
  misc_feature (67)..(407): NCBI GI NO: 18398135 NR Description: expressed protein; protein id: At3g08030
  misc_feature (86)..(407): NCBI GI NO: 12321555 NR Description: unknown protein, 5' partial [Arabidopsis thaliana]
  misc_feature (60)..(407): NCBI GI NO: 15227439 NR Description: unknown protein; protein id: At2g41810.1
  misc_feature (71)..(407): NCBI GI NO: 15227437 NR Description: unknown protein; protein id: At2g41800
  misc_feature (71)..(411): NCBI GI NO: 7488898 NR Description: hypothetical protein - castor bean
  misc_feature (71)..(408): NCBI GI NO: 18418018 NR Description: putative protein; protein id: At4g32460
  misc_feature (70)..(408): NCBI GI NO: 15239049 NR Description: putative protein; protein id: At5g11420
  misc_feature (70)..(408): NCBI GI NO: 21554402 NR Description: unknown [Arabidopsis thaliana]
  misc_feature (70)..(408): NCBI GI NO: 23397043 NR Description: unknown protein [Arabidopsis thaliana]
SERKSETSSLSAKLAMELPWGALLLALLTVSASSAVATLAVTAPPPAPARAPAPVTAPAPAHASPQAQDAEGLLMNGNFETAPRKVNKTLIVGRHSLPGWTLRGHVEYVSAGPQPGGMFFAVPHGVHALRLGSHASASQNVSVRPGSLYALTFAATRTCAQDEALRIAVSPSLSAPADVAVRTLYSADTADTWAWGFRASSPVAEVTFSNPGVQEDAACGPLIDAVAIKELPTPYPTKDNLIKNDGFEIGPQVFKNSSVGVLLPPKQKDVTSPLPGWIIESLKAVRYIDAAHFSVPAGQYAVELVAGRESAIAQVIRTVPNRAYNLSYVVGDAKNGCHGSMLVEAFAANVTQKVPFQSTGKGGFKAASLRFVAAGVRTRVTFYSSYYHTKVTDGVSLCGPVLDQVKIMPLKL

SEQ ID NO: 13571 - protein, 397 aa, Triticum aestivum
  peptide (1)..(397): Ceres Seq. ID no. 12586368
  misc_feature (71)..(392): Pfam Name: Pfam Description:  Protein of unknown function, DUF642
  misc_feature (1)..(396): NCBI GI NO: 30102997 NR Description: unknown protein
  misc_feature (52)..(392): NCBI GI NO: 18398135 NR Description: expressed protein; protein id: At3g08030
  misc_feature (71)..(392): NCBI GI NO: 12321555 NR Description: unknown protein, 5' partial [Arabidopsis thaliana]
  misc_feature (45)..(392): NCBI GI NO: 15227439 NR Description: unknown protein; protein id: At2g41810.1
  misc_feature (56)..(392): NCBI GI NO: 15227437 NR Description: unknown protein; protein id: At2g41800
  misc_feature (56)..(396): NCBI GI NO: 7488898 NR Description: hypothetical protein - castor bean
  misc_feature (56)..(393): NCBI GI NO: 18418018 NR Description: putative protein; protein id: At4g32460
  misc_feature (55)..(393): NCBI GI NO: 15239049 NR Description: putative protein; protein id: At5g11420
  misc_feature (55)..(393): NCBI GI NO: 21554402 NR Description: unknown [Arabidopsis thaliana]
  misc_feature (55)..(393): NCBI GI NO: 23397043 NR Description: unknown protein [Arabidopsis thaliana]
MELPWGALLLALLTVSASSAVATLAVTAPPPAPARAPAPVTAPAPAHASPQAQDAEGLLMNGNFETAPRKVNKTLIVGRHSLPGWTLRGHVEYVSAGPQPGGMFFAVPHGVHALRLGSHASASQNVSVRPGSLYALTFAATRTCAQDEALRIAVSPSLSAPADVAVRTLYSADTADTWAWGFRASSPVAEVTFSNPGVQEDAACGPLIDAVAIKELPTPYPTKDNLIKNDGFEIGPQVFKNSSVGVLLPPKQKDVTSPLPGWIIESLKAVRYIDAAHFSVPAGQYAVELVAGRESAIAQVIRTVPNRAYNLSYVVGDAKNGCHGSMLVEAFAANVTQKVPFQSTGKGGFKAASLRFVAAGVRTRVTFYSSYYHTKVTDGVSLCGPVLDQVKIMPLKL

SEQ ID NO: 13572 - protein, 338 aa, Triticum aestivum
  peptide (1)..(338): Ceres Seq. ID no. 12586369
  misc_feature (12)..(333): Pfam Name: Pfam Description:  Protein of unknown function, DUF642
  misc_feature (1)..(337): NCBI GI NO: 30102997 NR Description: unknown protein
  misc_feature (1)..(333): NCBI GI NO: 18398135 NR Description: expressed protein; protein id: At3g08030
  misc_feature (12)..(333): NCBI GI NO: 12321555 NR Description: unknown protein, 5' partial [Arabidopsis thaliana]
  misc_feature (1)..(333): NCBI GI NO: 15227439 NR Description: unknown protein; protein id: At2g41810.1
  misc_feature (1)..(333): NCBI GI NO: 15227437 NR Description: unknown protein; protein id: At2g41800
  misc_feature (1)..(337): NCBI GI NO: 7488898 NR Description: hypothetical protein - castor bean
  misc_feature (1)..(334): NCBI GI NO: 18418018 NR Description: putative protein; protein id: At4g32460
  misc_feature (1)..(334): NCBI GI NO: 15239049 NR Description: putative protein; protein id: At5g11420
  misc_feature (1)..(334): NCBI GI NO: 21554402 NR Description: unknown [Arabidopsis thaliana]
  misc_feature (1)..(334): NCBI GI NO: 23397043 NR Description: unknown protein [Arabidopsis thaliana]
MNGNFETAPRKVNKTLIVGRHSLPGWTLRGHVEYVSAGPQPGGMFFAVPHGVHALRLGSHASASQNVSVRPGSLYALTFAATRTCAQDEALRIAVSPSLSAPADVAVRTLYSADTADTWAWGFRASSPVAEVTFSNPGVQEDAACGPLIDAVAIKELPTPYPTKDNLIKNDGFEIGPQVFKNSSVGVLLPPKQKDVTSPLPGWIIESLKAVRYIDAAHFSVPAGQYAVELVAGRESAIAQVIRTVPNRAYNLSYVVGDAKNGCHGSMLVEAFAANVTQKVPFQSTGKGGFKAASLRFVAAGVRTRVTFYSSYYHTKVTDGVSLCGPVLDQVKIMPLKL

SEQ ID NO: 13573 - DNA, 1314 bp, Triticum aestivum
  misc_feature (1)..(1314): Ceres Seq. ID no. 12616332
atttcaatttttgccccatcggcggagcaaaacagggtgtgggagtgttcgcttttcaggtgggctcggtcggagccgtcggaggagatcgccgccatccatggaaacgctggccagcgccatgcggcgcgacaaccgccgcttcaagaccccgccctcctcctccgccgccgccgcctccgccggcagggtccccctcgtcatggccttcctcgcctgcctcgcctgggtgtacgtcgccggccggctatggcaggacgcgcagacccgggcgatcctctccggcctcctcgagaagagcaccggcagtctccccaaggagatctcggtggacgacaagctgagggacctcggatgcactgggattgggaggaagatcgccgaggcggagatggacattgccaaggccaagagcgagggctacctgtggggaaatgggactggtgccggtgctgggggttccgaccggaagaagttcctcgcggtcattggagtttacaccggctttggctcccggctcaagaggaacaccttccgtggctcctggatgcccagaggtgatgctttaaagacgcttgaggaaaagggtgtggttattcgttttgttattgaccggagtcctaatcgaggtgatagcttggaccgtaatattaacgaagaaagcagaaagacaaacgatttcttgattctggaaagtcacgaggaagctgcagaggaattacctaaaaaagttaagtttttcttcagtgcagcaatagaagcttgggatgcagagttctacgtcaagattgacgataacattaatcttgacttggctgggttaattgagatgcttaacgcccgtcgaggtagccaagggttgtacatgggctgcatgaaatcaggagctgtcgttagtgaagaggagcaacaatggtatgaacctgaatggtggaaatttggagattcaaggacgtattttcgccatgctgctggttctttatttatcctctcaaacaatttggctcgctacatcaacataaacagtgcatcgctgcagagctatgcgcatgatgacatatcagttggttcatggatgatggggcttaatgccacttacgttgatgacgaccgtctgtgttgcctcagtccggtacaagagaaagtatgttcctttggatgagcggaaggaccagccgcccccccttctgatggtggtgtcctgatgaagaggtgtttttgtacattagccattttgtacacacctatagcaggcagcctatgtgaatgattgaatgaatgcaagaaatatatgaagaaactactttgagatgt

SEQ ID NO: 13574 - protein, 386 aa, Triticum aestivum
  peptide (1)..(386): Ceres Seq. ID no. 12616333
  misc_feature (173)..(370): Pfam Name: Pfam Description:  Galactosyltransferase
  misc_feature (34)..(384): NCBI GI NO: 34898462 NR Description: ESTs D47620
  misc_feature (34)..(384): NCBI GI NO: 15236681 NR Description: putative protein; protein id: At4g32120
  misc_feature (34)..(376): NCBI GI NO: 15224704 NR Description: unknown protein; protein id: At2g25300.1
  misc_feature (105)..(384): NCBI GI NO: 26451702 NR Description: unknown protein [Arabidopsis thaliana]
  misc_feature (58)..(384): NCBI GI NO: 40253477 NR Description: putative Avr9 elicitor response protein
  misc_feature (66)..(376): NCBI GI NO: 22553068 NR Description: beta 1,3-glycosyltransferase-like protein I
  misc_feature (66)..(384): NCBI GI NO: 20372915 NR Description: beta 1,3-glycosyltransferase-like protein I
  misc_feature (55)..(384): NCBI GI NO: 18423501 NR Description: Avr9 elicitor response protein-like
  misc_feature (55)..(374): NCBI GI NO: 9759181 NR Description: Avr9 elicitor response protein-like
  misc_feature (122)..(377): NCBI GI NO: 15220440 NR Description: putative AVR9 elicitor response protein
FQFLPHRRSKTGCGSVRFSGGLGRSRRRRSPPSMETLASAMRRDNRRFKTPPSSSAAAASAGRVPLVMAFLACLAWVYVAGRLWQDAQTRAILSGLLEKSTGSLPKEISVDDKLRDLGCTGIGRKIAEAEMDIAKAKSEGYLWGNGTGAGAGGSDRKKFLAVIGVYTGFGSRLKRNTFRGSWMPRGDALKTLEEKGVVIRFVIDRSPNRGDSLDRNINEESRKTNDFLILESHEEAAEELPKKVKFFFSAAIEAWDAEFYVKIDDNINLDLAGLIEMLNARRGSQGLYMGCMKSGAVVSEEEQQWYEPEWWKFGDSRTYFRHAAGSLFILSNNLARYININSASLQSYAHDDISVGSWMMGLNATYVDDDRLCCLSPVQEKVCSFG

SEQ ID NO: 13575 - protein, 353 aa, Triticum aestivum
  peptide (1)..(353): Ceres Seq. ID no. 12616334
  misc_feature (140)..(337): Pfam Name: Pfam Description:  Galactosyltransferase
  misc_feature (1)..(351): NCBI GI NO: 34898462 NR Description: ESTs D47620
  misc_feature (1)..(351): NCBI GI NO: 15236681 NR Description: putative protein; protein id: At4g32120
  misc_feature (1)..(343): NCBI GI NO: 15224704 NR Description: unknown protein; protein id: At2g25300.1
  misc_feature (72)..(351): NCBI GI NO: 26451702 NR Description: unknown protein [Arabidopsis thaliana]
  misc_feature (25)..(351): NCBI GI NO: 40253477 NR Description: putative Avr9 elicitor response protein
  misc_feature (33)..(343): NCBI GI NO: 22553068 NR Description: beta 1,3-glycosyltransferase-like protein I
  misc_feature (33)..(351): NCBI GI NO: 20372915 NR Description: beta 1,3-glycosyltransferase-like protein I
  misc_feature (22)..(351): NCBI GI NO: 18423501 NR Description: Avr9 elicitor response protein-like
  misc_feature (22)..(341): NCBI GI NO: 9759181 NR Description: Avr9 elicitor response protein-like
  misc_feature (89)..(344): NCBI GI NO: 15220440 NR Description: putative AVR9 elicitor response protein
METLASAMRRDNRRFKTPPSSSAAAASAGRVPLVMAFLACLAWVYVAGRLWQDAQTRAILSGLLEKSTGSLPKEISVDDKLRDLGCTGIGRKIAEAEMDIAKAKSEGYLWGNGTGAGAGGSDRKKFLAVIGVYTGFGSRLKRNTFRGSWMPRGDALKTLEEKGVVIRFVIDRSPNRGDSLDRNINEESRKTNDFLILESHEEAAEELPKKVKFFFSAAIEAWDAEFYVKIDDNINLDLAGLIEMLNARRGSQGLYMGCMKSGAVVSEEEQQWYEPEWWKFGDSRTYFRHAAGSLFILSNNLARYININSASLQSYAHDDISVGSWMMGLNATYVDDDRLCCLSPVQEKVCSFG

SEQ ID NO: 13576 - protein, 346 aa, Triticum aestivum
  peptide (1)..(346): Ceres Seq. ID no. 12616335
  misc_feature (133)..(330): Pfam Name: Pfam Description:  Galactosyltransferase
  misc_feature (1)..(344): NCBI GI NO: 34898462 NR Description: ESTs D47620
  misc_feature (1)..(344): NCBI GI NO: 15236681 NR Description: putative protein; protein id: At4g32120
  misc_feature (1)..(336): NCBI GI NO: 15224704 NR Description: unknown protein; protein id: At2g25300.1
  misc_feature (65)..(344): NCBI GI NO: 26451702 NR Description: unknown protein [Arabidopsis thaliana]
  misc_feature (18)..(344): NCBI GI NO: 40253477 NR Description: putative Avr9 elicitor response protein
  misc_feature (26)..(336): NCBI GI NO: 22553068 NR Description: beta 1,3-glycosyltransferase-like protein I
  misc_feature (26)..(344): NCBI GI NO: 20372915 NR Description: beta 1,3-glycosyltransferase-like protein I
  misc_feature (15)..(344): NCBI GI NO: 18423501 NR Description: Avr9 elicitor response protein-like
  misc_feature (15)..(334): NCBI GI NO: 9759181 NR Description: Avr9 elicitor response protein-like
  misc_feature (82)..(337): NCBI GI NO: 15220440 NR Description: putative AVR9 elicitor response protein
MRRDNRRFKTPPSSSAAAASAGRVPLVMAFLACLAWVYVAGRLWQDAQTRAILSGLLEKSTGSLPKEISVDDKLRDLGCTGIGRKIAEAEMDIAKAKSEGYLWGNGTGAGAGGSDRKKFLAVIGVYTGFGSRLKRNTFRGSWMPRGDALKTLEEKGVVIRFVIDRSPNRGDSLDRNINEESRKTNDFLILESHEEAAEELPKKVKFFFSAAIEAWDAEFYVKIDDNINLDLAGLIEMLNARRGSQGLYMGCMKSGAVVSEEEQQWYEPEWWKFGDSRTYFRHAAGSLFILSNNLARYININSASLQSYAHDDISVGSWMMGLNATYVDDDRLCCLSPVQEKVCSFG

SEQ ID NO: 13577 - DNA, 1356 bp, Triticum aestivum
  misc_feature (1)..(1356): Ceres Seq. ID no. 13597393
attacctagtacatcctaatcgaaaaaagagccctatagcccaaatggcagctctcctgaaccctacggctcggcgcctcaccctcgctgcctgccgccgcctctctacggcgccggcggtggagcccctcgtggctcactggagcacccaagcaagatacaattccagtctggtggaggttaatggcggatttggggagatggttgccgacacaaagaggtactacgtgcttggaggcaaaggtggtgttgggacaacaagcatggcagcatcgcttgctatgaagtttgccaaccatggtgaaccgacgctcatagtttctatgcacccagcacattcactgggtgatacatttgaacaagacctgagtggcggtaatattgtacctgtcaatggagtcgactctctttttgctgccgagattggccatgttaatacaaaggaggaatcttctaatagtggatcttttatgcgtaatatactggacaagatagggcttggagtccttgctgatccgctgggaaagaataagctgcatgaaatgctgatgaaaactcctggatttggagaagccgttgcaatttcgaagctgatgcaaatcgtcgaactgcaagagagcaataaatttaggcgcatagttttggataccgcggcaactgggcatacacttaaccttttatctgctacaactttaatggagaagctccttggtatggccaataaggctgtgaatttagcgtcatccttcccagctcttaaatcagctttcgggaaagaccaaatagatcctgccaggatagaggtgctaagaaagcagattgccagagtacatgagcttatgcaagatccacaatcaactgaatttatcattctgacgattcctacggtgatggctatcaccgagtcgtcaaggtttcatgcatctttgaagaaggatggtgcgtcagcaacaaggcttgtcgtaaatcaagtattgcccccctctacatctgagtgcagattttgttctacaaaacgcaaggaagaagcacgtgccctgaatatgataagcaatgatcgtgaacttggcggcctagagctaatccaagcgccacttctcgatgtggaggtcagaggcgcccctgctctcagattcttcggcgatgtggtctggaaatagacgctaggatgccaggccgtgacgagaattttgttatttcatctgaaactccacagtactggtggcggcactcaaattgtctagaaatgtggttgaatctggagaaaagatgaaacccagcaggataccagactgttcaggctgtagacgtttggtaggttcttaaataagaaacggagtattagttgctgccctc

SEQ ID NO: 13578 - protein, 385 aa, Triticum aestivum
  peptide (1)..(385): Ceres Seq. ID no. 15222088
  misc_feature (72)..(385): Pfam Name: Pfam Description:  Anion-transporting ATPase
  misc_feature (48)..(385): NCBI GI NO: 30681260 NR Description: ATPase -related [Arabidopsis thaliana]
  misc_feature (50)..(385): NCBI GI NO: 30697424 NR Description: ATPase - like protein [Arabidopsis thaliana]
  misc_feature (55)..(385): NCBI GI NO: 9759337 NR Description: arsenite translocating ATPase-like protein
  misc_feature (63)..(358): NCBI GI NO: 5824321 NR Description: ATPase [Solanum tuberosum]
  misc_feature (48)..(385): NCBI GI NO: 6056208 NR Description: putative ATPase [Arabidopsis thaliana]
  misc_feature (63)..(384): NCBI GI NO: 20095116 NR Description: Arsenite transporting ATPase
  misc_feature (70)..(384): NCBI GI NO: 15669329 NR Description: arsenical pump-driving ATPase (arsA)
  misc_feature (74)..(376): NCBI GI NO: 15679508 NR Description: arsenical pump-driving ATPase
  misc_feature (71)..(381): NCBI GI NO: 17557003 NR Description: Anion-transporting ATPase (37.6 kD)
  misc_feature (73)..(376): NCBI GI NO: 34557874 NR Description: ARSENICAL PUMP-DRIVING ATPASE
YLVHPNRKKSPIAQMAALLNPTARRLTLAACRRLSTAPAVEPLVAHWSTQARYNSSLVEVNGGFGEMVADTKRYYVLGGKGGVGTTSMAASLAMKFANHGEPTLIVSMHPAHSLGDTFEQDLSGGNIVPVNGVDSLFAAEIGHVNTKEESSNSGSFMRNILDKIGLGVLADPLGKNKLHEMLMKTPGFGEAVAISKLMQIVELQESNKFRRIVLDTAATGHTLNLLSATTLMEKLLGMANKAVNLASSFPALKSAFGKDQIDPARIEVLRKQIARVHELMQDPQSTEFIILTIPTVMAITESSRFHASLKKDGASATRLVVNQVLPPSTSECRFCSTKRKEEARALNMISNDRELGGLELIQAPLLDVEVRGAPALRFFGDVVWK

SEQ ID NO: 13579 - protein, 371 aa, Triticum aestivum
  peptide (1)..(371): Ceres Seq. ID no. 15222089
  misc_feature (58)..(371): Pfam Name: Pfam Description:  Anion-transporting ATPase
  misc_feature (34)..(371): NCBI GI NO: 30681260 NR Description: ATPase -related [Arabidopsis thaliana]
  misc_feature (36)..(371): NCBI GI NO: 30697424 NR Description: ATPase - like protein [Arabidopsis thaliana]
  misc_feature (41)..(371): NCBI GI NO: 9759337 NR Description: arsenite translocating ATPase-like protein
  misc_feature (49)..(344): NCBI GI NO: 5824321 NR Description: ATPase [Solanum tuberosum]
  misc_feature (34)..(371): NCBI GI NO: 6056208 NR Description: putative ATPase [Arabidopsis thaliana]
  misc_feature (49)..(370): NCBI GI NO: 20095116 NR Description: Arsenite transporting ATPase
  misc_feature (56)..(370): NCBI GI NO: 15669329 NR Description: arsenical pump-driving ATPase (arsA)
  misc_feature (60)..(362): NCBI GI NO: 15679508 NR Description: arsenical pump-driving ATPase
  misc_feature (57)..(367): NCBI GI NO: 17557003 NR Description: Anion-transporting ATPase (37.6 kD)
  misc_feature (59)..(362): NCBI GI NO: 34557874 NR Description: ARSENICAL PUMP-DRIVING ATPASE
MAALLNPTARRLTLAACRRLSTAPAVEPLVAHWSTQARYNSSLVEVNGGFGEMVADTKRYYVLGGKGGVGTTSMAASLAMKFANHGEPTLIVSMHPAHSLGDTFEQDLSGGNIVPVNGVDSLFAAEIGHVNTKEESSNSGSFMRNILDKIGLGVLADPLGKNKLHEMLMKTPGFGEAVAISKLMQIVELQESNKFRRIVLDTAATGHTLNLLSATTLMEKLLGMANKAVNLASSFPALKSAFGKDQIDPARIEVLRKQIARVHELMQDPQSTEFIILTIPTVMAITESSRFHASLKKDGASATRLVVNQVLPPSTSECRFCSTKRKEEARALNMISNDRELGGLELIQAPLLDVEVRGAPALRFFGDVVWK

SEQ ID NO: 13580 - protein, 319 aa, Triticum aestivum
  peptide (1)..(319): Ceres Seq. ID no. 15222090
  misc_feature (6)..(319): Pfam Name: Pfam Description:  Anion-transporting ATPase
  misc_feature (1)..(319): NCBI GI NO: 30681260 NR Description: ATPase -related [Arabidopsis thaliana]
  misc_feature (1)..(319): NCBI GI NO: 30697424 NR Description: ATPase - like protein [Arabidopsis thaliana]
  misc_feature (1)..(319): NCBI GI NO: 9759337 NR Description: arsenite translocating ATPase-like protein
  misc_feature (1)..(292): NCBI GI NO: 5824321 NR Description: ATPase [Solanum tuberosum]
  misc_feature (1)..(319): NCBI GI NO: 6056208 NR Description: putative ATPase [Arabidopsis thaliana]
  misc_feature (1)..(318): NCBI GI NO: 20095116 NR Description: Arsenite transporting ATPase
  misc_feature (4)..(318): NCBI GI NO: 15669329 NR Description: arsenical pump-driving ATPase (arsA)
  misc_feature (8)..(310): NCBI GI NO: 15679508 NR Description: arsenical pump-driving ATPase
  misc_feature (5)..(315): NCBI GI NO: 17557003 NR Description: Anion-transporting ATPase (37.6 kD)
  misc_feature (7)..(310): NCBI GI NO: 34557874 NR Description: ARSENICAL PUMP-DRIVING ATPASE
MVADTKRYYVLGGKGGVGTTSMAASLAMKFANHGEPTLIVSMHPAHSLGDTFEQDLSGGNIVPVNGVDSLFAAEIGHVNTKEESSNSGSFMRNILDKIGLGVLADPLGKNKLHEMLMKTPGFGEAVAISKLMQIVELQESNKFRRIVLDTAATGHTLNLLSATTLMEKLLGMANKAVNLASSFPALKSAFGKDQIDPARIEVLRKQIARVHELMQDPQSTEFIILTIPTVMAITESSRFHASLKKDGASATRLVVNQVLPPSTSECRFCSTKRKEEARALNMISNDRELGGLELIQAPLLDVEVRGAPALRFFGDVVWK

SEQ ID NO: 13581 - DNA, 606 bp, Triticum aestivum
  misc_feature (1)..(606): Ceres Seq. ID no. 12777119
actcgagagcgcgagcgagacttttctttccatccgcaggagatcccgacgagaaggcgaaggcgaagccggcggcgcaaccgaagcccctcatggcccgctcgtcctcgcagtcccagtcctccgtcggcggtgccggcgccgccggatcccgcccggccaccgccgggccccgcggcacgcccgccgccacggctggcatgcgccgccgacccggccgcacctcctcctccgcgtccggtggcggaggcttctccggcggcggagggaacaacatgctgcgcttttacaccgacgaggccccggggctgcgcctctccccgaccatggtgctcgtcatgtccgtctgcttcatcggcttcgtcaccgccctccacgtcttcggcaagctctaccgctcccgcaccgccgcctccgcgtccgcctgatcaacccggttcctgctcctgtttgttcttcgtttcagatcagatcagatggttttggtgtgtaacaaagaggctgtggttgctacctgacgagttagatctgccgaagtaccctacatgtttaattatggtgccctttctgtttccatttaccttgttgttgcgatgaattgtggct

SEQ ID NO: 13582 - protein, 198 aa, Triticum aestivum
  peptide (1)..(198): Ceres Seq. ID no. 12777120
  misc_feature (29)..(142): Pfam Name: Pfam Description:  Extensin-like region
  misc_feature (29)..(145): NCBI GI NO: 20138131 NR Description: Vegetative cell wall protein gp1 precursor
  misc_feature (29)..(142): NCBI GI NO: 20138131 NR Description: Vegetative cell wall protein gp1 precursor
  misc_feature (29)..(142): NCBI GI NO: 14253159 NR Description: VMP3 protein [Volvox carteri f. nagariensis]
  misc_feature (30)..(147): NCBI GI NO: 27375632 NR Description: blr0521 [Bradyrhizobium japonicum]
  misc_feature (30)..(145): NCBI GI NO: 6523547 NR Description: hydroxyproline-rich glycoprotein DZ-HRGP
  misc_feature (29)..(142): NCBI GI NO: 20138131 NR Description: Vegetative cell wall protein gp1 precursor
  misc_feature (29)..(145): NCBI GI NO: 81286 NR Description: extensin - Volvox carteri (fragment)
  misc_feature (29)..(144): NCBI GI NO: 81286 NR Description: extensin - Volvox carteri (fragment)
  misc_feature (29)..(145): NCBI GI NO: 20138131 NR Description: Vegetative cell wall protein gp1 precursor
  misc_feature (29)..(142): NCBI GI NO: 6523547 NR Description: hydroxyproline-rich glycoprotein DZ-HRGP
TRERERDFSFHPQEIPTRRRRRSRRRNRSPSWPARPRSPSPPSAVPAPPDPARPPPGPAARPPPRLACAADPAAPPPPRPVAEASPAAEGTTCCAFTPTRPRGCASPRPWCSSCPSASSASSPPSTSSASSTAPAPPPPRPPDQPGSCSCLFFVSDQIRWFWCVTKRLWLLPDELDLPKYPTCLIMVPFLFPFTLLLR

SEQ ID NO: 13583 - protein, 163 aa, Triticum aestivum
  peptide (1)..(163): Ceres Seq. ID no. 12777121
LESASETFLSIRRRSRREGEGEAGGATEAPHGPLVLAVPVLRRRCRRRRIPPGHRRAPRHARRHGWHAPPTRPHLLLRVRWRRLLRRRREQHAALLHRRGPGAAPLPDHGARHVRLLHRLRHRPPRLRQALPLPHRRLRVRLINPVPAPVCSSFQIRSDGFGV

SEQ ID NO: 13584 - protein, 141 aa, Triticum aestivum
  peptide (1)..(141): Ceres Seq. ID no. 12777122
  misc_feature (86)..(131): Pfam Name: Pfam Description:  Sec61beta family
  misc_feature (31)..(139): NCBI GI NO: 15239337 NR Description: protein transport protein subunit - like
  misc_feature (55)..(131): NCBI GI NO: 15225401 NR Description: putative transport protein SEC61 beta-subunit
  misc_feature (55)..(131): NCBI GI NO: 15232357 NR Description: transport protein subunit - like
  misc_feature (55)..(131): NCBI GI NO: 26450635 NR Description: putative transport protein subunit
  misc_feature (47)..(133): NCBI GI NO: 34914212 NR Description: P0697C12.13
SRARARLFFPSAGDPDEKAKAKPAAQPKPLMARSSSQSQSSVGGAGAAGSRPATAGPRGTPAATAGMRRRPGRTSSSASGGGGFSGGGGNNMLRFYTDEAPGLRLSPTMVLVMSVCFIGFVTALHVFGKLYRSRTAASASA

SEQ ID NO: 13585 - protein, 111 aa, Triticum aestivum
  peptide (1)..(111): Ceres Seq. ID no. 12777123
  misc_feature (56)..(101): Pfam Name: Pfam Description:  Sec61beta family
  misc_feature (1)..(109): NCBI GI NO: 15239337 NR Description: protein transport protein subunit - like
  misc_feature (25)..(101): NCBI GI NO: 15225401 NR Description: putative transport protein SEC61 beta-subunit
  misc_feature (25)..(101): NCBI GI NO: 15232357 NR Description: transport protein subunit - like
  misc_feature (25)..(101): NCBI GI NO: 26450635 NR Description: putative transport protein subunit
  misc_feature (17)..(103): NCBI GI NO: 34914212 NR Description: P0697C12.13
MARSSSQSQSSVGGAGAAGSRPATAGPRGTPAATAGMRRRPGRTSSSASGGGGFSGGGGNNMLRFYTDEAPGLRLSPTMVLVMSVCFIGFVTALHVFGKLYRSRTAASASA

SEQ ID NO: 13586 - DNA, 942 bp, Triticum aestivum
  misc_feature (1)..(942): Ceres Seq. ID no. 13597394
  misc_feature (935)..(935): n is a, c, t, g, unknown, or other
ccacccagttcccctcttcactccacgccgtgctccctctctttcccctctccccgatctccgtctccgtctccgtcctcccgccgctgccgccatggacggcgtcatcggccagatcttggagaagcaggtcctgtcggccgcgaaggcggtcgaggacaagctagatgagcagatcgccgcgctcgagcggctcgacccggacgacatcgaggcgctccgcgagcgccggatgctgcagatgcgccgcgcggccgagcgccgggccaagtggcgcgccctggggcacggcgagtatacggaggtccccgagaaagagttcttctccaccgccaaggccagcgagcgcatggtgtgccacttctaccgcgacaactggccgtgcaaggttatggacaaacacatgtcgattctcgctaaacagcatgtagaaacacggtttatcaaagtccatgctgaaaaggctccctttctgaccgaaaaactaagggttgttgtgctcccaactcttgccctagtgaagaatgccaaggttgaggattatgtggttggatttgatgagctgggtggtaaagatgacttcagcactgaggatctggaggaacgcattgccaaagctcaagtgatcttcctcgacggagaggggcctgcaaatccttccaagcaagctgctgccagcaagcgaagcgttcgacaatcagatactggcaactcagactcagactagttctgttcctgtattgaaggcgtgtgcgccaaggatttttatatataggatttatgccaagctgttatgctatccttactagtaataggaaagaagtttgtgtttcgatggcgatttgaaccgcaattgtcactgttgtagagtgctcttgtttttaccatgcgtccatacctggtttggtttgtttatttgagtggaaatgtttttncgttgct

SEQ ID NO: 13587 - protein, 241 aa, Triticum aestivum
  peptide (1)..(241): Ceres Seq. ID no. 15222091
  misc_feature (146)..(184): Pfam Name: Pfam Description:  Thioredoxin
  misc_feature (32)..(241): NCBI GI NO: 40253924 NR Description: putative ATP binding protein associated with celldifferentiation
  misc_feature (32)..(241): NCBI GI NO: 15224267 NR Description: ATP binding protein -related
  misc_feature (32)..(241): NCBI GI NO: 18404574 NR Description: expressed protein [Arabidopsis thaliana]
  misc_feature (32)..(241): NCBI GI NO: 21594045 NR Description: putative ATP binding protein
  misc_feature (85)..(241): NCBI GI NO: 26452365 NR Description: unknown protein [Arabidopsis thaliana]
  misc_feature (28)..(241): NCBI GI NO: 28277604 NR Description: Similar to ATP binding protein associated with celldifferentiation
  misc_feature (28)..(241): NCBI GI NO: 18104959 NR Description: ATP binding protein associated with celldifferentiation
  misc_feature (28)..(241): NCBI GI NO: 2342477 NR Description: ATP binding protein [Homo sapiens]
  misc_feature (35)..(241): NCBI GI NO: 25286717 NR Description: ATP binding protein associated with celldifferentiation
  misc_feature (28)..(209): NCBI GI NO: 19683948 NR Description: Similar to ATP binding protein associated with celldifferentiation
HPVPLFTPRRAPSLSPLPDLRLRLRPPAAAAMDGVIGQILEKQVLSAAKAVEDKLDEQIAALERLDPDDIEALRERRMLQMRRAAERRAKWRALGHGEYTEVPEKEFFSTAKASERMVCHFYRDNWPCKVMDKHMSILAKQHVETRFIKVHAEKAPFLTEKLRVVVLPTLALVKNAKVEDYVVGFDELGGKDDFSTEDLEERIAKAQVIFLDGEGPANPSKQAAASKRSVRQSDTGNSDSD

SEQ ID NO: 13588 - protein, 210 aa, Triticum aestivum
  peptide (1)..(210): Ceres Seq. ID no. 15222092
  misc_feature (115)..(153): Pfam Name: Pfam Description:  Thioredoxin
  misc_feature (1)..(210): NCBI GI NO: 40253924 NR Description: putative ATP binding protein associated with celldifferentiation
  misc_feature (1)..(210): NCBI GI NO: 15224267 NR Description: ATP binding protein -related
  misc_feature (1)..(210): NCBI GI NO: 18404574 NR Description: expressed protein [Arabidopsis thaliana]
  misc_feature (1)..(210): NCBI GI NO: 21594045 NR Description: putative ATP binding protein
  misc_feature (54)..(210): NCBI GI NO: 26452365 NR Description: unknown protein [Arabidopsis thaliana]
  misc_feature (1)..(210): NCBI GI NO: 28277604 NR Description: Similar to ATP binding protein associated with celldifferentiation
  misc_feature (1)..(210): NCBI GI NO: 18104959 NR Description: ATP binding protein associated with celldifferentiation
  misc_feature (1)..(210): NCBI GI NO: 2342477 NR Description: ATP binding protein [Homo sapiens]
  misc_feature (4)..(210): NCBI GI NO: 25286717 NR Description: ATP binding protein associated with celldifferentiation
  misc_feature (1)..(178): NCBI GI NO: 19683948 NR Description: Similar to ATP binding protein associated with celldifferentiation
MDGVIGQILEKQVLSAAKAVEDKLDEQIAALERLDPDDIEALRERRMLQMRRAAERRAKWRALGHGEYTEVPEKEFFSTAKASERMVCHFYRDNWPCKVMDKHMSILAKQHVETRFIKVHAEKAPFLTEKLRVVVLPTLALVKNAKVEDYVVGFDELGGKDDFSTEDLEERIAKAQVIFLDGEGPANPSKQAAASKRSVRQSDTGNSDSD

SEQ ID NO: 13589 - protein, 164 aa, Triticum aestivum
  peptide (1)..(164): Ceres Seq. ID no. 15222093
  misc_feature (69)..(107): Pfam Name: Pfam Description:  Thioredoxin
  misc_feature (1)..(164): NCBI GI NO: 40253924 NR Description: putative ATP binding protein associated with celldifferentiation
  misc_feature (1)..(164): NCBI GI NO: 15224267 NR Description: ATP binding protein -related
  misc_feature (1)..(164): NCBI GI NO: 18404574 NR Description: expressed protein [Arabidopsis thaliana]
  misc_feature (1)..(164): NCBI GI NO: 21594045 NR Description: putative ATP binding protein
  misc_feature (8)..(164): NCBI GI NO: 26452365 NR Description: unknown protein [Arabidopsis thaliana]
  misc_feature (1)..(164): NCBI GI NO: 28277604 NR Description: Similar to ATP binding protein associated with celldifferentiation
  misc_feature (1)..(164): NCBI GI NO: 18104959 NR Description: ATP binding protein associated with celldifferentiation
  misc_feature (1)..(164): NCBI GI NO: 2342477 NR Description: ATP binding protein [Homo sapiens]
  misc_feature (1)..(164): NCBI GI NO: 25286717 NR Description: ATP binding protein associated with celldifferentiation
  misc_feature (1)..(132): NCBI GI NO: 19683948 NR Description: Similar to ATP binding protein associated with celldifferentiation
MLQMRRAAERRAKWRALGHGEYTEVPEKEFFSTAKASERMVCHFYRDNWPCKVMDKHMSILAKQHVETRFIKVHAEKAPFLTEKLRVVVLPTLALVKNAKVEDYVVGFDELGGKDDFSTEDLEERIAKAQVIFLDGEGPANPSKQAAASKRSVRQSDTGNSDSD

SEQ ID NO: 13590 - DNA, 1393 bp, Triticum aestivum
  misc_feature (1)..(1393): Ceres Seq. ID no. 13598234
acacaaaattccgttcagcgcgtgcagtagagagctccccgcttctcctcatcctcctccccaactccaatactctccacagaaatctccgctccttctcgtcccctctcgctcgcgtgcgcgtgaggtgcgcaatggcggcggcggcggtggcgttgtcgaacggctccggtggcgactccaaggccgagttcgcggaaatatacagcaggctcaaggaggagatgctcgaggaccccgccttcgagttcaccgacgagtcgctccagtggatcgaccgcatgctggattacaatgtcctaggaggaaagtgcaaccgtgggctctctgtcatcgatagctacaagacattgaaaggtgtagatgttttgaggaaggaggagacatttcttgcctgcacccttggttggtgtattgaatggcttcaagcatattttcttgtgcttgatgatatcatggacaactcccagacacgacggggccagccttgctggtttagggtgcctcaggttggccttattgctgtaaacgatgggattatccttcgcaaccatatttcacggatccttcaacgccacttcagaggaaaaccgtattatgttgatctcattgatttgttcaatgaggttgaattcaagacagcttcagggcagttgttggatcttatcactactcacgagggagaaaaggatctcacaaaatataacttgaatgttcaccggcgcattgtgcaatacaagacagcgtactattcattttatcttccggttgcatgtgcattgctgctgtcgggtgagaatttggataacttcggcgatgtaaagaacattcttgttgaaatgggaacatactttcaagttcaggatgattatctagattgttttggagatcctgaatctattggcaagattggaactgacattgaagactacaagtgttcctggttagttgtgcaagctcttgagcatgcagatgagagccaaaagggcattctacttgaaaattatgggaagtcagatccagagtctgttgcaaaagtgaaggatctgtataaagaacttgatctggagacggcatttcacaagtatgagcgggagagctacaataagctgatcgccgacatcgaggcccagccaagcaaagctgttcagaaagttttgatgtctttcctggagaagatctacaagaggcagaagtagagctaagctcttggagaggttgttgtgcctttccgtgctttggtaacttattccatgttctgtgtgtgttggtcttattaccataatgtacagcgtgttattccttccaacaataaactacggtgctattttttagtggtgcgtgaacctgctgtgccataaccatgttatttgaagctctctaatgtttttct

SEQ ID NO: 13591 - protein, 398 aa, Triticum aestivum
  peptide (1)..(398): Ceres Seq. ID no. 13598235
  misc_feature (90)..(361): Pfam Name: Pfam Description:  Polyprenyl synthetase
  misc_feature (54)..(398): NCBI GI NO: 1346033 NR Description: Farnesyl pyrophosphate synthetase
  misc_feature (45)..(398): NCBI GI NO: 18958450 NR Description: farnesyl pyrophosphare synthase [Musa acuminata]
  misc_feature (102)..(398): NCBI GI NO: 25458583 NR Description: probable farnesyl pyrophosphate synthase
  misc_feature (44)..(95): NCBI GI NO: 25458583 NR Description: probable farnesyl pyrophosphate synthase
  misc_feature (59)..(398): NCBI GI NO: 1346029 NR Description: Farnesyl pyrophosphate synthetase 2
  misc_feature (26)..(398): NCBI GI NO: 15238801 NR Description: farnesyl pyrophosphate synthetase 1 (FPS1)
  misc_feature (59)..(398): NCBI GI NO: 1146159 NR Description: farnesyl diphosphate synthase short form
  misc_feature (59)..(398): NCBI GI NO: 7433992 NR Description: farnesyl-pyrophosphate synthetase
  misc_feature (59)..(398): NCBI GI NO: 1076319 NR Description: farnesyl-pyrophosphate synthetase FPS1 -Arabidopsis thaliana
  misc_feature (59)..(398): NCBI GI NO: 1346028 NR Description: Farnesyl pyrophosphate synthetase 1
TKFRSARAVESSPLLLILLPNSNTLHRNLRSFSSPLARVRVRCAMAAAAVALSNGSGGDSKAEFAEIYSRLKEEMLEDPAFEFTDESLQWIDRMLDYNVLGGKCNRGLSVIDSYKTLKGVDVLRKEETFLACTLGWCIEWLQAYFLVLDDIMDNSQTRRGQPCWFRVPQVGLIAVNDGIILRNHISRILQRHFRGKPYYVDLIDLFNEVEFKTASGQLLDLITTHEGEKDLTKYNLNVHRRIVQYKTAYYSFYLPVACALLLSGENLDNFGDVKNILVEMGTYFQVQDDYLDCFGDPESIGKIGTDIEDYKCSWLVVQALEHADESQKGILLENYGKSDPESVAKVKDLYKELDLETAFHKYERESYNKLIADIEAQPSKAVQKVLMSFLEKIYKRQK

SEQ ID NO: 13592 - protein, 354 aa, Triticum aestivum
  peptide (1)..(354): Ceres Seq. ID no. 13598236
  misc_feature (46)..(317): Pfam Name: Pfam Description:  Polyprenyl synthetase
  misc_feature (10)..(354): NCBI GI NO: 1346033 NR Description: Farnesyl pyrophosphate synthetase
  misc_feature (1)..(354): NCBI GI NO: 18958450 NR Description: farnesyl pyrophosphare synthase [Musa acuminata]
  misc_feature (58)..(354): NCBI GI NO: 25458583 NR Description: probable farnesyl pyrophosphate synthase
  misc_feature (1)..(51): NCBI GI NO: 25458583 NR Description: probable farnesyl pyrophosphate synthase
  misc_feature (15)..(354): NCBI GI NO: 1346029 NR Description: Farnesyl pyrophosphate synthetase 2
  misc_feature (1)..(354): NCBI GI NO: 15238801 NR Description: farnesyl pyrophosphate synthetase 1 (FPS1)
  misc_feature (15)..(354): NCBI GI NO: 1146159 NR Description: farnesyl diphosphate synthase short form
  misc_feature (15)..(354): NCBI GI NO: 7433992 NR Description: farnesyl-pyrophosphate synthetase
  misc_feature (15)..(354): NCBI GI NO: 1076319 NR Description: farnesyl-pyrophosphate synthetase FPS1 -Arabidopsis thaliana
  misc_feature (15)..(354): NCBI GI NO: 1346028 NR Description: Farnesyl pyrophosphate synthetase 1
MAAAAVALSNGSGGDSKAEFAEIYSRLKEEMLEDPAFEFTDESLQWIDRMLDYNVLGGKCNRGLSVIDSYKTLKGVDVLRKEETFLACTLGWCIEWLQAYFLVLDDIMDNSQTRRGQPCWFRVPQVGLIAVNDGIILRNHISRILQRHFRGKPYYVDLIDLFNEVEFKTASGQLLDLITTHEGEKDLTKYNLNVHRRIVQYKTAYYSFYLPVACALLLSGENLDNFGDVKNILVEMGTYFQVQDDYLDCFGDPESIGKIGTDIEDYKCSWLVVQALEHADESQKGILLENYGKSDPESVAKVKDLYKELDLETAFHKYERESYNKLIADIEAQPSKAVQKVLMSFLEKIYKRQK

SEQ ID NO: 13593 - protein, 324 aa, Triticum aestivum
  peptide (1)..(324): Ceres Seq. ID no. 13598237
  misc_feature (16)..(287): Pfam Name: Pfam Description:  Polyprenyl synthetase
  misc_feature (1)..(324): NCBI GI NO: 1346033 NR Description: Farnesyl pyrophosphate synthetase
  misc_feature (1)..(324): NCBI GI NO: 18958450 NR Description: farnesyl pyrophosphare synthase [Musa acuminata]
  misc_feature (28)..(324): NCBI GI NO: 25458583 NR Description: probable farnesyl pyrophosphate synthase
  misc_feature (1)..(21): NCBI GI NO: 25458583 NR Description: probable farnesyl pyrophosphate synthase
  misc_feature (1)..(324): NCBI GI NO: 1346029 NR Description: Farnesyl pyrophosphate synthetase 2
  misc_feature (1)..(324): NCBI GI NO: 15238801 NR Description: farnesyl pyrophosphate synthetase 1 (FPS1)
  misc_feature (1)..(324): NCBI GI NO: 1146159 NR Description: farnesyl diphosphate synthase short form
  misc_feature (1)..(324): NCBI GI NO: 7433992 NR Description: farnesyl-pyrophosphate synthetase
  misc_feature (1)..(324): NCBI GI NO: 1076319 NR Description: farnesyl-pyrophosphate synthetase FPS1 -Arabidopsis thaliana
  misc_feature (1)..(324): NCBI GI NO: 1346028 NR Description: Farnesyl pyrophosphate synthetase 1
MLEDPAFEFTDESLQWIDRMLDYNVLGGKCNRGLSVIDSYKTLKGVDVLRKEETFLACTLGWCIEWLQAYFLVLDDIMDNSQTRRGQPCWFRVPQVGLIAVNDGIILRNHISRILQRHFRGKPYYVDLIDLFNEVEFKTASGQLLDLITTHEGEKDLTKYNLNVHRRIVQYKTAYYSFYLPVACALLLSGENLDNFGDVKNILVEMGTYFQVQDDYLDCFGDPESIGKIGTDIEDYKCSWLVVQALEHADESQKGILLENYGKSDPESVAKVKDLYKELDLETAFHKYERESYNKLIADIEAQPSKAVQKVLMSFLEKIYKRQK

SEQ ID NO: 13594 - DNA, 1603 bp, Triticum aestivum
  misc_feature (1)..(1603): Ceres Seq. ID no. 12616843
tccaaatcgaaaaatttctaagaaaagaggtctcctgaactaaaaagaagcccttctctctcctccaaccgccggtggtcgctccgtcgctcgccatggcttccgggtcctcggccgccgcacgtcgccttctgctattgcgccaccgccgccgccacctcgttcccaatcaccacttctcttcctcctcggcggacgaagtgctggacgggggccgcgtcaagatcttcgatcgcgatctgaagcgccgacaccgggaccgggcggcgtgggcgatgcgggaaactgacccactggtagacgcggtcgccgataacctcctcgaccgcctcgaggactgcaggaaggcgttcccctcggcgctctgcctcggcggttcggccggcgccgtccgccggtcgcttcgcggccgcggtggaatcgagaaattgaccatgatggacatgtcggtagacatggtgaacaagtggcgggagttggagagtgctactgacgacggccccgagatgaactttatcgttggagatgaagagtatcttcctatgaaagagaactcccaggatttgataatgagctgtcttgggctacattggacaaatgatctacctggagcaatgatacagtgtaggttggcgttgaagcctgatggcctttttcttgcagcaattcttggcggggagactctgaaggaactaagaattgcatgcactattgctcaaatggaacgtgagggaggcatcagtcctcgaatgtcgccattagcacaagtccgtgatgcaggaaaccttttgtcaagggcaggcttcgcccttccaggagttgatgtagatcgatatacagtcaagtacaatagtgctcttgaacttgtggaacatcttagagcaatggcagaaacgaatgctctctttcaaagaagccatatattaaagagagatacagcactagctactgcagccatttaccagtcaatgtttgggttagaagatggaaccattccagcaacctttcaggtaatttacatgactgggtggaaggagcattcatcacagcaaaagcctaagagaaggggttctgccactgtatcatttggtgacataaggaaacaatttggttccaaccaagactgaagaactttatcagctatgaaaacatctctcgaggaaggaaaaggaaacccctatttgctcacaacagaacttggggtttccgaggcttcccatttgtggaaaaagtgtactctgttggttcccaccaagattcgcggaagcgttccttgcatcgcacacaatcctcctcctgtgcatctgggttgatctcgacacgccctgaaaactggaagcggatcatggagtggaagaaggagatgctatatatttgtactccgaccctagcctacgtgtttccactgtatgcaacaaatatcccatcacatggaaaatgatatttttgtagaaaaaatgttgtgatagctttcgccaaatctcattgaagttctaactgaaacttatttgctttgagttgtgaacttatttggtttggagaccttttatgttacattgtgagacatgctatccctatctatctatctatctatctatctatc

SEQ ID NO: 13595 - protein, 343 aa, Triticum aestivum
  peptide (1)..(343): Ceres Seq. ID no. 12616844
  misc_feature (56)..(201): Pfam Name: Pfam Description:  ubiE/COQ5 methyltransferase family
  misc_feature (38)..(339): NCBI GI NO: 15219953 NR Description: unknown protein; protein id: At1g22800.1
  misc_feature (38)..(305): NCBI GI NO: 6648045 NR Description: Hypothetical protein At1g22800
  misc_feature (44)..(332): NCBI GI NO: 22968351 NR Description: hypothetical protein [Rhodospirillum rubrum]
  misc_feature (42)..(336): NCBI GI NO: 40018642 NR Description: chromosome 20 open reading frame 7 isoform 1
  misc_feature (42)..(336): NCBI GI NO: 34858816 NR Description: similar to dJ842G6.1.1 (novel protein)
  misc_feature (44)..(334): NCBI GI NO: 19922210 NR Description: CG8067-PA [Drosophila melanogaster]
  misc_feature (42)..(336): NCBI GI NO: 31201829 NR Description: ENSANGP00000018272 [Anopheles gambiae]
  misc_feature (141)..(336): NCBI GI NO: 13559240 NR Description: dJ842G6.1.1 (novel protein) [Homo sapiens]
  misc_feature (44)..(337): NCBI GI NO: 23502732 NR Description: conserved hypothetical protein
  misc_feature (44)..(337): NCBI GI NO: 17986466 NR Description: BIOTIN SYNTHESIS PROTEIN BIOC
MASGSSAAARRLLLLRHRRRHLVPNHHFSSSSADEVLDGGRVKIFDRDLKRRHRDRAAWAMRETDPLVDAVADNLLDRLEDCRKAFPSALCLGGSAGAVRRSLRGRGGIEKLTMMDMSVDMVNKWRELESATDDGPEMNFIVGDEEYLPMKENSQDLIMSCLGLHWTNDLPGAMIQCRLALKPDGLFLAAILGGETLKELRIACTIAQMEREGGISPRMSPLAQVRDAGNLLSRAGFALPGVDVDRYTVKYNSALELVEHLRAMAETNALFQRSHILKRDTALATAAIYQSMFGLEDGTIPATFQVIYMTGWKEHSSQQKPKRRGSATVSFGDIRKQFGSNQD

SEQ ID NO: 13596 - protein, 283 aa, Triticum aestivum
  peptide (1)..(283): Ceres Seq. ID no. 12616845
  misc_feature (1)..(141): Pfam Name: Pfam Description:  ubiE/COQ5 methyltransferase family
  misc_feature (1)..(279): NCBI GI NO: 15219953 NR Description: unknown protein; protein id: At1g22800.1
  misc_feature (1)..(245): NCBI GI NO: 6648045 NR Description: Hypothetical protein At1g22800
  misc_feature (1)..(272): NCBI GI NO: 22968351 NR Description: hypothetical protein [Rhodospirillum rubrum]
  misc_feature (1)..(276): NCBI GI NO: 40018642 NR Description: chromosome 20 open reading frame 7 isoform 1
  misc_feature (1)..(276): NCBI GI NO: 34858816 NR Description: similar to dJ842G6.1.1 (novel protein)
  misc_feature (1)..(274): NCBI GI NO: 19922210 NR Description: CG8067-PA [Drosophila melanogaster]
  misc_feature (1)..(276): NCBI GI NO: 31201829 NR Description: ENSANGP00000018272 [Anopheles gambiae]
  misc_feature (81)..(276): NCBI GI NO: 13559240 NR Description: dJ842G6.1.1 (novel protein) [Homo sapiens]
  misc_feature (1)..(277): NCBI GI NO: 23502732 NR Description: conserved hypothetical protein
  misc_feature (1)..(277): NCBI GI NO: 17986466 NR Description: BIOTIN SYNTHESIS PROTEIN BIOC
MRETDPLVDAVADNLLDRLEDCRKAFPSALCLGGSAGAVRRSLRGRGGIEKLTMMDMSVDMVNKWRELESATDDGPEMNFIVGDEEYLPMKENSQDLIMSCLGLHWTNDLPGAMIQCRLALKPDGLFLAAILGGETLKELRIACTIAQMEREGGISPRMSPLAQVRDAGNLLSRAGFALPGVDVDRYTVKYNSALELVEHLRAMAETNALFQRSHILKRDTALATAAIYQSMFGLEDGTIPATFQVIYMTGWKEHSSQQKPKRRGSATVSFGDIRKQFGSNQD

SEQ ID NO: 13597 - protein, 230 aa, Triticum aestivum
  peptide (1)..(230): Ceres Seq. ID no. 12616846
  misc_feature (1)..(88): Pfam Name: Pfam Description:  ubiE/COQ5 methyltransferase family
  misc_feature (1)..(226): NCBI GI NO: 15219953 NR Description: unknown protein; protein id: At1g22800.1
  misc_feature (1)..(192): NCBI GI NO: 6648045 NR Description: Hypothetical protein At1g22800
  misc_feature (1)..(219): NCBI GI NO: 22968351 NR Description: hypothetical protein [Rhodospirillum rubrum]
  misc_feature (1)..(223): NCBI GI NO: 40018642 NR Description: chromosome 20 open reading frame 7 isoform 1
  misc_feature (1)..(223): NCBI GI NO: 34858816 NR Description: similar to dJ842G6.1.1 (novel protein)
  misc_feature (1)..(221): NCBI GI NO: 19922210 NR Description: CG8067-PA [Drosophila melanogaster]
  misc_feature (1)..(223): NCBI GI NO: 31201829 NR Description: ENSANGP00000018272 [Anopheles gambiae]
  misc_feature (28)..(223): NCBI GI NO: 13559240 NR Description: dJ842G6.1.1 (novel protein) [Homo sapiens]
  misc_feature (1)..(224): NCBI GI NO: 23502732 NR Description: conserved hypothetical protein
  misc_feature (1)..(224): NCBI GI NO: 17986466 NR Description: BIOTIN SYNTHESIS PROTEIN BIOC
MMDMSVDMVNKWRELESATDDGPEMNFIVGDEEYLPMKENSQDLIMSCLGLHWTNDLPGAMIQCRLALKPDGLFLAAILGGETLKELRIACTIAQMEREGGISPRMSPLAQVRDAGNLLSRAGFALPGVDVDRYTVKYNSALELVEHLRAMAETNALFQRSHILKRDTALATAAIYQSMFGLEDGTIPATFQVIYMTGWKEHSSQQKPKRRGSATVSFGDIRKQFGSNQD

SEQ ID NO: 13598 - DNA, 1061 bp, Triticum aestivum
  misc_feature (1)..(1061): Ceres Seq. ID no. 13584254
gaaaaacccacgcgaccgagaccagcagcagcaccacctcctccctccatcctgatccgatctgactgagccggccatggcggttagggtttggctctccgccatcctcctcgccttcctcctcgccgcctcccccttcgcccaagttgctagagctcagtctgaggaagatgctgctatgcaagaagttgttgatggggctgatctaggatatgtgggtgatgatactccggtttccagtgaagagcctttaagccctgctcctggtgtggagactgtttgcgtcttccccaaaaacgctgggaaaattgtaccagcaggtgaagaaactgagcttttggttggcctgcaaaatgagggtgaatcaactttgaatgttgttgctgtccattcaaccctgcatcttccttatgatcacaaaatgtatggacaaaaccttacagttcagagtttctacaacgcgtcagttcctgtctctgtgcaagcaacctttccctatacatttgccgtgagcaaattcttgcagcctggagcatatgatcttgttggttacattgtgtacgagattgatcagcacccttaccagaacgtattctacaatggcaccattgaggttgttgaggtcggagggttactgagtgttgaatctgtgttccttattacccttggaattgcacttcttggtctcctaggattgtgggcttatggtcaagtgcaacagctctcgaagaaaacaaagaaaggccccaaggtggaactcggaactggaacaactgacgccaacatggacgagtggctggagggtaccgcgtttgcaaaggacaaggccaagaaaaacaaatagattcgaggttgatgggcctagctagacatttcaggatctagaatgagacaaatcgagggtagcccttcacaagtaacctggatagatgagagagcagaggtgtttgaactagtctcgtggctgcacatcttgttgacaccattttcgaccttgctgtgtactttacagatagttttccttgaaacacaattttgttgaaggtatatgttatctatgg

SEQ ID NO: 13599 - protein, 255 aa, Triticum aestivum
  peptide (1)..(255): Ceres Seq. ID no. 13584255
  misc_feature (7)..(255): NCBI GI NO: 21555380 NR Description: putative signal sequence receptor, alpha subunit
  misc_feature (7)..(255): NCBI GI NO: 18399609 NR Description: signal sequence receptor, alpha subunit
  misc_feature (7)..(255): NCBI GI NO: 25335776 NR Description: hypothetical protein At2g21160
  misc_feature (10)..(255): NCBI GI NO: 547391 NR Description: alpha-subunit; putative
  misc_feature (124)..(255): NCBI GI NO: 15227250 NR Description: TRAP protein -related [Arabidopsis thaliana]
  misc_feature (28)..(241): NCBI GI NO: 4507237 NR Description: signal sequence receptor, alpha; TRAP alpha
  misc_feature (28)..(241): NCBI GI NO: 34783867 NR Description: Unknown (protein for MGC:64448) [Xenopus laevis]
  misc_feature (28)..(241): NCBI GI NO: 1174450 NR Description: TRANSLOCON-ASSOCIATED PROTEIN
MAVRVWLSAILLAFLLAASPFAQVARAQSEEDAAMQEVVDGADLGYVGDDTPVSSEEPLSPAPGVETVCVFPKNAGKIVPAGEETELLVGLQNEGESTLNVVAVHSTLHLPYDHKMYGQNLTVQSFYNASVPVSVQATFPYTFAVSKFLQPGAYDLVGYIVYEIDQHPYQNVFYNGTIEVVEVGGLLSVESVFLITLGIALLGLLGLWAYGQVQQLSKKTKKGPKVELGTGTTDANMDEWLEGTAFAKDKAKKNK

SEQ ID NO: 13600 - protein, 221 aa, Triticum aestivum
  peptide (1)..(221): Ceres Seq. ID no. 13584256
  misc_feature (1)..(221): NCBI GI NO: 21555380 NR Description: putative signal sequence receptor, alpha subunit
  misc_feature (1)..(221): NCBI GI NO: 18399609 NR Description: signal sequence receptor, alpha subunit
  misc_feature (1)..(221): NCBI GI NO: 25335776 NR Description: hypothetical protein At2g21160
  misc_feature (1)..(221): NCBI GI NO: 547391 NR Description: alpha-subunit; putative
  misc_feature (90)..(221): NCBI GI NO: 15227250 NR Description: TRAP protein -related [Arabidopsis thaliana]
  misc_feature (1)..(207): NCBI GI NO: 4507237 NR Description: signal sequence receptor, alpha; TRAP alpha
  misc_feature (1)..(207): NCBI GI NO: 34783867 NR Description: Unknown (protein for MGC:64448) [Xenopus laevis]
  misc_feature (1)..(207): NCBI GI NO: 1174450 NR Description: TRANSLOCON-ASSOCIATED PROTEIN
MQEVVDGADLGYVGDDTPVSSEEPLSPAPGVETVCVFPKNAGKIVPAGEETELLVGLQNEGESTLNVVAVHSTLHLPYDHKMYGQNLTVQSFYNASVPVSVQATFPYTFAVSKFLQPGAYDLVGYIVYEIDQHPYQNVFYNGTIEVVEVGGLLSVESVFLITLGIALLGLLGLWAYGQVQQLSKKTKKGPKVELGTGTTDANMDEWLEGTAFAKDKAKKNK

SEQ ID NO: 13601 - protein, 140 aa, Triticum aestivum
  peptide (1)..(140): Ceres Seq. ID no. 13584257
  misc_feature (1)..(140): NCBI GI NO: 21555380 NR Description: putative signal sequence receptor, alpha subunit
  misc_feature (1)..(140): NCBI GI NO: 18399609 NR Description: signal sequence receptor, alpha subunit
  misc_feature (1)..(140): NCBI GI NO: 25335776 NR Description: hypothetical protein At2g21160
  misc_feature (1)..(140): NCBI GI NO: 547391 NR Description: alpha-subunit; putative
  misc_feature (9)..(140): NCBI GI NO: 15227250 NR Description: TRAP protein -related [Arabidopsis thaliana]
  misc_feature (1)..(126): NCBI GI NO: 4507237 NR Description: signal sequence receptor, alpha; TRAP alpha
  misc_feature (1)..(126): NCBI GI NO: 34783867 NR Description: Unknown (protein for MGC:64448) [Xenopus laevis]
  misc_feature (1)..(126): NCBI GI NO: 1174450 NR Description: TRANSLOCON-ASSOCIATED PROTEIN
MYGQNLTVQSFYNASVPVSVQATFPYTFAVSKFLQPGAYDLVGYIVYEIDQHPYQNVFYNGTIEVVEVGGLLSVESVFLITLGIALLGLLGLWAYGQVQQLSKKTKKGPKVELGTGTTDANMDEWLEGTAFAKDKAKKNK

SEQ ID NO: 13602 - DNA, 486 bp, Triticum aestivum
  misc_feature (1)..(486): Ceres Seq. ID no. 13584174
tcgtctccgtttgaagacaaggagcaaagttggaaaccgccgccgattccctgtcctgcccctcctcgtagcataccgcttctagtataaccttgccctccggggggcacagcctctcctccttcccctgaccacctcctcagttttttctcaccctcctcaatggcgaatctgccgccgtccctcgccgccggcccctccttcggcgcgccctccccgcccccgctcccgcccccgtccggctcgtcggccgcggcgccgcccgccggggggagggaccggaagatggtgtccgcggagcagctcgtgctcgacctctgcgacccggagctgcgcgagaacgccctcctcgagctctccaagaagcgagagatttttcaagaccttgctccactgctgtggcactcctttggcaccgttgctgcactgctccaggagattgtgtcaatctacccttcactttcacctcctactttgtcgccagtt

SEQ ID NO: 13603 - protein, 108 aa, Triticum aestivum
  peptide (1)..(108): Ceres Seq. ID no. 13584175
  misc_feature (47)..(107): Pfam Name: Pfam Description:  Cell differentiation family, Rcd1-like
  misc_feature (1)..(107): NCBI GI NO: 34897134 NR Description: putative cell differentiation protein
  misc_feature (1)..(107): NCBI GI NO: 34899762 NR Description: putative cell differentiation protein
  misc_feature (1)..(107): NCBI GI NO: 15232369 NR Description: cell differentiation protein -related
  misc_feature (1)..(107): NCBI GI NO: 21537250 NR Description: putative cell differentiation protein
  misc_feature (19)..(107): NCBI GI NO: 15239962 NR Description: expressed protein [Arabidopsis thaliana]
  misc_feature (11)..(107): NCBI GI NO: 9294407 NR Description: RCD1 [Arabidopsis thaliana]
  misc_feature (28)..(106): NCBI GI NO: 10946722 NR Description: rcd1
  misc_feature (39)..(106): NCBI GI NO: 4885579 NR Description: RCD1 required for cell differentiation1 homolog
  misc_feature (39)..(106): NCBI GI NO: 13937977 NR Description: rcd1 (required for cell differentiation, S
  misc_feature (28)..(106): NCBI GI NO: 38174128 NR Description: Unknown (protein for MGC:76003)
MANLPPSLAAGPSFGAPSPPPLPPPSGSSAAAPPAGGRDRKMVSAEQLVLDLCDPELRENALLELSKKREIFQDLAPLLWHSFGTVAALLQEIVSIYPSLSPPTLSPV

SEQ ID NO: 13604 - protein, 67 aa, Triticum aestivum
  peptide (1)..(67): Ceres Seq. ID no. 13584176
  misc_feature (6)..(66): Pfam Name: Pfam Description:  Cell differentiation family, Rcd1-like
  misc_feature (1)..(66): NCBI GI NO: 34897134 NR Description: putative cell differentiation protein
  misc_feature (1)..(66): NCBI GI NO: 34899762 NR Description: putative cell differentiation protein
  misc_feature (1)..(66): NCBI GI NO: 15232369 NR Description: cell differentiation protein -related
  misc_feature (1)..(66): NCBI GI NO: 21537250 NR Description: putative cell differentiation protein
  misc_feature (1)..(66): NCBI GI NO: 15239962 NR Description: expressed protein [Arabidopsis thaliana]
  misc_feature (1)..(66): NCBI GI NO: 9294407 NR Description: RCD1 [Arabidopsis thaliana]
  misc_feature (1)..(65): NCBI GI NO: 10946722 NR Description: rcd1
  misc_feature (1)..(65): NCBI GI NO: 4885579 NR Description: RCD1 required for cell differentiation1 homolog
  misc_feature (1)..(65): NCBI GI NO: 13937977 NR Description: rcd1 (required for cell differentiation, S
  misc_feature (1)..(65): NCBI GI NO: 38174128 NR Description: Unknown (protein for MGC:76003)
MVSAEQLVLDLCDPELRENALLELSKKREIFQDLAPLLWHSFGTVAALLQEIVSIYPSLSPPTLSPV

SEQ ID NO: 13605 - DNA, 1092 bp, Triticum aestivum
  misc_feature (1)..(1092): Ceres Seq. ID no. 13584012
aatttctgctaacctgctgctgcggtcgccggcggcgaggaggaggaggaaggggctgagagatggcgggcgccggcggcacgagggagcgggaggaggaagaggaggacgacttcgtctgcctggatccctccttcttcatgaaccgcaactacgagatgaagaccttcacctacggctcccaggagctccagctcctctgcctcagctccgcctgcactgattatgatcttactggacaattagtgtggccaggtgctgttctgatgaacacgtacctatctgaacaccctgagactgtgaaggggcgttcactaattgagttaggatctgggatcggcattaccggcatattgtgcagccgtttctgcaaagaggtggtattgactgatcacaatgatgaagttctagagattataaagaaaaatatagagatgcagtcatgttctggcaatgcggatgcagtgttgactgctgagaagctagaatggggaaatcatgatcatctaagcaatatcattgaaaaacatcctgttggatttgatctcattcttggagccgatatctgcttccagcaagctagcattccatgtctctttgatactgtagagaagcttcttcgtatgcaggccaataaatgtagatttatactggcttatgtatcacgaaccaaagtcatggacgcactggtactgaaggaagctgaaaaacgtggaatgcttgtcgaggaagtggacgggacaagaacaaccatcacagatctcgaaggcgtcatattcgacatcaccctcaaatgacgcctccgatgaaatgcttgggtgacaattccatcagacaggaacaagatgtggagcctcctcccatcaggaaagccaatgttaccgccttcatgatctgctgagctggccctgaacatgatgtggtctctagtccgcatctctccactccatgggagaaaacagttgcacaacaccagcatcagtcctgatatggcgctgattgattcagcgtaacttttaaatgattcgtcggtcgtgacccctttcgctaaatcaagaagcgattcggggtcacgagcatcgcatcgccgtc

SEQ ID NO: 13606 - protein, 244 aa, Triticum aestivum
  peptide (1)..(244): Ceres Seq. ID no. 13584013
  misc_feature (6)..(244): NCBI GI NO: 33146643 NR Description: unknown protein
  misc_feature (3)..(244): NCBI GI NO: 26449997 NR Description: unknown protein [Arabidopsis thaliana]
  misc_feature (119)..(244): NCBI GI NO: 30683273 NR Description: expressed protein [Arabidopsis thaliana]
  misc_feature (3)..(92): NCBI GI NO: 7460191 NR Description: hypothetical protein At2g26810
  misc_feature (3)..(92): NCBI GI NO: 30683273 NR Description: expressed protein [Arabidopsis thaliana]
  misc_feature (58)..(218): NCBI GI NO: 30683042 NR Description: expressed protein [Arabidopsis thaliana]
  misc_feature (58)..(221): NCBI GI NO: 28950234 NR Description: conserved hypothetical protein [Neurospora crassa]
  misc_feature (58)..(218): NCBI GI NO: 20197178 NR Description: hypothetical protein [Arabidopsis thaliana]
  misc_feature (58)..(218): NCBI GI NO: 25407826 NR Description: hypothetical protein At2g26200
  misc_feature (33)..(185): NCBI GI NO: 34877084 NR Description: similar to RIKEN cDNA 2310038H17
MAGAGGTREREEEEEDDFVCLDPSFFMNRNYEMKTFTYGSQELQLLCLSSACTDYDLTGQLVWPGAVLMNTYLSEHPETVKGRSLIELGSGIGITGILCSRFCKEVVLTDHNDEVLEIIKKNIEMQSCSGNADAVLTAEKLEWGNHDHLSNIIEKHPVGFDLILGADICFQQASIPCLFDTVEKLLRMQANKCRFILAYVSRTKVMDALVLKEAEKRGMLVEEVDGTRTTITDLEGVIFDITLK

SEQ ID NO: 13607 - protein, 218 aa, Triticum aestivum
  peptide (1)..(218): Ceres Seq. ID no. 13584014
  misc_feature (1)..(218): NCBI GI NO: 33146643 NR Description: unknown protein
  misc_feature (1)..(218): NCBI GI NO: 26449997 NR Description: unknown protein [Arabidopsis thaliana]
  misc_feature (93)..(218): NCBI GI NO: 30683273 NR Description: expressed protein [Arabidopsis thaliana]
  misc_feature (1)..(66): NCBI GI NO: 7460191 NR Description: hypothetical protein At2g26810
  misc_feature (1)..(66): NCBI GI NO: 30683273 NR Description: expressed protein [Arabidopsis thaliana]
  misc_feature (32)..(192): NCBI GI NO: 30683042 NR Description: expressed protein [Arabidopsis thaliana]
  misc_feature (32)..(195): NCBI GI NO: 28950234 NR Description: conserved hypothetical protein [Neurospora crassa]
  misc_feature (32)..(192): NCBI GI NO: 20197178 NR Description: hypothetical protein [Arabidopsis thaliana]
  misc_feature (32)..(192): NCBI GI NO: 25407826 NR Description: hypothetical protein At2g26200
  misc_feature (7)..(159): NCBI GI NO: 34877084 NR Description: similar to RIKEN cDNA 2310038H17
MNRNYEMKTFTYGSQELQLLCLSSACTDYDLTGQLVWPGAVLMNTYLSEHPETVKGRSLIELGSGIGITGILCSRFCKEVVLTDHNDEVLEIIKKNIEMQSCSGNADAVLTAEKLEWGNHDHLSNIIEKHPVGFDLILGADICFQQASIPCLFDTVEKLLRMQANKCRFILAYVSRTKVMDALVLKEAEKRGMLVEEVDGTRTTITDLEGVIFDITLK

SEQ ID NO: 13608 - protein, 212 aa, Triticum aestivum
  peptide (1)..(212): Ceres Seq. ID no. 13584015
  misc_feature (1)..(212): NCBI GI NO: 33146643 NR Description: unknown protein
  misc_feature (1)..(212): NCBI GI NO: 26449997 NR Description: unknown protein [Arabidopsis thaliana]
  misc_feature (87)..(212): NCBI GI NO: 30683273 NR Description: expressed protein [Arabidopsis thaliana]
  misc_feature (1)..(60): NCBI GI NO: 7460191 NR Description: hypothetical protein At2g26810
  misc_feature (1)..(60): NCBI GI NO: 30683273 NR Description: expressed protein [Arabidopsis thaliana]
  misc_feature (26)..(186): NCBI GI NO: 30683042 NR Description: expressed protein [Arabidopsis thaliana]
  misc_feature (26)..(189): NCBI GI NO: 28950234 NR Description: conserved hypothetical protein [Neurospora crassa]
  misc_feature (26)..(186): NCBI GI NO: 20197178 NR Description: hypothetical protein [Arabidopsis thaliana]
  misc_feature (26)..(186): NCBI GI NO: 25407826 NR Description: hypothetical protein At2g26200
  misc_feature (1)..(153): NCBI GI NO: 34877084 NR Description: similar to RIKEN cDNA 2310038H17
MKTFTYGSQELQLLCLSSACTDYDLTGQLVWPGAVLMNTYLSEHPETVKGRSLIELGSGIGITGILCSRFCKEVVLTDHNDEVLEIIKKNIEMQSCSGNADAVLTAEKLEWGNHDHLSNIIEKHPVGFDLILGADICFQQASIPCLFDTVEKLLRMQANKCRFILAYVSRTKVMDALVLKEAEKRGMLVEEVDGTRTTITDLEGVIFDITLK

SEQ ID NO: 13609 - DNA, 920 bp, Triticum aestivum
  misc_feature (1)..(920): Ceres Seq. ID no. 13503003
attttgactgattagcctcatgtgagcttacacttgcacgtttccaaaattggtctacgctttcacgtggtttactttcttcgtttcaaattgcttaaattttcgcaaagttaactacagacagtgctagtgtagagtagcatcatcagttcactgcgcaccgacagccaaactagcaccggggtccgaggcagacgccatggccgacgacgaggtggtcgtcgcgtccgcggaggagtcgctgaccactccgctgctcgagccagccgcgagcccccgcgacccgtcggtggaggtgagtctgtaccggcggggcgccggcccgcccaaggtcttccggtcgggcctgaggggccctcgccgcgaccgcctcgacgtgcgcggcatccaggcagagcacgagctccgcgccctcttcgccttcaagccgggggtctcccgccgcggcctccggatccggcccgacccggcgaccggccactccgccgtgcccttccgcgacggcgccgccatcgccctcgacggcgagcccaaggtgcaggtgtcgtggaccaagcctgcctcgatgatcgtcgtcggtctgctggtgctggcgttgatggcggtggtggctttcaacggggtgccggagtcgctactgtcgtcgagcgtagtcaaagccctcttctcgccgtggatcctcgccagcgcggttatcgtcttcgtccgtctcaggatgcggccacaagctcctccccgtctcaggatgcggccacaagctcctccatgaacggaaccgagctatggtactgtaataactctcctttgtgatatccagagaagcccttcttctctggtttctcttcaggaattatgtgcaatggagacaaaattccagaataaatgtgtgtgcagtttgcttcaacgcgaataatcatctc

SEQ ID NO: 13610 - protein, 189 aa, Triticum aestivum
  peptide (1)..(189): Ceres Seq. ID no. 13503004
  misc_feature (1)..(120): NCBI GI NO: 34906292 NR Description: unnamed protein product
  misc_feature (1)..(174): NCBI GI NO: 34910596 NR Description: B1131B07.26
  misc_feature (16)..(174): NCBI GI NO: 18409911 NR Description: expressed protein [Arabidopsis thaliana]
  misc_feature (16)..(174): NCBI GI NO: 25373323 NR Description: hypothetical protein F14O23.16
MADDEVVVASAEESLTTPLLEPAASPRDPSVEVSLYRRGAGPPKVFRSGLRGPRRDRLDVRGIQAEHELRALFAFKPGVSRRGLRIRPDPATGHSAVPFRDGAAIALDGEPKVQVSWTKPASMIVVGLLVLALMAVVAFNGVPESLLSSSVVKALFSPWILASAVIVFVRLRMRPQAPPRLRMRPQAPP

SEQ ID NO: 13611 - DNA, 439 bp, Triticum aestivum
  misc_feature (1)..(439): Ceres Seq. ID no. 13655451
acagctcgcccactccctacccatctcgccggcgcgcaggcggcgccgtcccaacatgggatgacgtccgccgtaaaatagggcccccacgaccaaacaaagccccgactagccaccaacatcgaaccccatgaaggcgtctatcaagttccgcgacgacgaccggccgctgatgcgggccaaggtgccgatcggcgtgctcgggctgccgttccagtccggcctctccgccggtggcgatccccgggagctccgcttcgatctctccaccgctttcgcctccgggccagctctccgcttatcgtatcgccccaacgaccctggtctccccttcgccatctccatccgcgccggtgtcggagccctcggctcccctgtccgggcccccttctccctcgccgccgagttcaacctcctctctgccaactccggatctcct

SEQ ID NO: 13612 - protein, 103 aa, Triticum aestivum
  peptide (1)..(103): Ceres Seq. ID no. 13655452
  misc_feature (1)..(102): NCBI GI NO: 28411873 NR Description: OSJNBa0016N23.25
  misc_feature (1)..(102): NCBI GI NO: 15230911 NR Description: expressed protein [Arabidopsis thaliana]
  misc_feature (51)..(99): NCBI GI NO: 21740989 NR Description: OSJNBa0019K04.27
MKASIKFRDDDRPLMRAKVPIGVLGLPFQSGLSAGGDPRELRFDLSTAFASGPALRLSYRPNDPGLPFAISIRAGVGALGSPVRAPFSLAAEFNLLSANSGSP

SEQ ID NO: 13613 - protein, 89 aa, Triticum aestivum
  peptide (1)..(89): Ceres Seq. ID no. 13655453
  misc_feature (1)..(88): NCBI GI NO: 28411873 NR Description: OSJNBa0016N23.25
  misc_feature (1)..(88): NCBI GI NO: 15230911 NR Description: expressed protein [Arabidopsis thaliana]
  misc_feature (37)..(85): NCBI GI NO: 21740989 NR Description: OSJNBa0019K04.27
MRAKVPIGVLGLPFQSGLSAGGDPRELRFDLSTAFASGPALRLSYRPNDPGLPFAISIRAGVGALGSPVRAPFSLAAEFNLLSANSGSP

SEQ ID NO: 13614 - DNA, 1539 bp, Triticum aestivum
  misc_feature (1)..(1539): Ceres Seq. ID no. 15224912
atatcagataatcagagttctggacttgaagtagagttcgatgatgagatcaggctgaagcttcaagagctggagcatgctttacttgatgatggagatgacatcttgttcgaaatttcccaggcgggttgcatcagtgatgaatgggccgatcccatgaaggatgtcttgcttgcaacttctccgaaagaatcggaatcaagcattagttgtgcaggtagcaacagcggagaagcacggaccccaaagcagttgctctttgactgtgccacggcattagctgaatataacgtagatgaagcacaggcaatcataacggacctccggcagatggtctcaatccaaggggacccttctcacaggattgcagcttatctggtggagggccttgctgcaagaatagtagcttcagggacgggcatctacaaggcattgacatgcaaggaccctccaaccctgtatcagctgtcagcaatgcaaatcctctttgagatctgcccatgctatcgatttggtttcatggctgctaattatgccatacttgaagcctgcaaaggcgaagaaaggatgcatattatagactttgacatcaatcaaggcagccagtatattacactgatgcagtttatgaaagatgatgcaaacaagccacgccatttgagaataactggtgtggatgatcacgagacagtacagaggactgttggaggtctgaaggtcattgggcaacgcctggagaagcttgcggaggactgcggaatatcttttgagttcagggcagtgggtgccgacatcggggatgttacacctgcaatgctagattgccgtcccggggaagcactagttgtgaattttgcattccagctgcaccaccttcctgatgaaagtgtttcgatcatgaacgaacgggatcagctccttcgtatggtgaagggccttcaaccaaagcttgtgaccctggttgagcaggatgccaataccaatactgctccatttcagacaaggttccgtgaggtctatgactactactccgctcttttcgattcactggacgcaacacttccaagggaaagtccggacagaatgaatgtggagaggcagtgccttgctagagaaattgttaacatcttggcttgcgaaggccctgatcgcgtggagaggtacgaagttgctgggaaatggagggcgagaatgacgatggctggattcgcaccgtgcccatttagcagcaacgtcatcggaggaataagatcgctgctgagctcgtactgcgacaggtacaagttcgaggaggaccatgggggacttcacttcggctggggagagaaaacgctcatcgtcgcctccgcgtggcaataggccgagctcgctgacttgggttgcattagcactgctgtattttaggagcttctggtgcagagattgtaaaaagggtgtgaaccacggaggagttcttggctgatcttatctaattttaggagtctgcttgtcagaataattgagtttggctgatcgcccgggtgaaaaaaaaaaaaaaaa

SEQ ID NO: 13615 - protein, 452 aa, Triticum aestivum
  peptide (1)..(452): Ceres Seq. ID no. 15224913
  misc_feature (58)..(362): Pfam Name: Pfam Description:  GRAS family transcription factor
  misc_feature (1)..(452): NCBI GI NO: 34907424 NR Description: scarecrow-like protein
  misc_feature (1)..(452): NCBI GI NO: 15218990 NR Description: scarecrow-like transcription factor 1 (SCL1)
  misc_feature (103)..(452): NCBI GI NO: 11358822 NR Description: scarecrow-like protein 1
  misc_feature (16)..(451): NCBI GI NO: 37533564 NR Description: putative SCARECROW gene regulator-like
  misc_feature (55)..(452): NCBI GI NO: 15238903 NR Description: phytochrome A signal transduction 1 (PAT1)
  misc_feature (55)..(452): NCBI GI NO: 26450054 NR Description: putative SCARECROW gene regulator
  misc_feature (83)..(451): NCBI GI NO: 25989334 NR Description: chitin-inducible gibberellin-responsive protein
  misc_feature (83)..(452): NCBI GI NO: 23397333 NR Description: putative scarecrow protein [Arabidopsis thaliana]
  misc_feature (83)..(452): NCBI GI NO: 25405382 NR Description: scarecrow-like protein
  misc_feature (83)..(452): NCBI GI NO: 30694805 NR Description: scarecrow-like transcription factor 5 (SCL5)
ISDNQSSGLEVEFDDEIRLKLQELEHALLDDGDDILFEISQAGCISDEWADPMKDVLLATSPKESESSISCAGSNSGEARTPKQLLFDCATALAEYNVDEAQAIITDLRQMVSIQGDPSHRIAAYLVEGLAARIVASGTGIYKALTCKDPPTLYQLSAMQILFEICPCYRFGFMAANYAILEACKGEERMHIIDFDINQGSQYITLMQFMKDDANKPRHLRITGVDDHETVQRTVGGLKVIGQRLEKLAEDCGISFEFRAVGADIGDVTPAMLDCRPGEALVVNFAFQLHHLPDESVSIMNERDQLLRMVKGLQPKLVTLVEQDANTNTAPFQTRFREVYDYYSALFDSLDATLPRESPDRMNVERQCLAREIVNILACEGPDRVERYEVAGKWRARMTMAGFAPCPFSSNVIGGIRSLLSSYCDRYKFEEDHGGLHFGWGEKTLIVASAWQ

SEQ ID NO: 13616 - protein, 400 aa, Triticum aestivum
  peptide (1)..(400): Ceres Seq. ID no. 15224914
  misc_feature (6)..(310): Pfam Name: Pfam Description:  GRAS family transcription factor
  misc_feature (1)..(400): NCBI GI NO: 34907424 NR Description: scarecrow-like protein
  misc_feature (1)..(400): NCBI GI NO: 15218990 NR Description: scarecrow-like transcription factor 1 (SCL1)
  misc_feature (51)..(400): NCBI GI NO: 11358822 NR Description: scarecrow-like protein 1
  misc_feature (1)..(399): NCBI GI NO: 37533564 NR Description: putative SCARECROW gene regulator-like
  misc_feature (3)..(400): NCBI GI NO: 15238903 NR Description: phytochrome A signal transduction 1 (PAT1)
  misc_feature (3)..(400): NCBI GI NO: 26450054 NR Description: putative SCARECROW gene regulator
  misc_feature (31)..(399): NCBI GI NO: 25989334 NR Description: chitin-inducible gibberellin-responsive protein
  misc_feature (31)..(400): NCBI GI NO: 23397333 NR Description: putative scarecrow protein [Arabidopsis thaliana]
  misc_feature (31)..(400): NCBI GI NO: 25405382 NR Description: scarecrow-like protein
  misc_feature (31)..(400): NCBI GI NO: 30694805 NR Description: scarecrow-like transcription factor 5 (SCL5)
MKDVLLATSPKESESSISCAGSNSGEARTPKQLLFDCATALAEYNVDEAQAIITDLRQMVSIQGDPSHRIAAYLVEGLAARIVASGTGIYKALTCKDPPTLYQLSAMQILFEICPCYRFGFMAANYAILEACKGEERMHIIDFDINQGSQYITLMQFMKDDANKPRHLRITGVDDHETVQRTVGGLKVIGQRLEKLAEDCGISFEFRAVGADIGDVTPAMLDCRPGEALVVNFAFQLHHLPDESVSIMNERDQLLRMVKGLQPKLVTLVEQDANTNTAPFQTRFREVYDYYSALFDSLDATLPRESPDRMNVERQCLAREIVNILACEGPDRVERYEVAGKWRARMTMAGFAPCPFSSNVIGGIRSLLSSYCDRYKFEEDHGGLHFGWGEKTLIVASAWQ

SEQ ID NO: 13617 - protein, 342 aa, Triticum aestivum
  peptide (1)..(342): Ceres Seq. ID no. 15224915
  misc_feature (1)..(252): Pfam Name: Pfam Description:  GRAS family transcription factor
  misc_feature (1)..(342): NCBI GI NO: 34907424 NR Description: scarecrow-like protein
  misc_feature (1)..(342): NCBI GI NO: 15218990 NR Description: scarecrow-like transcription factor 1 (SCL1)
  misc_feature (1)..(342): NCBI GI NO: 11358822 NR Description: scarecrow-like protein 1
  misc_feature (1)..(341): NCBI GI NO: 37533564 NR Description: putative SCARECROW gene regulator-like
  misc_feature (1)..(342): NCBI GI NO: 15238903 NR Description: phytochrome A signal transduction 1 (PAT1)
  misc_feature (1)..(342): NCBI GI NO: 26450054 NR Description: putative SCARECROW gene regulator
  misc_feature (1)..(341): NCBI GI NO: 25989334 NR Description: chitin-inducible gibberellin-responsive protein
  misc_feature (1)..(342): NCBI GI NO: 23397333 NR Description: putative scarecrow protein [Arabidopsis thaliana]
  misc_feature (1)..(342): NCBI GI NO: 25405382 NR Description: scarecrow-like protein
  misc_feature (1)..(342): NCBI GI NO: 30694805 NR Description: scarecrow-like transcription factor 5 (SCL5)
MVSIQGDPSHRIAAYLVEGLAARIVASGTGIYKALTCKDPPTLYQLSAMQILFEICPCYRFGFMAANYAILEACKGEERMHIIDFDINQGSQYITLMQFMKDDANKPRHLRITGVDDHETVQRTVGGLKVIGQRLEKLAEDCGISFEFRAVGADIGDVTPAMLDCRPGEALVVNFAFQLHHLPDESVSIMNERDQLLRMVKGLQPKLVTLVEQDANTNTAPFQTRFREVYDYYSALFDSLDATLPRESPDRMNVERQCLAREIVNILACEGPDRVERYEVAGKWRARMTMAGFAPCPFSSNVIGGIRSLLSSYCDRYKFEEDHGGLHFGWGEKTLIVASAWQ

SEQ ID NO: 13618 - DNA, 1278 bp, Triticum aestivum
  misc_feature (1)..(1278): Ceres Seq. ID no. 13597033
cacttccgccagcgaccgatccattcccacttcgcacagacgcatccgcatccgcatccacccccggtagtacagatcggatccccacccatggccgggcacttcgacctccagggcaggcatggcaagtcccgcgtccgcgtctcccgcgtctggcgccgccccgccgatgccggcggccacctcttcgtcgagtggagcgtcgccgtcagcgtcgtctccgactgcctcccatcctacacctccgacgacaactccgccatcgtcgccaccgactccatcaagaacaccgtgtatgtgaaggccaaggagtgcacggaggtggtgtccatggaggaattcgcggtcatcctcgggaggcatttcacctcactgtacccgcaggtctcagaggctgcagtgacaatcgtggagcgcccatgggagcgtgtggctgtggacgggaagccccattcgcatgggttcaaacttggttctgaaaagcacaccacagaggtcacggtgaagaagtctggaagcctgcttataaattctgggatacaaggatactccctgctaaagacaactcagtctggatttgaaggattcatgagggaccgctacactcttcttcctgaaacaagagaaagaattgtagcaacagaagtaactgcttggtggaggtatccgttcgagcatatttcccagcttccgtcaaagccattttgcttcacacaaagataccaggatgtaaagaaggttcttgcagacacattctttggtccttctgatgttggtgtatatagtccatccgtgcagaatacattatacctcatggctagggaagttcttaccaggttcccagacatagcatccgttcagcttaggatgccaaacctccactttcttcccgtgaacctaggggggaaagaaaatccaggattggtgaagtttgctgatgatgtgtacatgccgactgacgagccgcatggaaccatcgaagcaacgttgagccgtgccaactcaaagctgtaatttcacttgatgcttgtggccaggctcatgatttggtttggtttcttgaagatcacaatcgccaataaacaaagtgatagggggaaagctagcacaaccaccccttgcaaaagggtaaaaggacgtaaactttgcatatgtattcagctaattgacttgtacatggctagctagagttcccccatcgtaaattttactgttgtacaaaaccttcaatgtttcgttgtctccacaatgctataatatagcctgttttttctttcc

SEQ ID NO: 13619 - protein, 337 aa, Triticum aestivum
  peptide (1)..(337): Ceres Seq. ID no. 15222019
  misc_feature (175)..(328): Pfam Name: Pfam Description:  Uricase
  misc_feature (31)..(337): NCBI GI NO: 34908558 NR Description: putative uricase
  misc_feature (37)..(337): NCBI GI NO: 6175090 NR Description: Uricase (Urate oxidase) (Nodulin 35 homolog)
  misc_feature (37)..(337): NCBI GI NO: 15225267 NR Description: uricase subunit -related [Arabidopsis thaliana]
  misc_feature (35)..(337): NCBI GI NO: 11414898 NR Description: uricase [Lotus japonicus]
  misc_feature (35)..(337): NCBI GI NO: 6175091 NR Description: Uricase II
  misc_feature (35)..(337): NCBI GI NO: 4996846 NR Description: uricase (Nod-35) [Medicago sativa]
  misc_feature (35)..(337): NCBI GI NO: 170031 NR Description: nodulin 35
  misc_feature (35)..(337): NCBI GI NO: 81803 NR Description: urate oxidase (EC 1.7.3.3) - soybean
  misc_feature (35)..(337): NCBI GI NO: 7242493 NR Description: urate oxidase [Cicer arietinum]
  misc_feature (35)..(337): NCBI GI NO: 170033 NR Description: uricase II subunit
HFRQRPIHSHFAQTHPHPHPPPVVQIGSPPMAGHFDLQGRHGKSRVRVSRVWRRPADAGGHLFVEWSVAVSVVSDCLPSYTSDDNSAIVATDSIKNTVYVKAKECTEVVSMEEFAVILGRHFTSLYPQVSEAAVTIVERPWERVAVDGKPHSHGFKLGSEKHTTEVTVKKSGSLLINSGIQGYSLLKTTQSGFEGFMRDRYTLLPETRERIVATEVTAWWRYPFEHISQLPSKPFCFTQRYQDVKKVLADTFFGPSDVGVYSPSVQNTLYLMAREVLTRFPDIASVQLRMPNLHFLPVNLGGKENPGLVKFADDVYMPTDEPHGTIEATLSRANSKL

SEQ ID NO: 13620 - protein, 307 aa, Triticum aestivum
  peptide (1)..(307): Ceres Seq. ID no. 15222020
  misc_feature (145)..(298): Pfam Name: Pfam Description:  Uricase
  misc_feature (1)..(307): NCBI GI NO: 34908558 NR Description: putative uricase
  misc_feature (7)..(307): NCBI GI NO: 6175090 NR Description: Uricase (Urate oxidase) (Nodulin 35 homolog)
  misc_feature (7)..(307): NCBI GI NO: 15225267 NR Description: uricase subunit -related [Arabidopsis thaliana]
  misc_feature (5)..(307): NCBI GI NO: 11414898 NR Description: uricase [Lotus japonicus]
  misc_feature (5)..(307): NCBI GI NO: 6175091 NR Description: Uricase II
  misc_feature (5)..(307): NCBI GI NO: 4996846 NR Description: uricase (Nod-35) [Medicago sativa]
  misc_feature (5)..(307): NCBI GI NO: 170031 NR Description: nodulin 35
  misc_feature (5)..(307): NCBI GI NO: 81803 NR Description: urate oxidase (EC 1.7.3.3) - soybean
  misc_feature (5)..(307): NCBI GI NO: 7242493 NR Description: urate oxidase [Cicer arietinum]
  misc_feature (5)..(307): NCBI GI NO: 170033 NR Description: uricase II subunit
MAGHFDLQGRHGKSRVRVSRVWRRPADAGGHLFVEWSVAVSVVSDCLPSYTSDDNSAIVATDSIKNTVYVKAKECTEVVSMEEFAVILGRHFTSLYPQVSEAAVTIVERPWERVAVDGKPHSHGFKLGSEKHTTEVTVKKSGSLLINSGIQGYSLLKTTQSGFEGFMRDRYTLLPETRERIVATEVTAWWRYPFEHISQLPSKPFCFTQRYQDVKKVLADTFFGPSDVGVYSPSVQNTLYLMAREVLTRFPDIASVQLRMPNLHFLPVNLGGKENPGLVKFADDVYMPTDEPHGTIEATLSRANSKL

SEQ ID NO: 13621 - protein, 227 aa, Triticum aestivum
  peptide (1)..(227): Ceres Seq. ID no. 15222021
  misc_feature (65)..(218): Pfam Name: Pfam Description:  Uricase
  misc_feature (1)..(227): NCBI GI NO: 34908558 NR Description: putative uricase
  misc_feature (1)..(227): NCBI GI NO: 6175090 NR Description: Uricase (Urate oxidase) (Nodulin 35 homolog)
  misc_feature (1)..(227): NCBI GI NO: 15225267 NR Description: uricase subunit -related [Arabidopsis thaliana]
  misc_feature (1)..(227): NCBI GI NO: 11414898 NR Description: uricase [Lotus japonicus]
  misc_feature (1)..(227): NCBI GI NO: 6175091 NR Description: Uricase II
  misc_feature (1)..(227): NCBI GI NO: 4996846 NR Description: uricase (Nod-35) [Medicago sativa]
  misc_feature (1)..(227): NCBI GI NO: 170031 NR Description: nodulin 35
  misc_feature (1)..(227): NCBI GI NO: 81803 NR Description: urate oxidase (EC 1.7.3.3) - soybean
  misc_feature (1)..(227): NCBI GI NO: 7242493 NR Description: urate oxidase [Cicer arietinum]
  misc_feature (1)..(227): NCBI GI NO: 170033 NR Description: uricase II subunit
MEEFAVILGRHFTSLYPQVSEAAVTIVERPWERVAVDGKPHSHGFKLGSEKHTTEVTVKKSGSLLINSGIQGYSLLKTTQSGFEGFMRDRYTLLPETRERIVATEVTAWWRYPFEHISQLPSKPFCFTQRYQDVKKVLADTFFGPSDVGVYSPSVQNTLYLMAREVLTRFPDIASVQLRMPNLHFLPVNLGGKENPGLVKFADDVYMPTDEPHGTIEATLSRANSKL

SEQ ID NO: 13622 - DNA, 1659 bp, Triticum aestivum
  misc_feature (1)..(1659): Ceres Seq. ID no. 13597034
ctcccccctacgcacctcttgccaccgccgcagcacatccccgaaagctaggtttttatcactccacctatcatcatcgcctcggcggccgcacaacccaccctccccctcgaagccccgatctccttcacttctcctctccgtgccagatcgttgtttatgagctcgaaggagaagcccaccctcggaggccagcggattaagacccgcaagcggaatatcgcagctcctttggacccttcgtcgttctctgatgcaattgtccagatttatctggataatgctggagacctggaacttgttgccaaaagtatagagtcatcagatctcaacttctcacgttacggtgacactttctttgaggttgttttcattggtgtgcgtactcagcctggtacgattaaacccgaagaagagggagagcgccacccctattctctcattgactgtgcagcacaacgtgaagcaatattaccttatgtcctctttattcagaaaacactgcgcaggaggcctttcttaataaagagtcttgaaaatgttatgcgaaaatttctccagtctttggagttctttgaagaaaatgagagacaaaaacttgccattttcacggcacttgcattttctcagaaattatcaggtctgccacctgaaactgtctttcagccattgcttaaggacaatcttgttgccaaagggatagtgctttcattcattactgagttcttcaaggaatatctgaaggaaaatagtttggatgatctgattgcacttttaaagaaaggcaaaatggaggacaatttacttgaattttttccatcaggaaagagaacctctgaggctttgtctgagcatttcaccaaagaaggtttgactagccttgttgagtacaatagcaagaaaatgtttgaagttaagctcaaggagataaagtcaactctgaccactatgatcaatgaagaagctgaaatatctgaagtaactgaggttgtcaagcaacaggttaaagatgctaaatttcctgatatagaggttgttcgcatgctgtgggatgtgctgatggaggctgttcagtggtctggaaagaaccagcagcaaaattctaattcagcacttaggcaggtgaatgcttgggctggtcttatgaatgcattttgcacaagtggaaagctagaactggaactcatatacaaggtccagacacaatgttatgaggatgctaagttgatgaagctgttccctgaaattataagatcactgtatgatcaagatgtcctagctgaagataccatacttctttggttccgcaagggttcaaaccaaaaaggaaggcaatctttcgtgaaagctctggagcctttcgtcaaatggcttgaggaggcagaggaggaagaataaagaggcacggttgttgctttaaaatgagtatttccttataccccatgtttgcggagacggtggtcatccttttgctgcttattactgaacaaacattttatattcagatgtgagcattgctgtcatctgctatcattttcgacattattgtaccaggatttggaaggatcgttacctactttgtgttgtgtattagttgttacatggatatttatgcagagtgcacgtttaagaagaggcaaactcaagtttataactgcc

SEQ ID NO: 13623 - protein, 412 aa, Triticum aestivum
  peptide (1)..(412): Ceres Seq. ID no. 13597035
  misc_feature (336)..(412): Pfam Name: Pfam Description:  eIF4-gamma/eIF5/eIF2-epsilon
  misc_feature (1)..(412): NCBI GI NO: 18421544 NR Description: expressed protein [Arabidopsis thaliana]
  misc_feature (2)..(412): NCBI GI NO: 9759036 NR Description: gb|AAD26879
  misc_feature (1)..(412): NCBI GI NO: 18408228 NR Description: expressed protein [Arabidopsis thaliana]
  misc_feature (1)..(412): NCBI GI NO: 21554220 NR Description: unknown [Arabidopsis thaliana]
  misc_feature (1)..(412): NCBI GI NO: 25404540 NR Description: hypothetical protein T23K8.13
  misc_feature (1)..(411): NCBI GI NO: 17737777 NR Description: elongation initiation factor 5C CG2922-PG
  misc_feature (1)..(411): NCBI GI NO: 7661744 NR Description: basic leucine zipper and W2 domains 2
  misc_feature (1)..(411): NCBI GI NO: 19705527 NR Description: Hfb2 protein [Rattus norvegicus]
  misc_feature (1)..(411): NCBI GI NO: 11640562 NR Description: MSTP017 [Homo sapiens]
  misc_feature (4)..(411): NCBI GI NO: 37589071 NR Description: Unknown (protein for MGC:63787) [Danio rerio]
MSSKEKPTLGGQRIKTRKRNIAAPLDPSSFSDAIVQIYLDNAGDLELVAKSIESSDLNFSRYGDTFFEVVFIGVRTQPGTIKPEEEGERHPYSLIDCAAQREAILPYVLFIQKTLRRRPFLIKSLENVMRKFLQSLEFFEENERQKLAIFTALAFSQKLSGLPPETVFQPLLKDNLVAKGIVLSFITEFFKEYLKENSLDDLIALLKKGKMEDNLLEFFPSGKRTSEALSEHFTKEGLTSLVEYNSKKMFEVKLKEIKSTLTTMINEEAEISEVTEVVKQQVKDAKFPDIEVVRMLWDVLMEAVQWSGKNQQQNSNSALRQVNAWAGLMNAFCTSGKLELELIYKVQTQCYEDAKLMKLFPEIIRSLYDQDVLAEDTILLWFRKGSNQKGRQSFVKALEPFVKWLEEAEEEE

SEQ ID NO: 13624 - protein, 284 aa, Triticum aestivum
  peptide (1)..(284): Ceres Seq. ID no. 13597036
  misc_feature (208)..(284): Pfam Name: Pfam Description:  eIF4-gamma/eIF5/eIF2-epsilon
  misc_feature (1)..(284): NCBI GI NO: 18421544 NR Description: expressed protein [Arabidopsis thaliana]
  misc_feature (1)..(284): NCBI GI NO: 9759036 NR Description: gb|AAD26879
  misc_feature (1)..(284): NCBI GI NO: 18408228 NR Description: expressed protein [Arabidopsis thaliana]
  misc_feature (1)..(284): NCBI GI NO: 21554220 NR Description: unknown [Arabidopsis thaliana]
  misc_feature (1)..(284): NCBI GI NO: 25404540 NR Description: hypothetical protein T23K8.13
  misc_feature (1)..(283): NCBI GI NO: 17737777 NR Description: elongation initiation factor 5C CG2922-PG
  misc_feature (1)..(283): NCBI GI NO: 7661744 NR Description: basic leucine zipper and W2 domains 2
  misc_feature (1)..(283): NCBI GI NO: 19705527 NR Description: Hfb2 protein [Rattus norvegicus]
  misc_feature (1)..(283): NCBI GI NO: 11640562 NR Description: MSTP017 [Homo sapiens]
  misc_feature (1)..(283): NCBI GI NO: 37589071 NR Description: Unknown (protein for MGC:63787) [Danio rerio]
MRKFLQSLEFFEENERQKLAIFTALAFSQKLSGLPPETVFQPLLKDNLVAKGIVLSFITEFFKEYLKENSLDDLIALLKKGKMEDNLLEFFPSGKRTSEALSEHFTKEGLTSLVEYNSKKMFEVKLKEIKSTLTTMINEEAEISEVTEVVKQQVKDAKFPDIEVVRMLWDVLMEAVQWSGKNQQQNSNSALRQVNAWAGLMNAFCTSGKLELELIYKVQTQCYEDAKLMKLFPEIIRSLYDQDVLAEDTILLWFRKGSNQKGRQSFVKALEPFVKWLEEAEEEE

SEQ ID NO: 13625 - DNA, 1352 bp, Triticum aestivum
  misc_feature (1)..(1352): Ceres Seq. ID no. 12616285
atagtgcggtccgtcccgtcgcgtgctttcacatccatgatcagggcctgcctcagcgagctctgcgccagctgctgctcctgcgtgctcccgccgccgtcctcgccgcgcgccgccgaccaagagatggactccgacggcgccatcacgcaccgcagcgtcgaggccaacggcgtgcgcctccacgtggcggaggccggcccggccggcgcgccggtcgcgctgctgctgcacgggttcccggaggtgtggtacacctggcgccaccagatgcgcgcgctggccgccgcgggctaccgcgccgtcgcgcccgacatgcgcggctacggcggctccgacgcgccccccggcgggccggaccagtacacggcgctgcacgtcgtcggcgaccttgttgctctgattgattcgctcggcgagaagcaggtgttcgtcgtggcgcacgactggggcgccatgatcgcgtggagcctgtgcctgttccggccggacagggtgaaggcgctcgtcgccctcagcgtgcccttcagtccccggagccccgcgaggaagcccgtcgacggcttgaaggctctgtacggggacgagtactacatctgccgtatccaggagcctggggcaattgaagcagaattcgcacggctcggcacggagctggtgctaagaaagtttttcacttatcgaactcctggccctctgtttatccccaagagcggctggggctcaccagatgatgaggtgcccttgccgagctggatcacggaggaggacatcaaatactacgcgagtcagtttgacaagtctggcttcactggggcattgaactactaccgtgccctgaacaagacatgggaactcacgtcgccatggaccggagctgagataaaggtaccgaccaagtttatagttggtgatgtggacttgtcataccatgttgcaggcgcacatgattttattaacaaaggtggcctcaagaagtttgttccattactggacgatgtggtggtaatgaaagatgtcgggcatttcataaatgaagaaaaaccagaagaaattagtgcccatataatcagtttcttaaagaaattcgactgaaatgaggagtaacgaacacatcatggaacatggtcaaaatgtagatgcttgatggaaaatttgtattaagcccattgtattattgtgtcgcacaatttcacatatgtatgcaactattattttctttacatttcactctttgtttaatttttcatgtctagtgccgctaccctgctttctagtgtgtgtgcttgggttgtttcttcttaactaaaataaaagtgacagcggctagtcactgtcgcccgagttctttt

SEQ ID NO: 13626 - protein, 364 aa, Triticum aestivum
  peptide (1)..(364): Ceres Seq. ID no. 12616286
  misc_feature (99)..(356): Pfam Name: Pfam Description:  alpha/beta hydrolase fold
  misc_feature (49)..(363): NCBI GI NO: 34902880 NR Description: unnamed protein product
  misc_feature (49)..(363): NCBI GI NO: 25044843 NR Description: epoxide hydrolase [Ananas comosus]
  misc_feature (49)..(363): NCBI GI NO: 18411917 NR Description: coded for by A
  misc_feature (51)..(363): NCBI GI NO: 15225781 NR Description: epoxide hydrolase (ATsEH); protein id: At2g26740
  misc_feature (49)..(363): NCBI GI NO: 7489254 NR Description: probable epoxide hydrolase (EC 3
  misc_feature (49)..(363): NCBI GI NO: 7489256 NR Description: probable epoxide hydrolase (EC 3
  misc_feature (49)..(363): NCBI GI NO: 7488671 NR Description: epoxide hydrolase homolog - soybean
  misc_feature (51)..(363): NCBI GI NO: 22208300 NR Description: soluble epoxide hydrolase [Brassica napus]
  misc_feature (49)..(363): NCBI GI NO: 7489255 NR Description: probable epoxide hydrolase (EC 3
  misc_feature (49)..(363): NCBI GI NO: 2764806 NR Description: epoxide hydrolase [Glycine max]
IVRSVPSRAFTSMIRACLSELCASCCSCVLPPPSSPRAADQEMDSDGAITHRSVEANGVRLHVAEAGPAGAPVALLLHGFPEVWYTWRHQMRALAAAGYRAVAPDMRGYGGSDAPPGGPDQYTALHVVGDLVALIDSLGEKQVFVVAHDWGAMIAWSLCLFRPDRVKALVALSVPFSPRSPARKPVDGLKALYGDEYYICRIQEPGAIEAEFARLGTELVLRKFFTYRTPGPLFIPKSGWGSPDDEVPLPSWITEEDIKYYASQFDKSGFTGALNYYRALNKTWELTSPWTGAEIKVPTKFIVGDVDLSYHVAGAHDFINKGGLKKFVPLLDDVVVMKDVGHFINEEKPEEISAHIISFLKKFD

SEQ ID NO: 13627 - protein, 352 aa, Triticum aestivum
  peptide (1)..(352): Ceres Seq. ID no. 12616287
  misc_feature (87)..(344): Pfam Name: Pfam Description:  alpha/beta hydrolase fold
  misc_feature (37)..(351): NCBI GI NO: 34902880 NR Description: unnamed protein product
  misc_feature (37)..(351): NCBI GI NO: 25044843 NR Description: epoxide hydrolase [Ananas comosus]
  misc_feature (37)..(351): NCBI GI NO: 18411917 NR Description: coded for by A
  misc_feature (39)..(351): NCBI GI NO: 15225781 NR Description: epoxide hydrolase (ATsEH); protein id: At2g26740
  misc_feature (37)..(351): NCBI GI NO: 7489254 NR Description: probable epoxide hydrolase (EC 3
  misc_feature (37)..(351): NCBI GI NO: 7489256 NR Description: probable epoxide hydrolase (EC 3
  misc_feature (37)..(351): NCBI GI NO: 7488671 NR Description: epoxide hydrolase homolog - soybean
  misc_feature (39)..(351): NCBI GI NO: 22208300 NR Description: soluble epoxide hydrolase [Brassica napus]
  misc_feature (37)..(351): NCBI GI NO: 7489255 NR Description: probable epoxide hydrolase (EC 3
  misc_feature (37)..(351): NCBI GI NO: 2764806 NR Description: epoxide hydrolase [Glycine max]
MIRACLSELCASCCSCVLPPPSSPRAADQEMDSDGAITHRSVEANGVRLHVAEAGPAGAPVALLLHGFPEVWYTWRHQMRALAAAGYRAVAPDMRGYGGSDAPPGGPDQYTALHVVGDLVALIDSLGEKQVFVVAHDWGAMIAWSLCLFRPDRVKALVALSVPFSPRSPARKPVDGLKALYGDEYYICRIQEPGAIEAEFARLGTELVLRKFFTYRTPGPLFIPKSGWGSPDDEVPLPSWITEEDIKYYASQFDKSGFTGALNYYRALNKTWELTSPWTGAEIKVPTKFIVGDVDLSYHVAGAHDFINKGGLKKFVPLLDDVVVMKDVGHFINEEKPEEISAHIISFLKKFD

SEQ ID NO: 13628 - protein, 322 aa, Triticum aestivum
  peptide (1)..(322): Ceres Seq. ID no. 12616288
  misc_feature (57)..(314): Pfam Name: Pfam Description:  alpha/beta hydrolase fold
  misc_feature (7)..(321): NCBI GI NO: 34902880 NR Description: unnamed protein product
  misc_feature (7)..(321): NCBI GI NO: 25044843 NR Description: epoxide hydrolase [Ananas comosus]
  misc_feature (7)..(321): NCBI GI NO: 18411917 NR Description: coded for by A
  misc_feature (9)..(321): NCBI GI NO: 15225781 NR Description: epoxide hydrolase (ATsEH); protein id: At2g26740
  misc_feature (7)..(321): NCBI GI NO: 7489254 NR Description: probable epoxide hydrolase (EC 3
  misc_feature (7)..(321): NCBI GI NO: 7489256 NR Description: probable epoxide hydrolase (EC 3
  misc_feature (7)..(321): NCBI GI NO: 7488671 NR Description: epoxide hydrolase homolog - soybean
  misc_feature (9)..(321): NCBI GI NO: 22208300 NR Description: soluble epoxide hydrolase [Brassica napus]
  misc_feature (7)..(321): NCBI GI NO: 7489255 NR Description: probable epoxide hydrolase (EC 3
  misc_feature (7)..(321): NCBI GI NO: 2764806 NR Description: epoxide hydrolase [Glycine max]
MDSDGAITHRSVEANGVRLHVAEAGPAGAPVALLLHGFPEVWYTWRHQMRALAAAGYRAVAPDMRGYGGSDAPPGGPDQYTALHVVGDLVALIDSLGEKQVFVVAHDWGAMIAWSLCLFRPDRVKALVALSVPFSPRSPARKPVDGLKALYGDEYYICRIQEPGAIEAEFARLGTELVLRKFFTYRTPGPLFIPKSGWGSPDDEVPLPSWITEEDIKYYASQFDKSGFTGALNYYRALNKTWELTSPWTGAEIKVPTKFIVGDVDLSYHVAGAHDFINKGGLKKFVPLLDDVVVMKDVGHFINEEKPEEISAHIISFLKKFD

SEQ ID NO: 13629 - DNA, 999 bp, Triticum aestivum
  misc_feature (1)..(999): Ceres Seq. ID no. 12616336
aatgccgcgccggtcactgtccccccagccccatcccgattttaacctcctcccctcgcactgaccaaaaccatgatttgcctcagagccatcccctcccctcgactcctccacctacccctaccccgcctcgcctcctccccgctccgccgcctcaggccctccgccgcagccatgtcctcctccccctccgtcgccgcgcccaccgtagcggcaccggtcgagcacatcgtgctcatcaaggtccgcccggaggccgtggcctcgggggccgccgcggcgatggtctccgcgctgcaggcgctctccacgctcgtcccgggggtctcctacatccacgcgggccccgtgctccgcctccgctccccggccgccgaggcgctgggccccacccacctcctccactcccgctacgccaccaaggccgacctcgccgcctacgccccgcacccggcccacgtggccgccgtgcaggcgcacgtcgcccccaacgctctcgacgccaccgccgttgactgggtcaacgccgcgggcgccccgtcccccgtcgcccccggcgccgccgtgcgcctcaccctcgccaaggtcaagcagggcgtggaggtcgggcagctcgtcgagaaggtggccgcggccaccaaggacgccggcgaggccagcggcgccaaggtcagcttcggggagaacttctcccccgcgcgggccaaggggtaccagttcgggatggtggccgtgttcgggagcgtcgaggagctggacgccgtggagggcgacggcaaggtggaggaggccaaggccgccctcaggcccatgctcgacgaggtcatggtgctggacttcgtcgtcgacgctccggcggccgcgagcctctgatggggggtttcaggttgatttcggatccgagtgtgctgccgatttgggaataatggagtcctttgtgatatctgtatcgatcttgagatgaataaccaatcaattgatgtgccagaaaaaaaaaaa

SEQ ID NO: 13630 - protein, 266 aa, Triticum aestivum
  peptide (1)..(266): Ceres Seq. ID no. 12616337
  misc_feature (1)..(266): NCBI GI NO: 14192878 NR Description: Hypothetical protein [Oryza sativa]
  misc_feature (1)..(264): NCBI GI NO: 34394190 NR Description: unknown protein
  misc_feature (46)..(264): NCBI GI NO: 14192877 NR Description: Hypothetical protein [Oryza sativa]
  misc_feature (1)..(265): NCBI GI NO: 15225120 NR Description: unknown protein; protein id: At2g31670.1
  misc_feature (50)..(258): NCBI GI NO: 15223825 NR Description: unknown protein; protein id: At1g51360.1
MICLRAIPSPRLLHLPLPRLASSPLRRLRPSAAAMSSSPSVAAPTVAAPVEHIVLIKVRPEAVASGAAAAMVSALQALSTLVPGVSYIHAGPVLRLRSPAAEALGPTHLLHSRYATKADLAAYAPHPAHVAAVQAHVAPNALDATAVDWVNAAGAPSPVAPGAAVRLTLAKVKQGVEVGQLVEKVAAATKDAGEASGAKVSFGENFSPARAKGYQFGMVAVFGSVEELDAVEGDGKVEEAKAALRPMLDEVMVLDFVVDAPAAASL

SEQ ID NO: 13631 - protein, 232 aa, Triticum aestivum
  peptide (1)..(232): Ceres Seq. ID no. 12616338
  misc_feature (1)..(232): NCBI GI NO: 14192878 NR Description: Hypothetical protein [Oryza sativa]
  misc_feature (1)..(230): NCBI GI NO: 34394190 NR Description: unknown protein
  misc_feature (12)..(230): NCBI GI NO: 14192877 NR Description: Hypothetical protein [Oryza sativa]
  misc_feature (1)..(231): NCBI GI NO: 15225120 NR Description: unknown protein; protein id: At2g31670.1
  misc_feature (16)..(224): NCBI GI NO: 15223825 NR Description: unknown protein; protein id: At1g51360.1
MSSSPSVAAPTVAAPVEHIVLIKVRPEAVASGAAAAMVSALQALSTLVPGVSYIHAGPVLRLRSPAAEALGPTHLLHSRYATKADLAAYAPHPAHVAAVQAHVAPNALDATAVDWVNAAGAPSPVAPGAAVRLTLAKVKQGVEVGQLVEKVAAATKDAGEASGAKVSFGENFSPARAKGYQFGMVAVFGSVEELDAVEGDGKVEEAKAALRPMLDEVMVLDFVVDAPAAASL

SEQ ID NO: 13632 - protein, 196 aa, Triticum aestivum
  peptide (1)..(196): Ceres Seq. ID no. 12616339
  misc_feature (1)..(196): NCBI GI NO: 14192878 NR Description: Hypothetical protein [Oryza sativa]
  misc_feature (1)..(194): NCBI GI NO: 34394190 NR Description: unknown protein
  misc_feature (1)..(194): NCBI GI NO: 14192877 NR Description: Hypothetical protein [Oryza sativa]
  misc_feature (1)..(195): NCBI GI NO: 15225120 NR Description: unknown protein; protein id: At2g31670.1
  misc_feature (1)..(188): NCBI GI NO: 15223825 NR Description: unknown protein; protein id: At1g51360.1
MVSALQALSTLVPGVSYIHAGPVLRLRSPAAEALGPTHLLHSRYATKADLAAYAPHPAHVAAVQAHVAPNALDATAVDWVNAAGAPSPVAPGAAVRLTLAKVKQGVEVGQLVEKVAAATKDAGEASGAKVSFGENFSPARAKGYQFGMVAVFGSVEELDAVEGDGKVEEAKAALRPMLDEVMVLDFVVDAPAAASL

SEQ ID NO: 13633 - DNA, 1280 bp, Triticum aestivum
  misc_feature (1)..(1280): Ceres Seq. ID no. 13597037
aattcccctcccctctccaggtctcctcccgaaacccccaattcgaaaatcgatttggggatttcggcgtcccagatccgctcctccggccggttcgctcggccgcacgtccgatccgcgttcgcggccgccgtcggagctgctgaccggcccgcggctcgattcgtccgggggatttgttgcgggggctctcgcttgctcccgatggcgtcgtccccggtctcctactggtgctaccactgcagccgcttcgtgcgggtctccccggccaccgtcgtctgccccgactgcgacggcggcttcctcgagcagttcccgcagcctccgccgccgcgcggcggcggcggcagcggccggcgcggggccatgaacccggtgatcgtgctgcggggcggctcgctctccggcttcgagctctactacgaggacggctccggcgacgggctgcggccgctgcccggcgacgtctcgcacctcctcatggggtcggggttccaccgcctgctcgaccagttctcgaggctggaggctgccgccccgcgcccgccggcgtccaaggccgcggtggagtcgatgccgtccgtgacggtcgccgggggaggcggggcccactgcgcggtgtgccaggaggccttcgagcccggcgccgcggctcgggagatgccgtgcaagcacgtctaccaccaggactgcatcctcccctggctctccctccgcaactcctgccccatctgccgcagcgagcttccggcggcagccgtgcctgaggcggaggcggatgccgggctcaccatctggcgactcccccgcggcggattcgccgttggaaggttcgccggcgggcccagagagcaactgccggttgtctacacggagctggatggtggtttcagcaacggcgtcgggccgaggcgggtgacatggccagaaggagaagggcaggtggacggcggcgaaggtcggattcgccgtgtatttaggaacctgtttgggtgctttggccggggcggccggcctgagagttcctcgcagtcccgtagtggctgagcaatgttcttcctggtaactcactttcaattgatgatagtggtgaataagtaggagttagtataaggaggaaaccccaggtggtgagttattggttagtttgatgtaaatgaagggcttgcattccccaccttttgtctcgtttttaaaaaaaaaaaaaaaaaaaaaaaaaaaaaaaaaaaaaaaagaaaaaaaaaaaaaaaaaagcttatcgataccgtcgacctcgaggg

SEQ ID NO: 13634 - protein, 348 aa, Triticum aestivum
  peptide (1)..(348): Ceres Seq. ID no. 13597038
  misc_feature (205)..(245): Pfam Name: RING finger Pfam Description: Zinc finger, C3HC4 type
  misc_feature (69)..(348): NCBI GI NO: 34902106 NR Description: unknown protein
  misc_feature (135)..(345): NCBI GI NO: 14719329 NR Description: putative RING-H2 finger protein [Oryza sativa]
  misc_feature (68)..(110): NCBI GI NO: 14719329 NR Description: putative RING-H2 finger protein [Oryza sativa]
  misc_feature (113)..(345): NCBI GI NO: 15232595 NR Description: expressed protein [Arabidopsis thaliana]
  misc_feature (115)..(316): NCBI GI NO: 8885559 NR Description: emb|CAB62332
  misc_feature (115)..(316): NCBI GI NO: 18424254 NR Description: expressed protein [Arabidopsis thaliana]
  misc_feature (118)..(348): NCBI GI NO: 18405141 NR Description: RING-H2 finger protein (RHC2a)
  misc_feature (71)..(279): NCBI GI NO: 34906008 NR Description: putative RING-H2 finger protein RHC2a
  misc_feature (143)..(257): NCBI GI NO: 18405518 NR Description: RING-H2 finger protein (RHC1a)
  misc_feature (69)..(104): NCBI GI NO: 18405518 NR Description: RING-H2 finger protein (RHC1a)
NSPPLSRSPPETPNSKIDLGISASQIRSSGRFARPHVRSAFAAAVGAADRPAARFVRGICCGGSRLLPMASSPVSYWCYHCSRFVRVSPATVVCPDCDGGFLEQFPQPPPPRGGGGSGRRGAMNPVIVLRGGSLSGFELYYEDGSGDGLRPLPGDVSHLLMGSGFHRLLDQFSRLEAAAPRPPASKAAVESMPSVTVAGGGGAHCAVCQEAFEPGAAAREMPCKHVYHQDCILPWLSLRNSCPICRSELPAAAVPEAEADAGLTIWRLPRGGFAVGRFAGGPREQLPVVYTELDGGFSNGVGPRRVTWPEGEGQVDGGEGRIRRVFRNLFGCFGRGGRPESSSQSRSG

SEQ ID NO: 13635 - protein, 280 aa, Triticum aestivum
  peptide (1)..(280): Ceres Seq. ID no. 13597039
  misc_feature (137)..(177): Pfam Name: RING finger Pfam Description: Zinc finger, C3HC4 type
  misc_feature (1)..(280): NCBI GI NO: 34902106 NR Description: unknown protein
  misc_feature (67)..(277): NCBI GI NO: 14719329 NR Description: putative RING-H2 finger protein [Oryza sativa]
  misc_feature (1)..(42): NCBI GI NO: 14719329 NR Description: putative RING-H2 finger protein [Oryza sativa]
  misc_feature (45)..(277): NCBI GI NO: 15232595 NR Description: expressed protein [Arabidopsis thaliana]
  misc_feature (47)..(248): NCBI GI NO: 8885559 NR Description: emb|CAB62332
  misc_feature (47)..(248): NCBI GI NO: 18424254 NR Description: expressed protein [Arabidopsis thaliana]
  misc_feature (50)..(280): NCBI GI NO: 18405141 NR Description: RING-H2 finger protein (RHC2a)
  misc_feature (3)..(211): NCBI GI NO: 34906008 NR Description: putative RING-H2 finger protein RHC2a
  misc_feature (75)..(189): NCBI GI NO: 18405518 NR Description: RING-H2 finger protein (RHC1a)
  misc_feature (1)..(36): NCBI GI NO: 18405518 NR Description: RING-H2 finger protein (RHC1a)
MASSPVSYWCYHCSRFVRVSPATVVCPDCDGGFLEQFPQPPPPRGGGGSGRRGAMNPVIVLRGGSLSGFELYYEDGSGDGLRPLPGDVSHLLMGSGFHRLLDQFSRLEAAAPRPPASKAAVESMPSVTVAGGGGAHCAVCQEAFEPGAAAREMPCKHVYHQDCILPWLSLRNSCPICRSELPAAAVPEAEADAGLTIWRLPRGGFAVGRFAGGPREQLPVVYTELDGGFSNGVGPRRVTWPEGEGQVDGGEGRIRRVFRNLFGCFGRGGRPESSSQSRSG

SEQ ID NO: 13636 - protein, 226 aa, Triticum aestivum
  peptide (1)..(226): Ceres Seq. ID no. 13597040
  misc_feature (83)..(123): Pfam Name: RING finger Pfam Description: Zinc finger, C3HC4 type
  misc_feature (1)..(226): NCBI GI NO: 34902106 NR Description: unknown protein
  misc_feature (13)..(223): NCBI GI NO: 14719329 NR Description: putative RING-H2 finger protein [Oryza sativa]
  misc_feature (1)..(223): NCBI GI NO: 15232595 NR Description: expressed protein [Arabidopsis thaliana]
  misc_feature (1)..(194): NCBI GI NO: 8885559 NR Description: emb|CAB62332
  misc_feature (1)..(194): NCBI GI NO: 18424254 NR Description: expressed protein [Arabidopsis thaliana]
  misc_feature (1)..(226): NCBI GI NO: 18405141 NR Description: RING-H2 finger protein (RHC2a)
  misc_feature (1)..(157): NCBI GI NO: 34906008 NR Description: putative RING-H2 finger protein RHC2a
  misc_feature (21)..(135): NCBI GI NO: 18405518 NR Description: RING-H2 finger protein (RHC1a)
  misc_feature (7)..(129): NCBI GI NO: 18410530 NR Description: expressed protein [Arabidopsis thaliana]
  misc_feature (35)..(131): NCBI GI NO: 34908968 NR Description: P0003D09.21
MNPVIVLRGGSLSGFELYYEDGSGDGLRPLPGDVSHLLMGSGFHRLLDQFSRLEAAAPRPPASKAAVESMPSVTVAGGGGAHCAVCQEAFEPGAAAREMPCKHVYHQDCILPWLSLRNSCPICRSELPAAAVPEAEADAGLTIWRLPRGGFAVGRFAGGPREQLPVVYTELDGGFSNGVGPRRVTWPEGEGQVDGGEGRIRRVFRNLFGCFGRGGRPESSSQSRSG

SEQ ID NO: 13637 - DNA, 1099 bp, Triticum aestivum
  misc_feature (1)..(1099): Ceres Seq. ID no. 12616706
aaaagcactgcattattcatcgctccgacagtcgacacagagcgagtcctcacccagagcaagcaagcaagaagatcgggaggagggtcggagtttgatcgccatttgattcgatggcgccggagtttgggtggtggccgatgtcgccgtggctgagcccaggcacggcgtcgttcatcttcttcaacgtcctcgtcggcgccatcgcggtcatgtcgtcgtcccgggggccggaaccggccgcccggcgcaagctcgttcgcacggcctcgaccgtcgtgctggagagcctgcgctcgatctccaacttccccttccactcactgggcgactacagcgtcgcgtgctctgcaccggcgtcgtcgcagctccaccacatgcaagcgcagtactatagtgctacgatccaagagcaagaagcgcgggaggtgagcgcggtggagcccgagccggcatcagtcgcccgagaagaagctgtagtggcggccgcaacgaccacctcgccgcagagcgcgcctgccgtggcagaggaggtgaacaggatggagcccgagccagcgtcagacgcccaagaagaaactgtagcggcggccacaacaactacctcgccgcagagcgcggcaccggcagcactcgacgcgtcagcgacggcgactcagggcgaggtcgaagacggggagtccatcagcttggacgaggcgtacgcactggcgcgcgcagggcggcagtccgccgccgacacggtggccacggtgccgaagaaggccaagggacgaggagcctacggatgcgggcggggaacggaggacgtccaagggaaggcggaggtggacgcgcgggcggagcagttcatccggcagttccgggaggagctcaagctggagcgcatcaactccatcctcaaccacacccacgcgctgcgccgcaccgccggggcacgctagccgaccggcgccgctcggccgatcctctcgtttgatcgtgtagagagagcagaatatttcatttgcttgtacagccattcatgggtcatttccgcagagaatgatgcgacagcacacagttttggattatttactgtaaccatatagtggcaggc

SEQ ID NO: 13638 - protein, 276 aa, Triticum aestivum
  peptide (1)..(276): Ceres Seq. ID no. 12616707
  misc_feature (158)..(271): NCBI GI NO: 37572996 NR Description: unknown protein
MAPEFGWWPMSPWLSPGTASFIFFNVLVGAIAVMSSSRGPEPAARRKLVRTASTVVLESLRSISNFPFHSLGDYSVACSAPASSQLHHMQAQYYSATIQEQEAREVSAVEPEPASVAREEAVVAAATTTSPQSAPAVAEEVNRMEPEPASDAQEETVAAATTTTSPQSAAPAALDASATATQGEVEDGESISLDEAYALARAGRQSAADTVATVPKKAKGRGAYGCGRGTEDVQGKAEVDARAEQFIRQFREELKLERINSILNHTHALRRTAGAR

SEQ ID NO: 13639 - protein, 267 aa, Triticum aestivum
  peptide (1)..(267): Ceres Seq. ID no. 12616708
  misc_feature (149)..(262): NCBI GI NO: 37572996 NR Description: unknown protein
MSPWLSPGTASFIFFNVLVGAIAVMSSSRGPEPAARRKLVRTASTVVLESLRSISNFPFHSLGDYSVACSAPASSQLHHMQAQYYSATIQEQEAREVSAVEPEPASVAREEAVVAAATTTSPQSAPAVAEEVNRMEPEPASDAQEETVAAATTTTSPQSAAPAALDASATATQGEVEDGESISLDEAYALARAGRQSAADTVATVPKKAKGRGAYGCGRGTEDVQGKAEVDARAEQFIRQFREELKLERINSILNHTHALRRTAGAR

SEQ ID NO: 13640 - protein, 243 aa, Triticum aestivum
  peptide (1)..(243): Ceres Seq. ID no. 12616709
  misc_feature (125)..(238): NCBI GI NO: 37572996 NR Description: unknown protein
MSSSRGPEPAARRKLVRTASTVVLESLRSISNFPFHSLGDYSVACSAPASSQLHHMQAQYYSATIQEQEAREVSAVEPEPASVAREEAVVAAATTTSPQSAPAVAEEVNRMEPEPASDAQEETVAAATTTTSPQSAAPAALDASATATQGEVEDGESISLDEAYALARAGRQSAADTVATVPKKAKGRGAYGCGRGTEDVQGKAEVDARAEQFIRQFREELKLERINSILNHTHALRRTAGAR

SEQ ID NO: 13641 - DNA, 1204 bp, Triticum aestivum
  misc_feature (1)..(1204): Ceres Seq. ID no. 13597250
aaagagcagcagcgaccgcgcccatcaccaccaccacccgcctgacggagcccttccctcccatcggcggcggagatggtggggtggctcaaggcgctggtgtactgcgcagggggcatggcggtggtgggcctggcggcgctggtggcgctgcaggagcgcctcgtctacgtgcccgtgctccctggcctcccgcgcgcttaccccatcaagccctcgcgcctccgcctcatctacgaggacgtctggctccgcgccgccgacggcgtgcgcctccactcctggttcctccgccactctcccacctgccgaggtccgaccattctgttctttcaggaaaatgccggcaatattgcacatcgtttggaatgcgttcgactaatgatgcagcggctacagtgcaatgtgtttatgctttcttatagagggtatggtgagagcgagggttatccttctcagagtggcatcacaaaagatgcacaggccgcacttgatcatctagttcagaggaaggacattgacacatccaggatagttatctttgggagatctttaggaggtgctgttggagcagttcttgcaaaaaacaatcctgacaaggtgtctgctctaatattggaaaatacttttacatctatattggatatggctggtatcatgctgcccttcttaagatggttcataggcggtagttctgccaaaggcccaaaacttcttaactgcgttgttcgctctccatggagtacacttgatgttgttgcagaggtcaaacaacccattctcttcctttctggattgcaagatgaactggttcccccgtcacacatgaggatgctgtatgacaaagctgttgaacataacaggaattgtaggtttgttgattttcccagtggtatgcatatggatacctggatttctggaggggaccgctactggaggacaatcgaattgtttctggaccaatataccccagaagtacagagttctgatgccagctgcacaagtgaaattgctgatgatggtaattactaattagtatttaccaattcattataacattttcctgcgaatattgttctatcatgttttttcttgtacgtgtagggatacattatgttgtcatatttgtgtatttaactacatagtgtagttttactaatgttaatggcaatactgaatagtgaatacaaccatttgtatcttc

SEQ ID NO: 13642 - protein, 318 aa, Triticum aestivum
  peptide (1)..(318): Ceres Seq. ID no. 13597251
  misc_feature (111)..(201): Pfam Name: Pfam Description:  alpha/beta hydrolase fold
  misc_feature (1)..(315): NCBI GI NO: 34395138 NR Description: putative membrane protein
  misc_feature (1)..(305): NCBI GI NO: 18420236 NR Description: expressed protein [Arabidopsis thaliana]
  misc_feature (1)..(294): NCBI GI NO: 987287 NR Description: temperature sensitive supressor of Saccharomycescerevisiae bem1/ bud5
  misc_feature (1)..(294): NCBI GI NO: 2257503 NR Description: BEM46 PROTEIN [Schizosaccharomyces pombe]
  misc_feature (15)..(294): NCBI GI NO: 19112401 NR Description: supressor of bem1/bud5 [Schizosaccharomyces pombe]
  misc_feature (15)..(310): NCBI GI NO: 28483207 NR Description: RIKEN cDNA 1110065L07 [Mus musculus]
  misc_feature (15)..(310): NCBI GI NO: 34879678 NR Description: similar to 1110065L07Rik protein
  misc_feature (1)..(307): NCBI GI NO: 17137566 NR Description: CG18642-PA [Drosophila melanogaster]
  misc_feature (30)..(296): NCBI GI NO: 40740775 NR Description: hypothetical protein AN3757.2
  misc_feature (4)..(294): NCBI GI NO: 6324009 NR Description: Hypothetical ORF; Ynl320wp
MVGWLKALVYCAGGMAVVGLAALVALQERLVYVPVLPGLPRAYPIKPSRLRLIYEDVWLRAADGVRLHSWFLRHSPTCRGPTILFFQENAGNIAHRLECVRLMMQRLQCNVFMLSYRGYGESEGYPSQSGITKDAQAALDHLVQRKDIDTSRIVIFGRSLGGAVGAVLAKNNPDKVSALILENTFTSILDMAGIMLPFLRWFIGGSSAKGPKLLNCVVRSPWSTLDVVAEVKQPILFLSGLQDELVPPSHMRMLYDKAVEHNRNCRFVDFPSGMHMDTWISGGDRYWRTIELFLDQYTPEVQSSDASCTSEIADDGNY

SEQ ID NO: 13643 - protein, 304 aa, Triticum aestivum
  peptide (1)..(304): Ceres Seq. ID no. 13597252
  misc_feature (97)..(187): Pfam Name: Pfam Description:  alpha/beta hydrolase fold
  misc_feature (1)..(301): NCBI GI NO: 34395138 NR Description: putative membrane protein
  misc_feature (1)..(291): NCBI GI NO: 18420236 NR Description: expressed protein [Arabidopsis thaliana]
  misc_feature (1)..(280): NCBI GI NO: 987287 NR Description: temperature sensitive supressor of Saccharomycescerevisiae bem1/ bud5
  misc_feature (1)..(280): NCBI GI NO: 2257503 NR Description: BEM46 PROTEIN [Schizosaccharomyces pombe]
  misc_feature (1)..(280): NCBI GI NO: 19112401 NR Description: supressor of bem1/bud5 [Schizosaccharomyces pombe]
  misc_feature (1)..(296): NCBI GI NO: 28483207 NR Description: RIKEN cDNA 1110065L07 [Mus musculus]
  misc_feature (1)..(296): NCBI GI NO: 34879678 NR Description: similar to 1110065L07Rik protein
  misc_feature (1)..(293): NCBI GI NO: 17137566 NR Description: CG18642-PA [Drosophila melanogaster]
  misc_feature (16)..(282): NCBI GI NO: 40740775 NR Description: hypothetical protein AN3757.2
  misc_feature (1)..(280): NCBI GI NO: 6324009 NR Description: Hypothetical ORF; Ynl320wp
MAVVGLAALVALQERLVYVPVLPGLPRAYPIKPSRLRLIYEDVWLRAADGVRLHSWFLRHSPTCRGPTILFFQENAGNIAHRLECVRLMMQRLQCNVFMLSYRGYGESEGYPSQSGITKDAQAALDHLVQRKDIDTSRIVIFGRSLGGAVGAVLAKNNPDKVSALILENTFTSILDMAGIMLPFLRWFIGGSSAKGPKLLNCVVRSPWSTLDVVAEVKQPILFLSGLQDELVPPSHMRMLYDKAVEHNRNCRFVDFPSGMHMDTWISGGDRYWRTIELFLDQYTPEVQSSDASCTSEIADDGNY

SEQ ID NO: 13644 - protein, 216 aa, Triticum aestivum
  peptide (1)..(216): Ceres Seq. ID no. 13597253
  misc_feature (9)..(99): Pfam Name: Pfam Description:  alpha/beta hydrolase fold
  misc_feature (1)..(213): NCBI GI NO: 34395138 NR Description: putative membrane protein
  misc_feature (1)..(203): NCBI GI NO: 18420236 NR Description: expressed protein [Arabidopsis thaliana]
  misc_feature (1)..(192): NCBI GI NO: 987287 NR Description: temperature sensitive supressor of Saccharomycescerevisiae bem1/ bud5
  misc_feature (1)..(192): NCBI GI NO: 2257503 NR Description: BEM46 PROTEIN [Schizosaccharomyces pombe]
  misc_feature (1)..(192): NCBI GI NO: 19112401 NR Description: supressor of bem1/bud5 [Schizosaccharomyces pombe]
  misc_feature (1)..(208): NCBI GI NO: 28483207 NR Description: RIKEN cDNA 1110065L07 [Mus musculus]
  misc_feature (1)..(208): NCBI GI NO: 34879678 NR Description: similar to 1110065L07Rik protein
  misc_feature (1)..(205): NCBI GI NO: 17137566 NR Description: CG18642-PA [Drosophila melanogaster]
  misc_feature (1)..(194): NCBI GI NO: 40740775 NR Description: hypothetical protein AN3757.2
  misc_feature (1)..(192): NCBI GI NO: 6324009 NR Description: Hypothetical ORF; Ynl320wp
MMQRLQCNVFMLSYRGYGESEGYPSQSGITKDAQAALDHLVQRKDIDTSRIVIFGRSLGGAVGAVLAKNNPDKVSALILENTFTSILDMAGIMLPFLRWFIGGSSAKGPKLLNCVVRSPWSTLDVVAEVKQPILFLSGLQDELVPPSHMRMLYDKAVEHNRNCRFVDFPSGMHMDTWISGGDRYWRTIELFLDQYTPEVQSSDASCTSEIADDGNY

SEQ ID NO: 13645 - DNA, 1232 bp, Triticum aestivum
  misc_feature (1)..(1232): Ceres Seq. ID no. 15225086
ccccaaagacggccatcatcatcgtcgcgttgccttcttcccacctcccaaaaaccctacaccccgcgacgaccaaccggcggccgccatgctcctccggcgaccacttcagacgctcaccctccccctcctccgccggcacttctccgcctccgccgcagcggtttccgccccagatcacaacatcgacgaactcctgtcgccgccgttcgactacctccctggtcacccgcggccggacgcgaagcacgacgaggtgatcttcgccgtgccgagggactcctctggccggcacttcgcggccaaggaacgcaaggctgggcgtgtgccggccatcgtcttcgagcaggagaatggccaagagggcggtaacaagcgcctcgtctcggtgccgtccaagcagatccgcaagctcgtcgaccacctcggacggtccttcttcctctcccgcctcttccgtctccaggtttggtccgagcaggccgggcagggggacctcatcgagagcgtccgcgtcctgccgcgcaaggtgcacttgcacgcaggcactgatgaacctctcaatgtgacattcatgagagcaccttcttcggcactgctcaaaatagatgttcctttaatgtacattggggaggacgcctcacctggcctcaggaaaggagcttacttcaacaccataaaacgaactgtcaagtttctctgccctgctgacatagtcccgccatacattgaagtggacctaagcgagttggatgtcgggcagaaactgctgatgcgcgatctgatagtccacccggcgctgaaattgcttcagtcgccagatcaacccatctgtagcattatagggtcaagagcccccgaccagaagaaagagaaatcaaaataactcgctccgctgtgttaactatttgcaacagaataaacttgttttgctatctatgcgagttattcagttcttgattatcccacctagaacgaatactactaggatgattttgtagcaaaagaccactgttttacctgaggaatggaagccagatgctacagataagaatacggcaggaatgtccaaatatgtttatgtgattttgttcacagaaacttcactgtgatgtattttatcagaaaatcgtttacctgttgacaatccgatggttttccattgtaggattgtgtacgtgattttctagtggtcaagcacatggaatttgcattgttgtgtcatgatctcg

SEQ ID NO: 13646 - protein, 294 aa, Triticum aestivum
  peptide (1)..(294): Ceres Seq. ID no. 15225087
  misc_feature (29)..(247): NCBI GI NO: 34912284 NR Description: P0451D05.2
  misc_feature (30)..(293): NCBI GI NO: 15236554 NR Description: expressed protein [Arabidopsis thaliana]
  misc_feature (85)..(291): NCBI GI NO: 15240108 NR Description: expressed protein [Arabidopsis thaliana]
  misc_feature (171)..(281): NCBI GI NO: 22961530 NR Description: COG1825: Ribosomal protein L25
  misc_feature (92)..(280): NCBI GI NO: 22965584 NR Description: COG1825: Ribosomal protein L25
  misc_feature (171)..(289): NCBI GI NO: 27382552 NR Description: 50S ribosomal protein L25
  misc_feature (98)..(292): NCBI GI NO: 23106991 NR Description: COG1825: Ribosomal protein L25
  misc_feature (168)..(293): NCBI GI NO: 13472406 NR Description: 50S ribosomal protein L25 [Mesorhizobium loti]
  misc_feature (87)..(261): NCBI GI NO: 23015980 NR Description: COG1825: Ribosomal protein L25
  misc_feature (122)..(284): NCBI GI NO: 15604456 NR Description: PROBABLE 50S RIBOSOMAL PROTEIN L25 (rplY)
PKDGHHHRRVAFFPPPKNPTPRDDQPAAAMLLRRPLQTLTLPLLRRHFSASAAAVSAPDHNIDELLSPPFDYLPGHPRPDAKHDEVIFAVPRDSSGRHFAAKERKAGRVPAIVFEQENGQEGGNKRLVSVPSKQIRKLVDHLGRSFFLSRLFRLQVWSEQAGQGDLIESVRVLPRKVHLHAGTDEPLNVTFMRAPSSALLKIDVPLMYIGEDASPGLRKGAYFNTIKRTVKFLCPADIVPPYIEVDLSELDVGQKLLMRDLIVHPALKLLQSPDQPICSIIGSRAPDQKKEKSK

SEQ ID NO: 13647 - protein, 265 aa, Triticum aestivum
  peptide (1)..(265): Ceres Seq. ID no. 15225088
  misc_feature (1)..(218): NCBI GI NO: 34912284 NR Description: P0451D05.2
  misc_feature (1)..(264): NCBI GI NO: 15236554 NR Description: expressed protein [Arabidopsis thaliana]
  misc_feature (56)..(262): NCBI GI NO: 15240108 NR Description: expressed protein [Arabidopsis thaliana]
  misc_feature (142)..(252): NCBI GI NO: 22961530 NR Description: COG1825: Ribosomal protein L25
  misc_feature (63)..(251): NCBI GI NO: 22965584 NR Description: COG1825: Ribosomal protein L25
  misc_feature (142)..(260): NCBI GI NO: 27382552 NR Description: 50S ribosomal protein L25
  misc_feature (69)..(263): NCBI GI NO: 23106991 NR Description: COG1825: Ribosomal protein L25
  misc_feature (139)..(264): NCBI GI NO: 13472406 NR Description: 50S ribosomal protein L25 [Mesorhizobium loti]
  misc_feature (58)..(232): NCBI GI NO: 23015980 NR Description: COG1825: Ribosomal protein L25
  misc_feature (93)..(255): NCBI GI NO: 15604456 NR Description: PROBABLE 50S RIBOSOMAL PROTEIN L25 (rplY)
MLLRRPLQTLTLPLLRRHFSASAAAVSAPDHNIDELLSPPFDYLPGHPRPDAKHDEVIFAVPRDSSGRHFAAKERKAGRVPAIVFEQENGQEGGNKRLVSVPSKQIRKLVDHLGRSFFLSRLFRLQVWSEQAGQGDLIESVRVLPRKVHLHAGTDEPLNVTFMRAPSSALLKIDVPLMYIGEDASPGLRKGAYFNTIKRTVKFLCPADIVPPYIEVDLSELDVGQKLLMRDLIVHPALKLLQSPDQPICSIIGSRAPDQKKEKSK

SEQ ID NO: 13648 - DNA, 847 bp, Triticum aestivum
  misc_feature (1)..(847): Ceres Seq. ID no. 13597058
agtggaagatttgatcatcgcgttccaggagagcagagcgggctgagcgattcggatcgctctccaccttccgccgccgtcccccttcctccccccgatccccaatccaatggtgctggtcctagcgctgggggatctgcacatcccgcaccgtgcgcccgacctgcccgccaagttcaagtccatgctcgtcccgggcaagatccagcacatcatctgcaccgggaacctctgcatcaaggaagttcacgactaccttaaaagcctctgtcctgatctccacattaccagaggtgaatatgatgaggatgctcgctacccagagactaaaacagttactattggtcagttcaagctagggctatgccatggccatcaggttgttccatggggcgacctggactccctagcgatgctccagaggcagctggatgtggacatcctcgtcaccgggcacacccatcagttcaaggcctacaagcacgaggggggtgtcgtcatcaaccctggctcaggcacgggcgcccacagcagcatcacatatgacgtcaacccgagctttgtgctcatggacatcgatggcctccgtgttgttgtctacgtgtacgagctcattgacggcgaggtgaaggttgaccagatcgacttcaagaagaccgccacgatgcatggctgatggtgcttacgcatgacagaaatctgatcctgtttgttcttaccccccacccccactccacaccacaccaccaccaccacaatttccccgacctggagctctttttcctttgtacccttctgctcgatatgaaaaactagagctgtgtatacatattagtgaatgggatat

SEQ ID NO: 13649 - protein, 188 aa, Triticum aestivum
  peptide (1)..(188): Ceres Seq. ID no. 13597059
  misc_feature (2)..(120): Pfam Name: Pfam Description:  Calcineurin-like phosphoesterase
  misc_feature (1)..(185): NCBI GI NO: 7487365 NR Description: VPS29-like phosphoesterase-related proteinT23J7
  misc_feature (44)..(185): NCBI GI NO: 30692933 NR Description: calcineurin-like phosphoesterase family
  misc_feature (2)..(183): NCBI GI NO: 28279210 NR Description: Similar to vacuolar protein sorting 29 (S. pombe)
  misc_feature (2)..(183): NCBI GI NO: 9790285 NR Description: vacuolar protein sorting 29
  misc_feature (2)..(182): NCBI GI NO: 7706441 NR Description: vacuolar protein sorting 29 isoform 1
  misc_feature (3)..(183): NCBI GI NO: 12835154 NR Description: unnamed protein product [Mus musculus]
  misc_feature (3)..(182): NCBI GI NO: 17402912 NR Description: vacuolar protein sorting 29 isoform 2
  misc_feature (3)..(183): NCBI GI NO: 34872362 NR Description: similar to vacuolar protein sorting 29 isoform 2
  misc_feature (3)..(182): NCBI GI NO: 9295176 NR Description: DC15 [Homo sapiens]
  misc_feature (2)..(182): NCBI GI NO: 12052754 NR Description: hypothetical protein [Homo sapiens]
MVLVLALGDLHIPHRAPDLPAKFKSMLVPGKIQHIICTGNLCIKEVHDYLKSLCPDLHITRGEYDEDARYPETKTVTIGQFKLGLCHGHQVVPWGDLDSLAMLQRQLDVDILVTGHTHQFKAYKHEGGVVINPGSGTGAHSSITYDVNPSFVLMDIDGLRVVVYVYELIDGEVKVDQIDFKKTATMHG

SEQ ID NO: 13650 - protein, 163 aa, Triticum aestivum
  peptide (1)..(163): Ceres Seq. ID no. 13597060
  misc_feature (1)..(95): Pfam Name: Pfam Description:  Calcineurin-like phosphoesterase
  misc_feature (1)..(160): NCBI GI NO: 7487365 NR Description: VPS29-like phosphoesterase-related proteinT23J7
  misc_feature (19)..(160): NCBI GI NO: 30692933 NR Description: calcineurin-like phosphoesterase family
  misc_feature (1)..(158): NCBI GI NO: 28279210 NR Description: Similar to vacuolar protein sorting 29 (S. pombe)
  misc_feature (1)..(158): NCBI GI NO: 9790285 NR Description: vacuolar protein sorting 29
  misc_feature (1)..(157): NCBI GI NO: 7706441 NR Description: vacuolar protein sorting 29 isoform 1
  misc_feature (1)..(158): NCBI GI NO: 12835154 NR Description: unnamed protein product [Mus musculus]
  misc_feature (1)..(157): NCBI GI NO: 17402912 NR Description: vacuolar protein sorting 29 isoform 2
  misc_feature (1)..(158): NCBI GI NO: 34872362 NR Description: similar to vacuolar protein sorting 29 isoform 2
  misc_feature (1)..(157): NCBI GI NO: 9295176 NR Description: DC15 [Homo sapiens]
  misc_feature (1)..(157): NCBI GI NO: 12052754 NR Description: hypothetical protein [Homo sapiens]
MLVPGKIQHIICTGNLCIKEVHDYLKSLCPDLHITRGEYDEDARYPETKTVTIGQFKLGLCHGHQVVPWGDLDSLAMLQRQLDVDILVTGHTHQFKAYKHEGGVVINPGSGTGAHSSITYDVNPSFVLMDIDGLRVVVYVYELIDGEVKVDQIDFKKTATMHG

SEQ ID NO: 13651 - DNA, 1359 bp, Triticum aestivum
  misc_feature (1)..(1359): Ceres Seq. ID no. 13597041
taatcgaaaaatttggtctgttgttagttcgatcgttctcattcaggtccttgaaacggcatggatgcttttctcgcatgcccggatcacagcccggcggccgggcggtcgctgacgccggcgcgcggcgctcccgcctcgtccccggcgctcatctcggccgtccaggacctgtacgagttcatctgcagcggcccactggtggaaaggattggctacacccgggagaggatcgccgagtccatcgaccggtggctgtggtgcggctcgcaggtgagccggttgttccgcatcgacgagctccggctgacggacgccgagaagtcgaggatataccacttctacatacccgtcttcctctggtgcgaggaccaggtcgccgaccacaggtccaagtacaacgacggcgacgagatcccgccattagtgattggagtcagcgctccccaaggcagcgggaagacaactcttgttttcgctcttgattatctttttcgggtttctggtaggaactctgccacattgtctatcgatgacttctatttgactgcagcagaacagggtaaactgagggaaacacatgctggaaatgctcttttagagtttcgtggaaatgccggaagccacgatctccaattctcaattgacacacttgagtcactgatcaaactaacaaaggaaggtacgaagatgaagcttccacggtatgacaagtccgcttttggtggaagaggtgaccgagctgacccttcgacatggccagaggttgaagggcctacagaggttgttctctttgaaggatggatgcttgggtttaaacctcttccaaatgaagttgtaacagcagtggatcctcagcttgaggtgattaataagaacctagaagcatactatgacgcgtgggacagattcattgagtcatggattgtcataaaaattaaggagcctaactgtgtatttcagtggagactacaggcagaggtagctatgagagctgatggtaaagcaggaatgtctgacgaggaggttatggattttgtatcgcgctacctaccagcataccatgcctatttgcccacgctatataaagaaggaccaaatggcgcgaagaaagaccatctgctggtcattgacatagacgaagagaggactcctatatctggtagttgagtgctgagtgtacattctgaaatggatatcttgacttggtggttgagcttgggatttctgatctttctgagaccacttctgccaagcaagcaccaccgtcctcttgtttcttacagcttaaatatatcctaaacgtgtaaattcgatgtatatcaatttttgctatctatttaaagaaactggcatccc

SEQ ID NO: 13652 - protein, 369 aa, Triticum aestivum
  peptide (1)..(369): Ceres Seq. ID no. 13597042
  misc_feature (123)..(355): Pfam Name: Pfam Description:  Phosphoribulokinase / Uridine kinase family
  misc_feature (3)..(242): NCBI GI NO: 34911206 NR Description: P0019E03.19
  misc_feature (266)..(368): NCBI GI NO: 34911206 NR Description: P0019E03.19
  misc_feature (25)..(366): NCBI GI NO: 30699506 NR Description: auxin-regulated protein [Arabidopsis thaliana]
  misc_feature (25)..(366): NCBI GI NO: 16226442 NR Description: At1g80380/F5I6_13 [Arabidopsis thaliana]
  misc_feature (150)..(366): NCBI GI NO: 25406658 NR Description: unknown protein F5I6.13
  misc_feature (25)..(157): NCBI GI NO: 25406658 NR Description: unknown protein F5I6.13
  misc_feature (213)..(366): NCBI GI NO: 18412831 NR Description: auxin-regulated protein [Arabidopsis thaliana]
  misc_feature (25)..(120): NCBI GI NO: 18412831 NR Description: auxin-regulated protein [Arabidopsis thaliana]
  misc_feature (213)..(366): NCBI GI NO: 21537005 NR Description: unknown [Arabidopsis thaliana]
  misc_feature (25)..(120): NCBI GI NO: 21537005 NR Description: unknown [Arabidopsis thaliana]
MDAFLACPDHSPAAGRSLTPARGAPASSPALISAVQDLYEFICSGPLVERIGYTRERIAESIDRWLWCGSQVSRLFRIDELRLTDAEKSRIYHFYIPVFLWCEDQVADHRSKYNDGDEIPPLVIGVSAPQGSGKTTLVFALDYLFRVSGRNSATLSIDDFYLTAAEQGKLRETHAGNALLEFRGNAGSHDLQFSIDTLESLIKLTKEGTKMKLPRYDKSAFGGRGDRADPSTWPEVEGPTEVVLFEGWMLGFKPLPNEVVTAVDPQLEVINKNLEAYYDAWDRFIESWIVIKIKEPNCVFQWRLQAEVAMRADGKAGMSDEEVMDFVSRYLPAYHAYLPTLYKEGPNGAKKDHLLVIDIDEERTPISGS

SEQ ID NO: 13653 - DNA, 1364 bp, Triticum aestivum
  misc_feature (1)..(1364): Ceres Seq. ID no. 13597061
agcatattcgtacgcgaccctgccgggaaagcggcttcccatctgcgggaagcggaaagaggaccggcttcgaagacggcggaggcgactcttgggtcgcgtcgtctccaatcttccactctgaccgactcccgaccgatctccgccggagcccgcacgacgccgtcgccgatggggttcgccgcccggccgctccccctgctcctgctgctcctggtcgccggcgcggccgccaccgaccagatcttcaccacctcaggtgtgccgttcgggaagaactcgcgcgagccgaggtaccgcgtggagttccaccccgtcgattcgccataccacccggagaatggccaggagtctgaaccaatgactgaccacgaggggagacagtacacctgctacctaccagtggaagaaaccaagaccatgaagtcgattgtcccacagaatgcaaccaatgttataatagaaagcgaacggaaagttaagccaaaggagccagatgaactgctggaggttctcaaagaccagtgcttctacaggcatgaaggttggtggtcttatgagttctgctattatgggaaaatccgacaggttcatgtagagaatgagaaggttatccaagagtatgttctaggtgaatatgaccctgatgcaaccgatgcttaccatgacaatcacacctccgaatctgctgatgaggaccacgtgaaagatacttctaagaggtatcatgtccacgtgtacacaaacgggactgtgtgtgatctcacagatataccacggtacacagaggttaggtttgtttgttccgagcccactgtactgatcagttcgataaaggagatatcttcctgcaagtatgttttaactgtccaaagcccaatgctctgcaagaacccgttgtttcagcaggaaaagcgcaccttcttcatccactgcaacgagtcgcttgcggaagcagaagctgaggccgccgaggacgacgactctctcccaaaagaagctcagatgtccatcgttccaaaccccgacgaattgcataactacgcagcttacgctacctgattgcccgccaatcacggtgccctcagctgatgaaagatgccgttattttggaagtacaacagcaagttggcaacatagtataactatcccctggcttgttctgtctgacgccaactagtggttacagggtactctttgagcagatatccattactgaaacagcttgagattaccttagaggaagattaagggcaaagagtgtcctgctgtactgtagtggtatataatttagtaaagggggtatttgagattcagtgacaggctttagacacatcaccaacaattttcctcttgaaatgttc

SEQ ID NO: 13654 - protein, 353 aa, Triticum aestivum
  peptide (1)..(353): Ceres Seq. ID no. 13597062
  misc_feature (67)..(336): NCBI GI NO: 18421420 NR Description: expressed protein [Arabidopsis thaliana]
  misc_feature (67)..(336): NCBI GI NO: 21592392 NR Description: unknown [Arabidopsis thaliana]
  misc_feature (121)..(208): NCBI GI NO: 7487985 NR Description: hypothetical protein F7N22
  misc_feature (234)..(299): NCBI GI NO: 7487985 NR Description: hypothetical protein F7N22
  misc_feature (105)..(314): NCBI GI NO: 28850402 NR Description: similar to Arabidopsis thaliana (Mouse-ear cress)
  misc_feature (96)..(320): NCBI GI NO: 12653521 NR Description: Similar to amplified in osteosarcoma
  misc_feature (96)..(320): NCBI GI NO: 5803109 NR Description: amplified in osteosarcoma [Homo sapiens]
  misc_feature (167)..(302): NCBI GI NO: 13905114 NR Description: 1300007E20 protein [Mus musculus]
  misc_feature (167)..(302): NCBI GI NO: 29243990 NR Description: hypothetical protein 1300007E20 [Mus musculus]
  misc_feature (167)..(302): NCBI GI NO: 34865743 NR Description: similar to Protein OS-9 precursor
SIFVRDPAGKAASHLREAERGPASKTAEATLGSRRLQSSTLTDSRPISAGARTTPSPMGFAARPLPLLLLLLVAGAAATDQIFTTSGVPFGKNSREPRYRVEFHPVDSPYHPENGQESEPMTDHEGRQYTCYLPVEETKTMKSIVPQNATNVIIESERKVKPKEPDELLEVLKDQCFYRHEGWWSYEFCYYGKIRQVHVENEKVIQEYVLGEYDPDATDAYHDNHTSESADEDHVKDTSKRYHVHVYTNGTVCDLTDIPRYTEVRFVCSEPTVLISSIKEISSCKYVLTVQSPMLCKNPLFQQEKRTFFIHCNESLAEAEAEAAEDDDSLPKEAQMSIVPNPDELHNYAAYAT

SEQ ID NO: 13655 - protein, 296 aa, Triticum aestivum
  peptide (1)..(296): Ceres Seq. ID no. 13597063
  misc_feature (10)..(279): NCBI GI NO: 18421420 NR Description: expressed protein [Arabidopsis thaliana]
  misc_feature (10)..(279): NCBI GI NO: 21592392 NR Description: unknown [Arabidopsis thaliana]
  misc_feature (64)..(151): NCBI GI NO: 7487985 NR Description: hypothetical protein F7N22
  misc_feature (177)..(242): NCBI GI NO: 7487985 NR Description: hypothetical protein F7N22
  misc_feature (48)..(257): NCBI GI NO: 28850402 NR Description: similar to Arabidopsis thaliana (Mouse-ear cress)
  misc_feature (39)..(263): NCBI GI NO: 12653521 NR Description: Similar to amplified in osteosarcoma
  misc_feature (39)..(263): NCBI GI NO: 5803109 NR Description: amplified in osteosarcoma [Homo sapiens]
  misc_feature (110)..(245): NCBI GI NO: 13905114 NR Description: 1300007E20 protein [Mus musculus]
  misc_feature (110)..(245): NCBI GI NO: 29243990 NR Description: hypothetical protein 1300007E20 [Mus musculus]
  misc_feature (110)..(245): NCBI GI NO: 34865743 NR Description: similar to Protein OS-9 precursor
MGFAARPLPLLLLLLVAGAAATDQIFTTSGVPFGKNSREPRYRVEFHPVDSPYHPENGQESEPMTDHEGRQYTCYLPVEETKTMKSIVPQNATNVIIESERKVKPKEPDELLEVLKDQCFYRHEGWWSYEFCYYGKIRQVHVENEKVIQEYVLGEYDPDATDAYHDNHTSESADEDHVKDTSKRYHVHVYTNGTVCDLTDIPRYTEVRFVCSEPTVLISSIKEISSCKYVLTVQSPMLCKNPLFQQEKRTFFIHCNESLAEAEAEAAEDDDSLPKEAQMSIVPNPDELHNYAAYAT

SEQ ID NO: 13656 - protein, 233 aa, Triticum aestivum
  peptide (1)..(233): Ceres Seq. ID no. 13597064
  misc_feature (1)..(216): NCBI GI NO: 18421420 NR Description: expressed protein [Arabidopsis thaliana]
  misc_feature (1)..(216): NCBI GI NO: 21592392 NR Description: unknown [Arabidopsis thaliana]
  misc_feature (1)..(88): NCBI GI NO: 7487985 NR Description: hypothetical protein F7N22
  misc_feature (114)..(179): NCBI GI NO: 7487985 NR Description: hypothetical protein F7N22
  misc_feature (1)..(194): NCBI GI NO: 28850402 NR Description: similar to Arabidopsis thaliana (Mouse-ear cress)
  misc_feature (1)..(200): NCBI GI NO: 12653521 NR Description: Similar to amplified in osteosarcoma
  misc_feature (1)..(200): NCBI GI NO: 5803109 NR Description: amplified in osteosarcoma [Homo sapiens]
  misc_feature (47)..(182): NCBI GI NO: 13905114 NR Description: 1300007E20 protein [Mus musculus]
  misc_feature (47)..(182): NCBI GI NO: 29243990 NR Description: hypothetical protein 1300007E20 [Mus musculus]
  misc_feature (47)..(182): NCBI GI NO: 34865743 NR Description: similar to Protein OS-9 precursor
MTDHEGRQYTCYLPVEETKTMKSIVPQNATNVIIESERKVKPKEPDELLEVLKDQCFYRHEGWWSYEFCYYGKIRQVHVENEKVIQEYVLGEYDPDATDAYHDNHTSESADEDHVKDTSKRYHVHVYTNGTVCDLTDIPRYTEVRFVCSEPTVLISSIKEISSCKYVLTVQSPMLCKNPLFQQEKRTFFIHCNESLAEAEAEAAEDDDSLPKEAQMSIVPNPDELHNYAAYAT

SEQ ID NO: 13657 - DNA, 827 bp, Triticum aestivum
  misc_feature (1)..(827): Ceres Seq. ID no. 13597065
cccaagtaagcaaagcagccaggtcggacccaatcaaacccaaagaaagcaagaactttccccggccgtccatggccacctaccccctcctcctcctcttcgccgccgtcgccgtagccgtagcggcggcgtcgtccgcgggggacaagccaacggcgtacgagatgctggagcggtacgacttcccgcggggcatcctgccggagggggtggaggggtacgagctcgatccggacggcggcttccaggtgtacttcccgcgggagtgcgagttcctgctagcgaagcagtggctggtcaagtacgacacgcgcatcgccggcgccgccagcgcgggcaagctcgcggcgctgcagggcatctacgtcaaggtactcttcctgtggatccccgtcgccgaggtcgaccgcgccggcgaccgcctcagcttctacatcggccccgtctccacgtccttcccgctaagcgacttcgccagcagcccgcactgtcgcggctaccacgaccgcgccgccgtcgctgcggccgtctcgtgaatcatatgctttttacatgtactcctacttagctactgctgctggggggaaatagtatatttcacatggaaaactctattgatacggcctgattatttgaacaagacgcacaagagtcattgtttcaattaaccttctgtgccgtggtggttcgtggatatcacaatgagctctatacgattccagtttagcttgagagccaatgttggcgtttcgcaggagccagcgtttatctagaattttcttgagatgtactggtatgtatttatagatcacagattagtttatggt

SEQ ID NO: 13658 - protein, 188 aa, Triticum aestivum
  peptide (1)..(188): Ceres Seq. ID no. 13597066
PSKQSSQVGPNQTQRKQELSPAVHGHLPPPPPLRRRRRSRSGGVVRGGQANGVRDAGAVRLPAGHPAGGGGGVRARSGRRLPGVLPAGVRVPASEAVAGQVRHAHRRRRQRGQARGAAGHLRQGTLPVDPRRRGRPRRRPPQLLHRPRLHVLPAKRLRQQPALSRLPRPRRRRCGRLVNHMLFTCTPT

SEQ ID NO: 13659 - protein, 177 aa, Triticum aestivum
  peptide (1)..(177): Ceres Seq. ID no. 13597067
  misc_feature (30)..(163): Pfam Name: Pfam Description:  Protein of unknown function, DUF538
  misc_feature (24)..(163): NCBI GI NO: 18411923 NR Description: expressed protein [Arabidopsis thaliana]
  misc_feature (24)..(163): NCBI GI NO: 21554037 NR Description: unknown [Arabidopsis thaliana]
  misc_feature (32)..(163): NCBI GI NO: 18379014 NR Description: expressed protein [Arabidopsis thaliana]
  misc_feature (29)..(163): NCBI GI NO: 15235335 NR Description: expressed protein [Arabidopsis thaliana]
  misc_feature (24)..(163): NCBI GI NO: 18379012 NR Description: expressed protein [Arabidopsis thaliana]
  misc_feature (24)..(163): NCBI GI NO: 21553750 NR Description: unknown [Arabidopsis thaliana]
  misc_feature (30)..(163): NCBI GI NO: 29824472 NR Description: hypothetical protein
  misc_feature (24)..(163): NCBI GI NO: 34912320 NR Description: P0451D05.23
  misc_feature (24)..(163): NCBI GI NO: 28273408 NR Description: unknown protein
  misc_feature (16)..(163): NCBI GI NO: 18405296 NR Description: expressed protein [Arabidopsis thaliana]
QVSKAARSDPIKPKESKNFPRPSMATYPLLLLFAAVAVAVAAASSAGDKPTAYEMLERYDFPRGILPEGVEGYELDPDGGFQVYFPRECEFLLAKQWLVKYDTRIAGAASAGKLAALQGIYVKVLFLWIPVAEVDRAGDRLSFYIGPVSTSFPLSDFASSPHCRGYHDRAAVAAAVS

SEQ ID NO: 13660 - protein, 154 aa, Triticum aestivum
  peptide (1)..(154): Ceres Seq. ID no. 13597068
  misc_feature (7)..(140): Pfam Name: Pfam Description:  Protein of unknown function, DUF538
  misc_feature (1)..(140): NCBI GI NO: 18411923 NR Description: expressed protein [Arabidopsis thaliana]
  misc_feature (1)..(140): NCBI GI NO: 21554037 NR Description: unknown [Arabidopsis thaliana]
  misc_feature (9)..(140): NCBI GI NO: 18379014 NR Description: expressed protein [Arabidopsis thaliana]
  misc_feature (6)..(140): NCBI GI NO: 15235335 NR Description: expressed protein [Arabidopsis thaliana]
  misc_feature (1)..(140): NCBI GI NO: 18379012 NR Description: expressed protein [Arabidopsis thaliana]
  misc_feature (1)..(140): NCBI GI NO: 21553750 NR Description: unknown [Arabidopsis thaliana]
  misc_feature (7)..(140): NCBI GI NO: 29824472 NR Description: hypothetical protein
  misc_feature (1)..(140): NCBI GI NO: 34912320 NR Description: P0451D05.23
  misc_feature (1)..(140): NCBI GI NO: 28273408 NR Description: unknown protein
  misc_feature (1)..(140): NCBI GI NO: 18405296 NR Description: expressed protein [Arabidopsis thaliana]
MATYPLLLLFAAVAVAVAAASSAGDKPTAYEMLERYDFPRGILPEGVEGYELDPDGGFQVYFPRECEFLLAKQWLVKYDTRIAGAASAGKLAALQGIYVKVLFLWIPVAEVDRAGDRLSFYIGPVSTSFPLSDFASSPHCRGYHDRAAVAAAVS

SEQ ID NO: 13661 - DNA, 1262 bp, Triticum aestivum
  misc_feature (1)..(1262): Ceres Seq. ID no. 13598439
attttctcagaaaaccactacattctgcctctccgttctgttcttgccttgttctatttttcggctctgctgtacatggcgtcggctgcaggtgaggggaggagccgggtgctggtgataggcggcaccggctacatcggccgcttcatcgtcgccgccagcgcacgcgagggccaccccaccgccgtcctcgtccgcgacgccgcgcccgccgacccagccaaggccgccgtcctccagggattccgggatgccggcgtcgccatcgtcgagggtgatatgtatgatcatgagagcctggtgacagccattaaatcagcagatgttgtgatctcggccgtgggttatcaacagctaccggatcaaactctcattatctcggcaattaaggaagttgggcatgtaaagagattcttcccatcagagtatggtaatgatgtggatcgtaaccatgcagttgaacctgcaaagacagtattcggtgggaaagctcgtataaggcgtgccattgaggctgagggaattccctacacatatgtctcttccaacttctttgctggtcgtttcttgcgaagccttgcgcagattggggtcacggagcctccaactgagaaggttctcattatgggtgatggaaatgtaaaaggagtctttacggcggaagaagacgtgggaacctacactattaaagctgtagatgatccaaggaccctgaacaaaatcctgtatctgaggccaccaagcaacactttgtcccataacgagcttgtctcactctgggagaagaaacttggtaagacacttgagagggtgtacctcccagaagacgaactcctgaagaagattcaagggccgctgagtgtaccactggcaatcagccactctgtctggttgaagggggaccacactaactttgagatcgacccatcatttggagttgaagccactcagctttaccctgatgtgccttacattaccgtggatgaatacctaaataggttcctttaaactcctaaatcctatcgtccccaatattcatatactttgaataaatgttggaggttgtgtatttttattagaatggcacgtgaattacgtaatagtgtgagacctcaatcatgtgaggaatgcatcttgcattcccttgagcttagaatatataaaccgaggttgtataaatttggaaattttagcttgatggaacatgataccgtatgtaacagcccgggggtttacgccaaattagaaattgtttgttattt

SEQ ID NO: 13662 - protein, 335 aa, Triticum aestivum
  peptide (1)..(335): Ceres Seq. ID no. 13598440
  misc_feature (34)..(335): Pfam Name: Pfam Description:  Isoflavone reductase
  misc_feature (34)..(335): NCBI GI NO: 3243234 NR Description: isoflavone reductase related protein
  misc_feature (30)..(335): NCBI GI NO: 6573171 NR Description: isoflavone reductase homolog 2 [Glycine max]
  misc_feature (34)..(335): NCBI GI NO: 10764491 NR Description: allergenic isoflavone reductase-like protein Bet v6
  misc_feature (34)..(327): NCBI GI NO: 4731376 NR Description: isoflavone reductase homolog Bet v 6.0101
  misc_feature (34)..(327): NCBI GI NO: 7484603 NR Description: 2'-hydroxyisoflavone reductase (EC 1
  misc_feature (34)..(335): NCBI GI NO: 7578895 NR Description: phenylcoumaran benzylic ether reductase homolog Fi1
  misc_feature (34)..(335): NCBI GI NO: 7578897 NR Description: phenylcoumaran benzylic ether reductase homolog Fi2
  misc_feature (34)..(335): NCBI GI NO: 15234993 NR Description: isoflavone reductase, putative
  misc_feature (34)..(335): NCBI GI NO: 19310585 NR Description: putative NAD
  misc_feature (33)..(335): NCBI GI NO: 1708422 NR Description: ISOFLAVONE REDUCTASE HOMOLOG (CP100)
IFSENHYILPLRSVLALFYFSALLYMASAAGEGRSRVLVIGGTGYIGRFIVAASAREGHPTAVLVRDAAPADPAKAAVLQGFRDAGVAIVEGDMYDHESLVTAIKSADVVISAVGYQQLPDQTLIISAIKEVGHVKRFFPSEYGNDVDRNHAVEPAKTVFGGKARIRRAIEAEGIPYTYVSSNFFAGRFLRSLAQIGVTEPPTEKVLIMGDGNVKGVFTAEEDVGTYTIKAVDDPRTLNKILYLRPPSNTLSHNELVSLWEKKLGKTLERVYLPEDELLKKIQGPLSVPLAISHSVWLKGDHTNFEIDPSFGVEATQLYPDVPYITVDEYLNRFL

SEQ ID NO: 13663 - protein, 310 aa, Triticum aestivum
  peptide (1)..(310): Ceres Seq. ID no. 13598441
  misc_feature (9)..(310): Pfam Name: Pfam Description:  Isoflavone reductase
  misc_feature (9)..(310): NCBI GI NO: 3243234 NR Description: isoflavone reductase related protein
  misc_feature (5)..(310): NCBI GI NO: 6573171 NR Description: isoflavone reductase homolog 2 [Glycine max]
  misc_feature (9)..(310): NCBI GI NO: 10764491 NR Description: allergenic isoflavone reductase-like protein Bet v6
  misc_feature (9)..(302): NCBI GI NO: 4731376 NR Description: isoflavone reductase homolog Bet v 6.0101
  misc_feature (9)..(302): NCBI GI NO: 7484603 NR Description: 2'-hydroxyisoflavone reductase (EC 1
  misc_feature (9)..(310): NCBI GI NO: 7578895 NR Description: phenylcoumaran benzylic ether reductase homolog Fi1
  misc_feature (9)..(310): NCBI GI NO: 7578897 NR Description: phenylcoumaran benzylic ether reductase homolog Fi2
  misc_feature (9)..(310): NCBI GI NO: 15234993 NR Description: isoflavone reductase, putative
  misc_feature (9)..(310): NCBI GI NO: 19310585 NR Description: putative NAD
  misc_feature (8)..(310): NCBI GI NO: 1708422 NR Description: ISOFLAVONE REDUCTASE HOMOLOG (CP100)
MASAAGEGRSRVLVIGGTGYIGRFIVAASAREGHPTAVLVRDAAPADPAKAAVLQGFRDAGVAIVEGDMYDHESLVTAIKSADVVISAVGYQQLPDQTLIISAIKEVGHVKRFFPSEYGNDVDRNHAVEPAKTVFGGKARIRRAIEAEGIPYTYVSSNFFAGRFLRSLAQIGVTEPPTEKVLIMGDGNVKGVFTAEEDVGTYTIKAVDDPRTLNKILYLRPPSNTLSHNELVSLWEKKLGKTLERVYLPEDELLKKIQGPLSVPLAISHSVWLKGDHTNFEIDPSFGVEATQLYPDVPYITVDEYLNRFL

SEQ ID NO: 13664 - protein, 242 aa, Triticum aestivum
  peptide (1)..(242): Ceres Seq. ID no. 13598442
  misc_feature (1)..(242): Pfam Name: Pfam Description:  Isoflavone reductase
  misc_feature (1)..(242): NCBI GI NO: 3243234 NR Description: isoflavone reductase related protein
  misc_feature (1)..(242): NCBI GI NO: 6573171 NR Description: isoflavone reductase homolog 2 [Glycine max]
  misc_feature (1)..(242): NCBI GI NO: 10764491 NR Description: allergenic isoflavone reductase-like protein Bet v6
  misc_feature (1)..(234): NCBI GI NO: 4731376 NR Description: isoflavone reductase homolog Bet v 6.0101
  misc_feature (1)..(234): NCBI GI NO: 7484603 NR Description: 2'-hydroxyisoflavone reductase (EC 1
  misc_feature (1)..(242): NCBI GI NO: 7578895 NR Description: phenylcoumaran benzylic ether reductase homolog Fi1
  misc_feature (1)..(242): NCBI GI NO: 7578897 NR Description: phenylcoumaran benzylic ether reductase homolog Fi2
  misc_feature (1)..(242): NCBI GI NO: 15234993 NR Description: isoflavone reductase, putative
  misc_feature (1)..(242): NCBI GI NO: 19310585 NR Description: putative NAD
  misc_feature (1)..(242): NCBI GI NO: 1708422 NR Description: ISOFLAVONE REDUCTASE HOMOLOG (CP100)
MYDHESLVTAIKSADVVISAVGYQQLPDQTLIISAIKEVGHVKRFFPSEYGNDVDRNHAVEPAKTVFGGKARIRRAIEAEGIPYTYVSSNFFAGRFLRSLAQIGVTEPPTEKVLIMGDGNVKGVFTAEEDVGTYTIKAVDDPRTLNKILYLRPPSNTLSHNELVSLWEKKLGKTLERVYLPEDELLKKIQGPLSVPLAISHSVWLKGDHTNFEIDPSFGVEATQLYPDVPYITVDEYLNRFL

SEQ ID NO: 13665 - DNA, 1607 bp, Triticum aestivum
  misc_feature (1)..(1607): Ceres Seq. ID no. 13597043
agcttaggaaatcctaaaccctagccccctctccccactcccatggcgccgccgtcgcaactggtgctcgcggcctcctccaccgacgccggcgtggccgcgtgggacctccgcacggggtccgaggccatccgccaccgcccctgcgcctcccggccacgtgccgtcgctgccgtcgccggccgcttcctcgccgccgcccaaatcgccgccggcaactccgcccccatccactactaccactgggacaagcctcaggtggctgtgaagagcttccccgccgagccaatccgcgcgctcattgctgacccggaggggaactatctcatcggcggcggtgtgtccggtgacatattcttttgggaggtggctagtggagagctgcttgtccgatggcatgctcactatcgtgatgttaggtgccttgccctctatgacatgttgcttgtctcagcgtccgaggatgggagcatcaaaatttgggatcttctcacgatgcttgatgagcaatcaaggtttgaggcaaagacgccatacctatacaacttcaatcagcacacacttcctgtaactgatattgcttgttttcatggagcaattgctgtgtcatcttcagaggaccgcacatgtaaaatatggagtctatcagagggcaggatgctgagaagtatttcatttcctgctatcattgattctgttgaaatagacccaagaagtcatattttctatgctggtggtagagatggaaagatatatgttactgctatgggtgttgatgcctcctctcagggccgtgatgattcgtctattctcggtattctggatgaccacagcaaggcggtaacgagcttaacatcaagtacagatggccttctactagtctctggttcggaggatggtaatgttcgggtttgggataccagaagtcagcaagtaacccgaaaattcaaaccctcccaaggtccagtaactaatgttctcatagtaacacccaaaagattaaacctgccacctttacaaccattgcggaaagtgtgcgcagcaagtggcgaagttgtaccacgagctgtaattctgcccaaccctgaaaatgatgttcatattgctggaaatctcagctctaaccttctagagcagctcttggatgcacagcagcacggcagctctaggttatttgattctggggtgagcactctcaatggcgtaccaaaccaacagggggcagaatggagaagtaaatacctagagttgcaggatctttttgtgcatgaggttcttggtgatatgtcatcttaatggacatatgataccacaagactggatattatgggctactgtcagttaggaggtttgtggtgaagaactgttcaacacatgatttggtgttcaactagcaaacctgggaaatccatggatgccaaagatgacttccttataacaaggaaactccttacctttcattgcgtccacatgtcaattgacatgtggcagagccatatcagaaatagtaggaaaaactataaacggagcaaagatgggacatcttaaactgtaattcgactgtgtaaacagaaatgaagaaattttcgcttattgtggggtactgc

SEQ ID NO: 13666 - protein, 417 aa, Triticum aestivum
  peptide (1)..(417): Ceres Seq. ID no. 15222022
  misc_feature (113)..(148): Pfam Name: Pfam Description:  WD domain, G-beta repeat
  misc_feature (1)..(271): NCBI GI NO: 33354207 NR Description: transducin / WD-40 repeat protein family -likeprotein
  misc_feature (8)..(315): NCBI GI NO: 15229101 NR Description: transducin / WD-40 repeat protein family
  misc_feature (8)..(315): NCBI GI NO: 21592898 NR Description: unknown [Arabidopsis thaliana]
  misc_feature (109)..(271): NCBI GI NO: 34897604 NR Description: G-protein beta family-like protein
  misc_feature (1)..(109): NCBI GI NO: 34897606 NR Description: G-protein beta family-like protein
  misc_feature (1)..(327): NCBI GI NO: 34862331 NR Description: similar to WD-repeat protein 18
  misc_feature (1)..(315): NCBI GI NO: 33859749 NR Description: WD repeat domain 18 [Homo sapiens]
  misc_feature (1)..(315): NCBI GI NO: 3025445 NR Description: R32184_1 [Homo sapiens]
  misc_feature (7)..(410): NCBI GI NO: 20128895 NR Description: CG14805-PA [Drosophila melanogaster]
  misc_feature (104)..(327): NCBI GI NO: 21432060 NR Description: 2310012I10Rik protein [Mus musculus]
MAPPSQLVLAASSTDAGVAAWDLRTGSEAIRHRPCASRPRAVAAVAGRFLAAAQIAAGNSAPIHYYHWDKPQVAVKSFPAEPIRALIADPEGNYLIGGGVSGDIFFWEVASGELLVRWHAHYRDVRCLALYDMLLVSASEDGSIKIWDLLTMLDEQSRFEAKTPYLYNFNQHTLPVTDIACFHGAIAVSSSEDRTCKIWSLSEGRMLRSISFPAIIDSVEIDPRSHIFYAGGRDGKIYVTAMGVDASSQGRDDSSILGILDDHSKAVTSLTSSTDGLLLVSGSEDGNVRVWDTRSQQVTRKFKPSQGPVTNVLIVTPKRLNLPPLQPLRKVCAASGEVVPRAVILPNPENDVHIAGNLSSNLLEQLLDAQQHGSSRLFDSGVSTLNGVPNQQGAEWRSKYLELQDLFVHEVLGDMSS

SEQ ID NO: 13667 - protein, 285 aa, Triticum aestivum
  peptide (1)..(285): Ceres Seq. ID no. 15222023
  misc_feature (1)..(139): NCBI GI NO: 33354207 NR Description: transducin / WD-40 repeat protein family -likeprotein
  misc_feature (1)..(183): NCBI GI NO: 15229101 NR Description: transducin / WD-40 repeat protein family
  misc_feature (1)..(183): NCBI GI NO: 21592898 NR Description: unknown [Arabidopsis thaliana]
  misc_feature (1)..(139): NCBI GI NO: 34897604 NR Description: G-protein beta family-like protein
  misc_feature (1)..(195): NCBI GI NO: 34862331 NR Description: similar to WD-repeat protein 18
  misc_feature (1)..(183): NCBI GI NO: 33859749 NR Description: WD repeat domain 18 [Homo sapiens]
  misc_feature (1)..(183): NCBI GI NO: 3025445 NR Description: R32184_1 [Homo sapiens]
  misc_feature (1)..(278): NCBI GI NO: 20128895 NR Description: CG14805-PA [Drosophila melanogaster]
  misc_feature (1)..(195): NCBI GI NO: 21432060 NR Description: 2310012I10Rik protein [Mus musculus]
  misc_feature (1)..(278): NCBI GI NO: 20151747 NR Description: RE49866p [Drosophila melanogaster]
MLLVSASEDGSIKIWDLLTMLDEQSRFEAKTPYLYNFNQHTLPVTDIACFHGAIAVSSSEDRTCKIWSLSEGRMLRSISFPAIIDSVEIDPRSHIFYAGGRDGKIYVTAMGVDASSQGRDDSSILGILDDHSKAVTSLTSSTDGLLLVSGSEDGNVRVWDTRSQQVTRKFKPSQGPVTNVLIVTPKRLNLPPLQPLRKVCAASGEVVPRAVILPNPENDVHIAGNLSSNLLEQLLDAQQHGSSRLFDSGVSTLNGVPNQQGAEWRSKYLELQDLFVHEVLGDMSS

SEQ ID NO: 13668 - protein, 266 aa, Triticum aestivum
  peptide (1)..(266): Ceres Seq. ID no. 15222024
  misc_feature (1)..(120): NCBI GI NO: 33354207 NR Description: transducin / WD-40 repeat protein family -likeprotein
  misc_feature (1)..(164): NCBI GI NO: 15229101 NR Description: transducin / WD-40 repeat protein family
  misc_feature (1)..(164): NCBI GI NO: 21592898 NR Description: unknown [Arabidopsis thaliana]
  misc_feature (1)..(120): NCBI GI NO: 34897604 NR Description: G-protein beta family-like protein
  misc_feature (1)..(176): NCBI GI NO: 34862331 NR Description: similar to WD-repeat protein 18
  misc_feature (1)..(164): NCBI GI NO: 33859749 NR Description: WD repeat domain 18 [Homo sapiens]
  misc_feature (1)..(164): NCBI GI NO: 3025445 NR Description: R32184_1 [Homo sapiens]
  misc_feature (1)..(259): NCBI GI NO: 20128895 NR Description: CG14805-PA [Drosophila melanogaster]
  misc_feature (1)..(176): NCBI GI NO: 21432060 NR Description: 2310012I10Rik protein [Mus musculus]
  misc_feature (1)..(259): NCBI GI NO: 20151747 NR Description: RE49866p [Drosophila melanogaster]
MLDEQSRFEAKTPYLYNFNQHTLPVTDIACFHGAIAVSSSEDRTCKIWSLSEGRMLRSISFPAIIDSVEIDPRSHIFYAGGRDGKIYVTAMGVDASSQGRDDSSILGILDDHSKAVTSLTSSTDGLLLVSGSEDGNVRVWDTRSQQVTRKFKPSQGPVTNVLIVTPKRLNLPPLQPLRKVCAASGEVVPRAVILPNPENDVHIAGNLSSNLLEQLLDAQQHGSSRLFDSGVSTLNGVPNQQGAEWRSKYLELQDLFVHEVLGDMSS

SEQ ID NO: 13669 - DNA, 1469 bp, Triticum aestivum
  misc_feature (1)..(1469): Ceres Seq. ID no. 13655454
acattttttcttacgacggcgttgctcttttttcttacgatggctccatgaagggatgaggtgatatgggttccctcttccctccatggccgctgccttccaccgttcgtcctctcccggccgctcgtcgccgaccccgggagcaccaccacgcgcccctcgccgttccgtcctcctcgtctcatcacgtccgtctccctcctccctcttcttcgcgcagtgagctccgtctcacccaaactgacctagcccgggcgcacacgccggcgtcgaggcgtgccgtgctccgtccaagaactgccccggaagccgatgccgcggcggccctcatggtcgtccgcgcggaggccggcgacttcgcgcgggctcagtccatctgggcgcagctcctgctcagctccgccgcgccgtgcctggccgccgcagcgcccagcctcctcccggcgtacgcgcgtctcggtcgctacgacgaggtcctcctcgccgcgcgggagctctccgcgcgcgaccccgccgcggcgcgggacctctacccgctcgccgtctcctgcctcggcgccgccggcgagctcgccctcatggaggacgccgtgcaggagatggcccgcgccggcctccgcgtcgactccgccaccggcaacgccttcgtgcggcactacgcggcctccggcaccgtaccggagatggaggcggcggtcggccggctcaagaagtccggcctcctcatctccgtcgacgccatccgcgccgtcgcttcagcgtacatcgccaaccggaagtactacaagctcggcgagttcgtcaggggcgtcggcctcggccgccgggacgccggcaacctgctctggaacctctacctcctctccttcgcggccaacttcaagatgaagtcgctgcagcgcgccttcctggagatgaccgccgccgggtgccggccggacctcaccaccttcaacatccgcgccgccgccttctccaagatgtgcatgttctgggacctccacctcaccgccgagcacatgcgccgcgacggcgtcgcgccggacctcgtcacgcacggctgcttcgtggacgcctacatggagcgccggctcgcgcgcaacctctccttcgcgttccgccggctggacggctcaggcgagcccgtggtggccacggacggcgtcgtgttcgaggcgttcggcaaggggggcttccacaccacctccgaggggctgctagaggcggccggcgggaagcggcgatggacgtaccacgacttgctcggcgtctacctgaggaagcagcacaggagaaaccaaatcttttggaactactgatcttcaccagtacagcactgttacactagtgcaacaaggtagtagtaccagatgctacgatgtacagggatgatgttatgcttagaaacaaaatcatagatgtaatggaactatggaagagtctttgtaaagatgattgtgccaaatttg

SEQ ID NO: 13670 - protein, 417 aa, Triticum aestivum
  peptide (1)..(417): Ceres Seq. ID no. 13655455
  misc_feature (294)..(328): Pfam Name: Pfam Description:  PPR repeat
  misc_feature (80)..(417): NCBI GI NO: 11358001 NR Description: hypothetical protein T12K4
  misc_feature (89)..(417): NCBI GI NO: 18407249 NR Description: pentatricopeptide (PPR) repeat-containing protein
  misc_feature (79)..(407): NCBI GI NO: 22328618 NR Description: pentatricopeptide (PPR) repeat-containing protein
  misc_feature (79)..(407): NCBI GI NO: 7488181 NR Description: probable salt-inducible protein - Arabidopsisthaliana
MGSLFPPWPLPSTVRPLPAARRRPREHHHAPLAVPSSSSHHVRLPPPSSSRSELRLTQTDLARAHTPASRRAVLRPRTAPEADAAAALMVVRAEAGDFARAQSIWAQLLLSSAAPCLAAAAPSLLPAYARLGRYDEVLLAARELSARDPAAARDLYPLAVSCLGAAGELALMEDAVQEMARAGLRVDSATGNAFVRHYAASGTVPEMEAAVGRLKKSGLLISVDAIRAVASAYIANRKYYKLGEFVRGVGLGRRDAGNLLWNLYLLSFAANFKMKSLQRAFLEMTAAGCRPDLTTFNIRAAAFSKMCMFWDLHLTAEHMRRDGVAPDLVTHGCFVDAYMERRLARNLSFAFRRLDGSGEPVVATDGVVFEAFGKGGFHTTSEGLLEAAGGKRRWTYHDLLGVYLRKQHRRNQIFWNY

SEQ ID NO: 13671 - protein, 329 aa, Triticum aestivum
  peptide (1)..(329): Ceres Seq. ID no. 13655456
  misc_feature (206)..(240): Pfam Name: Pfam Description:  PPR repeat
  misc_feature (1)..(329): NCBI GI NO: 11358001 NR Description: hypothetical protein T12K4
  misc_feature (1)..(329): NCBI GI NO: 18407249 NR Description: pentatricopeptide (PPR) repeat-containing protein
  misc_feature (1)..(319): NCBI GI NO: 22328618 NR Description: pentatricopeptide (PPR) repeat-containing protein
  misc_feature (1)..(319): NCBI GI NO: 7488181 NR Description: probable salt-inducible protein - Arabidopsisthaliana
MVVRAEAGDFARAQSIWAQLLLSSAAPCLAAAAPSLLPAYARLGRYDEVLLAARELSARDPAAARDLYPLAVSCLGAAGELALMEDAVQEMARAGLRVDSATGNAFVRHYAASGTVPEMEAAVGRLKKSGLLISVDAIRAVASAYIANRKYYKLGEFVRGVGLGRRDAGNLLWNLYLLSFAANFKMKSLQRAFLEMTAAGCRPDLTTFNIRAAAFSKMCMFWDLHLTAEHMRRDGVAPDLVTHGCFVDAYMERRLARNLSFAFRRLDGSGEPVVATDGVVFEAFGKGGFHTTSEGLLEAAGGKRRWTYHDLLGVYLRKQHRRNQIFWNY

SEQ ID NO: 13672 - protein, 246 aa, Triticum aestivum
  peptide (1)..(246): Ceres Seq. ID no. 13655457
  misc_feature (123)..(157): Pfam Name: Pfam Description:  PPR repeat
  misc_feature (1)..(246): NCBI GI NO: 11358001 NR Description: hypothetical protein T12K4
  misc_feature (1)..(246): NCBI GI NO: 18407249 NR Description: pentatricopeptide (PPR) repeat-containing protein
  misc_feature (1)..(236): NCBI GI NO: 22328618 NR Description: pentatricopeptide (PPR) repeat-containing protein
  misc_feature (1)..(236): NCBI GI NO: 7488181 NR Description: probable salt-inducible protein - Arabidopsisthaliana
MEDAVQEMARAGLRVDSATGNAFVRHYAASGTVPEMEAAVGRLKKSGLLISVDAIRAVASAYIANRKYYKLGEFVRGVGLGRRDAGNLLWNLYLLSFAANFKMKSLQRAFLEMTAAGCRPDLTTFNIRAAAFSKMCMFWDLHLTAEHMRRDGVAPDLVTHGCFVDAYMERRLARNLSFAFRRLDGSGEPVVATDGVVFEAFGKGGFHTTSEGLLEAAGGKRRWTYHDLLGVYLRKQHRRNQIFWNY

SEQ ID NO: 13673 - DNA, 1467 bp, Triticum aestivum
  misc_feature (1)..(1467): Ceres Seq. ID no. 13584019
acaatatataccaggttaaaatctactgcgacggacgagtaacgaaaacggaacgacagatcctgcacgggccacataaaatccaacaatatctgaagccccgatctggatctgggggtgaggccgtgggagcgcgatggggatcagtccatcgtcgttgcgacccccatggagctcgcggcgggccgccacgaaggccgcgccccctgctgcgaccgagggcggcggcggcactcccgtccggctgccgctgccgcacgatgtggtcttcgacatcctgtcgtgggtgccggtgaagtcggcgtgccggttcaaatccgtgtgccgggagtggcgcgccctcatcaacgaccctgccttcgtcgccgcgcacaaggctcgcgcggagccgctcctcgccatcgccgccgactcgtgcgacgagccgtcgaccctgcggctcatcgacatggacggccacatcatcaaggtgatcaaaaactctcttccgattttaaggcttgtctgcagcagccctggcaacctgatgtgcgtcatcgggtatgcgctggggatagccagagtgctcaaccttgcaaccggagaggctgctgtgattgaactcacatctaactttatgggcttcggccgcgccgccccgtcgggcgcctacaagattgtctgcgttagtcccggcagcaccgagatcctcacggtaggagacggcgtgtgctggaggcaagctcagcccctgcctagcagcagcatctcgtataacagccgccctgtcgtggtcaggggtgtcatgtacttgattttagtttcacagctcaatggtgacagcgtgatctgcttcgatcttgagagcgaggagtggaagggggggatcagaggcccgccgagtagcgaacgtcagcggtgtgacgctagcttgcaggaactcaacggggccctgtgtatgctcctgccggaggtcggaaacatttaccatggaaccatgagcatatggctcctgatagattcacgcaagggggtctggatcaaggtgtactcgatccccatggacccgtctgcgtatagtctgatcacgcctttgaggatactaggtgataatggtaaactgctcttccatgtcacgcttagcttcgacgaattcgcagtgctgcaaatctacgaccctcgtcatcggacattcacggacgcgcccaaggtgcttgcgggtgacaacggcggcagtatcagcctttgcagcttgcatctggatagttttctgccggccaacgtctagtgctataaattgtacctatgtgctcgtcctggattgttttattgattgaaaaggttaatttctcaaaagaacaaggtcatactactcctttagagttgacggaaactggctatgtgtctccttggaaaacttctcaggtgggtaatattttgatgtggtgtggtgtgcttgacttgaaattggagtatcgtaatcctcag

SEQ ID NO: 13674 - protein, 376 aa, Triticum aestivum
  peptide (1)..(376): Ceres Seq. ID no. 13584020
  misc_feature (36)..(81): Pfam Name: Pfam Description:  F-box domain
  misc_feature (164)..(348): NCBI GI NO: 28411801 NR Description: OJ1559_F09.9
  misc_feature (21)..(175): NCBI GI NO: 28411801 NR Description: OJ1559_F09.9
  misc_feature (3)..(152): NCBI GI NO: 34394081 NR Description: hypothetical protein
  misc_feature (14)..(187): NCBI GI NO: 34393278 NR Description: hypothetical protein
  misc_feature (39)..(184): NCBI GI NO: 34900700 NR Description: hypothetical protein~predicted by GeneMark
  misc_feature (6)..(302): NCBI GI NO: 38346527 NR Description: OSJNBa0040D17.2
  misc_feature (17)..(154): NCBI GI NO: 34900696 NR Description: hypothetical protein~predicted by FGENESH etc.
  misc_feature (17)..(154): NCBI GI NO: 33146635 NR Description: unknown protein
MGISPSSLRPPWSSRRAATKAAPPAATEGGGGTPVRLPLPHDVVFDILSWVPVKSACRFKSVCREWRALINDPAFVAAHKARAEPLLAIAADSCDEPSTLRLIDMDGHIIKVIKNSLPILRLVCSSPGNLMCVIGYALGIARVLNLATGEAAVIELTSNFMGFGRAAPSGAYKIVCVSPGSTEILTVGDGVCWRQAQPLPSSSISYNSRPVVVRGVMYLILVSQLNGDSVICFDLESEEWKGGIRGPPSSERQRCDASLQELNGALCMLLPEVGNIYHGTMSIWLLIDSRKGVWIKVYSIPMDPSAYSLITPLRILGDNGKLLFHVTLSFDEFAVLQIYDPRHRTFTDAPKVLAGDNGGSISLCSLHLDSFLPANV

SEQ ID NO: 13675 - protein, 272 aa, Triticum aestivum
  peptide (1)..(272): Ceres Seq. ID no. 13584021
  misc_feature (60)..(244): NCBI GI NO: 28411801 NR Description: OJ1559_F09.9
  misc_feature (1)..(71): NCBI GI NO: 28411801 NR Description: OJ1559_F09.9
  misc_feature (1)..(48): NCBI GI NO: 34394081 NR Description: hypothetical protein
  misc_feature (1)..(83): NCBI GI NO: 34393278 NR Description: hypothetical protein
  misc_feature (1)..(80): NCBI GI NO: 34900700 NR Description: hypothetical protein~predicted by GeneMark
  misc_feature (1)..(198): NCBI GI NO: 38346527 NR Description: OSJNBa0040D17.2
  misc_feature (1)..(50): NCBI GI NO: 34900696 NR Description: hypothetical protein~predicted by FGENESH etc.
  misc_feature (1)..(50): NCBI GI NO: 33146635 NR Description: unknown protein
MDGHIIKVIKNSLPILRLVCSSPGNLMCVIGYALGIARVLNLATGEAAVIELTSNFMGFGRAAPSGAYKIVCVSPGSTEILTVGDGVCWRQAQPLPSSSISYNSRPVVVRGVMYLILVSQLNGDSVICFDLESEEWKGGIRGPPSSERQRCDASLQELNGALCMLLPEVGNIYHGTMSIWLLIDSRKGVWIKVYSIPMDPSAYSLITPLRILGDNGKLLFHVTLSFDEFAVLQIYDPRHRTFTDAPKVLAGDNGGSISLCSLHLDSFLPANV

SEQ ID NO: 13676 - protein, 246 aa, Triticum aestivum
  peptide (1)..(246): Ceres Seq. ID no. 13584022
  misc_feature (34)..(218): NCBI GI NO: 28411801 NR Description: OJ1559_F09.9
  misc_feature (1)..(45): NCBI GI NO: 28411801 NR Description: OJ1559_F09.9
  misc_feature (1)..(22): NCBI GI NO: 34394081 NR Description: hypothetical protein
  misc_feature (1)..(57): NCBI GI NO: 34393278 NR Description: hypothetical protein
  misc_feature (1)..(54): NCBI GI NO: 34900700 NR Description: hypothetical protein~predicted by GeneMark
  misc_feature (1)..(172): NCBI GI NO: 38346527 NR Description: OSJNBa0040D17.2
  misc_feature (1)..(24): NCBI GI NO: 34900696 NR Description: hypothetical protein~predicted by FGENESH etc.
  misc_feature (1)..(24): NCBI GI NO: 33146635 NR Description: unknown protein
MCVIGYALGIARVLNLATGEAAVIELTSNFMGFGRAAPSGAYKIVCVSPGSTEILTVGDGVCWRQAQPLPSSSISYNSRPVVVRGVMYLILVSQLNGDSVICFDLESEEWKGGIRGPPSSERQRCDASLQELNGALCMLLPEVGNIYHGTMSIWLLIDSRKGVWIKVYSIPMDPSAYSLITPLRILGDNGKLLFHVTLSFDEFAVLQIYDPRHRTFTDAPKVLAGDNGGSISLCSLHLDSFLPANV

SEQ ID NO: 13677 - DNA, 857 bp, Triticum aestivum
  misc_feature (1)..(857): Ceres Seq. ID no. 13584023
aatcgaaaaattcggcttttccgcctcgctgccgccgcccaaaatccacctgggaagaagaaaagaggggcctcttctcttcctctctcgcgtccgatggcctcgagcccgggcgtcggcggcggaggggcggacggcggcggaggggatggaccgacgacgctcgacgagctgtaccacatcaacgtcgtgccggccgagctgcacttcaagttccgcaaggagctccagggcctccgcgtgggcctcaacttcgagttctacaacctagaggtgaatgattttgaggcaaaggtagttctgaagcccctggactttgaccggaagtggaagttccagtacaagcccatcagtggtgacatacagctgctttccaagaagataccagtcacaaaatatctcaaccttcaggtcggcattggtcacaatttccaactgaaggcaactggatggaagtggaagctctctacttgcttggggggagatggtgtttctcagataagaaacaaatcaaaactcaacgtgtttccagggtttgatctgaggctcggttggaaagctgaatatgtgcttcctgagattcatggggctgttggcacaggagaacctgccttcagtatgaactatggacgattgcaagcatccatagaccgggttgaggctattgtgacccaatcagatcggcactgaacctcctaggatgagcagaccaggacgttgatgatgttatggtcggcgaagcaagggagttctttggctacaatttcctctgcaaaatccgatggtttactcatgtcttttgaggctttgcatctgatgtacagaaatgagcaaacattgttttaccaacataaagg

SEQ ID NO: 13678 - protein, 229 aa, Triticum aestivum
  peptide (1)..(229): Ceres Seq. ID no. 13584024
  misc_feature (34)..(229): NCBI GI NO: 38344551 NR Description: OSJNBa0027P08.19
  misc_feature (52)..(227): NCBI GI NO: 18396223 NR Description: expressed protein [Arabidopsis thaliana]
  misc_feature (84)..(196): NCBI GI NO: 25411202 NR Description: hypothetical protein At2g06010
NRKIRLFRLAAAAQNPPGKKKRGASSLPLSRPMASSPGVGGGGADGGGGDGPTTLDELYHINVVPAELHFKFRKELQGLRVGLNFEFYNLEVNDFEAKVVLKPLDFDRKWKFQYKPISGDIQLLSKKIPVTKYLNLQVGIGHNFQLKATGWKWKLSTCLGGDGVSQIRNKSKLNVFPGFDLRLGWKAEYVLPEIHGAVGTGEPAFSMNYGRLQASIDRVEAIVTQSDRH

SEQ ID NO: 13679 - protein, 197 aa, Triticum aestivum
  peptide (1)..(197): Ceres Seq. ID no. 13584025
  misc_feature (2)..(197): NCBI GI NO: 38344551 NR Description: OSJNBa0027P08.19
  misc_feature (20)..(195): NCBI GI NO: 18396223 NR Description: expressed protein [Arabidopsis thaliana]
  misc_feature (52)..(164): NCBI GI NO: 25411202 NR Description: hypothetical protein At2g06010
MASSPGVGGGGADGGGGDGPTTLDELYHINVVPAELHFKFRKELQGLRVGLNFEFYNLEVNDFEAKVVLKPLDFDRKWKFQYKPISGDIQLLSKKIPVTKYLNLQVGIGHNFQLKATGWKWKLSTCLGGDGVSQIRNKSKLNVFPGFDLRLGWKAEYVLPEIHGAVGTGEPAFSMNYGRLQASIDRVEAIVTQSDRH

SEQ ID NO: 13680 - DNA, 1301 bp, Triticum aestivum
  misc_feature (1)..(1301): Ceres Seq. ID no. 13655636
atcccgcagactggactcccacagtattaaccccaggcacgcctcccgctgcaaccaacccgagtccttccaccctgcacagaatctcagcccaacccacaggtctcgactcaagccatgggcgccggcgacaagacggccgcgggcatgccgcgcatcggcatgggcacggcggtgcaggggcccaagccggaccccatccgccgcgccgtcctccgcgccatcgaggtagggtaccgccacttcgacacggccgcgcactacgagaccgaggcccccatcggcgaggccgccgccgaggccgtgcgctccggcgccgtcgcctcccgggacgacctcttcatcacctccaagctctggtgcagcgatgcgcaccgcgacagggtcgtccccgccctcaggcagacgctccggaatctccagatggagtacgtggacctgtacctcgtccactggccggtgtccatgaagcccgggcggttcaaggcccccttcacggcggaggacttcgtgccgttcgacatgcgggccgtgtgggaggccatggaggagtgccacaggctgggcctcgccaaggccatcggcgtcgccaatttctcctgcaagaagcttgagaccctcctctccttcgccaccatccctcccaccgtcaatcaggtggaggtgaacccggtgtggcagcagaggaagctgagggagttctgcaggggcaagggcatccagctgtgcacctactcgccgctgggggccaagggcacgcactggggcagcgacgccgtgatggacgcgggcgtcctgcaggagatcgccgcgtccaggggcaagagtgtggcgcaggtgtgcctgaggtgggtgtacgagcagggggactgcctcatcgtcaagagcttcgacgaggcccggatgcgggagaacctggacgtggacggctgggagctcaccgaggaggagcaccgcaggatcgcggagatcccgcagcgcaagatcaacctcggcaagcgctacgtgtccgagcacgggccctacaagtccctcgaggagctctgggacggtgagatataagtgatcactggagaggctggctggccggtgcgacgggttctgttgggttgtcatccttggccatggatgggtggttgatcgggggacgatttccctttgaataaaatcatgttctgcattgtgtttcagtgaataaatggagatgtttactaccggatttaaggagagttactaagagattgggatcatctcatcatgttattatgcgtactttcctggcaatgcaagttgttacaatg

SEQ ID NO: 13681 - protein, 314 aa, Triticum aestivum
  peptide (1)..(314): Ceres Seq. ID no. 13655637
  misc_feature (2)..(314): NCBI GI NO: 27357979 NR Description: Putative NADPH-dependent oxidoreductase
  misc_feature (11)..(314): NCBI GI NO: 37530522 NR Description: putative NADPH-dependent oxidoreductase
  misc_feature (11)..(312): NCBI GI NO: 37530524 NR Description: putative NADPH-dependent oxidoreductase
  misc_feature (11)..(314): NCBI GI NO: 37530540 NR Description: putative NADPH-dependent oxidoreductase
  misc_feature (10)..(314): NCBI GI NO: 6478216 NR Description: putative NADPH-dependent oxidoreductase
  misc_feature (11)..(314): NCBI GI NO: 40781599 NR Description: reductase 1 [Hydrangea macrophylla]
  misc_feature (11)..(313): NCBI GI NO: 40781598 NR Description: reductase 2 [Hydrangea macrophylla]
  misc_feature (11)..(314): NCBI GI NO: 15218958 NR Description: aldo/keto reductase, putative
  misc_feature (11)..(314): NCBI GI NO: 25283477 NR Description: probable Aldo/keto reductase F23H11.26
  misc_feature (1)..(314): NCBI GI NO: 15218960 NR Description: aldo/keto reductase, putative
MGAGDKTAAGMPRIGMGTAVQGPKPDPIRRAVLRAIEVGYRHFDTAAHYETEAPIGEAAAEAVRSGAVASRDDLFITSKLWCSDAHRDRVVPALRQTLRNLQMEYVDLYLVHWPVSMKPGRFKAPFTAEDFVPFDMRAVWEAMEECHRLGLAKAIGVANFSCKKLETLLSFATIPPTVNQVEVNPVWQQRKLREFCRGKGIQLCTYSPLGAKGTHWGSDAVMDAGVLQEIAASRGKSVAQVCLRWVYEQGDCLIVKSFDEARMRENLDVDGWELTEEEHRRIAEIPQRKINLGKRYVSEHGPYKSLEELWDGEI

SEQ ID NO: 13682 - protein, 304 aa, Triticum aestivum
  peptide (1)..(304): Ceres Seq. ID no. 13655638
  misc_feature (1)..(304): NCBI GI NO: 27357979 NR Description: Putative NADPH-dependent oxidoreductase
  misc_feature (1)..(304): NCBI GI NO: 37530522 NR Description: putative NADPH-dependent oxidoreductase
  misc_feature (1)..(302): NCBI GI NO: 37530524 NR Description: putative NADPH-dependent oxidoreductase
  misc_feature (1)..(304): NCBI GI NO: 37530540 NR Description: putative NADPH-dependent oxidoreductase
  misc_feature (1)..(304): NCBI GI NO: 6478216 NR Description: putative NADPH-dependent oxidoreductase
  misc_feature (1)..(304): NCBI GI NO: 40781599 NR Description: reductase 1 [Hydrangea macrophylla]
  misc_feature (1)..(303): NCBI GI NO: 40781598 NR Description: reductase 2 [Hydrangea macrophylla]
  misc_feature (1)..(304): NCBI GI NO: 15218958 NR Description: aldo/keto reductase, putative
  misc_feature (1)..(304): NCBI GI NO: 25283477 NR Description: probable Aldo/keto reductase F23H11.26
  misc_feature (1)..(304): NCBI GI NO: 15218960 NR Description: aldo/keto reductase, putative
MPRIGMGTAVQGPKPDPIRRAVLRAIEVGYRHFDTAAHYETEAPIGEAAAEAVRSGAVASRDDLFITSKLWCSDAHRDRVVPALRQTLRNLQMEYVDLYLVHWPVSMKPGRFKAPFTAEDFVPFDMRAVWEAMEECHRLGLAKAIGVANFSCKKLETLLSFATIPPTVNQVEVNPVWQQRKLREFCRGKGIQLCTYSPLGAKGTHWGSDAVMDAGVLQEIAASRGKSVAQVCLRWVYEQGDCLIVKSFDEARMRENLDVDGWELTEEEHRRIAEIPQRKINLGKRYVSEHGPYKSLEELWDGEI

SEQ ID NO: 13683 - protein, 299 aa, Triticum aestivum
  peptide (1)..(299): Ceres Seq. ID no. 13655639
  misc_feature (1)..(299): NCBI GI NO: 27357979 NR Description: Putative NADPH-dependent oxidoreductase
  misc_feature (1)..(299): NCBI GI NO: 37530522 NR Description: putative NADPH-dependent oxidoreductase
  misc_feature (1)..(297): NCBI GI NO: 37530524 NR Description: putative NADPH-dependent oxidoreductase
  misc_feature (1)..(299): NCBI GI NO: 37530540 NR Description: putative NADPH-dependent oxidoreductase
  misc_feature (1)..(299): NCBI GI NO: 6478216 NR Description: putative NADPH-dependent oxidoreductase
  misc_feature (1)..(299): NCBI GI NO: 40781599 NR Description: reductase 1 [Hydrangea macrophylla]
  misc_feature (1)..(298): NCBI GI NO: 40781598 NR Description: reductase 2 [Hydrangea macrophylla]
  misc_feature (1)..(299): NCBI GI NO: 15218958 NR Description: aldo/keto reductase, putative
  misc_feature (1)..(299): NCBI GI NO: 25283477 NR Description: probable Aldo/keto reductase F23H11.26
  misc_feature (1)..(299): NCBI GI NO: 15218960 NR Description: aldo/keto reductase, putative
MGTAVQGPKPDPIRRAVLRAIEVGYRHFDTAAHYETEAPIGEAAAEAVRSGAVASRDDLFITSKLWCSDAHRDRVVPALRQTLRNLQMEYVDLYLVHWPVSMKPGRFKAPFTAEDFVPFDMRAVWEAMEECHRLGLAKAIGVANFSCKKLETLLSFATIPPTVNQVEVNPVWQQRKLREFCRGKGIQLCTYSPLGAKGTHWGSDAVMDAGVLQEIAASRGKSVAQVCLRWVYEQGDCLIVKSFDEARMRENLDVDGWELTEEEHRRIAEIPQRKINLGKRYVSEHGPYKSLEELWDGEI

SEQ ID NO: 13684 - DNA, 1381 bp, Triticum aestivum
  misc_feature (1)..(1381): Ceres Seq. ID no. 13598443
agagcaaaatcgcactctcgctttccaacacaactccctcggcagtatcgcctagtgtagcagcgcctccgttccggccagctctgctcgccgagccggccatgatgctgctgctcgcgcgcagcctccgctcccgcgtccggccccccctcgcctccgccgttagcgccgctcccttctcatcggtatcggcggccgcggcggaggcagagcgggcggtgcgggacgggcccaggaacgactggacccgtcccgagatccaggccatctacgactccccgctcctcgacctcctcttccacggggctcaggtccataggaatgtccataaatttagagaagtgcagcaatgcacacttctttcaataaagactggtgggtgcagcgaagattgttcatactgcccacagtcttcaagatacagtactggattgaaggccgagaaattaatgaagaaagatgctgtcctagaagcagcaaaaaaggcaaagcaggctgggagcacccggttttgcatgggagccgcatggagagagacaattggcaggaaaacaaatttcaaccagattcttgaatatgtcaaggacataagaggtatgggcatggaggtctgttgcaccctgggtatgctagagaaacaacaagctgaagaactcaagaaggctggacttacagcttataatcataacctagatacatcaagggaatattaccccaacattatttctacaagatcgtacgatgatagattacagactcttcagcacgtccgtgaagctggaataagcgtctgctcaggtggaattattggtcttggagaggcggaggaagaccgtgtagggctgttgcatacactggccactttgccaacacacccagagagcgttcctatcaatgcattgattgctgtcaaaggcacgcctcttcaggatcagaagcctgtagagatatgggaaatgatccgcatgattgccagcgctcggattgtgatgccaaaggcaatggtgagactttcggcagggcgagtacggttctccatgccagaacaagctctctgctttctcgctggggccaactcgatcttcgccggtgaaaagctcctgacaactgcgaacaatgactttgatgcggaccaggcaatgttcaagatccttggcctgattcccaaggctccaaactttggcgatgaagaggccacggtagcagcacccacggagagatgtgagcaagccgcttcgatgtaaaatgccgctatagattctcaagaccatatccggtgcaaaactggcaccattatctccagctagagctttgtactgtagagatcatgatattttgtagtaacttcagattcatcgaaataaaatagggggttctctgc

SEQ ID NO: 13685 - protein, 413 aa, Triticum aestivum
  peptide (1)..(413): Ceres Seq. ID no. 15222344
  misc_feature (121)..(285): Pfam Name: Pfam Description:  Radical SAM superfamily
  misc_feature (35)..(413): NCBI GI NO: 38175566 NR Description: putative biotin synthase
  misc_feature (36)..(412): NCBI GI NO: 15224273 NR Description: biotin synthase (BioB) (BIO2)
  misc_feature (36)..(412): NCBI GI NO: 28392925 NR Description: putative biotin synthase (Bio B)
  misc_feature (78)..(389): NCBI GI NO: 23135112 NR Description: hypothetical protein [Cytophaga hutchinsonii]
  misc_feature (34)..(411): NCBI GI NO: 40738982 NR Description: hypothetical protein AN6643.2
  misc_feature (78)..(386): NCBI GI NO: 19075228 NR Description: biotin synthase (EC 2.8.1.6)
  misc_feature (78)..(386): NCBI GI NO: 2961328 NR Description: Biotin synthase [Schizosaccharomyces pombe]
  misc_feature (76)..(403): NCBI GI NO: 23127772 NR Description: hypothetical protein [Nostoc punctiforme]
  misc_feature (77)..(388): NCBI GI NO: 11596107 NR Description: biotin synthase long form [Pichia jadinii]
  misc_feature (77)..(388): NCBI GI NO: 11596108 NR Description: biotin synthase short form [Pichia jadinii]
SKIALSLSNTTPSAVSPSVAAPPFRPALLAEPAMMLLLARSLRSRVRPPLASAVSAAPFSSVSAAAAEAERAVRDGPRNDWTRPEIQAIYDSPLLDLLFHGAQVHRNVHKFREVQQCTLLSIKTGGCSEDCSYCPQSSRYSTGLKAEKLMKKDAVLEAAKKAKQAGSTRFCMGAAWRETIGRKTNFNQILEYVKDIRGMGMEVCCTLGMLEKQQAEELKKAGLTAYNHNLDTSREYYPNIISTRSYDDRLQTLQHVREAGISVCSGGIIGLGEAEEDRVGLLHTLATLPTHPESVPINALIAVKGTPLQDQKPVEIWEMIRMIASARIVMPKAMVRLSAGRVRFSMPEQALCFLAGANSIFAGEKLLTTANNDFDADQAMFKILGLIPKAPNFGDEEATVAAPTERCEQAASM

SEQ ID NO: 13686 - protein, 380 aa, Triticum aestivum
  peptide (1)..(380): Ceres Seq. ID no. 15222345
  misc_feature (88)..(252): Pfam Name: Pfam Description:  Radical SAM superfamily
  misc_feature (2)..(380): NCBI GI NO: 38175566 NR Description: putative biotin synthase
  misc_feature (3)..(379): NCBI GI NO: 15224273 NR Description: biotin synthase (BioB) (BIO2)
  misc_feature (3)..(379): NCBI GI NO: 28392925 NR Description: putative biotin synthase (Bio B)
  misc_feature (45)..(356): NCBI GI NO: 23135112 NR Description: hypothetical protein [Cytophaga hutchinsonii]
  misc_feature (1)..(378): NCBI GI NO: 40738982 NR Description: hypothetical protein AN6643.2
  misc_feature (45)..(353): NCBI GI NO: 19075228 NR Description: biotin synthase (EC 2.8.1.6)
  misc_feature (45)..(353): NCBI GI NO: 2961328 NR Description: Biotin synthase [Schizosaccharomyces pombe]
  misc_feature (43)..(370): NCBI GI NO: 23127772 NR Description: hypothetical protein [Nostoc punctiforme]
  misc_feature (44)..(355): NCBI GI NO: 11596107 NR Description: biotin synthase long form [Pichia jadinii]
  misc_feature (44)..(355): NCBI GI NO: 11596108 NR Description: biotin synthase short form [Pichia jadinii]
MMLLLARSLRSRVRPPLASAVSAAPFSSVSAAAAEAERAVRDGPRNDWTRPEIQAIYDSPLLDLLFHGAQVHRNVHKFREVQQCTLLSIKTGGCSEDCSYCPQSSRYSTGLKAEKLMKKDAVLEAAKKAKQAGSTRFCMGAAWRETIGRKTNFNQILEYVKDIRGMGMEVCCTLGMLEKQQAEELKKAGLTAYNHNLDTSREYYPNIISTRSYDDRLQTLQHVREAGISVCSGGIIGLGEAEEDRVGLLHTLATLPTHPESVPINALIAVKGTPLQDQKPVEIWEMIRMIASARIVMPKAMVRLSAGRVRFSMPEQALCFLAGANSIFAGEKLLTTANNDFDADQAMFKILGLIPKAPNFGDEEATVAAPTERCEQAASM

SEQ ID NO: 13687 - protein, 379 aa, Triticum aestivum
  peptide (1)..(379): Ceres Seq. ID no. 15222346
  misc_feature (87)..(251): Pfam Name: Pfam Description:  Radical SAM superfamily
  misc_feature (1)..(379): NCBI GI NO: 38175566 NR Description: putative biotin synthase
  misc_feature (2)..(378): NCBI GI NO: 15224273 NR Description: biotin synthase (BioB) (BIO2)
  misc_feature (2)..(378): NCBI GI NO: 28392925 NR Description: putative biotin synthase (Bio B)
  misc_feature (44)..(355): NCBI GI NO: 23135112 NR Description: hypothetical protein [Cytophaga hutchinsonii]
  misc_feature (1)..(377): NCBI GI NO: 40738982 NR Description: hypothetical protein AN6643.2
  misc_feature (44)..(352): NCBI GI NO: 19075228 NR Description: biotin synthase (EC 2.8.1.6)
  misc_feature (44)..(352): NCBI GI NO: 2961328 NR Description: Biotin synthase [Schizosaccharomyces pombe]
  misc_feature (42)..(369): NCBI GI NO: 23127772 NR Description: hypothetical protein [Nostoc punctiforme]
  misc_feature (43)..(354): NCBI GI NO: 11596107 NR Description: biotin synthase long form [Pichia jadinii]
  misc_feature (43)..(354): NCBI GI NO: 11596108 NR Description: biotin synthase short form [Pichia jadinii]
MLLLARSLRSRVRPPLASAVSAAPFSSVSAAAAEAERAVRDGPRNDWTRPEIQAIYDSPLLDLLFHGAQVHRNVHKFREVQQCTLLSIKTGGCSEDCSYCPQSSRYSTGLKAEKLMKKDAVLEAAKKAKQAGSTRFCMGAAWRETIGRKTNFNQILEYVKDIRGMGMEVCCTLGMLEKQQAEELKKAGLTAYNHNLDTSREYYPNIISTRSYDDRLQTLQHVREAGISVCSGGIIGLGEAEEDRVGLLHTLATLPTHPESVPINALIAVKGTPLQDQKPVEIWEMIRMIASARIVMPKAMVRLSAGRVRFSMPEQALCFLAGANSIFAGEKLLTTANNDFDADQAMFKILGLIPKAPNFGDEEATVAAPTERCEQAASM

SEQ ID NO: 13688 - DNA, 1210 bp, Triticum aestivum
  misc_feature (1)..(1210): Ceres Seq. ID no. 12587870
cctcgcacacagtctgctacagggatcttccacacagacacactggaagtgataaccggtgaaatgcctcccccgaagcctgccggtggtgctatcatggatggaaatcaccacctactaggccatgaagatgttcacagagctgcaacgactaccttcgagaatggctttacaacccattcagttcacacatcaggagcgaaggtcgatggcccgaatgtgacgaatatcgcgaggggcgacatatcaactacgccgattcctgaagcaacaggtccacatcatgtagcggtatcagtccctgaagaagtgaatctggttgctcctagaccacaacagagggatgactgggatatactgaaagctatagtgtatggaggcttagtggagtcagtcaccagcctctctgttgtttcggcggcagcatcaagcggcgccaaaacattggacatattcatcttgggcatggccaaccttatcggagggctccctctcgtttaccacaatatcgccgatctgagagatgtccgagacgtgagcgacgacaacgagcgggtcggacactactggctgcagctcgggaggcggtcgaaagcccggctccacatggtcctggccctgctctcatacatggtgttcgggctacttcaaccggttgtctacgggctgtcgttccgcgagagcaacaacagggagaacaagatgatggccgtcgccggcgcttccctcgcgtgcatcgctctgctggcgctcggaaaggcgcatgtccagacagcacccagggcatacttcaagaccctcgtgtactacctgacgatcgccgtgagctcgtcggggctgtcgtacgtcgccggcgtgctcatcacgaggctcctggagcactttggtgtcatcgagcaaggcgggtcggctgctcctgctcctccagggctgtcgttcgctcattcagtgggtgcacaaacatctgcctgggcctcattctaaagtctgaactctgaagttcatgggaacactggtgcaaaaaaagaagacatgtaggaggtgcacactaggagatgtagcactagctagattaccttgtgccacatcttgggcttcagttattagtactaaaacatgaaggcacacattaagacggtagaaacatacaatataattagaacagatgtctggttgagcttcatatttgttttcaataaattaatattcc

SEQ ID NO: 13689 - protein, 327 aa, Triticum aestivum
  peptide (1)..(327): Ceres Seq. ID no. 12587871
  misc_feature (4)..(298): NCBI GI NO: 24413974 NR Description: contains ESTs C71658
  misc_feature (118)..(306): NCBI GI NO: 15912253 NR Description: AT4g27870/T27E11_110 [Arabidopsis thaliana]
  misc_feature (118)..(306): NCBI GI NO: 30687764 NR Description: expressed protein [Arabidopsis thaliana]
  misc_feature (118)..(306): NCBI GI NO: 7487471 NR Description: hypothetical protein T27E11
  misc_feature (105)..(296): NCBI GI NO: 18417079 NR Description: putative protein; protein id: At4g27860
  misc_feature (105)..(296): NCBI GI NO: 7487470 NR Description: hypothetical protein T27E11
  misc_feature (98)..(298): NCBI GI NO: 30689371 NR Description: expressed protein [Arabidopsis thaliana]
  misc_feature (98)..(298): NCBI GI NO: 21592516 NR Description: unknown [Arabidopsis thaliana]
  misc_feature (98)..(298): NCBI GI NO: 30689367 NR Description: expressed protein [Arabidopsis thaliana]
PRTQSATGIFHTDTLEVITGEMPPPKPAGGAIMDGNHHLLGHEDVHRAATTTFENGFTTHSVHTSGAKVDGPNVTNIARGDISTTPIPEATGPHHVAVSVPEEVNLVAPRPQQRDDWDILKAIVYGGLVESVTSLSVVSAAASSGAKTLDIFILGMANLIGGLPLVYHNIADLRDVRDVSDDNERVGHYWLQLGRRSKARLHMVLALLSYMVFGLLQPVVYGLSFRESNNRENKMMAVAGASLACIALLALGKAHVQTAPRAYFKTLVYYLTIAVSSSGLSYVAGVLITRLLEHFGVIEQGGSAAPAPPGLSFAHSVGAQTSAWASF

SEQ ID NO: 13690 - protein, 306 aa, Triticum aestivum
  peptide (1)..(306): Ceres Seq. ID no. 12587872
  misc_feature (1)..(277): NCBI GI NO: 24413974 NR Description: contains ESTs C71658
  misc_feature (97)..(285): NCBI GI NO: 15912253 NR Description: AT4g27870/T27E11_110 [Arabidopsis thaliana]
  misc_feature (97)..(285): NCBI GI NO: 30687764 NR Description: expressed protein [Arabidopsis thaliana]
  misc_feature (97)..(285): NCBI GI NO: 7487471 NR Description: hypothetical protein T27E11
  misc_feature (84)..(275): NCBI GI NO: 18417079 NR Description: putative protein; protein id: At4g27860
  misc_feature (84)..(275): NCBI GI NO: 7487470 NR Description: hypothetical protein T27E11
  misc_feature (77)..(277): NCBI GI NO: 30689371 NR Description: expressed protein [Arabidopsis thaliana]
  misc_feature (77)..(277): NCBI GI NO: 21592516 NR Description: unknown [Arabidopsis thaliana]
  misc_feature (77)..(277): NCBI GI NO: 30689367 NR Description: expressed protein [Arabidopsis thaliana]
MPPPKPAGGAIMDGNHHLLGHEDVHRAATTTFENGFTTHSVHTSGAKVDGPNVTNIARGDISTTPIPEATGPHHVAVSVPEEVNLVAPRPQQRDDWDILKAIVYGGLVESVTSLSVVSAAASSGAKTLDIFILGMANLIGGLPLVYHNIADLRDVRDVSDDNERVGHYWLQLGRRSKARLHMVLALLSYMVFGLLQPVVYGLSFRESNNRENKMMAVAGASLACIALLALGKAHVQTAPRAYFKTLVYYLTIAVSSSGLSYVAGVLITRLLEHFGVIEQGGSAAPAPPGLSFAHSVGAQTSAWASF

SEQ ID NO: 13691 - protein, 295 aa, Triticum aestivum
  peptide (1)..(295): Ceres Seq. ID no. 12587873
  misc_feature (1)..(266): NCBI GI NO: 24413974 NR Description: contains ESTs C71658
  misc_feature (86)..(274): NCBI GI NO: 15912253 NR Description: AT4g27870/T27E11_110 [Arabidopsis thaliana]
  misc_feature (86)..(274): NCBI GI NO: 30687764 NR Description: expressed protein [Arabidopsis thaliana]
  misc_feature (86)..(274): NCBI GI NO: 7487471 NR Description: hypothetical protein T27E11
  misc_feature (73)..(264): NCBI GI NO: 18417079 NR Description: putative protein; protein id: At4g27860
  misc_feature (73)..(264): NCBI GI NO: 7487470 NR Description: hypothetical protein T27E11
  misc_feature (66)..(266): NCBI GI NO: 30689371 NR Description: expressed protein [Arabidopsis thaliana]
  misc_feature (66)..(266): NCBI GI NO: 21592516 NR Description: unknown [Arabidopsis thaliana]
  misc_feature (66)..(266): NCBI GI NO: 30689367 NR Description: expressed protein [Arabidopsis thaliana]
MDGNHHLLGHEDVHRAATTTFENGFTTHSVHTSGAKVDGPNVTNIARGDISTTPIPEATGPHHVAVSVPEEVNLVAPRPQQRDDWDILKAIVYGGLVESVTSLSVVSAAASSGAKTLDIFILGMANLIGGLPLVYHNIADLRDVRDVSDDNERVGHYWLQLGRRSKARLHMVLALLSYMVFGLLQPVVYGLSFRESNNRENKMMAVAGASLACIALLALGKAHVQTAPRAYFKTLVYYLTIAVSSSGLSYVAGVLITRLLEHFGVIEQGGSAAPAPPGLSFAHSVGAQTSAWASF

SEQ ID NO: 13692 - DNA, 924 bp, Triticum aestivum
  misc_feature (1)..(924): Ceres Seq. ID no. 13584026
cctctctgtcaccgccagcttccacacacctcgtcggcacggaacaccgcccctcgagtcaagagtcaacccacacccaccgatctccgtccatcgaccatgggagccggccaggacctggaggccggcgccggcgacggcggcgagaagaagatggcccactcctcctcctcgggcccgctcccgccgtcggagccgccgcacctgcggggccaggaccccgcccagtaccagtatggtaccttccacccccctgccccccaccccgacgtccgcccccacccgcccgtcggcttcccccaacccgcgcctccccccggattcgccgccggcggctaccagcagcagcagcagaagcagccctacgcgcccgccgacccctactacgcgcaggggtaccaggccgccccaggttatggtcctgttgttcaaggtaggcctgttgaaggaagacccgtgagaatgcggcgccttccatgctgtgggctcggcatgggctggcttctgttcattgccgggttcttcttggctgccattccgtggtatattggtgctttcgtcctaatctgtgtccgggtacatgaccacagagagaaaccaggatatgttgcctgcactgttgctgctataattgcggccattgttataccccttggagtaacaaaaggaacagactcatggtgagccaccaccaggtcttggcaggcggttctgttgctgaatataaacatcgttatttcaggcccagttacatgataggttaaaaagtctgctggttgtatttcatgtatgagtgtgtcttgtatacatatatgtacagtaaaaagagtggggctgcatcttcgatgttctcttgtatcgatacttggtacttatagtgtgtaataaaagcttgaatgtacaacacatatcttcctcgaggct

SEQ ID NO: 13693 - protein, 227 aa, Triticum aestivum
  peptide (1)..(227): Ceres Seq. ID no. 13584027
  misc_feature (91)..(227): NCBI GI NO: 18394436 NR Description: expressed protein [Arabidopsis thaliana]
  misc_feature (70)..(227): NCBI GI NO: 21554011 NR Description: unknown [Arabidopsis thaliana]
  misc_feature (70)..(227): NCBI GI NO: 18404524 NR Description: expressed protein [Arabidopsis thaliana]
  misc_feature (76)..(227): NCBI GI NO: 18397305 NR Description: expressed protein [Arabidopsis thaliana]
  misc_feature (76)..(227): NCBI GI NO: 21593837 NR Description: 60S ribosomal protein L18A, putative
  misc_feature (76)..(208): NCBI GI NO: 25518134 NR Description: probable 60S ribosomal protein L18A - Arabidopsisthaliana
  misc_feature (101)..(227): NCBI GI NO: 18400450 NR Description: expressed protein [Arabidopsis thaliana]
  misc_feature (101)..(227): NCBI GI NO: 21554784 NR Description: unknown [Arabidopsis thaliana]
PLCHRQLPHTSSARNTAPRVKSQPTPTDLRPSTMGAGQDLEAGAGDGGEKKMAHSSSSGPLPPSEPPHLRGQDPAQYQYGTFHPPAPHPDVRPHPPVGFPQPAPPPGFAAGGYQQQQQKQPYAPADPYYAQGYQAAPGYGPVVQGRPVEGRPVRMRRLPCCGLGMGWLLFIAGFFLAAIPWYIGAFVLICVRVHDHREKPGYVACTVAAIIAAIVIPLGVTKGTDSW

SEQ ID NO: 13694 - protein, 194 aa, Triticum aestivum
  peptide (1)..(194): Ceres Seq. ID no. 13584028
  misc_feature (58)..(194): NCBI GI NO: 18394436 NR Description: expressed protein [Arabidopsis thaliana]
  misc_feature (37)..(194): NCBI GI NO: 21554011 NR Description: unknown [Arabidopsis thaliana]
  misc_feature (37)..(194): NCBI GI NO: 18404524 NR Description: expressed protein [Arabidopsis thaliana]
  misc_feature (43)..(194): NCBI GI NO: 18397305 NR Description: expressed protein [Arabidopsis thaliana]
  misc_feature (43)..(194): NCBI GI NO: 21593837 NR Description: 60S ribosomal protein L18A, putative
  misc_feature (43)..(175): NCBI GI NO: 25518134 NR Description: probable 60S ribosomal protein L18A - Arabidopsisthaliana
  misc_feature (68)..(194): NCBI GI NO: 18400450 NR Description: expressed protein [Arabidopsis thaliana]
  misc_feature (68)..(194): NCBI GI NO: 21554784 NR Description: unknown [Arabidopsis thaliana]
MGAGQDLEAGAGDGGEKKMAHSSSSGPLPPSEPPHLRGQDPAQYQYGTFHPPAPHPDVRPHPPVGFPQPAPPPGFAAGGYQQQQQKQPYAPADPYYAQGYQAAPGYGPVVQGRPVEGRPVRMRRLPCCGLGMGWLLFIAGFFLAAIPWYIGAFVLICVRVHDHREKPGYVACTVAAIIAAIVIPLGVTKGTDSW

SEQ ID NO: 13695 - protein, 176 aa, Triticum aestivum
  peptide (1)..(176): Ceres Seq. ID no. 13584029
  misc_feature (40)..(176): NCBI GI NO: 18394436 NR Description: expressed protein [Arabidopsis thaliana]
  misc_feature (19)..(176): NCBI GI NO: 21554011 NR Description: unknown [Arabidopsis thaliana]
  misc_feature (19)..(176): NCBI GI NO: 18404524 NR Description: expressed protein [Arabidopsis thaliana]
  misc_feature (25)..(176): NCBI GI NO: 18397305 NR Description: expressed protein [Arabidopsis thaliana]
  misc_feature (25)..(176): NCBI GI NO: 21593837 NR Description: 60S ribosomal protein L18A, putative
  misc_feature (25)..(157): NCBI GI NO: 25518134 NR Description: probable 60S ribosomal protein L18A - Arabidopsisthaliana
  misc_feature (50)..(176): NCBI GI NO: 18400450 NR Description: expressed protein [Arabidopsis thaliana]
  misc_feature (50)..(176): NCBI GI NO: 21554784 NR Description: unknown [Arabidopsis thaliana]
MAHSSSSGPLPPSEPPHLRGQDPAQYQYGTFHPPAPHPDVRPHPPVGFPQPAPPPGFAAGGYQQQQQKQPYAPADPYYAQGYQAAPGYGPVVQGRPVEGRPVRMRRLPCCGLGMGWLLFIAGFFLAAIPWYIGAFVLICVRVHDHREKPGYVACTVAAIIAAIVIPLGVTKGTDSW

SEQ ID NO: 13696 - DNA, 1305 bp, Triticum aestivum
  misc_feature (1)..(1305): Ceres Seq. ID no. 15179764
aaagccggtcagacgacgtctgaagcagaggaggaggagacaggattgaggaacccgcgagacgaagcaggaagccagaggcgctctccaatccaagcatgtaagcgagctaatcgatcctcttccgttcttccgcgcatcctgcgattaaccctcacgctgtcttacccatgtgccatccagtccgccggtgtttctatttctcaagaatttgcgttctttttgttcttgttggcaggaggtcgtcgattaaccggccgccgacgccgaacgatgacgacgaggaggaggaggaggtagggaaggaggcttctctcggagacatcatcaacctcaagttggtggagagcggcgagaaggagcggctgatggagcttctccgggagcggctcgtagagtgcggctggagggatgacatgaaggctctctgcagggcttatgcaaggaaaaagggaagaaataatgtaacattagatgatcttattcatgttattactccaaaaggaagaggtcagtgattttcatttgtccagttaatttatttctggttgcaagaggtatgttacttagttccagcgcacattagatacgagttggaagaattgttataaaataatataaccatggcttgcatatgtccatctttgcgtaagtgtcaagcaagggaaaaagtagtgcctaaactcccaagtcaattgcttccttactgtaacaggatctgggacaaaattttggagaacgttctttttttgcacctgcttctcgcctcctatgtttgccatagatttgtgcattttttgtcaataacaatgatgctaagccctaagcaaatgtttctttcatttgtgttggttcttgttgcacgattatcattttctcctgcttctgaaacagcctcggtgcccgatgcggtgaaggcagagctgctgcagcgcatccgatcctttctcatgtcttcctcgctttggtagcccatgaatcacgccgatcggaaggcacgtgtaggaagcttgaagcatcgatcttgaacgcgtgacacttcagagaagcagcaaatatcgacataaaacggatctggtgctgtggatgtgtttcctggtcaggcatgtggttggccctgttctctgactgcaccatcaccacactgtatttgtagcgctacagtgcgcggtctcttcgatgccacttggtaatcttaattagagaactcagaatcaatgcgtctggtagtactcgcgtatctcatgtcaaacctgattgagtgatcctcatgagggaccaacaagaacagacgccacttttgtc

SEQ ID NO: 13697 - protein, 115 aa, Triticum aestivum
  peptide (1)..(115): Ceres Seq. ID no. 15179765
  misc_feature (91)..(114): NCBI GI NO: 30688637 NR Description: expressed protein [Arabidopsis thaliana]
MACICPSLRKCQAREKVVPKLPSQLLPYCNRIWDKILENVLFLHLLLASYVCHRFVHFLSITMMLSPKQMFLSFVLVLVARLSFSPASETASVPDAVKAELLQRIRSFLMSSSLW

SEQ ID NO: 13698 - protein, 115 aa, Triticum aestivum
  peptide (1)..(115): Ceres Seq. ID no. 15179766
  misc_feature (24)..(113): NCBI GI NO: 30688637 NR Description: expressed protein [Arabidopsis thaliana]
  misc_feature (25)..(91): NCBI GI NO: 19386734 NR Description: P0678F11.23
  misc_feature (37)..(113): NCBI GI NO: 34866121 NR Description: similar to DC6 protein [Rattus norvegicus]
  misc_feature (42)..(113): NCBI GI NO: 9910186 NR Description: DC6 protein [Homo sapiens]
  misc_feature (24)..(90): NCBI GI NO: 9279634 NR Description: gene_id:MOJ10.18~unknown protein
  misc_feature (42)..(113): NCBI GI NO: 38086720 NR Description: similar to DC6 protein; e
  misc_feature (58)..(113): NCBI GI NO: 17864496 NR Description: enhancer of yellow 2 CG15191-PA
MCHPVRRCFYFSRICVLFVLVGRRSSINRPPTPNDDDEEEEEVGKEASLGDIINLKLVESGEKERLMELLRERLVECGWRDDMKALCRAYARKKGRNNVTLDDLIHVITPKGRGQ

SEQ ID NO: 13699 - protein, 99 aa, Triticum aestivum
  peptide (1)..(99): Ceres Seq. ID no. 15179767
KAGQTTSEAEEEETGLRNPRDEAGSQRRSPIQACKRANRSSSVLPRILRLTLTLSYPCAIQSAGVSISQEFAFFLFLLAGGRRLTGRRRRTMTTRRRRR

SEQ ID NO: 13700 - DNA, 1694 bp, Triticum aestivum
  misc_feature (1)..(1694): Ceres Seq. ID no. 13597044
aaaacagaggcaccaaaatacaatctacgtacgtgcaaagttcagtgaaaccttgagttgacagacaccacaccaacaatggccggagcagcaaacgatctgaagctactgggcatgtgggcgagcccgtacgtcctgcgggtgcgccttgctctcagcatcaagagcatcagctacgagtacgcagaggaggacctccggcacaagagcgagctgctcctgcggtcaaaccccgtccacgatggtctgtttagttacaaggcaacctttgaagcatttgttggggtgcgggatgacgttgcaacttctcaagttaaactctttggtgatcaactcgaggatttggagaaaaatcttccattggacaatatttacaaatcagacaatgtatctgctgctccaattcgcgtgatgaatcttctttacaactctggggatgtgaaaggtcctcaaactatagctttcaatttgccaaatgatgagcggattgtgaatgagcgaggaacttcaatggttatgcttaagaacatttcagaagccaagttcaagaatatcttgaagcctatagccaatgcctgcatcagagaggagcagaaagaatatgttgattttgagccttattatacacatattgtttgccatgagtgctgccatggaattggacctcattccataacccttcctggtggtaaaaagtccacagttagaatggaacttcaagaatgtcattcagcattggaggaggcaaaagctgatatagttggtctgtgggcgctgaattttcttataaacaaggggttgcttcctaagagtctatcaaaatctatgtatgtttctttcctggctggatgctttcggtcaattcgcttcgggctggaagaagctcatgggaagggacaggcattgcagtttaattggttgtatgacaaaggagcttttatcttgcattctgacgggaaattctcaattgactttacaaaggttgaggaagctgttgaaagccttggcagagagatcatgacgatacaggcaaagggcgacaagcctgctgcgcagtctctccttcagtcgcgtgcaaccttgacgcagccattgcgtgtggcattggagaaaatcgaacacatgcaggtgcctgttgatatagccccgatatttggcacagccagtaagctgctcgcaaacaattaagcaccggaggacagcgattcagaaagttttgtgtctcccattgtacctgataaactacaaattgatttttttacgtgaaaaagtacaaattgttgaaacaagatgaagcaccatcctgagccgacacaaatggaaaataacacaaataaatgaatgatttcttaaaaggatggctgttaacatcactgcctaaatggatgaacttctaaaggatcactgttagcatcactgtctatttaccaaggtgtttttagaaagcgatgtctactgtaatctttgaacatattcactcaggaactaggagcggagactatcagaattctgctgaacttttgcggttttgccgcgctgaaggtcatcttgtgcttatatatatcagaatgttggtacacatggttcgttccttgtgagtgaatgctgcaaatatatgccccactctgatcggacccaattcaacgtttcaaacttgtaacgttacttcatacagaaacatgctctttcatctt

SEQ ID NO: 13701 - protein, 369 aa, Triticum aestivum
  peptide (1)..(369): Ceres Seq. ID no. 13597045
  misc_feature (1)..(366): NCBI GI NO: 18412472 NR Description: MutT/nudix family protein [Arabidopsis thaliana]
  misc_feature (39)..(366): NCBI GI NO: 15912329 NR Description: At1g79690/F20B17_11 [Arabidopsis thaliana]
  misc_feature (120)..(366): NCBI GI NO: 7715590 NR Description: F20B17.11 [Arabidopsis thaliana]
  misc_feature (76)..(125): NCBI GI NO: 7715590 NR Description: F20B17.11 [Arabidopsis thaliana]
  misc_feature (1)..(54): NCBI GI NO: 37536308 NR Description: putative glutathione S-transferase
  misc_feature (1)..(54): NCBI GI NO: 37536284 NR Description: putative glutathione S-transferase
  misc_feature (1)..(54): NCBI GI NO: 11385535 NR Description: glutathione S-transferase GST 42 [Zea mays]
  misc_feature (1)..(54): NCBI GI NO: 33304612 NR Description: tau class GST protein 3
  misc_feature (1)..(54): NCBI GI NO: 37536312 NR Description: putative glutathione S-transferase
  misc_feature (61)..(338): NCBI GI NO: 29347256 NR Description: putative dipeptidyl-peptidase III
MAGAANDLKLLGMWASPYVLRVRLALSIKSISYEYAEEDLRHKSELLLRSNPVHDGLFSYKATFEAFVGVRDDVATSQVKLFGDQLEDLEKNLPLDNIYKSDNVSAAPIRVMNLLYNSGDVKGPQTIAFNLPNDERIVNERGTSMVMLKNISEAKFKNILKPIANACIREEQKEYVDFEPYYTHIVCHECCHGIGPHSITLPGGKKSTVRMELQECHSALEEAKADIVGLWALNFLINKGLLPKSLSKSMYVSFLAGCFRSIRFGLEEAHGKGQALQFNWLYDKGAFILHSDGKFSIDFTKVEEAVESLGREIMTIQAKGDKPAAQSLLQSRATLTQPLRVALEKIEHMQVPVDIAPIFGTASKLLANN

SEQ ID NO: 13702 - protein, 357 aa, Triticum aestivum
  peptide (1)..(357): Ceres Seq. ID no. 13597046
  misc_feature (1)..(354): NCBI GI NO: 18412472 NR Description: MutT/nudix family protein [Arabidopsis thaliana]
  misc_feature (27)..(354): NCBI GI NO: 15912329 NR Description: At1g79690/F20B17_11 [Arabidopsis thaliana]
  misc_feature (108)..(354): NCBI GI NO: 7715590 NR Description: F20B17.11 [Arabidopsis thaliana]
  misc_feature (64)..(113): NCBI GI NO: 7715590 NR Description: F20B17.11 [Arabidopsis thaliana]
  misc_feature (1)..(42): NCBI GI NO: 37536308 NR Description: putative glutathione S-transferase
  misc_feature (1)..(42): NCBI GI NO: 37536284 NR Description: putative glutathione S-transferase
  misc_feature (1)..(42): NCBI GI NO: 11385535 NR Description: glutathione S-transferase GST 42 [Zea mays]
  misc_feature (1)..(42): NCBI GI NO: 33304612 NR Description: tau class GST protein 3
  misc_feature (1)..(42): NCBI GI NO: 37536312 NR Description: putative glutathione S-transferase
  misc_feature (49)..(326): NCBI GI NO: 29347256 NR Description: putative dipeptidyl-peptidase III
MWASPYVLRVRLALSIKSISYEYAEEDLRHKSELLLRSNPVHDGLFSYKATFEAFVGVRDDVATSQVKLFGDQLEDLEKNLPLDNIYKSDNVSAAPIRVMNLLYNSGDVKGPQTIAFNLPNDERIVNERGTSMVMLKNISEAKFKNILKPIANACIREEQKEYVDFEPYYTHIVCHECCHGIGPHSITLPGGKKSTVRMELQECHSALEEAKADIVGLWALNFLINKGLLPKSLSKSMYVSFLAGCFRSIRFGLEEAHGKGQALQFNWLYDKGAFILHSDGKFSIDFTKVEEAVESLGREIMTIQAKGDKPAAQSLLQSRATLTQPLRVALEKIEHMQVPVDIAPIFGTASKLLANN

SEQ ID NO: 13703 - protein, 258 aa, Triticum aestivum
  peptide (1)..(258): Ceres Seq. ID no. 13597047
  misc_feature (1)..(255): NCBI GI NO: 18412472 NR Description: MutT/nudix family protein [Arabidopsis thaliana]
  misc_feature (1)..(255): NCBI GI NO: 15912329 NR Description: At1g79690/F20B17_11 [Arabidopsis thaliana]
  misc_feature (9)..(255): NCBI GI NO: 7715590 NR Description: F20B17.11 [Arabidopsis thaliana]
  misc_feature (1)..(14): NCBI GI NO: 7715590 NR Description: F20B17.11 [Arabidopsis thaliana]
  misc_feature (1)..(227): NCBI GI NO: 29347256 NR Description: putative dipeptidyl-peptidase III
  misc_feature (1)..(45): NCBI GI NO: 11385429 NR Description: glutathione S-transferase GST 7 [Glycine max]
MNLLYNSGDVKGPQTIAFNLPNDERIVNERGTSMVMLKNISEAKFKNILKPIANACIREEQKEYVDFEPYYTHIVCHECCHGIGPHSITLPGGKKSTVRMELQECHSALEEAKADIVGLWALNFLINKGLLPKSLSKSMYVSFLAGCFRSIRFGLEEAHGKGQALQFNWLYDKGAFILHSDGKFSIDFTKVEEAVESLGREIMTIQAKGDKPAAQSLLQSRATLTQPLRVALEKIEHMQVPVDIAPIFGTASKLLANN

SEQ ID NO: 13704 - DNA, 1267 bp, Triticum aestivum
  misc_feature (1)..(1267): Ceres Seq. ID no. 13585043
atttttccccgattctcagcaacgagagccgacctcgtgacggcgccggccagccaggatccatagcgacgcggtggcgccgttcgccggagtagcgcgcctcgacaagaggccgcgcgctgctccttcgaacggcgctgagcccagcgcagaggcggggtgtcgtcttcctccgtaagtacggcacatcggtgtcaacttcccgtgcgtcgtcccgagagaccacgacatcctggtcctcgtgcggcgtcgtcgcgcgggatcccggacgtgaggcaccaacgcggcgccatcagtttcatctttaaatcttgagttcatcaactgaaggagatgtctgtggttaggttacaaggcggcagtccagagcatttgggcagtggtttcgttgcttactgcaacggatgttcatgtctagtaatgacatcttaccatgttgttaaatcagccttcattaatggtcttatgattacggttatctttcctggtggacaaccgcgctttcaagccgatgtacaaaatttatccgagcctggggatcttgctatacttcagtttgattgtgagggctatatgtttgaacctctgctgttcgctgaaatatctaccaatcctgatttatttccatggacggtttatttgcatggatattacaatggtaaacgtggacaacttatcagaccttcgacattacctggccaaattgacggtatgtacgtaaatcaagaaactggtgttcatatgctttatgcaaattacaccagtaaccctggaatgtctggtggaccaattattatgggaggtagagtcttggagtcaacaaaggggctgaggcaggaacgagacttgctgtttcagtcctgggtgtacaccatgctagaggattggactggcggagcagaaacaattgctgagatgcttgaaatgcttgaagagcttgactattaaaataatcaatcttgcagcaccaagtattaaagccttcaatgaagtatcagttacttggagtgaatgtttgatacgctgctggagcctcagggtggagtgaaagatggtttattgcttccatacattaagccgtcgtttattttggaagttgtctgagtgcgatgtgtaatttgtatctctatacggttgttatttaagttattcttgtccgagtgactacatcagactatcaaggattgttatttgttatgtaccaatgtggagtcacataggttatttgtgcctgtagagtaagaattatattaatgtgatggactcc

SEQ ID NO: 13705 - protein, 204 aa, Triticum aestivum
  peptide (1)..(204): Ceres Seq. ID no. 13585044
  misc_feature (15)..(160): Pfam Name: Pfam Description:  Trypsin
  misc_feature (2)..(201): NCBI GI NO: 34899250 NR Description: hypothetical protein~predicted by FGENESH etc.
MSVVRLQGGSPEHLGSGFVAYCNGCSCLVMTSYHVVKSAFINGLMITVIFPGGQPRFQADVQNLSEPGDLAILQFDCEGYMFEPLLFAEISTNPDLFPWTVYLHGYYNGKRGQLIRPSTLPGQIDGMYVNQETGVHMLYANYTSNPGMSGGPIIMGGRVLESTKGLRQERDLLFQSWVYTMLEDWTGGAETIAEMLEMLEELDY

SEQ ID NO: 13706 - protein, 175 aa, Triticum aestivum
  peptide (1)..(175): Ceres Seq. ID no. 13585045
  misc_feature (1)..(131): Pfam Name: Pfam Description:  Trypsin
  misc_feature (1)..(172): NCBI GI NO: 34899250 NR Description: hypothetical protein~predicted by FGENESH etc.
MTSYHVVKSAFINGLMITVIFPGGQPRFQADVQNLSEPGDLAILQFDCEGYMFEPLLFAEISTNPDLFPWTVYLHGYYNGKRGQLIRPSTLPGQIDGMYVNQETGVHMLYANYTSNPGMSGGPIIMGGRVLESTKGLRQERDLLFQSWVYTMLEDWTGGAETIAEMLEMLEELDY

SEQ ID NO: 13707 - protein, 160 aa, Triticum aestivum
  peptide (1)..(160): Ceres Seq. ID no. 13585046
  misc_feature (1)..(116): Pfam Name: Pfam Description:  Trypsin
  misc_feature (1)..(157): NCBI GI NO: 34899250 NR Description: hypothetical protein~predicted by FGENESH etc.
MITVIFPGGQPRFQADVQNLSEPGDLAILQFDCEGYMFEPLLFAEISTNPDLFPWTVYLHGYYNGKRGQLIRPSTLPGQIDGMYVNQETGVHMLYANYTSNPGMSGGPIIMGGRVLESTKGLRQERDLLFQSWVYTMLEDWTGGAETIAEMLEMLEELDY

SEQ ID NO: 13708 - DNA, 644 bp, Triticum aestivum
  misc_feature (1)..(644): Ceres Seq. ID no. 13598755
ccccatcgccgcctcatcgccgccaggagttcgagttccccccgaaccgtcgccatggctgccgcaccagtcatgtgagcaggccaagtcccggcgcagaatctactgcgcttcattctcgattaaattattcgaatcgtttctccgttgtgttgtttttaacttggtgtttgtttctctactccaacgtgcgcagctccccgaaagaaaatctgcccccttcgctgacctccacctccgagccccctccactcttcgacggcaccaccaggttgtatgttgcatatcactgcccatatgcgcagcgcgcttggattgccaggaactacaagggtttgcaagacaagatcaagatagtcgggatcgatctcgcagacaggccggcttggtacaaggagaaggtttacccacagaacaaggtgccttcactggagcataacaacgaggtgaaaggagaaagcttggatttggtcaagtacattgacagcaatttcgatggcccagcattgctccccgatgattctgcaaagaagcagtttgccgaggagctgcttgtgtacatcgatgagttcaataaagcactatactcatccataacctccaagggagatgtggcagaggaaactgttgctgcgctggataaa

SEQ ID NO: 13709 - protein, 214 aa, Triticum aestivum
  peptide (1)..(214): Ceres Seq. ID no. 13598756
  misc_feature (65)..(213): NCBI GI NO: 24796806 NR Description: putative glutathione S-transferase
  misc_feature (64)..(213): NCBI GI NO: 7939638 NR Description: XIG [Oryza sativa]
  misc_feature (64)..(213): NCBI GI NO: 24796810 NR Description: putative glutathione S-transferase
  misc_feature (65)..(213): NCBI GI NO: 1352460 NR Description: IN2-1 PROTEIN
  misc_feature (63)..(213): NCBI GI NO: 7489703 NR Description: safener-induced In2.1-like protein - wheat
  misc_feature (71)..(213): NCBI GI NO: 11385579 NR Description: In2-1 protein [Glycine max]
  misc_feature (69)..(213): NCBI GI NO: 15241956 NR Description: In2-1 protein, putative [Arabidopsis thaliana]
  misc_feature (69)..(213): NCBI GI NO: 21537338 NR Description: In2-1 protein [Arabidopsis thaliana]
  misc_feature (65)..(213): NCBI GI NO: 11357919 NR Description: hypothetical protein F9G14
  misc_feature (65)..(213): NCBI GI NO: 30679765 NR Description: In2-1 protein, putative [Arabidopsis thaliana]
PSPPHRRQEFEFPPNRRHGCRTSHVSRPSPGAESTALHSRLNYSNRFSVVLFLTWCLFLYSNVRSSPKENLPPSLTSTSEPPPLFDGTTRLYVAYHCPYAQRAWIARNYKGLQDKIKIVGIDLADRPAWYKEKVYPQNKVPSLEHNNEVKGESLDLVKYIDSNFDGPALLPDDSAKKQFAEELLVYIDEFNKALYSSITSKGDVAEETVAALDK

SEQ ID NO: 13710 - protein, 145 aa, Triticum aestivum
  peptide (1)..(145): Ceres Seq. ID no. 13598757
PIAASSPPGVRVPPEPSPWLPHQSCEQAKSRRRIYCASFSIKLFESFLRCVVFNLVFVSLLQRAQLPERKSAPFADLHLRAPSTLRRHHQVVCCISLPICAARLDCQELQGFARQDQDSRDRSRRQAGLVQGEGLPTEQGAFTGA

SEQ ID NO: 13711 - DNA, 1412 bp, Triticum aestivum
  misc_feature (1)..(1412): Ceres Seq. ID no. 14303542
gacaccactccccctgagctcgctcgcacgccgcggccgggtaacaccaccaccgggcaccatggcctcctccttcctctccctacggctccctaccccctccccgcccaccgcgacgtcgtccccgttcttcccgaatcccctagtccggtccggaaggtgcagtccgctgtcctctaccctcgtggcgcgtgttgccgggccggcggcgggggctccgtcgccgttgttcaacccgaggggcgacccgttcctatccacgctagcagctgcttctccagagcagctcgcggcagctgcgggtggcgaacgccgcggcgaggaccacctgccgttcctcgagatcttccagaacgccaagctcatgtcctcgcccgcgcaggtggaacgttctagcagctcttacagtcagcacagtcctagaaggcctcccccggatttgccgtcgttgcttctacatggccggattgtttatattggcatgccgttggtgccagcagttaccgagcttattgttgcccagttgatgtaccttgattggatgaatagtagtgagcctgcatatatatacatcaactcaacaggaacggctcgtgatgatggtgaaccagttggaatggagacggaaggttttgctatctatgatgccatgatgcggatgaaaactgaggttcacacactttgtataggagctgcagcaggtcatgcctgccttgtccttgcagcagggaagaaaggcaaacgatatatgtttccccatgccaaagctttgattcagcaacctcgtattccttcatatgggatgatgcaagcttctgatgttgttattcgtgcgaaagaggtagtgcacaacaggaataccctggtcaaacttttagcaaggcacactggaaatccaccggagaaaatagataaggtgatgagaggaccattttatatggactctttgaaagccaaggagtttggggtaattgacaagatcctttggcgcggtcaggagaagtacatgtctgacatgctctcccctgaggattgggacaaggttgctggagtcagaggccccggtggaatgtgaagttgtgcactggaactcgaatacttagttaggtctttgagctcgcagtcgcaggggttgaacgaacaatcttgcctgttgacaggttgtcagagccgagggtacctgttgtacggactatggagaagctagattagaacttggacgatcatgttagtgcgtatgctcccgggattggagctagcgagtgttttgggtggagctattgttgttagtccgatcgtttgccagtccaggttttggtactctgctcactgtaggtgcatagtgtacaccggagttaaaagcaaaaaacaaccacatttgaggcttcgtttgcgaaaaaatacctagtccc

SEQ ID NO: 13712 - protein, 357 aa, Triticum aestivum
  peptide (1)..(357): Ceres Seq. ID no. 14303543
  misc_feature (140)..(331): Pfam Name: Pfam Description:  Clp protease
  misc_feature (40)..(352): NCBI GI NO: 18390982 NR Description: ATP-dependent Clp protease proteolytic subunit
  misc_feature (40)..(218): NCBI GI NO: 25402516 NR Description: hypothetical protein
  misc_feature (224)..(327): NCBI GI NO: 25402516 NR Description: hypothetical protein
  misc_feature (141)..(328): NCBI GI NO: 22299302 NR Description: ATP-dependent Clp protease proteolytic subunit 3
  misc_feature (135)..(327): NCBI GI NO: 17231850 NR Description: ATP-dependent Clp protease proteolytic subunit
  misc_feature (135)..(327): NCBI GI NO: 23126723 NR Description: hypothetical protein [Nostoc punctiforme]
  misc_feature (143)..(328): NCBI GI NO: 13812146 NR Description: ATP-dependent Clp protease proteolytic subunit
  misc_feature (135)..(328): NCBI GI NO: 18203214 NR Description: Putative ATP-dependent Clp protease proteolytic subunit-like
  misc_feature (37)..(339): NCBI GI NO: 18414804 NR Description: ATP-dependent Clp protease proteolytic subunit
  misc_feature (37)..(339): NCBI GI NO: 19698857 NR Description: unknown protein [Arabidopsis thaliana]
TPLPLSSLARRGRVTPPPGTMASSFLSLRLPTPSPPTATSSPFFPNPLVRSGRCSPLSSTLVARVAGPAAGAPSPLFNPRGDPFLSTLAAASPEQLAAAAGGERRGEDHLPFLEIFQNAKLMSSPAQVERSSSSYSQHSPRRPPPDLPSLLLHGRIVYIGMPLVPAVTELIVAQLMYLDWMNSSEPAYIYINSTGTARDDGEPVGMETEGFAIYDAMMRMKTEVHTLCIGAAAGHACLVLAAGKKGKRYMFPHAKALIQQPRIPSYGMMQASDVVIRAKEVVHNRNTLVKLLARHTGNPPEKIDKVMRGPFYMDSLKAKEFGVIDKILWRGQEKYMSDMLSPEDWDKVAGVRGPGGM

SEQ ID NO: 13713 - protein, 337 aa, Triticum aestivum
  peptide (1)..(337): Ceres Seq. ID no. 14303544
  misc_feature (120)..(311): Pfam Name: Pfam Description:  Clp protease
  misc_feature (20)..(332): NCBI GI NO: 18390982 NR Description: ATP-dependent Clp protease proteolytic subunit
  misc_feature (20)..(198): NCBI GI NO: 25402516 NR Description: hypothetical protein
  misc_feature (204)..(307): NCBI GI NO: 25402516 NR Description: hypothetical protein
  misc_feature (121)..(308): NCBI GI NO: 22299302 NR Description: ATP-dependent Clp protease proteolytic subunit 3
  misc_feature (115)..(307): NCBI GI NO: 17231850 NR Description: ATP-dependent Clp protease proteolytic subunit
  misc_feature (115)..(307): NCBI GI NO: 23126723 NR Description: hypothetical protein [Nostoc punctiforme]
  misc_feature (123)..(308): NCBI GI NO: 13812146 NR Description: ATP-dependent Clp protease proteolytic subunit
  misc_feature (115)..(308): NCBI GI NO: 18203214 NR Description: Putative ATP-dependent Clp protease proteolytic subunit-like
  misc_feature (17)..(319): NCBI GI NO: 18414804 NR Description: ATP-dependent Clp protease proteolytic subunit
  misc_feature (17)..(319): NCBI GI NO: 19698857 NR Description: unknown protein [Arabidopsis thaliana]
MASSFLSLRLPTPSPPTATSSPFFPNPLVRSGRCSPLSSTLVARVAGPAAGAPSPLFNPRGDPFLSTLAAASPEQLAAAAGGERRGEDHLPFLEIFQNAKLMSSPAQVERSSSSYSQHSPRRPPPDLPSLLLHGRIVYIGMPLVPAVTELIVAQLMYLDWMNSSEPAYIYINSTGTARDDGEPVGMETEGFAIYDAMMRMKTEVHTLCIGAAAGHACLVLAAGKKGKRYMFPHAKALIQQPRIPSYGMMQASDVVIRAKEVVHNRNTLVKLLARHTGNPPEKIDKVMRGPFYMDSLKAKEFGVIDKILWRGQEKYMSDMLSPEDWDKVAGVRGPGGM

SEQ ID NO: 13714 - protein, 236 aa, Triticum aestivum
  peptide (1)..(236): Ceres Seq. ID no. 14303545
  misc_feature (19)..(210): Pfam Name: Pfam Description:  Clp protease
  misc_feature (1)..(231): NCBI GI NO: 18390982 NR Description: ATP-dependent Clp protease proteolytic subunit
  misc_feature (1)..(97): NCBI GI NO: 25402516 NR Description: hypothetical protein
  misc_feature (103)..(206): NCBI GI NO: 25402516 NR Description: hypothetical protein
  misc_feature (20)..(207): NCBI GI NO: 22299302 NR Description: ATP-dependent Clp protease proteolytic subunit 3
  misc_feature (14)..(206): NCBI GI NO: 17231850 NR Description: ATP-dependent Clp protease proteolytic subunit
  misc_feature (14)..(206): NCBI GI NO: 23126723 NR Description: hypothetical protein [Nostoc punctiforme]
  misc_feature (22)..(207): NCBI GI NO: 13812146 NR Description: ATP-dependent Clp protease proteolytic subunit
  misc_feature (14)..(207): NCBI GI NO: 18203214 NR Description: Putative ATP-dependent Clp protease proteolytic subunit-like
  misc_feature (1)..(218): NCBI GI NO: 18414804 NR Description: ATP-dependent Clp protease proteolytic subunit
  misc_feature (1)..(218): NCBI GI NO: 19698857 NR Description: unknown protein [Arabidopsis thaliana]
MSSPAQVERSSSSYSQHSPRRPPPDLPSLLLHGRIVYIGMPLVPAVTELIVAQLMYLDWMNSSEPAYIYINSTGTARDDGEPVGMETEGFAIYDAMMRMKTEVHTLCIGAAAGHACLVLAAGKKGKRYMFPHAKALIQQPRIPSYGMMQASDVVIRAKEVVHNRNTLVKLLARHTGNPPEKIDKVMRGPFYMDSLKAKEFGVIDKILWRGQEKYMSDMLSPEDWDKVAGVRGPGGM

SEQ ID NO: 13715 - DNA, 1264 bp, Triticum aestivum
  misc_feature (1)..(1264): Ceres Seq. ID no. 12616360
ggagcagtggcctgcagacgcggagctaccgagagccggaggacggaagcaagtgagctgagcgcaggcggaggcggacgcgacgatgagggcggtggcgatcgcgagccccggcgggccggaggcgctgcaggtgcgcgaggtggaggacctcccggcgccgggggagggcgaggtgctcgtcgcggtggccgccgccggcgtcaaccgcgccgacacggtccagcggcagggccggtacccgccgccgccgggcgcctccccctacccgggcctcgagtgctccggcaccatcctcgcgctcggggccaacgtgcccccgcgctgggccgtcggcgaccaggtgtgcgcgctgctctccggtggcgggtatgcggagaaggtggtggtgccggcggggcagctgctcccggtcccggagggggtgtcgctggccgacgccgccggcttgcccgaggtggcctgcaccgtctggtccaccgtcttcatgaccagccacctctcccccggcgaatccttccttatccatggcggatcgagtggaattggtacattcgctatacagattgcgaagcaccttggtgttaaggtttttgttactgcaggaagtgaagaaaaactagcagcctgcaaaggtttgggagcggatgtatgtataaactacaaaactgaagattttgtagcacgcgtaaaagaagaaacaaatggaaagggtgttgatgtcattctggacaatatcggcgggtcttatctccagcgcaatctgaacagcctagctgttgatggtagactcttcatcatcggtttcatgggaggcactacaactgaagtgaaccttcaggcgatgcttgcccgaagactgaccatacaagctgctggactgcggaacagaagcctcgctaacaaagcccagatcgtcagcgaggtggagaagaatgtgtggcctgccgtcgcgtcgggcaaggtgaagccggtgatttacaagacattccctctatccgaagcagctgaatctcacaagttgatggagacgagctcccacattggcaagatactgctgattccatgatggggtatggtgtatcatgtattcatgtgtacactagccgatgtgggcactgttttctgtagtgaactatgcatggacatgcccttttatattgtaataagctggatctctaagtgctggtgaaattggatatgtatcttgaggataaatagtcacaataaaatgttggaacttggaagtcttgttctttcatct

SEQ ID NO: 13716 - protein, 327 aa, Triticum aestivum
  peptide (1)..(327): Ceres Seq. ID no. 12616361
  misc_feature (1)..(327): NCBI GI NO: 15451578 NR Description: Putative quinone oxidoreductase [Oryza sativa]
  misc_feature (1)..(325): NCBI GI NO: 15234529 NR Description: putative NADPH quinone oxidoreductase
  misc_feature (1)..(326): NCBI GI NO: 21222233 NR Description: putative quinone oxidoreductase
  misc_feature (1)..(326): NCBI GI NO: 23017076 NR Description: hypothetical protein [Thermobifida fusca]
  misc_feature (1)..(326): NCBI GI NO: 29830911 NR Description: putative quinone oxidoreductase
  misc_feature (1)..(325): NCBI GI NO: 22960487 NR Description: hypothetical protein [Rhodobacter sphaeroides]
  misc_feature (1)..(325): NCBI GI NO: 22966771 NR Description: hypothetical protein [Rhodospirillum rubrum]
  misc_feature (1)..(325): NCBI GI NO: 22977083 NR Description: hypothetical protein [Ralstonia metallidurans]
  misc_feature (1)..(325): NCBI GI NO: 15843400 NR Description: quinone oxidoreductase
  misc_feature (1)..(325): NCBI GI NO: 15610913 NR Description: hypothetical protein Rv3777
MRAVAIASPGGPEALQVREVEDLPAPGEGEVLVAVAAAGVNRADTVQRQGRYPPPPGASPYPGLECSGTILALGANVPPRWAVGDQVCALLSGGGYAEKVVVPAGQLLPVPEGVSLADAAGLPEVACTVWSTVFMTSHLSPGESFLIHGGSSGIGTFAIQIAKHLGVKVFVTAGSEEKLAACKGLGADVCINYKTEDFVARVKEETNGKGVDVILDNIGGSYLQRNLNSLAVDGRLFIIGFMGGTTTEVNLQAMLARRLTIQAAGLRNRSLANKAQIVSEVEKNVWPAVASGKVKPVIYKTFPLSEAAESHKLMETSSHIGKILLIP

SEQ ID NO: 13717 - protein, 195 aa, Triticum aestivum
  peptide (1)..(195): Ceres Seq. ID no. 12616362
  misc_feature (73)..(165): Pfam Name: Pfam Description:  TT viral ORF2
GAVACRRGATESRRTEASELSAGGGGRDDEGGGDREPRRAGGAAGARGGGPPGAGGGRGARRGGRRRRQPRRHGPAAGPVPAAAGRLPLPGPRVLRHHPRARGQRAPALGRRRPGVRAALRWRVCGEGGGAGGAAAPGPGGGVAGRRRRLARGGLHRLVHRLHDQPPLPRRILPYPWRIEWNWYIRYTDCEAPWC

SEQ ID NO: 13718 - protein, 193 aa, Triticum aestivum
  peptide (1)..(193): Ceres Seq. ID no. 12616363
  misc_feature (1)..(193): NCBI GI NO: 15451578 NR Description: Putative quinone oxidoreductase [Oryza sativa]
  misc_feature (1)..(191): NCBI GI NO: 15234529 NR Description: putative NADPH quinone oxidoreductase
  misc_feature (1)..(192): NCBI GI NO: 21222233 NR Description: putative quinone oxidoreductase
  misc_feature (1)..(192): NCBI GI NO: 23017076 NR Description: hypothetical protein [Thermobifida fusca]
  misc_feature (1)..(192): NCBI GI NO: 29830911 NR Description: putative quinone oxidoreductase
  misc_feature (1)..(191): NCBI GI NO: 22960487 NR Description: hypothetical protein [Rhodobacter sphaeroides]
  misc_feature (1)..(191): NCBI GI NO: 22966771 NR Description: hypothetical protein [Rhodospirillum rubrum]
  misc_feature (1)..(191): NCBI GI NO: 22977083 NR Description: hypothetical protein [Ralstonia metallidurans]
  misc_feature (1)..(191): NCBI GI NO: 15843400 NR Description: quinone oxidoreductase
  misc_feature (1)..(191): NCBI GI NO: 15610913 NR Description: hypothetical protein Rv3777
MTSHLSPGESFLIHGGSSGIGTFAIQIAKHLGVKVFVTAGSEEKLAACKGLGADVCINYKTEDFVARVKEETNGKGVDVILDNIGGSYLQRNLNSLAVDGRLFIIGFMGGTTTEVNLQAMLARRLTIQAAGLRNRSLANKAQIVSEVEKNVWPAVASGKVKPVIYKTFPLSEAAESHKLMETSSHIGKILLIP

SEQ ID NO: 13719 - DNA, 2084 bp, Triticum aestivum
  misc_feature (1)..(2084): Ceres Seq. ID no. 13655463
acgcgaaagcgaagccctgttgagattaaagggggaaaataaacccaaaccactcgccgaacagtacaccaacccccaccccccatccccgccgcccctgaccggcgccatggccgccgccggagagcggcgcctcctcgtcggcctcctcctcctggcccttatggtctcggcgcactgcctggacggcgcgggccaccacggcccgcgcgtgaagcggcgccgcaagaagcgcgagatccactcccccgtcaagacggtggtggtggtggtcatggagaaccgcagcttcgaccacgtcctcggctggctccgcgcctcccgccccgacatcgacgggctcaccggcacggagtccaaccgcctcaacgcgtccgacccctcctccccggagatcttcgtcaccgacaaggccggctacgtcgactcggaccccggccacggcttcgaggacatccgcgagcagatcttcggctccgccgacacctccgccgtgccgccccccatgtcgggcttcgcgcagaacgcgcgcgggatgggcctcggcatggcgcagaacgtcatgagcggattcgcgcccgactccgtccccgtctacgccgccctcgccgacgagttcgccgtcttcgaccgctggttcgcgtcggtgcccacctccacccagcccaaccggctcttcgtccactcggccacctcccacggcctcaccttcaacgcgcgcaaggacctcatcaacggcttcccgcagaagaccatcttcgacagcctcgaggaggacggcctctccttcggcatctactaccagaacatccccgccacgctcttctaccagagcctgcgccgcctcaagcacctcctcaagttccaccagtacagcctcaggttcaagctcgacgccgccaggggcaagctgcccaattacgtcgtcatcgagcagcgctacttcgattgcaaggagttccccgccaacgacgaccacccgtcgcacgacgttgccaggggacagaggtttgtcaaggaggtctacgagacgctgcgggcgagcccgcagtggaacgagacggctctcatcatcacctatgatgagcatggtggcttctatgaccatgtccccacgcccgtcgtcaaagtgcctcagcctgatgggattattggccctgacccttactacttcaagtttgatcggctcggggtgcgcgtgcccagcttcctcatctcaccctgggttgagaagggcaccgtgatccatgaaccaaatggtcctgagggaacctcacaatatgagcattcatccatccctgcgacagtaaagaagctatttaatttacgtgctaactacctgacaaagagggattcatgggctgggacctttgagagctacctcaaagtccgaaagacaccaagaactgattgtccagagaaactcccagaggttacaaagtccctgcgaccatttggtgctaatgaagataaatctctatcggagtttcaagtggagttgattcaacttgcctctcagctcaatggtgaccacgtgctcaacagctatccggatattggcaagacgatgagtgtaggcgaagcaaaccgctacgcagaggatgctgtctccagattcctggaggctggaaggatcgctcttagggctggtgcaaacgaatctgctctggtgacaatgaggcccgcgctcaccagcagagccgcaatgtccaccggcttgtcatctgaactctgatggactgttactggatactgccaacagattctgcatcacgattaccggcgctacatgggctgcaagagtacggtagcatttatgtaatgggtattagatcttgcacatggattttttgtacatatacgccatgatacttcgtatctgaagcttacttcagcgggccctcgtggtttacgctcaggagtatcacccaacgacgcaccagatgcatgccaaattccccttccggataagctgtagctggtgttgtacctattcagctctctactgtacctgcttgtatagcagttgaactgcatcgtaaggagtattgtactatgaatgattgttggatttggccacctgt

SEQ ID NO: 13720 - protein, 577 aa, Triticum aestivum
  peptide (1)..(577): Ceres Seq. ID no. 15219740
  misc_feature (84)..(460): Pfam Name: Pfam Description:  Phosphoesterase family
  misc_feature (35)..(577): NCBI GI NO: 34897344 NR Description: putative phospholipase [Oryza sativa]
  misc_feature (43)..(572): NCBI GI NO: 21703147 NR Description: At1g07230/F10K1_4 [Arabidopsis thaliana]
  misc_feature (43)..(572): NCBI GI NO: 15222342 NR Description: phosphoesterase family [Arabidopsis thaliana]
  misc_feature (82)..(566): NCBI GI NO: 15225806 NR Description: phosphoesterase family [Arabidopsis thaliana]
  misc_feature (82)..(568): NCBI GI NO: 20161866 NR Description: B1139B11.7
  misc_feature (82)..(566): NCBI GI NO: 30693062 NR Description: phosphoesterase family [Arabidopsis thaliana]
  misc_feature (82)..(564): NCBI GI NO: 15228577 NR Description: phosphoesterase family [Arabidopsis thaliana]
  misc_feature (82)..(564): NCBI GI NO: 17529016 NR Description: unknown protein [Arabidopsis thaliana]
  misc_feature (83)..(557): NCBI GI NO: 18396577 NR Description: phosphoesterase family [Arabidopsis thaliana]
  misc_feature (84)..(575): NCBI GI NO: 27573343 NR Description: putative phosphoesterase
RESEALLRLKGENKPKPLAEQYTNPHPPSPPPLTGAMAAAGERRLLVGLLLLALMVSAHCLDGAGHHGPRVKRRRKKREIHSPVKTVVVVVMENRSFDHVLGWLRASRPDIDGLTGTESNRLNASDPSSPEIFVTDKAGYVDSDPGHGFEDIREQIFGSADTSAVPPPMSGFAQNARGMGLGMAQNVMSGFAPDSVPVYAALADEFAVFDRWFASVPTSTQPNRLFVHSATSHGLTFNARKDLINGFPQKTIFDSLEEDGLSFGIYYQNIPATLFYQSLRRLKHLLKFHQYSLRFKLDAARGKLPNYVVIEQRYFDCKEFPANDDHPSHDVARGQRFVKEVYETLRASPQWNETALIITYDEHGGFYDHVPTPVVKVPQPDGIIGPDPYYFKFDRLGVRVPSFLISPWVEKGTVIHEPNGPEGTSQYEHSSIPATVKKLFNLRANYLTKRDSWAGTFESYLKVRKTPRTDCPEKLPEVTKSLRPFGANEDKSLSEFQVELIQLASQLNGDHVLNSYPDIGKTMSVGEANRYAEDAVSRFLEAGRIALRAGANESALVTMRPALTSRAAMSTGLSSEL

SEQ ID NO: 13721 - protein, 541 aa, Triticum aestivum
  peptide (1)..(541): Ceres Seq. ID no. 15219741
  misc_feature (48)..(424): Pfam Name: Pfam Description:  Phosphoesterase family
  misc_feature (1)..(541): NCBI GI NO: 34897344 NR Description: putative phospholipase [Oryza sativa]
  misc_feature (7)..(536): NCBI GI NO: 21703147 NR Description: At1g07230/F10K1_4 [Arabidopsis thaliana]
  misc_feature (7)..(536): NCBI GI NO: 15222342 NR Description: phosphoesterase family [Arabidopsis thaliana]
  misc_feature (46)..(530): NCBI GI NO: 15225806 NR Description: phosphoesterase family [Arabidopsis thaliana]
  misc_feature (46)..(532): NCBI GI NO: 20161866 NR Description: B1139B11.7
  misc_feature (46)..(530): NCBI GI NO: 30693062 NR Description: phosphoesterase family [Arabidopsis thaliana]
  misc_feature (46)..(528): NCBI GI NO: 15228577 NR Description: phosphoesterase family [Arabidopsis thaliana]
  misc_feature (46)..(528): NCBI GI NO: 17529016 NR Description: unknown protein [Arabidopsis thaliana]
  misc_feature (47)..(521): NCBI GI NO: 18396577 NR Description: phosphoesterase family [Arabidopsis thaliana]
  misc_feature (48)..(539): NCBI GI NO: 27573343 NR Description: putative phosphoesterase
MAAAGERRLLVGLLLLALMVSAHCLDGAGHHGPRVKRRRKKREIHSPVKTVVVVVMENRSFDHVLGWLRASRPDIDGLTGTESNRLNASDPSSPEIFVTDKAGYVDSDPGHGFEDIREQIFGSADTSAVPPPMSGFAQNARGMGLGMAQNVMSGFAPDSVPVYAALADEFAVFDRWFASVPTSTQPNRLFVHSATSHGLTFNARKDLINGFPQKTIFDSLEEDGLSFGIYYQNIPATLFYQSLRRLKHLLKFHQYSLRFKLDAARGKLPNYVVIEQRYFDCKEFPANDDHPSHDVARGQRFVKEVYETLRASPQWNETALIITYDEHGGFYDHVPTPVVKVPQPDGIIGPDPYYFKFDRLGVRVPSFLISPWVEKGTVIHEPNGPEGTSQYEHSSIPATVKKLFNLRANYLTKRDSWAGTFESYLKVRKTPRTDCPEKLPEVTKSLRPFGANEDKSLSEFQVELIQLASQLNGDHVLNSYPDIGKTMSVGEANRYAEDAVSRFLEAGRIALRAGANESALVTMRPALTSRAAMSTGLSSEL

SEQ ID NO: 13722 - protein, 523 aa, Triticum aestivum
  peptide (1)..(523): Ceres Seq. ID no. 15219742
  misc_feature (30)..(406): Pfam Name: Pfam Description:  Phosphoesterase family
  misc_feature (1)..(523): NCBI GI NO: 34897344 NR Description: putative phospholipase [Oryza sativa]
  misc_feature (1)..(518): NCBI GI NO: 21703147 NR Description: At1g07230/F10K1_4 [Arabidopsis thaliana]
  misc_feature (1)..(518): NCBI GI NO: 15222342 NR Description: phosphoesterase family [Arabidopsis thaliana]
  misc_feature (28)..(512): NCBI GI NO: 15225806 NR Description: phosphoesterase family [Arabidopsis thaliana]
  misc_feature (28)..(514): NCBI GI NO: 20161866 NR Description: B1139B11.7
  misc_feature (28)..(512): NCBI GI NO: 30693062 NR Description: phosphoesterase family [Arabidopsis thaliana]
  misc_feature (28)..(510): NCBI GI NO: 15228577 NR Description: phosphoesterase family [Arabidopsis thaliana]
  misc_feature (28)..(510): NCBI GI NO: 17529016 NR Description: unknown protein [Arabidopsis thaliana]
  misc_feature (29)..(503): NCBI GI NO: 18396577 NR Description: phosphoesterase family [Arabidopsis thaliana]
  misc_feature (30)..(521): NCBI GI NO: 27573343 NR Description: putative phosphoesterase
MVSAHCLDGAGHHGPRVKRRRKKREIHSPVKTVVVVVMENRSFDHVLGWLRASRPDIDGLTGTESNRLNASDPSSPEIFVTDKAGYVDSDPGHGFEDIREQIFGSADTSAVPPPMSGFAQNARGMGLGMAQNVMSGFAPDSVPVYAALADEFAVFDRWFASVPTSTQPNRLFVHSATSHGLTFNARKDLINGFPQKTIFDSLEEDGLSFGIYYQNIPATLFYQSLRRLKHLLKFHQYSLRFKLDAARGKLPNYVVIEQRYFDCKEFPANDDHPSHDVARGQRFVKEVYETLRASPQWNETALIITYDEHGGFYDHVPTPVVKVPQPDGIIGPDPYYFKFDRLGVRVPSFLISPWVEKGTVIHEPNGPEGTSQYEHSSIPATVKKLFNLRANYLTKRDSWAGTFESYLKVRKTPRTDCPEKLPEVTKSLRPFGANEDKSLSEFQVELIQLASQLNGDHVLNSYPDIGKTMSVGEANRYAEDAVSRFLEAGRIALRAGANESALVTMRPALTSRAAMSTGLSSEL

SEQ ID NO: 13723 - DNA, 1536 bp, Triticum aestivum
  misc_feature (1)..(1536): Ceres Seq. ID no. 14313522
aaaacggatgttcggtcgtgccgtcgtggagtttggctaggcaacgcagctcggatcccgcggaaaaggcaggcaacacaggcagcggcacacggtacagcctcaggagacacagaggcgagatcccgtggcggatcagcggctgcctgtctgaaccggcaacgcatctcctccctcccccctctccagtctccctactccgacgatctatccgtcgagcctcctcaccgcgcgactcgcagcagcgccggagggggaggatggggcggccgccaagcagcgggggccccgcgttccggttcacgcacgcggaggtggcggagatggaggagcacctccgccacctcaacaacgccatcccgcagcgcaacgtcatccagggcctcgccgagaagttcaccgcctccgccgcccgcgccggcaagatccccgtccagtacaagcaggtctggaactggttccagaaccggaggtactcgcagcgggccaggacccccaggggcgcgccgccgccgcaggggaagatgctgcccacgggggccgaggaacaccacccggcctccttcagggctcaggggtcttcctcgtcctaccccggatcccactcaggaaagagtccttcggatggtggccaggccgagtttgaagcaaagtcagctagagatggtgcatggtacgatgttgctgcctttctgtcccacaggctctttgaaacaggggacccggaagtaaaagttcgattttctggatttgggcctgaggaggatgaatggattaatgttcgtaaatgtgtgaggctgcgttctcttccatgtgaatctgcagaatgtgttgctgtgcttcctggggatctcattctttgttttcaggaaggcaaagagcaggccctctattttgacgctcgtgttcttgatgctcaaaggcgcaggcatgatgtaagagggtgccgctgcaggtttcttgttcgttatgatcatgatcactctgaggagattgttcctctgaggaaggtatgccgtcgaccagaaactgatttcaggctccagatcttgcacgcatctagagcggcggcctctgcggatgctcagaatgttagcccagttgagcagaaaccccaaaaggcgcacaagatgatggatgtgaacactgccgaggtgaccgtggttcgcaacccagatcaaggagggccatctgacaagccggctgctcccttaccagctgcgcctgctggcacccacggtgattcagtttcagatgtgcagatggggaatgtggaggttattccaaaagttgaagctgcaaatgaagcacatgatgacaacatgaacgtgggagcgtagttgtttcgcttccctgtgcgcttcggtgtgtacttactaagtccaaaaaaatgtttgcttaggaacttccggtcgaggaaggatggtcgcccggtaactgtaatgtgccgatgtcgacttgtttgctgatgtgtgtacaaagtcttggattgtcggtatctatatagctatatcgtgagacgaatgttgttttcag

SEQ ID NO: 13724 - protein, 445 aa, Triticum aestivum
  peptide (1)..(445): Ceres Seq. ID no. 14313523
  misc_feature (193)..(411): NCBI GI NO: 22331151 NR Description: expressed protein [Arabidopsis thaliana]
  misc_feature (87)..(163): NCBI GI NO: 22331151 NR Description: expressed protein [Arabidopsis thaliana]
  misc_feature (104)..(411): NCBI GI NO: 11994101 NR Description: gb|AAD39678
  misc_feature (100)..(342): NCBI GI NO: 25402795 NR Description: protein F9L1.16 [imported] - Arabidopsis thaliana
  misc_feature (108)..(342): NCBI GI NO: 30684244 NR Description: expressed protein [Arabidopsis thaliana]
  misc_feature (108)..(329): NCBI GI NO: 30684237 NR Description: expressed protein [Arabidopsis thaliana]
NGCSVVPSWSLARQRSSDPAEKAGNTGSGTRYSLRRHRGEIPWRISGCLSEPATHLLPPPSPVSLLRRSIRRASSPRDSQQRRRGRMGRPPSSGGPAFRFTHAEVAEMEEHLRHLNNAIPQRNVIQGLAEKFTASAARAGKIPVQYKQVWNWFQNRRYSQRARTPRGAPPPQGKMLPTGAEEHHPASFRAQGSSSSYPGSHSGKSPSDGGQAEFEAKSARDGAWYDVAAFLSHRLFETGDPEVKVRFSGFGPEEDEWINVRKCVRLRSLPCESAECVAVLPGDLILCFQEGKEQALYFDARVLDAQRRRHDVRGCRCRFLVRYDHDHSEEIVPLRKVCRRPETDFRLQILHASRAAASADAQNVSPVEQKPQKAHKMMDVNTAEVTVVRNPDQGGPSDKPAAPLPAAPAGTHGDSVSDVQMGNVEVIPKVEAANEAHDDNMNVGA

SEQ ID NO: 13725 - protein, 359 aa, Triticum aestivum
  peptide (1)..(359): Ceres Seq. ID no. 14313524
  misc_feature (107)..(325): NCBI GI NO: 22331151 NR Description: expressed protein [Arabidopsis thaliana]
  misc_feature (1)..(77): NCBI GI NO: 22331151 NR Description: expressed protein [Arabidopsis thaliana]
  misc_feature (18)..(325): NCBI GI NO: 11994101 NR Description: gb|AAD39678
  misc_feature (14)..(256): NCBI GI NO: 25402795 NR Description: protein F9L1.16 [imported] - Arabidopsis thaliana
  misc_feature (22)..(256): NCBI GI NO: 30684244 NR Description: expressed protein [Arabidopsis thaliana]
  misc_feature (22)..(243): NCBI GI NO: 30684237 NR Description: expressed protein [Arabidopsis thaliana]
MGRPPSSGGPAFRFTHAEVAEMEEHLRHLNNAIPQRNVIQGLAEKFTASAARAGKIPVQYKQVWNWFQNRRYSQRARTPRGAPPPQGKMLPTGAEEHHPASFRAQGSSSSYPGSHSGKSPSDGGQAEFEAKSARDGAWYDVAAFLSHRLFETGDPEVKVRFSGFGPEEDEWINVRKCVRLRSLPCESAECVAVLPGDLILCFQEGKEQALYFDARVLDAQRRRHDVRGCRCRFLVRYDHDHSEEIVPLRKVCRRPETDFRLQILHASRAAASADAQNVSPVEQKPQKAHKMMDVNTAEVTVVRNPDQGGPSDKPAAPLPAAPAGTHGDSVSDVQMGNVEVIPKVEAANEAHDDNMNVGA

SEQ ID NO: 13726 - protein, 338 aa, Triticum aestivum
  peptide (1)..(338): Ceres Seq. ID no. 14313525
  misc_feature (86)..(304): NCBI GI NO: 22331151 NR Description: expressed protein [Arabidopsis thaliana]
  misc_feature (1)..(56): NCBI GI NO: 22331151 NR Description: expressed protein [Arabidopsis thaliana]
  misc_feature (1)..(304): NCBI GI NO: 11994101 NR Description: gb|AAD39678
  misc_feature (1)..(235): NCBI GI NO: 25402795 NR Description: protein F9L1.16 [imported] - Arabidopsis thaliana
  misc_feature (1)..(235): NCBI GI NO: 30684244 NR Description: expressed protein [Arabidopsis thaliana]
  misc_feature (1)..(222): NCBI GI NO: 30684237 NR Description: expressed protein [Arabidopsis thaliana]
MEEHLRHLNNAIPQRNVIQGLAEKFTASAARAGKIPVQYKQVWNWFQNRRYSQRARTPRGAPPPQGKMLPTGAEEHHPASFRAQGSSSSYPGSHSGKSPSDGGQAEFEAKSARDGAWYDVAAFLSHRLFETGDPEVKVRFSGFGPEEDEWINVRKCVRLRSLPCESAECVAVLPGDLILCFQEGKEQALYFDARVLDAQRRRHDVRGCRCRFLVRYDHDHSEEIVPLRKVCRRPETDFRLQILHASRAAASADAQNVSPVEQKPQKAHKMMDVNTAEVTVVRNPDQGGPSDKPAAPLPAAPAGTHGDSVSDVQMGNVEVIPKVEAANEAHDDNMNVGA

SEQ ID NO: 13727 - DNA, 1831 bp, Triticum aestivum
  misc_feature (1)..(1831): Ceres Seq. ID no. 13584031
agattaaatgttgaggtggaggaaagagaaaccgaaaaaaaggtcttgccttcgcttaattaagcgatgacatcttagccccgattttgatgcgatctgtgatccatgcgccgaacggccacagccggatccttctcgttgcctcgcgcgaaaattttcttcttggcgcgcctctcttccttctcgcccgtcctgcgcgccaaatttctcatcccgatcctggagcccgccagaagaaacctaggcccgctgcccccataaatccacagcagcagactccatcttccatccgtgcgacttgcaggttccttgagcaccaacatggctggccatgggaggaagaaagcggcgcccccatcccaggtgatggacggaccagacggacaagacccaaaatatggcgcccctcccctgccgatggggcgacctaaagctgccgcagcagccgtagcggcatcgaacgcttggttggctgggcatgctgccgctagatccgattcttcccttcaagttgattggggaaatgatgtttacccacctggtggttttgtaaattatttgaacaattcatcgagcttcagtcttccacaacaaattcctcctccaccagccatgacacatggtgctaatttcgcggcaccgctgacatttgcatctcaaaagaatccaattacagcagtgaagaaacgatccaaacgtgcccatgttgaaattgcggatgatgcgggagaaggtaaaactatgaagagattgccatggacatcagaggaggaggatagattgatgagtgcttggctcaagaactcaaatgatcctatcggtggtaatttcaagaagaatgacaaatattggggagatgtggtcgcggactacaatagcaacaccccctcagatcgcaaaagacaagtcaatcaagctatgaaccgatggcatcgagttaacaaaatgataaataatttccattccatccacggagagattagcggtgtatatgctagtgggcagtccaatcagcaattgatggagaaagtccacaaagcatatgagaacagacacggaggaccatttcttctggaaagtacctggcaggttgttcgtcactatccgaagtggtctacgtacaatgcagaactgaatggattgaagaaaatagatgtggccgacctggggaaggcagaggatcatgaggcagctgatagtgatgatatcccacggcctccaggtactaaaacagctaaaagagatgggaatggcaatgacaaaagaaagttgaagtcagaggatttagaagagcttgagaaattcttagaagcccaaaaagaagctactaaaagtcgcacggatgtccttgaggttcaaaagcgtattgcagccgataaacttgagtcgtcgaggctcattctccttgcagcgaaggagaacaaggaggcaaaaacaagagggaaaatgctagaacagtacggtaaattattgacacaagatatggcagggatgaccgagtttcagaaagctgagcatgcgattgcacttaaattgatgcgggaggagttattccccaacgctcgtcaataagtttggaaggaacctgttcctgtttgatgaatgaagagagaagaacagccaatgaagcaatgtggttcatgtcctagtactgatgcttcgggagtgcacaagcttgtttttgttttgttgacagaagtagttattatcaatagatttctgttggtctcgagctagttatttatgtatgtcaacttcttgcttaagtacttccaaaaattgttttctaatctgaagtcagtaataatcattaatccgtaatgattaaaat

SEQ ID NO: 13728 - protein, 416 aa, Triticum aestivum
  peptide (1)..(416): Ceres Seq. ID no. 13584032
  misc_feature (22)..(412): NCBI GI NO: 34913404 NR Description: B1074C08.25
  misc_feature (101)..(411): NCBI GI NO: 34908712 NR Description: hypothetical protein~similar to Oryza sativachromosome1
  misc_feature (74)..(410): NCBI GI NO: 37534862 NR Description: hypothetical protein
  misc_feature (118)..(410): NCBI GI NO: 34907792 NR Description: P0703B11.16
  misc_feature (1)..(409): NCBI GI NO: 18855038 NR Description: putative ribosomal protein [Oryza sativa]
  misc_feature (124)..(384): NCBI GI NO: 38636815 NR Description: ribosomal protein-like
  misc_feature (71)..(408): NCBI GI NO: 22830896 NR Description: A [Oryza sativa (japonica cultivar-group)]
  misc_feature (90)..(333): NCBI GI NO: 34914796 NR Description: B1039D07.22
  misc_feature (124)..(384): NCBI GI NO: 34913854 NR Description: B1156H12.9
  misc_feature (63)..(410): NCBI GI NO: 38636855 NR Description: myb family protein-like
MAGHGRKKAAPPSQVMDGPDGQDPKYGAPPLPMGRPKAAAAAVAASNAWLAGHAAARSDSSLQVDWGNDVYPPGGFVNYLNNSSSFSLPQQIPPPPAMTHGANFAAPLTFASQKNPITAVKKRSKRAHVEIADDAGEGKTMKRLPWTSEEEDRLMSAWLKNSNDPIGGNFKKNDKYWGDVVADYNSNTPSDRKRQVNQAMNRWHRVNKMINNFHSIHGEISGVYASGQSNQQLMEKVHKAYENRHGGPFLLESTWQVVRHYPKWSTYNAELNGLKKIDVADLGKAEDHEAADSDDIPRPPGTKTAKRDGNGNDKRKLKSEDLEELEKFLEAQKEATKSRTDVLEVQKRIAADKLESSRLILLAAKENKEAKTRGKMLEQYGKLLTQDMAGMTEFQKAEHAIALKLMREELFPNARQ

SEQ ID NO: 13729 - protein, 401 aa, Triticum aestivum
  peptide (1)..(401): Ceres Seq. ID no. 13584033
  misc_feature (7)..(397): NCBI GI NO: 34913404 NR Description: B1074C08.25
  misc_feature (86)..(396): NCBI GI NO: 34908712 NR Description: hypothetical protein~similar to Oryza sativachromosome1
  misc_feature (59)..(395): NCBI GI NO: 37534862 NR Description: hypothetical protein
  misc_feature (103)..(395): NCBI GI NO: 34907792 NR Description: P0703B11.16
  misc_feature (1)..(394): NCBI GI NO: 18855038 NR Description: putative ribosomal protein [Oryza sativa]
  misc_feature (109)..(369): NCBI GI NO: 38636815 NR Description: ribosomal protein-like
  misc_feature (56)..(393): NCBI GI NO: 22830896 NR Description: A [Oryza sativa (japonica cultivar-group)]
  misc_feature (75)..(318): NCBI GI NO: 34914796 NR Description: B1039D07.22
  misc_feature (109)..(369): NCBI GI NO: 34913854 NR Description: B1156H12.9
  misc_feature (48)..(395): NCBI GI NO: 38636855 NR Description: myb family protein-like
MDGPDGQDPKYGAPPLPMGRPKAAAAAVAASNAWLAGHAAARSDSSLQVDWGNDVYPPGGFVNYLNNSSSFSLPQQIPPPPAMTHGANFAAPLTFASQKNPITAVKKRSKRAHVEIADDAGEGKTMKRLPWTSEEEDRLMSAWLKNSNDPIGGNFKKNDKYWGDVVADYNSNTPSDRKRQVNQAMNRWHRVNKMINNFHSIHGEISGVYASGQSNQQLMEKVHKAYENRHGGPFLLESTWQVVRHYPKWSTYNAELNGLKKIDVADLGKAEDHEAADSDDIPRPPGTKTAKRDGNGNDKRKLKSEDLEELEKFLEAQKEATKSRTDVLEVQKRIAADKLESSRLILLAAKENKEAKTRGKMLEQYGKLLTQDMAGMTEFQKAEHAIALKLMREELFPNARQ

SEQ ID NO: 13730 - protein, 384 aa, Triticum aestivum
  peptide (1)..(384): Ceres Seq. ID no. 13584034
  misc_feature (1)..(380): NCBI GI NO: 34913404 NR Description: B1074C08.25
  misc_feature (69)..(379): NCBI GI NO: 34908712 NR Description: hypothetical protein~similar to Oryza sativachromosome1
  misc_feature (42)..(378): NCBI GI NO: 37534862 NR Description: hypothetical protein
  misc_feature (86)..(378): NCBI GI NO: 34907792 NR Description: P0703B11.16
  misc_feature (1)..(377): NCBI GI NO: 18855038 NR Description: putative ribosomal protein [Oryza sativa]
  misc_feature (92)..(352): NCBI GI NO: 38636815 NR Description: ribosomal protein-like
  misc_feature (39)..(376): NCBI GI NO: 22830896 NR Description: A [Oryza sativa (japonica cultivar-group)]
  misc_feature (58)..(301): NCBI GI NO: 34914796 NR Description: B1039D07.22
  misc_feature (92)..(352): NCBI GI NO: 34913854 NR Description: B1156H12.9
  misc_feature (31)..(378): NCBI GI NO: 38636855 NR Description: myb family protein-like
MGRPKAAAAAVAASNAWLAGHAAARSDSSLQVDWGNDVYPPGGFVNYLNNSSSFSLPQQIPPPPAMTHGANFAAPLTFASQKNPITAVKKRSKRAHVEIADDAGEGKTMKRLPWTSEEEDRLMSAWLKNSNDPIGGNFKKNDKYWGDVVADYNSNTPSDRKRQVNQAMNRWHRVNKMINNFHSIHGEISGVYASGQSNQQLMEKVHKAYENRHGGPFLLESTWQVVRHYPKWSTYNAELNGLKKIDVADLGKAEDHEAADSDDIPRPPGTKTAKRDGNGNDKRKLKSEDLEELEKFLEAQKEATKSRTDVLEVQKRIAADKLESSRLILLAAKENKEAKTRGKMLEQYGKLLTQDMAGMTEFQKAEHAIALKLMREELFPNARQ

SEQ ID NO: 13731 - DNA, 1325 bp, Triticum aestivum
  misc_feature (1)..(1325): Ceres Seq. ID no. 12617152
atgaccttcttccggtacctaccggaactcctctcctggccctccccttcttccagctcttcttgataaggccacactccgtagaagaacagcaccttgcgatgaaaatggcgagagccctgctcgtcgctcctcttctcgcctcgtgctttgtggcgctcggcctgtccggccgcgccgatgcggcggccgagacgaagaccgtcggtgtctacgagctcaagaagggggatttctccatcaaggtcaccaactggggtgccaccctcatgtccgtgatcctccccgactcgagaggaaacttgggggatgtgatcctgggctacgatacggttgctgagtatgtgaatggcaccgcctactttggagggttgatcggccgcgtcgccaacaggatcgccaacgcccggttcacgctggacgggaaggcctaccggctggttcccaacgatggcaacaacacgctacacggtggtcaccggggattcgataaggtcgtatggacggtgaaggagcacgtcgccggcggcagctccccattcatcactctgtactatcatagcttcgacggagagcaagggtttccaggcgatgtggacgtgcacgtgaagtaccagctctccggcccgcacgagctgagcgtgcgcatgaacgcgacggcgcggggcaaggccaccccggtgaacctcgcgcaccacgcctactggaacctcggcggccacggcagcggcagcgtcctcggcgaggaggtccgcctcttcgcctcccggtacacgcccgtggatgccgcgctcatcccgacgggccacctggcgcccgtggccggcacgccctacgacttccgcacgccggccgccgtgggctcgcgcatcggtggtctcctgagccggggcgttaatgggtacgacatcaactacgtcgtggacggcgggggcctgcgcccggtggcagttgtccgggatggcgcgtccggtagggcgatggagctgtgggcggatcagcccggggtgcagttctacaccgccaacgggctgagtggcgtgagggggaagggcggcaaggtctatggccgatacggcgcgctctgcttggagacgcaggggttccccgacgccgtgaaccgcccgagtttcccgtcgcagatcgtccggccggggaaggtgtacatgcatcacatggtgttcaagttctccttctagtatagctagtggtagtgtggtacccgagcttggtcgtttgtcaggcaacacagccgctcttgtgttttgtgtgctgtctgaatttgatcggttgagcttcaatggaggaataaaagcttgcatgct

SEQ ID NO: 13732 - protein, 398 aa, Triticum aestivum
  peptide (1)..(398): Ceres Seq. ID no. 12617153
  misc_feature (69)..(394): Pfam Name: Pfam Description:  Aldose 1-epimerase
  misc_feature (156)..(398): NCBI GI NO: 38567883 NR Description: OSJNBa0036B21.18
  misc_feature (36)..(165): NCBI GI NO: 38567883 NR Description: OSJNBa0036B21.18
  misc_feature (36)..(398): NCBI GI NO: 38567884 NR Description: OSJNBa0036B21.19
  misc_feature (45)..(397): NCBI GI NO: 15824567 NR Description: non-cell-autonomous protein pathway2
  misc_feature (46)..(397): NCBI GI NO: 15824565 NR Description: non-cell-autonomous protein pathway1
  misc_feature (46)..(397): NCBI GI NO: 40882679 NR Description: putative aldose 1-epimerase
  misc_feature (61)..(397): NCBI GI NO: 7430313 NR Description: probable aldose 1-epimerase (EC 5
  misc_feature (68)..(397): NCBI GI NO: 21537069 NR Description: aldose 1-epimerase-like protein
  misc_feature (68)..(397): NCBI GI NO: 15228261 NR Description: aldose 1-epimerase - like protein
  misc_feature (64)..(397): NCBI GI NO: 15242223 NR Description: putative aldose 1-epimerase - like protein
DLLPVPTGTPLLALPFFQLFLIRPHSVEEQHLAMKMARALLVAPLLASCFVALGLSGRADAAAETKTVGVYELKKGDFSIKVTNWGATLMSVILPDSRGNLGDVILGYDTVAEYVNGTAYFGGLIGRVANRIANARFTLDGKAYRLVPNDGNNTLHGGHRGFDKVVWTVKEHVAGGSSPFITLYYHSFDGEQGFPGDVDVHVKYQLSGPHELSVRMNATARGKATPVNLAHHAYWNLGGHGSGSVLGEEVRLFASRYTPVDAALIPTGHLAPVAGTPYDFRTPAAVGSRIGGLLSRGVNGYDINYVVDGGGLRPVAVVRDGASGRAMELWADQPGVQFYTANGLSGVRGKGGKVYGRYGALCLETQGFPDAVNRPSFPSQIVRPGKVYMHHMVFKFSF

SEQ ID NO: 13733 - protein, 365 aa, Triticum aestivum
  peptide (1)..(365): Ceres Seq. ID no. 12617154
  misc_feature (36)..(361): Pfam Name: Pfam Description:  Aldose 1-epimerase
  misc_feature (123)..(365): NCBI GI NO: 38567883 NR Description: OSJNBa0036B21.18
  misc_feature (3)..(132): NCBI GI NO: 38567883 NR Description: OSJNBa0036B21.18
  misc_feature (3)..(365): NCBI GI NO: 38567884 NR Description: OSJNBa0036B21.19
  misc_feature (12)..(364): NCBI GI NO: 15824567 NR Description: non-cell-autonomous protein pathway2
  misc_feature (13)..(364): NCBI GI NO: 15824565 NR Description: non-cell-autonomous protein pathway1
  misc_feature (13)..(364): NCBI GI NO: 40882679 NR Description: putative aldose 1-epimerase
  misc_feature (28)..(364): NCBI GI NO: 7430313 NR Description: probable aldose 1-epimerase (EC 5
  misc_feature (35)..(364): NCBI GI NO: 21537069 NR Description: aldose 1-epimerase-like protein
  misc_feature (35)..(364): NCBI GI NO: 15228261 NR Description: aldose 1-epimerase - like protein
  misc_feature (31)..(364): NCBI GI NO: 15242223 NR Description: putative aldose 1-epimerase - like protein
MKMARALLVAPLLASCFVALGLSGRADAAAETKTVGVYELKKGDFSIKVTNWGATLMSVILPDSRGNLGDVILGYDTVAEYVNGTAYFGGLIGRVANRIANARFTLDGKAYRLVPNDGNNTLHGGHRGFDKVVWTVKEHVAGGSSPFITLYYHSFDGEQGFPGDVDVHVKYQLSGPHELSVRMNATARGKATPVNLAHHAYWNLGGHGSGSVLGEEVRLFASRYTPVDAALIPTGHLAPVAGTPYDFRTPAAVGSRIGGLLSRGVNGYDINYVVDGGGLRPVAVVRDGASGRAMELWADQPGVQFYTANGLSGVRGKGGKVYGRYGALCLETQGFPDAVNRPSFPSQIVRPGKVYMHHMVFKFSF

SEQ ID NO: 13734 - protein, 363 aa, Triticum aestivum
  peptide (1)..(363): Ceres Seq. ID no. 12617155
  misc_feature (34)..(359): Pfam Name: Pfam Description:  Aldose 1-epimerase
  misc_feature (121)..(363): NCBI GI NO: 38567883 NR Description: OSJNBa0036B21.18
  misc_feature (1)..(130): NCBI GI NO: 38567883 NR Description: OSJNBa0036B21.18
  misc_feature (1)..(363): NCBI GI NO: 38567884 NR Description: OSJNBa0036B21.19
  misc_feature (10)..(362): NCBI GI NO: 15824567 NR Description: non-cell-autonomous protein pathway2
  misc_feature (11)..(362): NCBI GI NO: 15824565 NR Description: non-cell-autonomous protein pathway1
  misc_feature (11)..(362): NCBI GI NO: 40882679 NR Description: putative aldose 1-epimerase
  misc_feature (26)..(362): NCBI GI NO: 7430313 NR Description: probable aldose 1-epimerase (EC 5
  misc_feature (33)..(362): NCBI GI NO: 21537069 NR Description: aldose 1-epimerase-like protein
  misc_feature (33)..(362): NCBI GI NO: 15228261 NR Description: aldose 1-epimerase - like protein
  misc_feature (29)..(362): NCBI GI NO: 15242223 NR Description: putative aldose 1-epimerase - like protein
MARALLVAPLLASCFVALGLSGRADAAAETKTVGVYELKKGDFSIKVTNWGATLMSVILPDSRGNLGDVILGYDTVAEYVNGTAYFGGLIGRVANRIANARFTLDGKAYRLVPNDGNNTLHGGHRGFDKVVWTVKEHVAGGSSPFITLYYHSFDGEQGFPGDVDVHVKYQLSGPHELSVRMNATARGKATPVNLAHHAYWNLGGHGSGSVLGEEVRLFASRYTPVDAALIPTGHLAPVAGTPYDFRTPAAVGSRIGGLLSRGVNGYDINYVVDGGGLRPVAVVRDGASGRAMELWADQPGVQFYTANGLSGVRGKGGKVYGRYGALCLETQGFPDAVNRPSFPSQIVRPGKVYMHHMVFKFSF

SEQ ID NO: 13735 - DNA, 1576 bp, Triticum aestivum
  misc_feature (1)..(1576): Ceres Seq. ID no. 13580053
caaatactggtttcttccaccgtcggtgacctccaagcccaagcccaaaccccaacacccgcgcggctcccgccgccgccgcaccggagatggcggcgtacctgagcatgggcgaggcgcaccgccgcatcgctgactacctctcccgcttggacgacgctatctctcagtccgacggcgccgacctcgcctctctcctcgccatctcctcggcgcccgcctccaccccgctctccgacgcgctcgccgcttttccggattttccccgcctcgcctccgaccgcttcccccacctctccgacttcctccccccgctcctccgcgccatccactcccactccctccgccgcttcggggacgcctactcctccttcgagaaggctgctagcgcgttcctgcaggagttccggaactgggagactccttgggcgatggaggcgatgcacatggtggcgcttgagatcaggctgctagctgagaaggcagacagggagcttgtgatgagcgggaagaacccagacaagctgcaggctgctgggtccttcctgatgaaggtttttggggcacttgcggttaaaggacctaagcgcgttggggcactgtatgttacctgccagctgtttaaaatttatttcaggcttggtactgttaacctttgccgtagtgtcataaggagtatcgaaacagctaggaattttgattttgaagattttccagtgaaagataaggtcacttatatgtattatacaggtcgcttggaggtgtttaatgagaattttcttgttgctgatcagaaactaacttatgctttgatgcattgtaatcctcaaagcgaatcaaatttgaggaaaattttgaagttcctaatccctgtaaagctgtcaattggtgttttgccaaggaggaccctcctggagaagtacaatctgcttgagtatgcagatattgtgacctcacttaggagaggggatctcaggctccttaagcaagcccttgatagacatgaagaccagttactaaaatgtggtgtctaccttgtgttggagaaacttgaactccaggtctaccgaagattagtgaagaaaatccatatcatacagagggagaaggaaccatcgaaggcgcatcaaatcaagctagaggtcttggtaaagactctgcaatggcttggaatcaccatggatgtggatgaggtggaatgcatcatggcgtgcctaatatacaagaatctcataaaaggatactttgcccacaagagcaaagttcttgtccttagcaaacaagaccccttcccaaagttgaatgggaagcccgtttagttcgcagcgatacctcataagcttgtacacctaatggaagtttctcttatctttgatgtacggaacatgacaggtttatgtaaaattaccgcgactctgattgtaacaacatttgtattctagctgcaatgtttgtaaacatttatggttggtagcctccacttaaacggtggttttcatagcttcagtgaggtacaatattgtattctggataaactaaatttgcagactgcaattaaggccatagtaaaaaaccg

SEQ ID NO: 13736 - protein, 409 aa, Triticum aestivum
  peptide (1)..(409): Ceres Seq. ID no. 13580054
  misc_feature (282)..(397): Pfam Name: Pfam Description:  PCI domain
  misc_feature (3)..(409): NCBI GI NO: 30680717 NR Description: expressed protein [Arabidopsis thaliana]
  misc_feature (10)..(405): NCBI GI NO: 7022282 NR Description: unnamed protein product [Homo sapiens]
  misc_feature (10)..(405): NCBI GI NO: 26337617 NR Description: unnamed protein product [Mus musculus]
  misc_feature (10)..(405): NCBI GI NO: 26335427 NR Description: unnamed protein product [Mus musculus]
  misc_feature (10)..(405): NCBI GI NO: 7022473 NR Description: unnamed protein product [Homo sapiens]
  misc_feature (1)..(333): NCBI GI NO: 34879449 NR Description: similar to hypothetical protein FLJ11305
  misc_feature (344)..(405): NCBI GI NO: 34879449 NR Description: similar to hypothetical protein FLJ11305
  misc_feature (67)..(405): NCBI GI NO: 30520125 NR Description: RIKEN cDNA A730042J05 gene [Mus musculus]
  misc_feature (67)..(405): NCBI GI NO: 9963791 NR Description: HT004 protein [Homo sapiens]
  misc_feature (100)..(405): NCBI GI NO: 8922987 NR Description: hypothetical protein FLJ11305 [Homo sapiens]
MAAYLSMGEAHRRIADYLSRLDDAISQSDGADLASLLAISSAPASTPLSDALAAFPDFPRLASDRFPHLSDFLPPLLRAIHSHSLRRFGDAYSSFEKAASAFLQEFRNWETPWAMEAMHMVALEIRLLAEKADRELVMSGKNPDKLQAAGSFLMKVFGALAVKGPKRVGALYVTCQLFKIYFRLGTVNLCRSVIRSIETARNFDFEDFPVKDKVTYMYYTGRLEVFNENFLVADQKLTYALMHCNPQSESNLRKILKFLIPVKLSIGVLPRRTLLEKYNLLEYADIVTSLRRGDLRLLKQALDRHEDQLLKCGVYLVLEKLELQVYRRLVKKIHIIQREKEPSKAHQIKLEVLVKTLQWLGITMDVDEVECIMACLIYKNLIKGYFAHKSKVLVLSKQDPFPKLNGKPV

SEQ ID NO: 13737 - protein, 403 aa, Triticum aestivum
  peptide (1)..(403): Ceres Seq. ID no. 13580055
  misc_feature (276)..(391): Pfam Name: Pfam Description:  PCI domain
  misc_feature (1)..(403): NCBI GI NO: 30680717 NR Description: expressed protein [Arabidopsis thaliana]
  misc_feature (4)..(399): NCBI GI NO: 7022282 NR Description: unnamed protein product [Homo sapiens]
  misc_feature (4)..(399): NCBI GI NO: 26337617 NR Description: unnamed protein product [Mus musculus]
  misc_feature (4)..(399): NCBI GI NO: 26335427 NR Description: unnamed protein product [Mus musculus]
  misc_feature (4)..(399): NCBI GI NO: 7022473 NR Description: unnamed protein product [Homo sapiens]
  misc_feature (1)..(327): NCBI GI NO: 34879449 NR Description: similar to hypothetical protein FLJ11305
  misc_feature (338)..(399): NCBI GI NO: 34879449 NR Description: similar to hypothetical protein FLJ11305
  misc_feature (61)..(399): NCBI GI NO: 30520125 NR Description: RIKEN cDNA A730042J05 gene [Mus musculus]
  misc_feature (61)..(399): NCBI GI NO: 9963791 NR Description: HT004 protein [Homo sapiens]
  misc_feature (94)..(399): NCBI GI NO: 8922987 NR Description: hypothetical protein FLJ11305 [Homo sapiens]
MGEAHRRIADYLSRLDDAISQSDGADLASLLAISSAPASTPLSDALAAFPDFPRLASDRFPHLSDFLPPLLRAIHSHSLRRFGDAYSSFEKAASAFLQEFRNWETPWAMEAMHMVALEIRLLAEKADRELVMSGKNPDKLQAAGSFLMKVFGALAVKGPKRVGALYVTCQLFKIYFRLGTVNLCRSVIRSIETARNFDFEDFPVKDKVTYMYYTGRLEVFNENFLVADQKLTYALMHCNPQSESNLRKILKFLIPVKLSIGVLPRRTLLEKYNLLEYADIVTSLRRGDLRLLKQALDRHEDQLLKCGVYLVLEKLELQVYRRLVKKIHIIQREKEPSKAHQIKLEVLVKTLQWLGITMDVDEVECIMACLIYKNLIKGYFAHKSKVLVLSKQDPFPKLNGKPV

SEQ ID NO: 13738 - protein, 295 aa, Triticum aestivum
  peptide (1)..(295): Ceres Seq. ID no. 13580056
  misc_feature (168)..(283): Pfam Name: Pfam Description:  PCI domain
  misc_feature (1)..(295): NCBI GI NO: 30680717 NR Description: expressed protein [Arabidopsis thaliana]
  misc_feature (1)..(291): NCBI GI NO: 7022282 NR Description: unnamed protein product [Homo sapiens]
  misc_feature (1)..(291): NCBI GI NO: 26337617 NR Description: unnamed protein product [Mus musculus]
  misc_feature (1)..(291): NCBI GI NO: 26335427 NR Description: unnamed protein product [Mus musculus]
  misc_feature (1)..(291): NCBI GI NO: 7022473 NR Description: unnamed protein product [Homo sapiens]
  misc_feature (1)..(219): NCBI GI NO: 34879449 NR Description: similar to hypothetical protein FLJ11305
  misc_feature (230)..(291): NCBI GI NO: 34879449 NR Description: similar to hypothetical protein FLJ11305
  misc_feature (1)..(291): NCBI GI NO: 30520125 NR Description: RIKEN cDNA A730042J05 gene [Mus musculus]
  misc_feature (1)..(291): NCBI GI NO: 9963791 NR Description: HT004 protein [Homo sapiens]
  misc_feature (1)..(291): NCBI GI NO: 8922987 NR Description: hypothetical protein FLJ11305 [Homo sapiens]
MEAMHMVALEIRLLAEKADRELVMSGKNPDKLQAAGSFLMKVFGALAVKGPKRVGALYVTCQLFKIYFRLGTVNLCRSVIRSIETARNFDFEDFPVKDKVTYMYYTGRLEVFNENFLVADQKLTYALMHCNPQSESNLRKILKFLIPVKLSIGVLPRRTLLEKYNLLEYADIVTSLRRGDLRLLKQALDRHEDQLLKCGVYLVLEKLELQVYRRLVKKIHIIQREKEPSKAHQIKLEVLVKTLQWLGITMDVDEVECIMACLIYKNLIKGYFAHKSKVLVLSKQDPFPKLNGKPV

SEQ ID NO: 13739 - DNA, 1046 bp, Triticum aestivum
  misc_feature (1)..(1046): Ceres Seq. ID no. 12616414
cttttccagcagagcctttccccatccctccctccctccccacaaccgccgccgcccatcacgcgcagaaaccacgctccaagacaccaaaacccaccgatcccccatggagaacggcgacgaaaccctcgtctctccccccgccgccgccaccgctgaggtcgagaaggctgcgcccaacggaggcgttgagggcgaggaggtcaccgtcgccgacgctgtccaccccgccaagtcctacgccgccgtcgccgcgaacgccgagatcgaggacctccgcgccaccaagctcgacctcgaggagcagctcgccaatgccagccaggagaacaagaccctcgccgcggaggcccaccgcctcgaagggctcttctctcaggccagggacgacgtcgccaccgccgagcacgccgccgccaccaccgaagaagaggtggcctctctccgcgccgaggtcgagcgcctccaggccctcgtcgaccgcaagaaggctgaccgtgaggcggacgagcgccaacgtcaggagctcacggccgaggtggagaccgttcgtcaggcgaagctcaagctcgagaaggaggtcgacgccctgaaggcttccgccgctgctaccaccgtggaggacagggaggctgctccggacgctggggtcccgaaggaacagggggtcgcctggcaggggatggcagcgggggcggccgctggtgctgccatcaccgctgccgtcgttctgatctacctccgcctcaagaggtaatctggtgctctggtgcgcaggaagttttgctctgctgctacagcttatggaagatttgatgagtttgtcgtggtgatgctgttagtaccgaactgagagtaatatgtcttctatcagttagttgcttaatagaccacaaaaaattaggtaatctgcagaatggttatgtttcatcggtgtttttccttaatcatctacgggcttttggtggtgacgatgaatgtgtagacactttgtcaaccgggcaaggctgtatgcttggttatattatcgttatggttgctggctc

SEQ ID NO: 13740 - protein, 251 aa, Triticum aestivum
  peptide (1)..(251): Ceres Seq. ID no. 12616415
  misc_feature (162)..(218): Pfam Name: Pfam Description:  Atrophin-1 family
  misc_feature (36)..(251): NCBI GI NO: 6996142 NR Description: VIP1 protein [Avena fatua]
  misc_feature (17)..(251): NCBI GI NO: 22535574 NR Description: OJ1116_H09.21
FSSRAFPHPSLPPHNRRRPSRAETTLQDTKTHRSPMENGDETLVSPPAAATAEVEKAAPNGGVEGEEVTVADAVHPAKSYAAVAANAEIEDLRATKLDLEEQLANASQENKTLAAEAHRLEGLFSQARDDVATAEHAAATTEEEVASLRAEVERLQALVDRKKADREADERQRQELTAEVETVRQAKLKLEKEVDALKASAAATTVEDREAAPDAGVPKEQGVAWQGMAAGAAAGAAITAAVVLIYLRLKR

SEQ ID NO: 13741 - protein, 216 aa, Triticum aestivum
  peptide (1)..(216): Ceres Seq. ID no. 12616416
  misc_feature (127)..(183): Pfam Name: Pfam Description:  Atrophin-1 family
  misc_feature (1)..(216): NCBI GI NO: 6996142 NR Description: VIP1 protein [Avena fatua]
  misc_feature (1)..(216): NCBI GI NO: 22535574 NR Description: OJ1116_H09.21
MENGDETLVSPPAAATAEVEKAAPNGGVEGEEVTVADAVHPAKSYAAVAANAEIEDLRATKLDLEEQLANASQENKTLAAEAHRLEGLFSQARDDVATAEHAAATTEEEVASLRAEVERLQALVDRKKADREADERQRQELTAEVETVRQAKLKLEKEVDALKASAAATTVEDREAAPDAGVPKEQGVAWQGMAAGAAAGAAITAAVVLIYLRLKR

SEQ ID NO: 13742 - protein, 196 aa, Triticum aestivum
  peptide (1)..(196): Ceres Seq. ID no. 12616417
  misc_feature (2)..(157): Pfam Name: Pfam Description:  Formin Homology 2 Domain
  misc_feature (2)..(196): NCBI GI NO: 18138528 NR Description: hypothetical protein [Grapevine fleck virus]
  misc_feature (2)..(150): NCBI GI NO: 30387315 NR Description: unknown [Choristoneura fumiferana MNPV]
  misc_feature (2)..(157): NCBI GI NO: 6523547 NR Description: hydroxyproline-rich glycoprotein DZ-HRGP
  misc_feature (2)..(196): NCBI GI NO: 6523547 NR Description: hydroxyproline-rich glycoprotein DZ-HRGP
  misc_feature (2)..(196): NCBI GI NO: 15230108 NR Description: protein kinase, putative; protein id: At3g24400.1
  misc_feature (2)..(161): NCBI GI NO: 20138131 NR Description: Vegetative cell wall protein gp1 precursor
  misc_feature (2)..(164): NCBI GI NO: 20138131 NR Description: Vegetative cell wall protein gp1 precursor
  misc_feature (2)..(150): NCBI GI NO: 20138131 NR Description: Vegetative cell wall protein gp1 precursor
  misc_feature (2)..(157): NCBI GI NO: 6523547 NR Description: hydroxyproline-rich glycoprotein DZ-HRGP
  misc_feature (2)..(196): NCBI GI NO: 119712 NR Description: Extensin precursor (Proline-rich glycoprotein)
FPAEPFPIPPSLPTTAAAHHAQKPRSKTPKPTDPPWRTATKPSSLPPPPPPLRSRRLRPTEALRARRSPSPTLSTPPSPTPPSPRTPRSRTSAPPSSTSRSSSPMPARRTRPSPRRPTASKGSSLRPGTTSPPPSTPPPPPKKRWPLSAPRSSASRPSSTARRLTVRRTSANVRSSRPRWRPFVRRSSSSRRRSTP

SEQ ID NO: 13743 - DNA, 1113 bp, Triticum aestivum
  misc_feature (1)..(1113): Ceres Seq. ID no. 13597090
aaaatccgccgcgccgcatccaaccccttccttccttccgttcctccgccgctccggtggcgcgatggccgcgcgggccctcctcctccgggcaaccgcccgctgctgctcccctctccactcccccaccgccgccccgcgcctccacccgcggctccgcagccacgccgccgccgccgctccccagctccgcttccccgcgctttccttctccgcctccgccgtgtccaccagctcgcacggccccagcggcggtgacgccggcgagggggaggatgacaagggagcgtacgagaactacctggggatgagcgacgacgagctcatggcgcagtgcgacatgggcaccttcaagtcctccgggcccggcggccagcaccgcaacaagcgcgagtccgccgtgcgcctccgccaccaccccaccggcatcgtcgcccaggctgtggaggataggtcacaacataagaatcgatcgtctgctttatctcggcttcggaccctgattgctcttaaagttaggaggccgataaaccttgataactacactcctccagttgaacttcttcagatattgccactgaagtctaccattcgatcaaaggatgttggcagccaaattgggccaaataacccaaaattttctccaggaatgcaagctttattagatcttctatttgctgttgaaggttctgtatcagaggcagcgaaaattctaggcctaagcactggtgccctgtcaaggttaattctatcagatgattctctccgagcggctgcaaatgaactgcgagcctccaagggactgaagccattaagatgatgcccctttacaatgttatcatcttctgctgcgccacaggtgccaaggtgtctcattgctcatgatttcatggcatgccattggagcttatgcccaattccttagcgcaagaaatgcaaaacgtacacagggtctgtcttatacagggccatcatcatgcctgcttgtttgtctcacaccattgtaaccttgttgttgtacagtgcaattgtactttcacatgtcgccatcgcttgatgatgccttcaacaaattggatctacttttaagccatatagtgtctttttattacc

SEQ ID NO: 13744 - protein, 272 aa, Triticum aestivum
  peptide (1)..(272): Ceres Seq. ID no. 13597091
  misc_feature (27)..(272): NCBI GI NO: 30692851 NR Description: peptide chain release factor, putative
  misc_feature (27)..(272): NCBI GI NO: 25511682 NR Description: probable peptide chain release factor F10C21
  misc_feature (169)..(272): NCBI GI NO: 34907468 NR Description: P0434C04.16
  misc_feature (117)..(174): NCBI GI NO: 23053284 NR Description: hypothetical protein [Geobacter metallireducens]
  misc_feature (117)..(173): NCBI GI NO: 39996074 NR Description: peptidyl-tRNA hydrolase domain protein
  misc_feature (106)..(175): NCBI GI NO: 37523609 NR Description: hypothetical protein glr4040
  misc_feature (110)..(174): NCBI GI NO: 23010857 NR Description: hypothetical protein
  misc_feature (110)..(166): NCBI GI NO: 22976027 NR Description: hypothetical protein [Ralstonia metallidurans]
  misc_feature (117)..(174): NCBI GI NO: 15644800 NR Description: peptide chain release factor RF-2 (prfB)
  misc_feature (105)..(171): NCBI GI NO: 28210088 NR Description: bacterial peptide chain release factor 2
KSAAPHPTPSFLPFLRRSGGAMAARALLLRATARCCSPLHSPTAAPRLHPRLRSHAAAAAPQLRFPALSFSASAVSTSSHGPSGGDAGEGEDDKGAYENYLGMSDDELMAQCDMGTFKSSGPGGQHRNKRESAVRLRHHPTGIVAQAVEDRSQHKNRSSALSRLRTLIALKVRRPINLDNYTPPVELLQILPLKSTIRSKDVGSQIGPNNPKFSPGMQALLDLLFAVEGSVSEAAKILGLSTGALSRLILSDDSLRAAANELRASKGLKPLR

SEQ ID NO: 13745 - protein, 251 aa, Triticum aestivum
  peptide (1)..(251): Ceres Seq. ID no. 13597092
  misc_feature (6)..(251): NCBI GI NO: 30692851 NR Description: peptide chain release factor, putative
  misc_feature (6)..(251): NCBI GI NO: 25511682 NR Description: probable peptide chain release factor F10C21
  misc_feature (148)..(251): NCBI GI NO: 34907468 NR Description: P0434C04.16
  misc_feature (96)..(153): NCBI GI NO: 23053284 NR Description: hypothetical protein [Geobacter metallireducens]
  misc_feature (96)..(152): NCBI GI NO: 39996074 NR Description: peptidyl-tRNA hydrolase domain protein
  misc_feature (85)..(154): NCBI GI NO: 37523609 NR Description: hypothetical protein glr4040
  misc_feature (89)..(153): NCBI GI NO: 23010857 NR Description: hypothetical protein
  misc_feature (89)..(145): NCBI GI NO: 22976027 NR Description: hypothetical protein [Ralstonia metallidurans]
  misc_feature (96)..(153): NCBI GI NO: 15644800 NR Description: peptide chain release factor RF-2 (prfB)
  misc_feature (84)..(150): NCBI GI NO: 28210088 NR Description: bacterial peptide chain release factor 2
MAARALLLRATARCCSPLHSPTAAPRLHPRLRSHAAAAAPQLRFPALSFSASAVSTSSHGPSGGDAGEGEDDKGAYENYLGMSDDELMAQCDMGTFKSSGPGGQHRNKRESAVRLRHHPTGIVAQAVEDRSQHKNRSSALSRLRTLIALKVRRPINLDNYTPPVELLQILPLKSTIRSKDVGSQIGPNNPKFSPGMQALLDLLFAVEGSVSEAAKILGLSTGALSRLILSDDSLRAAANELRASKGLKPLR

SEQ ID NO: 13746 - protein, 170 aa, Triticum aestivum
  peptide (1)..(170): Ceres Seq. ID no. 13597093
  misc_feature (1)..(170): NCBI GI NO: 30692851 NR Description: peptide chain release factor, putative
  misc_feature (1)..(170): NCBI GI NO: 25511682 NR Description: probable peptide chain release factor F10C21
  misc_feature (67)..(170): NCBI GI NO: 34907468 NR Description: P0434C04.16
  misc_feature (15)..(72): NCBI GI NO: 23053284 NR Description: hypothetical protein [Geobacter metallireducens]
  misc_feature (15)..(71): NCBI GI NO: 39996074 NR Description: peptidyl-tRNA hydrolase domain protein
  misc_feature (4)..(73): NCBI GI NO: 37523609 NR Description: hypothetical protein glr4040
  misc_feature (8)..(72): NCBI GI NO: 23010857 NR Description: hypothetical protein
  misc_feature (8)..(64): NCBI GI NO: 22976027 NR Description: hypothetical protein [Ralstonia metallidurans]
  misc_feature (15)..(72): NCBI GI NO: 15644800 NR Description: peptide chain release factor RF-2 (prfB)
  misc_feature (3)..(69): NCBI GI NO: 28210088 NR Description: bacterial peptide chain release factor 2
MSDDELMAQCDMGTFKSSGPGGQHRNKRESAVRLRHHPTGIVAQAVEDRSQHKNRSSALSRLRTLIALKVRRPINLDNYTPPVELLQILPLKSTIRSKDVGSQIGPNNPKFSPGMQALLDLLFAVEGSVSEAAKILGLSTGALSRLILSDDSLRAAANELRASKGLKPLR

SEQ ID NO: 13747 - DNA, 1330 bp, Triticum aestivum
  misc_feature (1)..(1330): Ceres Seq. ID no. 13597076
attacctagaacatcctaatcgaaaagttttccctgcaaaactctcgccgctgcgagttcccaaaaagcgaagcgaccaccacacctctcgccggagatgccgccggggacccctctgccgtcgacgggggcgtggacctgggagaacgccgtcgccggagcgaccgccggcttcgccaccgtcgccaccttccacccgctcgacgtcgtccgcacccgcttccaagtgagcggcgggagagggttgtccgacttgccgccgtacaggaacacgggacacgctgtatacaccatcgcacgatctgagggcctgaggggactttatgccggcttttatcctgcagttctggggtcaaccgtttcttgggggctatatttctttttttataacagagctaaacaaagatacttgcaggagaaggatgttcagctccgtccattcgaccatcttgcctcagctgcagaagcaggtgctttggtttgcctgtttacaaatcccatatggctggtgaaaacacggatgcaactacaaacacctgggcatacttcatcttattctggattttctgatgctttgagaactattcggaaagaggagggatggcgagcactttatagagggatcgggcctggacttttgctggtcacccatggcgcgatacaattcactgcctatgaggaacttcgcaaggctatgatatctgcgaaaagtaaacaaacaaggggagatgacaaaggcagcgaggatttattgaactccgttgattatgcggcacttggcgctggttcaaaattatctgctattctgcttacttatccttatcaggttatccgagcccgcttacagcaacgacctggtagtgatggtatcccaaagtactcagatagttggcatgtagtgaaggaagctgcaaggtacgaaggtgtccgtgggttttacaggggcatcacttccaacctattgaagaaccttccagcagcttccgtgacgtttgtggtgtatgaaaacgttatcaaactattcagagcagccaaggagaagacgtaattccaacttgcaactggagccaggagaaacataggaggaactaggaaagacactaatgttccgcgcaaatacagaatctgttcattcaccacactatccgagctcaacgtgatgttccatcacatttcccagttcagctcttattgacttaacagaaacggaatttagtttggcgaacttgttttttgtagagaaaattcattttctaagaaacagctcattggttcatgttgtccagttgaatgcttgttgaagatagagctctggttctatgtgtggttc

SEQ ID NO: 13748 - protein, 316 aa, Triticum aestivum
  peptide (1)..(316): Ceres Seq. ID no. 13597077
  misc_feature (12)..(310): NCBI GI NO: 21537040 NR Description: contains similarity to peroxisomal membrane carrierprotein
  misc_feature (12)..(310): NCBI GI NO: 18425065 NR Description: mitochondrial carrier protein family
  misc_feature (12)..(310): NCBI GI NO: 10177519 NR Description: contains similarity to peroxisomal membrane carrierprotein~gene_id:K1F13
  misc_feature (15)..(293): NCBI GI NO: 24652037 NR Description: CG8026-PA [Drosophila melanogaster]
  misc_feature (264)..(315): NCBI GI NO: 24652037 NR Description: CG8026-PA [Drosophila melanogaster]
  misc_feature (15)..(315): NCBI GI NO: 27369517 NR Description: mitochondrial folate transporter/carrier
  misc_feature (15)..(315): NCBI GI NO: 34222668 NR Description: Mitochondrial folate transporter/carrier
  misc_feature (15)..(315): NCBI GI NO: 34866087 NR Description: similar to mitochondrial folate transporter/carrier
  misc_feature (15)..(315): NCBI GI NO: 14042724 NR Description: unnamed protein product [Homo sapiens]
  misc_feature (15)..(315): NCBI GI NO: 21314739 NR Description: mitochondrial folate transporter/carrier
MPPGTPLPSTGAWTWENAVAGATAGFATVATFHPLDVVRTRFQVSGGRGLSDLPPYRNTGHAVYTIARSEGLRGLYAGFYPAVLGSTVSWGLYFFFYNRAKQRYLQEKDVQLRPFDHLASAAEAGALVCLFTNPIWLVKTRMQLQTPGHTSSYSGFSDALRTIRKEEGWRALYRGIGPGLLLVTHGAIQFTAYEELRKAMISAKSKQTRGDDKGSEDLLNSVDYAALGAGSKLSAILLTYPYQVIRARLQQRPGSDGIPKYSDSWHVVKEAARYEGVRGFYRGITSNLLKNLPAASVTFVVYENVIKLFRAAKEKT

SEQ ID NO: 13749 - protein, 175 aa, Triticum aestivum
  peptide (1)..(175): Ceres Seq. ID no. 13597078
  misc_feature (1)..(169): NCBI GI NO: 21537040 NR Description: contains similarity to peroxisomal membrane carrierprotein
  misc_feature (1)..(169): NCBI GI NO: 18425065 NR Description: mitochondrial carrier protein family
  misc_feature (1)..(169): NCBI GI NO: 10177519 NR Description: contains similarity to peroxisomal membrane carrierprotein~gene_id:K1F13
  misc_feature (1)..(152): NCBI GI NO: 24652037 NR Description: CG8026-PA [Drosophila melanogaster]
  misc_feature (123)..(174): NCBI GI NO: 24652037 NR Description: CG8026-PA [Drosophila melanogaster]
  misc_feature (1)..(174): NCBI GI NO: 27369517 NR Description: mitochondrial folate transporter/carrier
  misc_feature (1)..(174): NCBI GI NO: 34222668 NR Description: Mitochondrial folate transporter/carrier
  misc_feature (1)..(174): NCBI GI NO: 34866087 NR Description: similar to mitochondrial folate transporter/carrier
  misc_feature (1)..(174): NCBI GI NO: 14042724 NR Description: unnamed protein product [Homo sapiens]
  misc_feature (1)..(174): NCBI GI NO: 21314739 NR Description: mitochondrial folate transporter/carrier
MQLQTPGHTSSYSGFSDALRTIRKEEGWRALYRGIGPGLLLVTHGAIQFTAYEELRKAMISAKSKQTRGDDKGSEDLLNSVDYAALGAGSKLSAILLTYPYQVIRARLQQRPGSDGIPKYSDSWHVVKEAARYEGVRGFYRGITSNLLKNLPAASVTFVVYENVIKLFRAAKEKT

SEQ ID NO: 13750 - DNA, 1339 bp, Triticum aestivum
  misc_feature (1)..(1339): Ceres Seq. ID no. 12624791
ccacagagtcccatctccattccattcctcagcagactccagcgaccgagatcggatcagagagagcgatggcggcggtgatggagtcgtcgtcggtgcccggcgtggacggcggcgagggtgcggaggggagggtgcggaagccctacaccatcaccaagtcgcgggagagctggaccgacccggagcacgacaagttcatcgaggcgctcctcctgttcgatcgcgattggagaaagatcgaagcatttgttggctccaagacagtgatacagttctgttggcagatcaggagccatgcacagaagtactttctgaaggttcagaagaatgggacaggtgagcatctgcccccacctaggccgaagaggaaggcggcacacccgtacccacataataaagcctcaaaaaaggcccctgaagtcgacttgccacagcagcctcctcatgtcgtggagcaagggcgtgttatacctatggatgcacctactgtcgctacaaactcaagtgcaaacgaggacacatttccttcctgggacgatgttcttacccaaccttatagcccaagacatacacaagacttaggcgctgcaaataatagctctagtagcatagagtgccaatctggaacttggccagcttctgatgcgattgggcaagaaatttggccaacttccgatgcgattgagcaagagattgtacttccagcattgcatgccatgccagactttgctcaagtatacaactttcttgggggcgtatttgatccagatacaacaggacatttgcagaagttgagagagatggatcctatagatgctgaaacggtactacaactgatgaaaaatctatcggtaaacctgtctagcccggactttgagacacacctgagcatacagcacccctgactgttgcagaggaggatgctctcgtcgcacggtggcggcatgggccaagccaggcacgagagcgtaggagatccggggtctctactcagacccttcgcgttccattcatgtaatctctagtcaccctcttcgtgatccacgctcacgacatcgctaatttcactaagcgcatggaccgctctgcagggtaaggagcagatgaggaaagcgtacggtacatcgttacattgttgtcaaagttgcgacatgttaatgcatcgccgcctatttttgtacatatttcttggagatgttctcgggctcttaggcctgggaacttttacctatccggcttgtggcatgtatagtcaggacatggttgcgcatgttgttttggagaggggagaggggaaagtgtttattacccatgaaggaagaccgttcttgtgtgc

SEQ ID NO: 13751 - protein, 301 aa, Triticum aestivum
  peptide (1)..(301): Ceres Seq. ID no. 12624792
  misc_feature (55)..(104): Pfam Name: Pfam Description:  Myb-like DNA-binding domain
  misc_feature (39)..(298): NCBI GI NO: 8953721 NR Description: contains similarity to MYB-related DNA-bindingprotein~gene_id:F6N7
  misc_feature (39)..(301): NCBI GI NO: 30696225 NR Description: myb family transcription factor
  misc_feature (39)..(301): NCBI GI NO: 30696221 NR Description: myb family transcription factor
  misc_feature (39)..(294): NCBI GI NO: 30680926 NR Description: myb family transcription factor
  misc_feature (30)..(293): NCBI GI NO: 18414039 NR Description: myb family transcription factor
  misc_feature (30)..(293): NCBI GI NO: 14596213 NR Description: putative protein [Arabidopsis thaliana]
  misc_feature (30)..(293): NCBI GI NO: 11357907 NR Description: hypothetical protein F9G14
  misc_feature (35)..(292): NCBI GI NO: 15234118 NR Description: myb family transcription factor
  misc_feature (44)..(136): NCBI GI NO: 15223419 NR Description: myb family transcription factor
  misc_feature (241)..(293): NCBI GI NO: 15223419 NR Description: myb family transcription factor
TESHLHSIPQQTPATEIGSERAMAAVMESSSVPGVDGGEGAEGRVRKPYTITKSRESWTDPEHDKFIEALLLFDRDWRKIEAFVGSKTVIQFCWQIRSHAQKYFLKVQKNGTGEHLPPPRPKRKAAHPYPHNKASKKAPEVDLPQQPPHVVEQGRVIPMDAPTVATNSSANEDTFPSWDDVLTQPYSPRHTQDLGAANNSSSSIECQSGTWPASDAIGQEIWPTSDAIEQEIVLPALHAMPDFAQVYNFLGGVFDPDTTGHLQKLREMDPIDAETVLQLMKNLSVNLSSPDFETHLSIQHP

SEQ ID NO: 13752 - protein, 279 aa, Triticum aestivum
  peptide (1)..(279): Ceres Seq. ID no. 12624793
  misc_feature (33)..(82): Pfam Name: Pfam Description:  Myb-like DNA-binding domain
  misc_feature (17)..(276): NCBI GI NO: 8953721 NR Description: contains similarity to MYB-related DNA-bindingprotein~gene_id:F6N7
  misc_feature (17)..(279): NCBI GI NO: 30696225 NR Description: myb family transcription factor
  misc_feature (17)..(279): NCBI GI NO: 30696221 NR Description: myb family transcription factor
  misc_feature (17)..(272): NCBI GI NO: 30680926 NR Description: myb family transcription factor
  misc_feature (8)..(271): NCBI GI NO: 18414039 NR Description: myb family transcription factor
  misc_feature (8)..(271): NCBI GI NO: 14596213 NR Description: putative protein [Arabidopsis thaliana]
  misc_feature (8)..(271): NCBI GI NO: 11357907 NR Description: hypothetical protein F9G14
  misc_feature (13)..(270): NCBI GI NO: 15234118 NR Description: myb family transcription factor
  misc_feature (22)..(114): NCBI GI NO: 15223419 NR Description: myb family transcription factor
  misc_feature (219)..(271): NCBI GI NO: 15223419 NR Description: myb family transcription factor
MAAVMESSSVPGVDGGEGAEGRVRKPYTITKSRESWTDPEHDKFIEALLLFDRDWRKIEAFVGSKTVIQFCWQIRSHAQKYFLKVQKNGTGEHLPPPRPKRKAAHPYPHNKASKKAPEVDLPQQPPHVVEQGRVIPMDAPTVATNSSANEDTFPSWDDVLTQPYSPRHTQDLGAANNSSSSIECQSGTWPASDAIGQEIWPTSDAIEQEIVLPALHAMPDFAQVYNFLGGVFDPDTTGHLQKLREMDPIDAETVLQLMKNLSVNLSSPDFETHLSIQHP

SEQ ID NO: 13753 - protein, 275 aa, Triticum aestivum
  peptide (1)..(275): Ceres Seq. ID no. 12624794
  misc_feature (29)..(78): Pfam Name: Pfam Description:  Myb-like DNA-binding domain
  misc_feature (13)..(272): NCBI GI NO: 8953721 NR Description: contains similarity to MYB-related DNA-bindingprotein~gene_id:F6N7
  misc_feature (13)..(275): NCBI GI NO: 30696225 NR Description: myb family transcription factor
  misc_feature (13)..(275): NCBI GI NO: 30696221 NR Description: myb family transcription factor
  misc_feature (13)..(268): NCBI GI NO: 30680926 NR Description: myb family transcription factor
  misc_feature (4)..(267): NCBI GI NO: 18414039 NR Description: myb family transcription factor
  misc_feature (4)..(267): NCBI GI NO: 14596213 NR Description: putative protein [Arabidopsis thaliana]
  misc_feature (4)..(267): NCBI GI NO: 11357907 NR Description: hypothetical protein F9G14
  misc_feature (9)..(266): NCBI GI NO: 15234118 NR Description: myb family transcription factor
  misc_feature (18)..(110): NCBI GI NO: 15223419 NR Description: myb family transcription factor
  misc_feature (215)..(267): NCBI GI NO: 15223419 NR Description: myb family transcription factor
MESSSVPGVDGGEGAEGRVRKPYTITKSRESWTDPEHDKFIEALLLFDRDWRKIEAFVGSKTVIQFCWQIRSHAQKYFLKVQKNGTGEHLPPPRPKRKAAHPYPHNKASKKAPEVDLPQQPPHVVEQGRVIPMDAPTVATNSSANEDTFPSWDDVLTQPYSPRHTQDLGAANNSSSSIECQSGTWPASDAIGQEIWPTSDAIEQEIVLPALHAMPDFAQVYNFLGGVFDPDTTGHLQKLREMDPIDAETVLQLMKNLSVNLSSPDFETHLSIQHP

SEQ ID NO: 13754 - DNA, 999 bp, Triticum aestivum
  misc_feature (1)..(999): Ceres Seq. ID no. 15173967
aggacatcaagcacctgagctccacatcgatcagtacccacagccactccactctcagctcagggactcggtgtcagggcgacccaagacagaagaatcatgggatccgtgacggcgtcgacgatggcacagcccaccctccgcgtggccgccttctgcggctccctccgcaaggactcatggcaccgcggcctcatccgcgccgccgaggagctgtgcgaggagtccatcccggggctgcgcatcgaccacgtggacatctccggcctgcccatggtcaacccggacctggagaccgacggcggcgagggcttcccgccggccgtcgaggcgctccgcgagagggtccgcgccgccgactgcttcctcttcgcctcgcccgagtacaactactcggtcaccgcctccctgaagaacgcgctggactgggcgtccaggggcaagcgcaactgctgggcggacagggcggcggcgatcgtgtgcgcggggggcgacttcggcggggccagggcgtcgctccacctccgccagatcggggtgttcctcgacctccacttcatcaacaagccggagctccacatcagggcgttcgcggacccgcccaagttcgacgaggagggcaacctcatcgacgccgtgaccagggagcggctcaagaaggttctcctctcgctccaggccttcgcgctcaggctcaaacacaaggacgagtgactgactcaagatcaacgatactacttggcagttggcaccgtataccgtacctgctggttaatttgcattgcattttccttcagctccgtgcactagtattcgtggttccgtgaaatcccctaggaagtgtgtgctactttgtctaataaatcgccgaagaattgttctgtactgtttaacgtgtggaagcttatgtgttttaccgttgctactagaacgcgagcgcgcaccacgcccgtctatgttgagaaaacaaaagaaaattattgaagaaattgatatgtc

SEQ ID NO: 13755 - protein, 274 aa, Triticum aestivum
  peptide (1)..(274): Ceres Seq. ID no. 15173968
DIKHLSSTSISTHSHSTLSSGTRCQGDPRQKNHGIRDGVDDGTAHPPRGRLLRLPPQGLMAPRPHPRRRGAVRGVHPGAAHRPRGHLRPAHGQPGPGDRRRRGLPAGRRGAPREGPRRRLLPLRLARVQLLGHRLPEERAGLGVQGQAQLLGGQGGGDRVRGGRLRRGQGVAPPPPDRGVPRPPLHQQAGAPHQGVRGPAQVRRGGQPHRRRDQGAAQEGSPLAPGLRAQAQTQGRVTDSRSTILLGSWHRIPYLLVNLHCIFLQLRALVFVVP

SEQ ID NO: 13756 - protein, 215 aa, Triticum aestivum
  peptide (1)..(215): Ceres Seq. ID no. 15173969
MAPRPHPRRRGAVRGVHPGAAHRPRGHLRPAHGQPGPGDRRRRGLPAGRRGAPREGPRRRLLPLRLARVQLLGHRLPEERAGLGVQGQAQLLGGQGGGDRVRGGRLRRGQGVAPPPPDRGVPRPPLHQQAGAPHQGVRGPAQVRRGGQPHRRRDQGAAQEGSPLAPGLRAQAQTQGRVTDSRSTILLGSWHRIPYLLVNLHCIFLQLRALVFVVP

SEQ ID NO: 13757 - protein, 204 aa, Triticum aestivum
  peptide (1)..(204): Ceres Seq. ID no. 15173970
  misc_feature (14)..(187): Pfam Name: Pfam Description:  NADPH-dependent FMN reductase
  misc_feature (10)..(203): NCBI GI NO: 34906648 NR Description: putative NADPH:quinone oxidoreductase
  misc_feature (14)..(202): NCBI GI NO: 34906652 NR Description: putative NADPH:quinone oxidoreductase
  misc_feature (10)..(204): NCBI GI NO: 24745889 NR Description: NAD(P)H:quinone oxidoreductase [Solanum tuberosum]
  misc_feature (6)..(202): NCBI GI NO: 15232856 NR Description: NADPH:quinone oxidoreductase (NQR)
  misc_feature (6)..(202): NCBI GI NO: 5002232 NR Description: NADPH:quinone oxidoreductase
  misc_feature (14)..(200): NCBI GI NO: 15596401 NR Description: conserved hypothetical protein
  misc_feature (14)..(200): NCBI GI NO: 32041222 NR Description: hypothetical protein
  misc_feature (13)..(201): NCBI GI NO: 23135834 NR Description: hypothetical protein [Cytophaga hutchinsonii]
  misc_feature (1)..(195): NCBI GI NO: 22959009 NR Description: hypothetical protein [Rhodobacter sphaeroides]
  misc_feature (14)..(145): NCBI GI NO: 24378693 NR Description: conserved hypothetical protein
MGSVTASTMAQPTLRVAAFCGSLRKDSWHRGLIRAAEELCEESIPGLRIDHVDISGLPMVNPDLETDGGEGFPPAVEALRERVRAADCFLFASPEYNYSVTASLKNALDWASRGKRNCWADRAAAIVCAGGDFGGARASLHLRQIGVFLDLHFINKPELHIRAFADPPKFDEEGNLIDAVTRERLKKVLLSLQAFALRLKHKDE

SEQ ID NO: 13758 - DNA, 616 bp, Triticum aestivum
  misc_feature (1)..(616): Ceres Seq. ID no. 12616383
acagcatctgcacactccgcctcccgcctcttgcagcctaaccccacctctcgagtctcgacaccctcgaatcagcgtccatggcacccaaggcggagaagaagccggtggccacggagaaggctccagcggggaagaagcccaaggcagagaagcggccgccggcgtccaaggagggcggcgagaagaagggcaagaagaagtccaagaagagcgtggagacgtacaagatctacatcttcaaggtgctcaagcaggtgcacccggacatcggcatctcctccaaggccatgtccatcatgaactccttcatcaacgacatcttcgagaagctcgccggcgagcttctcgaagatgtcgttgatgaagaagagagaggagatgtccagtgtcctcaggaagatgagatctgctggaactggaaccgagaagaagaaatagagcatcccaggctcatgaagttgatggaaaatcttctgttctggtgtccggtttttactgcatgtagaacctgctagacttgaaactgttatccgccagctaaacattatgctatgttgaacctcctgtcttgtgagatttttgagctaacttgcaatgcatcgtttgccacccc

SEQ ID NO: 13759 - protein, 145 aa, Triticum aestivum
  peptide (1)..(145): Ceres Seq. ID no. 12616384
  misc_feature (13)..(88): Pfam Name: Pfam Description:  Core histone H2A/H2B/H3/H4
  misc_feature (1)..(88): NCBI GI NO: 1362184 NR Description: histone H2B-8 - wheat
  misc_feature (1)..(88): NCBI GI NO: 1362186 NR Description: histone H2B153 - wheat
  misc_feature (1)..(88): NCBI GI NO: 122022 NR Description: Histone H2B
  misc_feature (1)..(88): NCBI GI NO: 399853 NR Description: Histone H2B.1
  misc_feature (1)..(88): NCBI GI NO: 399854 NR Description: Histone H2B.2
  misc_feature (1)..(88): NCBI GI NO: 34908130 NR Description: putative histone H2B
  misc_feature (1)..(88): NCBI GI NO: 3913804 NR Description: Histone H2B.3
  misc_feature (1)..(88): NCBI GI NO: 1346251 NR Description: Histone H2B.4
  misc_feature (1)..(88): NCBI GI NO: 13898838 NR Description: histone H2B-5 [Lolium perenne]
  misc_feature (1)..(88): NCBI GI NO: 1362183 NR Description: histone H2B-6 - wheat
MAPKAEKKPVATEKAPAGKKPKAEKRPPASKEGGEKKGKKKSKKSVETYKIYIFKVLKQVHPDIGISSKAMSIMNSFINDIFEKLAGELLEDVVDEEERGDVQCPQEDEICWNWNREEEIEHPRLMKLMENLLFWCPVFTACRTC

SEQ ID NO: 13760 - protein, 120 aa, Triticum aestivum
  peptide (1)..(120): Ceres Seq. ID no. 12616385
  misc_feature (40)..(114): NCBI GI NO: 17505204 NR Description: histone 1, H2bc; H2B histone family, member S
QHLHTPPPASCSLTPPLESRHPRISVHGTQGGEEAGGHGEGSSGEEAQGREAAAGVQGGRREEGQEEVQEERGDVQDLHLQGAQAGAPGHRHLLQGHVHHELLHQRHLREARRRASRRCR

SEQ ID NO: 13761 - protein, 100 aa, Triticum aestivum
  peptide (1)..(100): Ceres Seq. ID no. 12616386
  misc_feature (32)..(75): Pfam Name: Pfam Description:  Protamine P1
  misc_feature (28)..(100): NCBI GI NO: 29250446 NR Description: GLP_39_87477_88058 [Giardia lamblia ATCC 50803]
  misc_feature (3)..(100): NCBI GI NO: 31203637 NR Description: ENSANGP00000015599 [Anopheles gambiae]
TASAHSASRLLQPNPTSRVSTPSNQRPWHPRRRRSRWPRRRLQRGRSPRQRSGRRRPRRAARRRARRSPRRAWRRTRSTSSRCSSRCTRTSASPPRPCPS

SEQ ID NO: 13762 - DNA, 558 bp, Triticum aestivum
  misc_feature (1)..(558): Ceres Seq. ID no. 15173480
aaaaaaaaaagcacaagcagaagcaaccgagcgaacggcgacgacgacccgaagaagatggtgatgcccacggaccctatgctatggcacaaggtggccgccgtctccggggtcgttgcgcttggactgggcacctatggagcgcacatgttccgcccgcagaaccctagatacaaagagatttggcagaccgcgtccctgtaccatctcgtccacaccgcggcgctgctcggggctcccatgaccaagcgccccaacatcttcggaggccttctgacaactgggattgtgctcttctctggaacgtgctacactgtggcttaccttgaagacaggaagttctcttcaccagcaccgatcggtggctttgcattcattgctgcttgggccagcctgctcttctgattgtattgtgttttatcgggtgaaaactatgtctactttacacaaggctttgtatcagtcgctctattaggtcatgattgtactgctgtggcacacaactttctcatacctttacaaaataattagaataaaacagttcccttgatgtttcac

SEQ ID NO: 13763 - protein, 134 aa, Triticum aestivum
  peptide (1)..(134): Ceres Seq. ID no. 15173481
  misc_feature (29)..(125): Pfam Name: DUF423 Pfam Description: Protein of unknown function
  misc_feature (18)..(125): NCBI GI NO: 7963702 NR Description: unknown [Agropyron cristatum]
  misc_feature (18)..(125): NCBI GI NO: 7963659 NR Description: unknown [Leymus cinereus]
  misc_feature (25)..(134): NCBI GI NO: 40538985 NR Description: expressed protein
  misc_feature (27)..(119): NCBI GI NO: 7963699 NR Description: unknown [Leymus triticoides]
  misc_feature (27)..(119): NCBI GI NO: 7963694 NR Description: unknown [Psathyrostachys juncea]
  misc_feature (25)..(134): NCBI GI NO: 17065460 NR Description: Unknown protein [Arabidopsis thaliana]
  misc_feature (25)..(134): NCBI GI NO: 18395895 NR Description: expressed protein [Arabidopsis thaliana]
  misc_feature (27)..(115): NCBI GI NO: 7963697 NR Description: unknown [Haynaldia villosa]
  misc_feature (33)..(112): NCBI GI NO: 7963689 NR Description: unknown [Hordeum vulgare]
  misc_feature (38)..(134): NCBI GI NO: 25411133 NR Description: hypothetical protein At2g04900
KKKSTSRSNRANGDDDPKKMVMPTDPMLWHKVAAVSGVVALGLGTYGAHMFRPQNPRYKEIWQTASLYHLVHTAALLGAPMTKRPNIFGGLLTTGIVLFSGTCYTVAYLEDRKFSSPAPIGGFAFIAAWASLLF

SEQ ID NO: 13764 - protein, 115 aa, Triticum aestivum
  peptide (1)..(115): Ceres Seq. ID no. 15173482
  misc_feature (10)..(106): Pfam Name: DUF423 Pfam Description: Protein of unknown function
  misc_feature (1)..(106): NCBI GI NO: 7963702 NR Description: unknown [Agropyron cristatum]
  misc_feature (1)..(106): NCBI GI NO: 7963659 NR Description: unknown [Leymus cinereus]
  misc_feature (6)..(115): NCBI GI NO: 40538985 NR Description: expressed protein
  misc_feature (8)..(100): NCBI GI NO: 7963699 NR Description: unknown [Leymus triticoides]
  misc_feature (8)..(100): NCBI GI NO: 7963694 NR Description: unknown [Psathyrostachys juncea]
  misc_feature (6)..(115): NCBI GI NO: 17065460 NR Description: Unknown protein [Arabidopsis thaliana]
  misc_feature (6)..(115): NCBI GI NO: 18395895 NR Description: expressed protein [Arabidopsis thaliana]
  misc_feature (8)..(96): NCBI GI NO: 7963697 NR Description: unknown [Haynaldia villosa]
  misc_feature (14)..(93): NCBI GI NO: 7963689 NR Description: unknown [Hordeum vulgare]
  misc_feature (19)..(115): NCBI GI NO: 25411133 NR Description: hypothetical protein At2g04900
MVMPTDPMLWHKVAAVSGVVALGLGTYGAHMFRPQNPRYKEIWQTASLYHLVHTAALLGAPMTKRPNIFGGLLTTGIVLFSGTCYTVAYLEDRKFSSPAPIGGFAFIAAWASLLF

SEQ ID NO: 13765 - protein, 113 aa, Triticum aestivum
  peptide (1)..(113): Ceres Seq. ID no. 15173483
  misc_feature (8)..(104): Pfam Name: DUF423 Pfam Description: Protein of unknown function
  misc_feature (1)..(104): NCBI GI NO: 7963702 NR Description: unknown [Agropyron cristatum]
  misc_feature (1)..(104): NCBI GI NO: 7963659 NR Description: unknown [Leymus cinereus]
  misc_feature (4)..(113): NCBI GI NO: 40538985 NR Description: expressed protein
  misc_feature (6)..(98): NCBI GI NO: 7963699 NR Description: unknown [Leymus triticoides]
  misc_feature (6)..(98): NCBI GI NO: 7963694 NR Description: unknown [Psathyrostachys juncea]
  misc_feature (4)..(113): NCBI GI NO: 17065460 NR Description: Unknown protein [Arabidopsis thaliana]
  misc_feature (4)..(113): NCBI GI NO: 18395895 NR Description: expressed protein [Arabidopsis thaliana]
  misc_feature (6)..(94): NCBI GI NO: 7963697 NR Description: unknown [Haynaldia villosa]
  misc_feature (12)..(91): NCBI GI NO: 7963689 NR Description: unknown [Hordeum vulgare]
  misc_feature (17)..(113): NCBI GI NO: 25411133 NR Description: hypothetical protein At2g04900
MPTDPMLWHKVAAVSGVVALGLGTYGAHMFRPQNPRYKEIWQTASLYHLVHTAALLGAPMTKRPNIFGGLLTTGIVLFSGTCYTVAYLEDRKFSSPAPIGGFAFIAAWASLLF

SEQ ID NO: 13766 - DNA, 766 bp, Triticum aestivum
  misc_feature (1)..(766): Ceres Seq. ID no. 15224278
agaccaaggaaaaaaaggagaatgaaatccgcgatgcttcccctgctcctcctgctcgccgtggccggccccgccgccgcgaagccgacggcctacgaggcgctcgcggccttcgacttccccccgggcatcatccccaagggggtcgtctcctacaccctcgacaacgccaccggcgacttcacggcgcacatcaactcctcctccacctgcgagttctccatccagggctcctactcgctccggtacaagcccgacatcagcggccgcatctccgtcgaccgcctcaccaacctccagggcgtcaccgtcaaggtcctcttcttctggctcaacatcgtcgaggtcacccgcagcggcgaccagctcggcttctccgtcggcatcgcctccgccgacttcggcctcgacaacttcctcgagagccccacctgcggctgcggcttcgactgcaacgacctcctgctgccgcagtccaccgccgagccgagcctgcgcctgcgaggtgcgttctaggatccccaccgagctctctcacaagtcacaacggccccttcaaaattcagctagttcgtggatggattattcatgctcttgttgctggaagataccaaggggctggtagtattttctagtgctgttcctgttttagatggaccaacaatttcaggactcgatttcgatgggtccgtgtatgagtggtgtactgtttcatcaggaagtttagagtaaaacacttgagatcaataaaagtttcatgttcctt

SEQ ID NO: 13767 - protein, 210 aa, Triticum aestivum
  peptide (1)..(210): Ceres Seq. ID no. 15224279
TKEKKENEIRDASPAPPARRGRPRRREADGLRGARGLRLPPGHHPQGGRLLHPRQRHRRLHGAHQLLLHLRVLHPGLLLAPVQARHQRPHLRRPPHQPPGRHRQGPLLLAQHRRGHPQRRPARLLRRHRLRRLRPRQLPREPHLRLRLRLQRPPAAAVHRRAEPAPARCVLGSPPSSLTSHNGPFKIQLVRGWIIHALVAGRYQGAGSIF

SEQ ID NO: 13768 - protein, 171 aa, Triticum aestivum
  peptide (1)..(171): Ceres Seq. ID no. 15224280
  misc_feature (29)..(151): Pfam Name: Pfam Description:  Protein of unknown function, DUF538
  misc_feature (29)..(151): NCBI GI NO: 18379014 NR Description: expressed protein [Arabidopsis thaliana]
  misc_feature (13)..(163): NCBI GI NO: 21554037 NR Description: unknown [Arabidopsis thaliana]
  misc_feature (13)..(165): NCBI GI NO: 18411923 NR Description: expressed protein [Arabidopsis thaliana]
  misc_feature (20)..(156): NCBI GI NO: 15235335 NR Description: expressed protein [Arabidopsis thaliana]
  misc_feature (15)..(151): NCBI GI NO: 18379012 NR Description: expressed protein [Arabidopsis thaliana]
  misc_feature (15)..(151): NCBI GI NO: 21553750 NR Description: unknown [Arabidopsis thaliana]
RPRKKRRMKSAMLPLLLLLAVAGPAAAKPTAYEALAAFDFPPGIIPKGVVSYTLDNATGDFTAHINSSSTCEFSIQGSYSLRYKPDISGRISVDRLTNLQGVTVKVLFFWLNIVEVTRSGDQLGFSVGIASADFGLDNFLESPTCGCGFDCNDLLLPQSTAEPSLRLRGAF

SEQ ID NO: 13769 - protein, 164 aa, Triticum aestivum
  peptide (1)..(164): Ceres Seq. ID no. 15224281
  misc_feature (22)..(144): Pfam Name: Pfam Description:  Protein of unknown function, DUF538
  misc_feature (22)..(144): NCBI GI NO: 18379014 NR Description: expressed protein [Arabidopsis thaliana]
  misc_feature (6)..(156): NCBI GI NO: 21554037 NR Description: unknown [Arabidopsis thaliana]
  misc_feature (6)..(158): NCBI GI NO: 18411923 NR Description: expressed protein [Arabidopsis thaliana]
  misc_feature (13)..(149): NCBI GI NO: 15235335 NR Description: expressed protein [Arabidopsis thaliana]
  misc_feature (8)..(144): NCBI GI NO: 18379012 NR Description: expressed protein [Arabidopsis thaliana]
  misc_feature (8)..(144): NCBI GI NO: 21553750 NR Description: unknown [Arabidopsis thaliana]
MKSAMLPLLLLLAVAGPAAAKPTAYEALAAFDFPPGIIPKGVVSYTLDNATGDFTAHINSSSTCEFSIQGSYSLRYKPDISGRISVDRLTNLQGVTVKVLFFWLNIVEVTRSGDQLGFSVGIASADFGLDNFLESPTCGCGFDCNDLLLPQSTAEPSLRLRGAF

SEQ ID NO: 13770 - DNA, 804 bp, Triticum aestivum
  misc_feature (1)..(804): Ceres Seq. ID no. 14302093
atatctatcacttcccggagttcttcgtttggccacgctgatcaattgagatcaagaccatggcaaactgtaagaagtggcttctgctcgttgtgggcctcacggccatgatttcctcgtcggaggcgtacgtcttctacgccggcggccgcgacggctgggtcgtcgaccccgccgagagctacaaccactgggccgagcgcaaccggtttcagatcaacgacaccatcgtgtttgcgcgcggcgagggcgagggcgcggactcggtgctgctggtgaccgagccggacttcgacgcgtgcaacacgcgtagccctgtccgccggctagaggacgccggtggtcgcccggagttccggttcgaccggtcgggtgccttcttcttcatcagcggcgacgaggaccggtgccagaagggcaagaagttgtacgtcgtcgtgatggcgcctcggtcccaggagtgggagctcgcaccggcgcccggatcgccgccgctctgggcctcggcaccagagcacgcggaggccccggacatgagccctggcaacgaaaccttgttcacatcgtttggggctgtgagcgaaactccggccggatctcctcatggatggaacccgaataggcgataaacctggactagagacttgagtgtttaggcaggccatggccgacacccccgttgggcttccgcttgaaggttgccgagtacatgtcgtgtaaacggcggtaagtggtgagagcgtgtgtgaagaagtacccccctgcagggttaacatcatttattcaaataaccgtgtccgcggg

SEQ ID NO: 13771 - protein, 189 aa, Triticum aestivum
  peptide (1)..(189): Ceres Seq. ID no. 14302094
  misc_feature (34)..(121): Pfam Name: Pfam Description:  Plastocyanin-like domain
  misc_feature (7)..(185): NCBI GI NO: 34909494 NR Description: P0481E12.17
  misc_feature (12)..(186): NCBI GI NO: 34903678 NR Description: B1015E06.24
  misc_feature (4)..(181): NCBI GI NO: 15238868 NR Description: hypothetical protein [Arabidopsis thaliana]
  misc_feature (1)..(182): NCBI GI NO: 15234164 NR Description: expressed protein [Arabidopsis thaliana]
  misc_feature (1)..(182): NCBI GI NO: 21592865 NR Description: unknown [Arabidopsis thaliana]
  misc_feature (4)..(181): NCBI GI NO: 28396618 NR Description: phytocyanin protein, PUP2 [Arabidopsis thaliana]
  misc_feature (9)..(181): NCBI GI NO: 18417181 NR Description: plastocyanin-like domain containing protein
  misc_feature (9)..(181): NCBI GI NO: 7485901 NR Description: hypothetical protein F20O9
  misc_feature (8)..(181): NCBI GI NO: 7486634 NR Description: hypothetical protein F8B4
  misc_feature (8)..(181): NCBI GI NO: 30689408 NR Description: plastocyanin-like domain containing protein
MANCKKWLLLVVGLTAMISSSEAYVFYAGGRDGWVVDPAESYNHWAERNRFQINDTIVFARGEGEGADSVLLVTEPDFDACNTRSPVRRLEDAGGRPEFRFDRSGAFFFISGDEDRCQKGKKLYVVVMAPRSQEWELAPAPGSPPLWASAPEHAEAPDMSPGNETLFTSFGAVSETPAGSPHGWNPNRR

SEQ ID NO: 13772 - protein, 173 aa, Triticum aestivum
  peptide (1)..(173): Ceres Seq. ID no. 14302095
  misc_feature (18)..(105): Pfam Name: Pfam Description:  Plastocyanin-like domain
  misc_feature (1)..(169): NCBI GI NO: 34909494 NR Description: P0481E12.17
  misc_feature (1)..(170): NCBI GI NO: 34903678 NR Description: B1015E06.24
  misc_feature (1)..(165): NCBI GI NO: 15238868 NR Description: hypothetical protein [Arabidopsis thaliana]
  misc_feature (1)..(166): NCBI GI NO: 15234164 NR Description: expressed protein [Arabidopsis thaliana]
  misc_feature (1)..(166): NCBI GI NO: 21592865 NR Description: unknown [Arabidopsis thaliana]
  misc_feature (1)..(165): NCBI GI NO: 28396618 NR Description: phytocyanin protein, PUP2 [Arabidopsis thaliana]
  misc_feature (1)..(165): NCBI GI NO: 18417181 NR Description: plastocyanin-like domain containing protein
  misc_feature (1)..(165): NCBI GI NO: 7485901 NR Description: hypothetical protein F20O9
  misc_feature (1)..(165): NCBI GI NO: 7486634 NR Description: hypothetical protein F8B4
  misc_feature (1)..(165): NCBI GI NO: 30689408 NR Description: plastocyanin-like domain containing protein
MISSSEAYVFYAGGRDGWVVDPAESYNHWAERNRFQINDTIVFARGEGEGADSVLLVTEPDFDACNTRSPVRRLEDAGGRPEFRFDRSGAFFFISGDEDRCQKGKKLYVVVMAPRSQEWELAPAPGSPPLWASAPEHAEAPDMSPGNETLFTSFGAVSETPAGSPHGWNPNRR

SEQ ID NO: 13773 - DNA, 810 bp, Triticum aestivum
  misc_feature (1)..(810): Ceres Seq. ID no. 15173457
ccctttccttcccatctatcctccgatctccatcaaccggagccgccgtgcttcctccttccgcctgcacacgcttcgaccccggcggccgctcgcggcgcgtcgccaccttcctcacccttcgttccgctgctcaggatcccgctccccagtccagcacagggaggggggcaatggaaggaccgtctgacggccaactgatcccctccaccgcaggagaccctcacctcaacagctcggccgcgcccatggacgccaccagcagcggctcgcagcacgtcgcgacgctgcggaagctgctgttccggaggatgctggtcggggtgaacgacggccgctacttcctggggctgttccactgcgtcgacaagcaggggaacataatcctgcaggacgcggtggagtaccgcagcgcgcgccgctcatccccgtcggcgccgaaggaggagcggtgcctcgggctcatcctgatcccggcgtcctgccgctcgtcctgccatgtcgactgcttcatcgaagagcagatggccctgctgtccctgtgcaagtgaaggatgcttctgatttctttcttcttctggtttctcaagctatgtggcgtcgatgaatctgtgcctggagaccttactgtcacttttatttgtaatcagttgtgccatattggagttaccctgcatattattatttttgttatttcagctagaagctggtattcatcaatcagtgtcactggctgtgagttcttcaatcaacaagattttgtacacaaattcagtaactgatgacatacaagctcataccataacttcc

SEQ ID NO: 13774 - protein, 182 aa, Triticum aestivum
  peptide (1)..(182): Ceres Seq. ID no. 15173458
  misc_feature (103)..(157): Pfam Name: Pfam Description:  LSM domain
  misc_feature (79)..(180): NCBI GI NO: 22328770 NR Description: expressed protein [Arabidopsis thaliana]
  misc_feature (104)..(180): NCBI GI NO: 38566550 NR Description: At4g18372 [Arabidopsis thaliana]
LSFPSILRSPSTGAAVLPPSACTRFDPGGRSRRVATFLTLRSAAQDPAPQSSTGRGAMEGPSDGQLIPSTAGDPHLNSSAAPMDATSSGSQHVATLRKLLFRRMLVGVNDGRYFLGLFHCVDKQGNIILQDAVEYRSARRSSPSAPKEERCLGLILIPASCRSSCHVDCFIEEQMALLSLCK

SEQ ID NO: 13775 - protein, 125 aa, Triticum aestivum
  peptide (1)..(125): Ceres Seq. ID no. 15173459
  misc_feature (46)..(100): Pfam Name: Pfam Description:  LSM domain
  misc_feature (22)..(123): NCBI GI NO: 22328770 NR Description: expressed protein [Arabidopsis thaliana]
  misc_feature (47)..(123): NCBI GI NO: 38566550 NR Description: At4g18372 [Arabidopsis thaliana]
MEGPSDGQLIPSTAGDPHLNSSAAPMDATSSGSQHVATLRKLLFRRMLVGVNDGRYFLGLFHCVDKQGNIILQDAVEYRSARRSSPSAPKEERCLGLILIPASCRSSCHVDCFIEEQMALLSLCK

SEQ ID NO: 13776 - protein, 100 aa, Triticum aestivum
  peptide (1)..(100): Ceres Seq. ID no. 15173460
  misc_feature (21)..(75): Pfam Name: Pfam Description:  LSM domain
  misc_feature (1)..(98): NCBI GI NO: 22328770 NR Description: expressed protein [Arabidopsis thaliana]
  misc_feature (22)..(98): NCBI GI NO: 38566550 NR Description: At4g18372 [Arabidopsis thaliana]
MDATSSGSQHVATLRKLLFRRMLVGVNDGRYFLGLFHCVDKQGNIILQDAVEYRSARRSSPSAPKEERCLGLILIPASCRSSCHVDCFIEEQMALLSLCK

SEQ ID NO: 13777 - DNA, 1394 bp, Triticum aestivum
  misc_feature (1)..(1394): Ceres Seq. ID no. 13585342
caacatcctaatcgaaaaagttgttaaaggcagcggggacagggccaccgcccaccgccgtcgtactcgtggaacttgcttgcttgccaccccgtcctttgctgctaccgccgcagccgatcgatggccgattcggccggaaagcggcctccaacgccggcgccggcctccggcggaggcggcatggcgtggaagctctctttagctctgttcgtgttgctcgcggcgttcctgtacaagcagattcagcctccggctccggaaatcgttggctcgccgggtggcccccctgttacagcatcaagaacaaagctcaaagacggcaggcatttggcatacctggaatctggcgtcccaaaggagaaggccaagtacaagatcatttttgtccatggattcgactcctgcagatacgacgtgcttcaagtttccccggagctggcacaagagctgggcatctacctgctgtccttcgaccggcctgggtatggtgagagcgaccctgacccggcaccgtctgagaagagcatcgccctcgacatcgaggagctcgccgacaacctgcagctgggccccaaattccacctcatcggcttctccatgggcggcgaaatcatgtggagctgcctcaagtacatcccgcacaggctctctggggtggccgttctcgggccggtcggcaactactggtggtcgggcttgccgtcgaacgtgtcatgggacgcctggtaccagcagctcccacaggaccaatgggcggtctgggtctcccatcatctgccatggctgacctactggtggaacacccagaagctcttcccggcctccagcgtcatcgcctacaaccctgccctcctgtccgaagaagacgcgaagctcatggagaagtttggaatgcgaacctacatgccgatgataaggcagcagggggagtactactgcctgcaccgcgacatgatggtcgggttcgggaagtggggttggagccccctggacctcaaggacccgttcgccggcggcgagggcaaggtgcacctgtggcacggcgcggaggaccgcatcgtgccggtcatcttgtccaggtacatcagcgagaggctcccgtgggtggtctaccacgagctccccaagtccggacacctcttccccgttgcccaggaaatggccgacgccatcgtcaagtccctgctgctcggagagcagtaaccttccactccgatcatctatctctatgtagtatgcttcttgtgcagtacctcagcgccgtgtggttagctcctcctcacgggcaccgaataacaggtgtttctttcggtctggaagacgacgatagacacttgtatatatctgtgagggctagggttcgtatattcaagccatggccatggaattcc

SEQ ID NO: 13778 - protein, 360 aa, Triticum aestivum
  peptide (1)..(360): Ceres Seq. ID no. 15220759
  misc_feature (112)..(360): Pfam Name: Pfam Description:  alpha/beta hydrolase fold
  misc_feature (21)..(360): NCBI GI NO: 38346334 NR Description: OSJNBa0073L04.5
  misc_feature (1)..(360): NCBI GI NO: 15228377 NR Description: hydrolase, alpha/beta fold family
  misc_feature (11)..(359): NCBI GI NO: 18404095 NR Description: hydrolase, alpha/beta fold family
  misc_feature (11)..(359): NCBI GI NO: 28416665 NR Description: At2g36290 [Arabidopsis thaliana]
  misc_feature (26)..(356): NCBI GI NO: 18410582 NR Description: esterase/lipase/thioesterase family
  misc_feature (32)..(356): NCBI GI NO: 21592662 NR Description: unknown [Arabidopsis thaliana]
  misc_feature (32)..(359): NCBI GI NO: 18410575 NR Description: hydrolase, alpha/beta fold family
  misc_feature (32)..(356): NCBI GI NO: 21537089 NR Description: unknown [Arabidopsis thaliana]
  misc_feature (4)..(356): NCBI GI NO: 15221193 NR Description: esterase/lipase/thioesterase family
  misc_feature (175)..(360): NCBI GI NO: 25407040 NR Description: protein T23G18.18
MADSAGKRPPTPAPASGGGGMAWKLSLALFVLLAAFLYKQIQPPAPEIVGSPGGPPVTASRTKLKDGRHLAYLESGVPKEKAKYKIIFVHGFDSCRYDVLQVSPELAQELGIYLLSFDRPGYGESDPDPAPSEKSIALDIEELADNLQLGPKFHLIGFSMGGEIMWSCLKYIPHRLSGVAVLGPVGNYWWSGLPSNVSWDAWYQQLPQDQWAVWVSHHLPWLTYWWNTQKLFPASSVIAYNPALLSEEDAKLMEKFGMRTYMPMIRQQGEYYCLHRDMMVGFGKWGWSPLDLKDPFAGGEGKVHLWHGAEDRIVPVILSRYISERLPWVVYHELPKSGHLFPVAQEMADAIVKSLLLGEQ

SEQ ID NO: 13779 - protein, 340 aa, Triticum aestivum
  peptide (1)..(340): Ceres Seq. ID no. 15220760
  misc_feature (92)..(340): Pfam Name: Pfam Description:  alpha/beta hydrolase fold
  misc_feature (1)..(340): NCBI GI NO: 38346334 NR Description: OSJNBa0073L04.5
  misc_feature (1)..(340): NCBI GI NO: 15228377 NR Description: hydrolase, alpha/beta fold family
  misc_feature (1)..(339): NCBI GI NO: 18404095 NR Description: hydrolase, alpha/beta fold family
  misc_feature (1)..(339): NCBI GI NO: 28416665 NR Description: At2g36290 [Arabidopsis thaliana]
  misc_feature (6)..(336): NCBI GI NO: 18410582 NR Description: esterase/lipase/thioesterase family
  misc_feature (12)..(336): NCBI GI NO: 21592662 NR Description: unknown [Arabidopsis thaliana]
  misc_feature (12)..(339): NCBI GI NO: 18410575 NR Description: hydrolase, alpha/beta fold family
  misc_feature (12)..(336): NCBI GI NO: 21537089 NR Description: unknown [Arabidopsis thaliana]
  misc_feature (1)..(336): NCBI GI NO: 15221193 NR Description: esterase/lipase/thioesterase family
  misc_feature (155)..(340): NCBI GI NO: 25407040 NR Description: protein T23G18.18
MAWKLSLALFVLLAAFLYKQIQPPAPEIVGSPGGPPVTASRTKLKDGRHLAYLESGVPKEKAKYKIIFVHGFDSCRYDVLQVSPELAQELGIYLLSFDRPGYGESDPDPAPSEKSIALDIEELADNLQLGPKFHLIGFSMGGEIMWSCLKYIPHRLSGVAVLGPVGNYWWSGLPSNVSWDAWYQQLPQDQWAVWVSHHLPWLTYWWNTQKLFPASSVIAYNPALLSEEDAKLMEKFGMRTYMPMIRQQGEYYCLHRDMMVGFGKWGWSPLDLKDPFAGGEGKVHLWHGAEDRIVPVILSRYISERLPWVVYHELPKSGHLFPVAQEMADAIVKSLLLGEQ

SEQ ID NO: 13780 - protein, 226 aa, Triticum aestivum
  peptide (1)..(226): Ceres Seq. ID no. 15220761
MGRLVPAAPTGPMGGLGLPSSAMADLLVEHPEALPGLQRHRLQPCPPVRRRREAHGEVWNANLHADDKAAGGVLLPAPRHDGRVREVGLEPPGPQGPVRRRRGQGAPVARRGGPHRAGHLVQVHQREAPVGGLPRAPQVRTPLPRCPGNGRRHRQVPAARRAVTFHSDHLSLCSMLLVQYLSAVWLAPPHGHRITGVSFGLEDDDRHLYISVRARVRIFKPWPWNS

SEQ ID NO: 13781 - DNA, 1518 bp, Triticum aestivum
  misc_feature (1)..(1518): Ceres Seq. ID no. 12587035
acgaaaaaaagagctcaccatcgaagcagcagcaagaagaggaggaggagctaggagttctcggtctcgccgcagagcaacttggcagagcgagtgagcaagacaagcgaggaaagcaagggaaggatacatggcgtgcgcggtggcaccgggctcgccggtcttctcgccgtcccgcctcggcctgctccagcagttggagcagcagctccaccaccaccaccaccacggctgctccagcagcggcgcctccttcctcccctcctcgccgctccgccccttcgcccacctccgcgcgcgcatccaccccgacccctccccgtgcgccgccccgccgctgcccgccgtcaagactgaggattcttcttctgttgctccggctaaggccccggtcaagcgcaggcgcccggcgcctctgctagttccggccgcggtcaccgtcgcgccggcggtgctggaggccgccgcggcgagcggggtggacgaggtggcggagcagggcgacggcttcgcggccttctgccggagggggaagggccggaagcgggtcgagatggaggaccgccacgtcgccgccgtcgcgctcggcggggaccgcgcgcaggccctcttcgccgtgttcgacggccacggagggaagagcgccgcggagttcgccgcggagaacatgccacggatcgtggcggaggagctggagaggtcggcgcgcggcggaggggcagggcgcgcggcggtggagggcgccgtgcggcgggcgtacctgcgcaccgacgaggagttctcctccacctcctccaagaaccgggagcaggcgggcgggggcgcctgctgcgtgacggcgctgctccgcgagggcgggcggcagctggtggtgtccggcgccggggactgccgcgcggtcctgagccgcggcggcagggcggaggcgctcaccgacgaccaccgcgcgtcgcggcaggacgagcgggaccggatcgaggcgctgaaaggcgggctggtgctcaactgccgcggcgtatggcgggtgcagggctcgctggcggtgacccggggcatcggcgacgcgcacctcaagccgtgggtggtggcggagccggagactagaaccgtcgacttgggcgccgactgcgagctgctcatcctcgcctccgacgggctgtgggacaaggtgggcaaccaggaggccgtcgacgccgccgccgcctcctccggcgacctgcccgccgcgtgccgccggctcgtcgacatggccgtgtccaggggctcctccgacgacatcagcgtgctcgtcatccagctgcagcgccctctccgataagactgtagtagtagtagcagagaagatatgcatcggcgccatggatgttcaccctacgtgtagatagagagcttttttgacgtcgtctctctcgtccccgctcgatccggctgctggtgcttgtaacaagatcattagatcaagcactgttagtgctaataatcatcacccggttgagatttcgatcaccgtgggacggg

SEQ ID NO: 13782 - protein, 395 aa, Triticum aestivum
  peptide (1)..(395): Ceres Seq. ID no. 12587036
  misc_feature (127)..(383): Pfam Name: Pfam Description:  Protein phosphatase 2C
  misc_feature (118)..(391): NCBI GI NO: 6478146 NR Description: putative serine/threonine phosphatase type 2c
  misc_feature (1)..(392): NCBI GI NO: 15227687 NR Description: protein phosphatase 2C
  misc_feature (36)..(392): NCBI GI NO: 30013681 NR Description: Avr9/Cf-9 rapidly elicited protein 284
  misc_feature (136)..(356): NCBI GI NO: 23506609 NR Description: putative serine/threonine phosphatase
  misc_feature (42)..(391): NCBI GI NO: 15225656 NR Description: protein phosphatase 2C
  misc_feature (63)..(390): NCBI GI NO: 15222312 NR Description: protein phosphatase 2C
  misc_feature (63)..(284): NCBI GI NO: 25352225 NR Description: hypothetical protein
  misc_feature (285)..(390): NCBI GI NO: 25352225 NR Description: hypothetical protein
  misc_feature (136)..(356): NCBI GI NO: 23506607 NR Description: putative serine/threonine phosphatase
  misc_feature (62)..(391): NCBI GI NO: 7488754 NR Description: protein phosphatase 2C - alfalfa
MACAVAPGSPVFSPSRLGLLQQLEQQLHHHHHHGCSSSGASFLPSSPLRPFAHLRARIHPDPSPCAAPPLPAVKTEDSSSVAPAKAPVKRRRPAPLLVPAAVTVAPAVLEAAAASGVDEVAEQGDGFAAFCRRGKGRKRVEMEDRHVAAVALGGDRAQALFAVFDGHGGKSAAEFAAENMPRIVAEELERSARGGGAGRAAVEGAVRRAYLRTDEEFSSTSSKNREQAGGGACCVTALLREGGRQLVVSGAGDCRAVLSRGGRAEALTDDHRASRQDERDRIEALKGGLVLNCRGVWRVQGSLAVTRGIGDAHLKPWVVAEPETRTVDLGADCELLILASDGLWDKVGNQEAVDAAAASSGDLPAACRRLVDMAVSRGSSDDISVLVIQLQRPLR

SEQ ID NO: 13783 - protein, 254 aa, Triticum aestivum
  peptide (1)..(254): Ceres Seq. ID no. 12587037
  misc_feature (1)..(242): Pfam Name: Pfam Description:  Protein phosphatase 2C
  misc_feature (1)..(250): NCBI GI NO: 6478146 NR Description: putative serine/threonine phosphatase type 2c
  misc_feature (1)..(251): NCBI GI NO: 15227687 NR Description: protein phosphatase 2C
  misc_feature (1)..(251): NCBI GI NO: 30013681 NR Description: Avr9/Cf-9 rapidly elicited protein 284
  misc_feature (1)..(215): NCBI GI NO: 23506609 NR Description: putative serine/threonine phosphatase
  misc_feature (1)..(250): NCBI GI NO: 15225656 NR Description: protein phosphatase 2C
  misc_feature (1)..(249): NCBI GI NO: 15222312 NR Description: protein phosphatase 2C
  misc_feature (1)..(143): NCBI GI NO: 25352225 NR Description: hypothetical protein
  misc_feature (144)..(249): NCBI GI NO: 25352225 NR Description: hypothetical protein
  misc_feature (1)..(215): NCBI GI NO: 23506607 NR Description: putative serine/threonine phosphatase
  misc_feature (1)..(250): NCBI GI NO: 7488754 NR Description: protein phosphatase 2C - alfalfa
MEDRHVAAVALGGDRAQALFAVFDGHGGKSAAEFAAENMPRIVAEELERSARGGGAGRAAVEGAVRRAYLRTDEEFSSTSSKNREQAGGGACCVTALLREGGRQLVVSGAGDCRAVLSRGGRAEALTDDHRASRQDERDRIEALKGGLVLNCRGVWRVQGSLAVTRGIGDAHLKPWVVAEPETRTVDLGADCELLILASDGLWDKVGNQEAVDAAAASSGDLPAACRRLVDMAVSRGSSDDISVLVIQLQRPLR

SEQ ID NO: 13784 - protein, 216 aa, Triticum aestivum
  peptide (1)..(216): Ceres Seq. ID no. 12587038
  misc_feature (1)..(204): Pfam Name: Pfam Description:  Protein phosphatase 2C
  misc_feature (1)..(212): NCBI GI NO: 6478146 NR Description: putative serine/threonine phosphatase type 2c
  misc_feature (1)..(213): NCBI GI NO: 15227687 NR Description: protein phosphatase 2C
  misc_feature (1)..(213): NCBI GI NO: 30013681 NR Description: Avr9/Cf-9 rapidly elicited protein 284
  misc_feature (1)..(177): NCBI GI NO: 23506609 NR Description: putative serine/threonine phosphatase
  misc_feature (1)..(212): NCBI GI NO: 15225656 NR Description: protein phosphatase 2C
  misc_feature (1)..(211): NCBI GI NO: 15222312 NR Description: protein phosphatase 2C
  misc_feature (1)..(105): NCBI GI NO: 25352225 NR Description: hypothetical protein
  misc_feature (106)..(211): NCBI GI NO: 25352225 NR Description: hypothetical protein
  misc_feature (1)..(177): NCBI GI NO: 23506607 NR Description: putative serine/threonine phosphatase
  misc_feature (1)..(212): NCBI GI NO: 7488754 NR Description: protein phosphatase 2C - alfalfa
MPRIVAEELERSARGGGAGRAAVEGAVRRAYLRTDEEFSSTSSKNREQAGGGACCVTALLREGGRQLVVSGAGDCRAVLSRGGRAEALTDDHRASRQDERDRIEALKGGLVLNCRGVWRVQGSLAVTRGIGDAHLKPWVVAEPETRTVDLGADCELLILASDGLWDKVGNQEAVDAAAASSGDLPAACRRLVDMAVSRGSSDDISVLVIQLQRPLR

SEQ ID NO: 13785 - DNA, 957 bp, Triticum aestivum
  misc_feature (1)..(957): Ceres Seq. ID no. 15173971
cccgtcctgccctgcccactcccccaaatacaaccaacccctctcgccgtctgctcgcttgcccgtccgtccgtccccccaaatccaaccccctccccgcacgaaccccggcggcgtcaccggcgatggagtgcgtcatcggcgtggtcggccgcgacttcgcggtggtggccgcggacacgtccgccgtgcagagcatcctcgtccacaagacggacgaggacaagatcatgctcctcgactcccacaagctcatgggcgcctccggggagcccggcgaccgcgtgcagttcaccgagttcatccagaagaacctccacctctaccagttccgcaacaacatgccgctcagcaccgccgccaccgccaacttcacccgcggcgagctcgccaccgccctccgcaagaatccctactctgtaaacatcatacttgcagggtttgataaagatgctggtgcatcgatgtactacattgactacatcgcaacgctccacaaaattgacaagggagcattcgggtacgggtcgtacttctgtttgtcgctgatggacaagttgtaccgccctgacatgactgtcgaggaagcggtagaccttgttgacaagtgcatcaaggagatcagactccggctggtcgtcgcgcctcagaatttcgccatcaagatcgtggacaaggatggcgccagggactatgctaggcgtgagataggaggtgacagtcctgcagtcgcaaccgcaaccgcaacaatagcaacaactgcctgaggtgattggcgctgtcggtggtcatttggctggctggaggctgaaccctttctgttaattgtttccaagtactgtcactatgtaatcgcaatacgtttcggttcgagaactgtgttgcaaattctcccagatgtggactagtctgtttatgacccctatttcatggttatatgtttcactgtttcttgcc

SEQ ID NO: 13786 - protein, 254 aa, Triticum aestivum
  peptide (1)..(254): Ceres Seq. ID no. 15173972
  misc_feature (42)..(223): Pfam Name: Pfam Description:  Proteasome A-type and B-type
  misc_feature (42)..(251): NCBI GI NO: 27552546 NR Description: 20S proteasome beta 4 subunit
  misc_feature (42)..(251): NCBI GI NO: 17380213 NR Description: Proteasome subunit beta type 2
  misc_feature (42)..(234): NCBI GI NO: 15233580 NR Description: 20S proteasome beta subunit D2 (PBD2)
  misc_feature (42)..(235): NCBI GI NO: 15228805 NR Description: 20S proteasome beta subunit D (PBD1)
  misc_feature (42)..(175): NCBI GI NO: 14594929 NR Description: putative beta4 proteasome subunit
  misc_feature (42)..(230): NCBI GI NO: 29841035 NR Description: similar to NM_017284 proteasome
  misc_feature (42)..(230): NCBI GI NO: 19113828 NR Description: proteasome component; c7-I subfamily
  misc_feature (42)..(230): NCBI GI NO: 4506195 NR Description: proteasome beta 2 subunit
  misc_feature (42)..(230): NCBI GI NO: 30585195 NR Description: Homo sapiens proteasome
  misc_feature (42)..(227): NCBI GI NO: 8394079 NR Description: proteasome
RPALPTPPNTTNPSRRLLACPSVRPPKSNPLPARTPAASPAMECVIGVVGRDFAVVAADTSAVQSILVHKTDEDKIMLLDSHKLMGASGEPGDRVQFTEFIQKNLHLYQFRNNMPLSTAATANFTRGELATALRKNPYSVNIILAGFDKDAGASMYYIDYIATLHKIDKGAFGYGSYFCLSLMDKLYRPDMTVEEAVDLVDKCIKEIRLRLVVAPQNFAIKIVDKDGARDYARREIGGDSPAVATATATIATTA

SEQ ID NO: 13787 - protein, 213 aa, Triticum aestivum; identical to SEQ ID NO: 7463
  peptide (1)..(213): Ceres Seq. ID no. 15173973
  misc_feature (1)..(182): Pfam Name: Pfam Description:  Proteasome A-type and B-type
  misc_feature (1)..(210): NCBI GI NO: 27552546 NR Description: 20S proteasome beta 4 subunit
  misc_feature (1)..(210): NCBI GI NO: 17380213 NR Description: Proteasome subunit beta type 2
  misc_feature (1)..(193): NCBI GI NO: 15233580 NR Description: 20S proteasome beta subunit D2 (PBD2)
  misc_feature (1)..(194): NCBI GI NO: 15228805 NR Description: 20S proteasome beta subunit D (PBD1)
  misc_feature (1)..(134): NCBI GI NO: 14594929 NR Description: putative beta4 proteasome subunit
  misc_feature (1)..(189): NCBI GI NO: 29841035 NR Description: similar to NM_017284 proteasome
  misc_feature (1)..(189): NCBI GI NO: 19113828 NR Description: proteasome component; c7-I subfamily
  misc_feature (1)..(189): NCBI GI NO: 4506195 NR Description: proteasome beta 2 subunit
  misc_feature (1)..(189): NCBI GI NO: 30585195 NR Description: Homo sapiens proteasome
  misc_feature (1)..(186): NCBI GI NO: 8394079 NR Description: proteasome

SEQ ID NO: 13788 - protein, 178 aa, Triticum aestivum; identical to SEQ ID NO: 7464
  peptide (1)..(178): Ceres Seq. ID no. 15173974
  misc_feature (1)..(147): Pfam Name: Pfam Description:  Proteasome A-type and B-type
  misc_feature (1)..(175): NCBI GI NO: 27552546 NR Description: 20S proteasome beta 4 subunit
  misc_feature (1)..(175): NCBI GI NO: 17380213 NR Description: Proteasome subunit beta type 2
  misc_feature (1)..(158): NCBI GI NO: 15233580 NR Description: 20S proteasome beta subunit D2 (PBD2)
  misc_feature (1)..(159): NCBI GI NO: 15228805 NR Description: 20S proteasome beta subunit D (PBD1)
  misc_feature (1)..(99): NCBI GI NO: 14594929 NR Description: putative beta4 proteasome subunit
  misc_feature (1)..(154): NCBI GI NO: 29841035 NR Description: similar to NM_017284 proteasome
  misc_feature (1)..(154): NCBI GI NO: 19113828 NR Description: proteasome component; c7-I subfamily
  misc_feature (1)..(154): NCBI GI NO: 4506195 NR Description: proteasome beta 2 subunit
  misc_feature (1)..(154): NCBI GI NO: 30585195 NR Description: Homo sapiens proteasome
  misc_feature (1)..(151): NCBI GI NO: 8394079 NR Description: proteasome

SEQ ID NO: 13789 - DNA, 515 bp, Triticum aestivum
  misc_feature (1)..(515): Ceres Seq. ID no. 13584057
ataacgtttcctcgttgccggggggaagctctctcgtgtcctcctctgctcttcctcgacgagagtgaggccggccaccggcgacagggcggccatggcggcggcgcttctctccccggcctctcccctccctcgctcctcctccgcggcccatcccaggagcaagggcgcggctggtgcagcagcagggtgcgctccgccgtccaggaggagggccgtctcgtgctcgtgcgcgcccgattcgtggagcctcgggctggagaggaggcagctcgtgctctccggcctcgtctcctcctttgcaatcgccctcccgattacagtagtacaatcgtgcgctgctgccactgaggttgagcttgacgacggcgtgaagatggccatgctggtagatgagaccaacgcctactcttttctctacccggttcagctgccagggaagaaaacctccttcagatgggtggagtccaggaaatcggagcgatattcctctgcggcgccactatctcctgatg

SEQ ID NO: 13790 - protein, 140 aa, Triticum aestivum
  peptide (1)..(140): Ceres Seq. ID no. 13584058
  misc_feature (53)..(139): NCBI GI NO: 34912704 NR Description: P0686E09.22
  misc_feature (1)..(139): NCBI GI NO: 11283463 NR Description: hypothetical protein F15N18
  misc_feature (4)..(139): NCBI GI NO: 22326731 NR Description: oxygen-evolving complex related protein
MAAALLSPASPLPRSSSAAHPRSKGAAGAAAGCAPPSRRRAVSCSCAPDSWSLGLERRQLVLSGLVSSFAIALPITVVQSCAAATEVELDDGVKMAMLVDETNAYSFLYPVQLPGKKTSFRWVESRKSERYSSAAPLSPD

SEQ ID NO: 13791 - protein, 116 aa, Triticum aestivum
  peptide (1)..(116): Ceres Seq. ID no. 13584059
ITFPRCRGEALSCPPLLFLDESEAGHRRQGGHGGGASLPGLSPPSLLLRGPSQEQGRGWCSSRVRSAVQEEGRLVLVRARFVEPRAGEEAARALRPRLLLCNRPPDYSSTIVRCCH

SEQ ID NO: 13792 - DNA, 1224 bp, Triticum aestivum
  misc_feature (1)..(1224): Ceres Seq. ID no. 15225685
acgagascattacctagarcatcctratcgaawatcatcagccccttgccaacaacatgtcttcttcttcttcttcttctacccgggtctcccagctgggcatcgccggcttggccgcgcttctggcggccgtctgcctcctccacgccggcggggcggcggcggcggagctgtgcacggactactacgactgcacgtgcccggacgcgtacaagatcgtgcagggggtgctggtggaggcgcaccagtcggaccctcgcatcttcgccagcctcatccgcctccacttccacgactgcttcgtgcagggctgcgacggctcgctgctgctggacaccttcgacgggatggagtcggagaaggacgcgcggcccaacaacgggtcggcgcgcggcttcgaggtcgtggacgccgccaaggccgccctcgaggacgcctgccccggcgtcgtctcctgcgccgacatcctcgccatcgccgccgagatctcggtcgagctgtccggagggcccgggtggaacgtgttgctggggaggctggacagcttcacgtccagcaaagccgacgccgagaacctaccaggccccttcgacggcctcgatgtgctgagagcaaagttccggaacgccacgctcgacgatactaccgacctcgtcgccctctcaggtggccacactttcggccgcgtgcaatgccagttcgtcacgggccggctgtacaacttcagcgggacgaaccagcctgacccgaccctcgacgcgacataccgagccttcctgtcacagagatgcccgaggaacggcgacggaacgtccctcaacgacctcgacccgaccacacccgacaacttcgacaagaactacttcacaaacctcgaggtgaaccgcggcttccttcagtcagaccaggagctcaagtcggaccccggcgcggcggggacgacggcgccaatcgtcgatcggttcgcgggcagtcaggaggccttcttcagtagcttcgtgacttctatgatcaagatggggaacattaggcccgtcacagatccctcccagggagaagtccggaaccgctgcgcgtttgtcaattcaaattagcgggcaggggggagaccacgtgtgggtatatgcaaatgtggcatggtcatggatgcaaggatgaattcatctcttgtcgtctctggtgtaataattggtttttgtgtcaaccaatgtaaacatttcatgc

SEQ ID NO: 13793 - protein, 345 aa, Triticum aestivum
  peptide (1)..(345): Ceres Seq. ID no. 15225686
  misc_feature (55)..(306): Pfam Name: Pfam Description:  Peroxidase
  misc_feature (1)..(343): NCBI GI NO: 37530466 NR Description: putative peroxidase
  misc_feature (17)..(343): NCBI GI NO: 20330758 NR Description: Putative peroxidase
  misc_feature (35)..(345): NCBI GI NO: 2129513 NR Description: peroxidase (EC 1
  misc_feature (35)..(345): NCBI GI NO: 1279654 NR Description: peroxidase
  misc_feature (22)..(344): NCBI GI NO: 19569160 NR Description: apoplastic anionic gaiacol peroxidase
  misc_feature (48)..(345): NCBI GI NO: 485393 NR Description: peroxidase [Populus kitakamiensis]
  misc_feature (21)..(345): NCBI GI NO: 7433057 NR Description: peroxidase (EC 1.11.1.7) - black poplar
  misc_feature (21)..(345): NCBI GI NO: 1279648 NR Description: peroxidase
  misc_feature (21)..(345): NCBI GI NO: 1279652 NR Description: peroxidase
  misc_feature (26)..(345): NCBI GI NO: 1279650 NR Description: peroxidase
MSSSSSSSTRVSQLGIAGLAALLAAVCLLHAGGAAAAELCTDYYDCTCPDAYKIVQGVLVEAHQSDPRIFASLIRLHFHDCFVQGCDGSLLLDTFDGMESEKDARPNNGSARGFEVVDAAKAALEDACPGVVSCADILAIAAEISVELSGGPGWNVLLGRLDSFTSSKADAENLPGPFDGLDVLRAKFRNATLDDTTDLVALSGGHTFGRVQCQFVTGRLYNFSGTNQPDPTLDATYRAFLSQRCPRNGDGTSLNDLDPTTPDNFDKNYFTNLEVNRGFLQSDQELKSDPGAAGTTAPIVDRFAGSQEAFFSSFVTSMIKMGNIRPVTDPSQGEVRNRCAFVNSN

SEQ ID NO: 13794 - protein, 248 aa, Triticum aestivum
  peptide (1)..(248): Ceres Seq. ID no. 15225687
  misc_feature (1)..(209): Pfam Name: Pfam Description:  Peroxidase
  misc_feature (1)..(246): NCBI GI NO: 37530466 NR Description: putative peroxidase
  misc_feature (1)..(246): NCBI GI NO: 20330758 NR Description: Putative peroxidase
  misc_feature (1)..(248): NCBI GI NO: 2129513 NR Description: peroxidase (EC 1
  misc_feature (1)..(248): NCBI GI NO: 1279654 NR Description: peroxidase
  misc_feature (1)..(247): NCBI GI NO: 19569160 NR Description: apoplastic anionic gaiacol peroxidase
  misc_feature (1)..(248): NCBI GI NO: 485393 NR Description: peroxidase [Populus kitakamiensis]
  misc_feature (1)..(248): NCBI GI NO: 7433057 NR Description: peroxidase (EC 1.11.1.7) - black poplar
  misc_feature (1)..(248): NCBI GI NO: 1279648 NR Description: peroxidase
  misc_feature (1)..(248): NCBI GI NO: 1279652 NR Description: peroxidase
  misc_feature (1)..(248): NCBI GI NO: 1279650 NR Description: peroxidase
MESEKDARPNNGSARGFEVVDAAKAALEDACPGVVSCADILAIAAEISVELSGGPGWNVLLGRLDSFTSSKADAENLPGPFDGLDVLRAKFRNATLDDTTDLVALSGGHTFGRVQCQFVTGRLYNFSGTNQPDPTLDATYRAFLSQRCPRNGDGTSLNDLDPTTPDNFDKNYFTNLEVNRGFLQSDQELKSDPGAAGTTAPIVDRFAGSQEAFFSSFVTSMIKMGNIRPVTDPSQGEVRNRCAFVNSN

SEQ ID NO: 13795 - protein, 247 aa, Triticum aestivum
  peptide (1)..(247): Ceres Seq. ID no. 15225688
  misc_feature (2)..(2): Xaa is any aa, unknown or other
  misc_feature (6)..(6): Xaa is any aa, unknown or other
  misc_feature (9)..(9): Xaa is any aa, unknown or other
  misc_feature (11)..(11): Xaa is any aa, unknown or other
RXHYLXHPXRXSSAPCQQHVFFFFFFYPGLPAGHRRLGRASGGRLPPPRRRGGGGGAVHGLLRLHVPGRVQDRAGGAGGGAPVGPSHLRQPHPPPLPRLLRAGLRRLAAAGHLRRDGVGEGRAAQQRVGARLRGRGRRQGRPRGRLPRRRLLRRHPRHRRRDLGRAVRRARVERVAGEAGQLHVQQSRRREPTRPLRRPRCAESKVPERHARRYYRPRRPLRWPHFRPRAMPVRHGPAVQLQRDEPA

SEQ ID NO: 13796 - DNA, 1235 bp, Triticum aestivum
  misc_feature (1)..(1235): Ceres Seq. ID no. 12624774
cactgagccagccgtcaccaccaccaacaacaaaaaaacacgcatcgacgatacgtacaacgcagccgcccctcgccggcgacgagtgctaggccatggattccgactacggcgtgccgcgcgagctctcggaggtgcagcagaaccggactctctaccagcccgagctgcccccctgcctccagggcactactgtgagggtggagtatggtgatgtggcgatcgctgctgatcccgccggcgctcatgtgatcagccacgcgtacccccacacatacgggcagccactggctcatttcctcaggaaggcggctaatgttcctgatgctaaagtcatatcagagcaccctgccgtcagggttggtattgtattctgtggaaggcagtccccgggaggccacaatgtcatatggggactccatgaggccatcaaagctcacaacgtgaacagcaaacttattggtttcctcggaggaaccgacggtcttcttgcacaaaaaactttggagatcacaaatgaagttctttcttcctacaaaaaccaaggtggttatgatatgcttggtcggactaaggatcaaatcagaacaacggagcaagtcaatggtgcaatggctacttgccaggctttgaagttggatgctcttgtaataatcggaggtggattgactgggggaacgcgcatccgctgccaacctggggggaagtgagggacctgaaagcgtcctactaccaaggaacgtgccaccagtcaacagtcgcctgcccaggcttcatggctgcccaggccgtctcgtcgctgcagatccgagaagactcgtcctctccaggccagggagtcgccgccgcgaccgtcgttaataggatgctcggcggcgccaacaggctcaacctttacagggagatatgaagaaggaagatatatacaacctcgtcgtcatagtgttcttgtacataatagtcaccgaaggtgtgctgactattttgcctgcgtgcagctgttccagccatcaggagaatctgatggcgcaacttgtttcgcccttttgttttcgtcggtcggtgtaataggatattttgcgtctgttgttattgtcggtattgtaatgaaacaagtatgatttcgattctcttgctgctagctgggttttctctcgaaagtctatatatagttcttgtttgcgtttcctcacaaaataaaaaggagcctgtggaatgaaaaaccttttaccctt

SEQ ID NO: 13797 - protein, 204 aa, Triticum aestivum
  peptide (1)..(204): Ceres Seq. ID no. 12624775
  misc_feature (88)..(195): Pfam Name: Pfam Description:  Phosphofructokinase
  misc_feature (1)..(195): NCBI GI NO: 129881 NR Description: Pyrophosphate --fructose 6-phosphate 1-phosphotransferase alpha subunit
  misc_feature (1)..(195): NCBI GI NO: 3790102 NR Description: pyrophosphate-dependent phosphofructokinase alpha subunit
  misc_feature (1)..(195): NCBI GI NO: 2499488 NR Description: Pyrophosphate --fructose 6-phosphate 1-phosphotransferase alpha subunit
  misc_feature (1)..(195): NCBI GI NO: 15223082 NR Description: putative pyrophosphate-dependentphosphofructokinase alpha subunit
  misc_feature (1)..(189): NCBI GI NO: 15218074 NR Description: putative pyrophosphate-dependentphosphofructokinase alpha subunit
  misc_feature (1)..(189): NCBI GI NO: 29647436 NR Description: putative pyrophosphate--fructose 6-phosphate 1-phosphotransferase alpha subunit
  misc_feature (88)..(189): NCBI GI NO: 29367525 NR Description: fructose-6-phosphate 1-phosphotransferase
  misc_feature (18)..(189): NCBI GI NO: 34540025 NR Description: phosphofructokinase [Porphyromonas gingivalis W83]
  misc_feature (11)..(189): NCBI GI NO: 11528427 NR Description: pyrophosphate-dependent phosphofructokinase
  misc_feature (11)..(189): NCBI GI NO: 15639531 NR Description: pyrophosphate --fructose 6-phosphate 1-phosphotransferase
MDSDYGVPRELSEVQQNRTLYQPELPPCLQGTTVRVEYGDVAIAADPAGAHVISHAYPHTYGQPLAHFLRKAANVPDAKVISEHPAVRVGIVFCGRQSPGGHNVIWGLHEAIKAHNVNSKLIGFLGGTDGLLAQKTLEITNEVLSSYKNQGGYDMLGRTKDQIRTTEQVNGAMATCQALKLDALVIIGGGLTGGTRIRCQPGGK

SEQ ID NO: 13798 - DNA, 1542 bp, Triticum aestivum
  misc_feature (1)..(1542): Ceres Seq. ID no. 13662197
aattgccttcccgcaaaaataaggaaaattacaccttcccgccgccgccaacgaacgacgctttgcctcattgctcagttccctatgaccagcacgcccaccgttaccaagtcgccgccggcgctcatcccgccggcgggacctaccccctgcggcacccttccgttctcctccattgacaagaccgtcgccggctccggctttgtgaaccttatgcaggtctttcccccgccctcgatctccgccgcccgcaaggaccagggcgccgtcgcggccgtggccgcaatgcgcaacgggttcgcgagggcgcttgtgccgtactatccggtggccggccgcatcgcctcgagcggcctcgcggtggactgcaccggggagggcatctggtttgtggaagccgccgcgagctgcacgctcgccgacgtggacggcctcgacagctgcccactgctgatcccaggagagctcctcctccctcgccctccccccggcgagaagctcagcgacctcatcctcatagcccaggcgacgaggttcacctgcggtggtttcgccgtcgggatccgcttcagccacgcggtgttcgacgggcatggggctgcgcagttccttacggcggtgggggagctagcgcgggggctcaaggcgccgtcagtggctccggtgtgggaccgcgacgcgatcccagaagctccaagcccgctgccggggcagctcacggagttcaggctggtgacccaggtggtcgacatctcggcggagagcatcgcgcgcgtgaaggacgagttcaagcaggctgccgcgacatcgacgggggaagtgtgctccacctttgacgcggtgacggccgtggtgttcaagtgccgcgcgctggcgctggcatcggcgctcccggacgagaccgaggtccggatggccttcgccgccagcacgcggcaccttctccgcggtgtgctgccgacggtggagggctactacggcaactgcgtattcctggcgtgcgccactaggacaggcaaggccgtccgggaggccacgctggcggaggtggtcggcgcggtacgggaggcgaaggaggcggttcccgctcggttcgcgggctggatgcgcggcgtcgagcagtacgacgtgccgccgctggactacagcacagtgacgttgtcggactggagccgtctcggcttcgacgaggtggactacggcttcggtgcgcccgggtacgttttcccgctcaacgaccacgtcaacttcgtcgcggcgctcaactacgtcaggccgccggcgcccaggcgtgggggcatccgggtggtgctccgctgcgtcgaggagcctcatgcggctgcgttcgccgtcgagctcgccaagttcgcctagatgcaacgcacgcgtgcttcccatttcttggccatgtccgtccattaatgtgagaccgcgcagttcagggaacacattttcacattttttttctctcggcagccaacacgttgtatctccattgtatggtcgtataataagagtaatactttatcttttcctatcggg

SEQ ID NO: 13799 - protein, 457 aa, Triticum aestivum
  peptide (1)..(457): Ceres Seq. ID no. 13662198
  misc_feature (33)..(456): Pfam Name: Pfam Description:  Transferase family
  misc_feature (24)..(457): NCBI GI NO: 34912652 NR Description: putative acetyl transferase
  misc_feature (35)..(457): NCBI GI NO: 34912654 NR Description: putative acetyl transferase
  misc_feature (29)..(449): NCBI GI NO: 34906150 NR Description: putative 0-deacetylbaccatin III-10-O-acetyltransferase
  misc_feature (30)..(449): NCBI GI NO: 34906304 NR Description: unnamed protein product
  misc_feature (34)..(449): NCBI GI NO: 15228696 NR Description: acyltransferase family [Arabidopsis thaliana]
  misc_feature (35)..(456): NCBI GI NO: 38346537 NR Description: OSJNBa0040D17.12
  misc_feature (35)..(454): NCBI GI NO: 38347149 NR Description: OSJNBa0039G19.9
  misc_feature (35)..(454): NCBI GI NO: 37530684 NR Description: putative O-deacetylbaccatin III-10-0-acetyltransferase
  misc_feature (35)..(451): NCBI GI NO: 28558088 NR Description: 3'-N-debenzoyl-2'-deoxytaxol N-benzoyltransferase
  misc_feature (35)..(454): NCBI GI NO: 37530688 NR Description: putative O-deacetylbaccatin III-10-0-acetyltransferase
NCLPAKIRKITPSRRRQRTTLCLIAQFPMTSTPTVTKSPPALIPPAGPTPCGTLPFSSIDKTVAGSGFVNLMQVFPPPSISAARKDQGAVAAVAAMRNGFARALVPYYPVAGRIASSGLAVDCTGEGIWFVEAAASCTLADVDGLDSCPLLIPGELLLPRPPPGEKLSDLILIAQATRFTCGGFAVGIRFSHAVFDGHGAAQFLTAVGELARGLKAPSVAPVWDRDAIPEAPSPLPGQLTEFRLVTQVVDISAESIARVKDEFKQAAATSTGEVCSTFDAVTAVVFKCRALALASALPDETEVRMAFAASTRHLLRGVLPTVEGYYGNCVFLACATRTGKAVREATLAEVVGAVREAKEAVPARFAGWMRGVEQYDVPPLDYSTVTLSDWSRLGFDEVDYGFGAPGYVFPLNDHVNFVAALNYVRPPAPRRGGIRVVLRCVEEPHAAAFAVELAKFA

SEQ ID NO: 13800 - protein, 429 aa, Triticum aestivum
  peptide (1)..(429): Ceres Seq. ID no. 13662199
  misc_feature (5)..(428): Pfam Name: Pfam Description:  Transferase family
  misc_feature (1)..(429): NCBI GI NO: 34912652 NR Description: putative acetyl transferase
  misc_feature (7)..(429): NCBI GI NO: 34912654 NR Description: putative acetyl transferase
  misc_feature (1)..(421): NCBI GI NO: 34906150 NR Description: putative 0-deacetylbaccatin III-10-O-acetyltransferase
  misc_feature (2)..(421): NCBI GI NO: 34906304 NR Description: unnamed protein product
  misc_feature (6)..(421): NCBI GI NO: 15228696 NR Description: acyltransferase family [Arabidopsis thaliana]
  misc_feature (7)..(428): NCBI GI NO: 38346537 NR Description: OSJNBa0040D17.12
  misc_feature (7)..(426): NCBI GI NO: 38347149 NR Description: OSJNBa0039G19.9
  misc_feature (7)..(426): NCBI GI NO: 37530684 NR Description: putative O-deacetylbaccatin III-10-0-acetyltransferase
  misc_feature (7)..(423): NCBI GI NO: 28558088 NR Description: 3'-N-debenzoyl-2'-deoxytaxol N-benzoyltransferase
  misc_feature (7)..(426): NCBI GI NO: 37530688 NR Description: putative O-deacetylbaccatin III-10-0-acetyltransferase
MTSTPTVTKSPPALIPPAGPTPCGTLPFSSIDKTVAGSGFVNLMQVFPPPSISAARKDQGAVAAVAAMRNGFARALVPYYPVAGRIASSGLAVDCTGEGIWFVEAAASCTLADVDGLDSCPLLIPGELLLPRPPPGEKLSDLILIAQATRFTCGGFAVGIRFSHAVFDGHGAAQFLTAVGELARGLKAPSVAPVWDRDAIPEAPSPLPGQLTEFRLVTQVVDISAESIARVKDEFKQAAATSTGEVCSTFDAVTAVVFKCRALALASALPDETEVRMAFAASTRHLLRGVLPTVEGYYGNCVFLACATRTGKAVREATLAEVVGAVREAKEAVPARFAGWMRGVEQYDVPPLDYSTVTLSDWSRLGFDEVDYGFGAPGYVFPLNDHVNFVAALNYVRPPAPRRGGIRVVLRCVEEPHAAAFAVELAKFA

SEQ ID NO: 13801 - protein, 386 aa, Triticum aestivum
  peptide (1)..(386): Ceres Seq. ID no. 13662200
  misc_feature (1)..(385): Pfam Name: Pfam Description:  Transferase family
  misc_feature (1)..(386): NCBI GI NO: 34912652 NR Description: putative acetyl transferase
  misc_feature (1)..(386): NCBI GI NO: 34912654 NR Description: putative acetyl transferase
  misc_feature (1)..(378): NCBI GI NO: 34906150 NR Description: putative 0-deacetylbaccatin III-10-O-acetyltransferase
  misc_feature (1)..(378): NCBI GI NO: 34906304 NR Description: unnamed protein product
  misc_feature (1)..(378): NCBI GI NO: 15228696 NR Description: acyltransferase family [Arabidopsis thaliana]
  misc_feature (1)..(385): NCBI GI NO: 38346537 NR Description: OSJNBa0040D17.12
  misc_feature (1)..(383): NCBI GI NO: 38347149 NR Description: OSJNBa0039G19.9
  misc_feature (1)..(383): NCBI GI NO: 37530684 NR Description: putative O-deacetylbaccatin III-10-0-acetyltransferase
  misc_feature (1)..(380): NCBI GI NO: 28558088 NR Description: 3'-N-debenzoyl-2'-deoxytaxol N-benzoyltransferase
  misc_feature (1)..(383): NCBI GI NO: 37530688 NR Description: putative O-deacetylbaccatin III-10-0-acetyltransferase
MQVFPPPSISAARKDQGAVAAVAAMRNGFARALVPYYPVAGRIASSGLAVDCTGEGIWFVEAAASCTLADVDGLDSCPLLIPGELLLPRPPPGEKLSDLILIAQATRFTCGGFAVGIRFSHAVFDGHGAAQFLTAVGELARGLKAPSVAPVWDRDAIPEAPSPLPGQLTEFRLVTQVVDISAESIARVKDEFKQAAATSTGEVCSTFDAVTAVVFKCRALALASALPDETEVRMAFAASTRHLLRGVLPTVEGYYGNCVFLACATRTGKAVREATLAEVVGAVREAKEAVPARFAGWMRGVEQYDVPPLDYSTVTLSDWSRLGFDEVDYGFGAPGYVFPLNDHVNFVAALNYVRPPAPRRGGIRVVLRCVEEPHAAAFAVELAKFA

SEQ ID NO: 13802 - DNA, 1245 bp, Triticum aestivum
  misc_feature (1)..(1245): Ceres Seq. ID no. 13597094
acgacatcctccacactcgactcaaccaagcagcaacgagacgcagagcaagcagcaacaagtagcttcgaccttcagcttctagcgcatggcggagatgggggtgcgtgacaacttgccctgctcgacttcatggagagagctcacacacaccagctggagggatgacgattacaggaggatggtgatggcgagcctgatcgaggcggtgtacctgctggagctggagaggcaggagcggagggacgcggcggaggtggcgcagcagtggtggaagcccttcagctaccgcctcgcgcacgagctggtggacgaacgcgacggctccgtcttcggcgccatcttcgagtgggaggaccgccacctgctcgaccgccgcggcgccagcgccgaggaaaggccgaccggcgcgcccagcgcggtgatcgcgttccggggcacgctgctgcgcgcgcccaccatccggcgggacgtggaggacgagctgcgcctgctggcgtgcaacagcctccgcggctccgccaggctccacggcgcgctgcaggcgctcagggccaccatcgacaggttcggctccgagaacgtgtgcctctgcggccactccctcggcgccggcttcgcgcgccaggtcggcaggatgctcatggcgtcgcgccagcagcagcagccgcagccgcagcagcagcagcagcaacagaaccccgccgcggcgctcgagttccacctcttcaacgcgccctacctgtcgctgcccacgggcgtgcggagggtggtgaggacggccgactgcctgctcaagacggtccgcaccggcgtcgccgccgtcggcaggtggcacggcaaggcgctcaagaacgtggcctacgccaactgcgtgctcggctacacgcgcctcgacagcgacggcaggaagttgttcgagtgagaagagaacatgctacgccaactgcaactgatctgccacacccatgactgacgccatgactcgcctgaagagagggagggatccagcgctgaaaacgtgcgactgtactgaaaatcccaaacacgcggcacgtatctcgatcatggaggccatgatcccgaacgaacgatctatctattatcagcttgtactactagtaggattcaatttgaaggagacaataagcatcctgcccggcccagggatgcacggcttaggtagctagcttagtctgcatgcttgctctctagtctgtacatgttaatcgcgtttccattgtc

SEQ ID NO: 13803 - protein, 278 aa, Triticum aestivum
  peptide (1)..(278): Ceres Seq. ID no. 13597095
  misc_feature (24)..(274): NCBI GI NO: 34901136 NR Description: contains EST AU161031
  misc_feature (1)..(185): NCBI GI NO: 34910916 NR Description: OSJNBb0063G05.3
  misc_feature (1)..(185): NCBI GI NO: 15241306 NR Description: hypothetical protein [Arabidopsis thaliana]
  misc_feature (9)..(185): NCBI GI NO: 34909578 NR Description: P0046E05.21
  misc_feature (112)..(185): NCBI GI NO: 34904536 NR Description: B1066G12.13
  misc_feature (15)..(69): NCBI GI NO: 34904536 NR Description: B1066G12.13
  misc_feature (19)..(185): NCBI GI NO: 18396010 NR Description: lipase (class 3) family [Arabidopsis thaliana]
  misc_feature (19)..(188): NCBI GI NO: 10177082 NR Description: gene_id:MOP9
  misc_feature (19)..(188): NCBI GI NO: 30689345 NR Description: expressed protein [Arabidopsis thaliana]
  misc_feature (19)..(185): NCBI GI NO: 18413406 NR Description: lipase (class 3) family [Arabidopsis thaliana]
MAEMGVRDNLPCSTSWRELTHTSWRDDDYRRMVMASLIEAVYLLELERQERRDAAEVAQQWWKPFSYRLAHELVDERDGSVFGAIFEWEDRHLLDRRGASAEERPTGAPSAVIAFRGTLLRAPTIRRDVEDELRLLACNSLRGSARLHGALQALRATIDRFGSENVCLCGHSLGAGFARQVGRMLMASRQQQQPQPQQQQQQQNPAAALEFHLFNAPYLSLPTGVRRVVRTADCLLKTVRTGVAAVGRWHGKALKNVAYANCVLGYTRLDSDGRKLFE

SEQ ID NO: 13804 - protein, 275 aa, Triticum aestivum
  peptide (1)..(275): Ceres Seq. ID no. 13597096
  misc_feature (21)..(271): NCBI GI NO: 34901136 NR Description: contains EST AU161031
  misc_feature (1)..(182): NCBI GI NO: 34910916 NR Description: OSJNBb0063G05.3
  misc_feature (1)..(182): NCBI GI NO: 15241306 NR Description: hypothetical protein [Arabidopsis thaliana]
  misc_feature (6)..(182): NCBI GI NO: 34909578 NR Description: P0046E05.21
  misc_feature (109)..(182): NCBI GI NO: 34904536 NR Description: B1066G12.13
  misc_feature (12)..(66): NCBI GI NO: 34904536 NR Description: B1066G12.13
  misc_feature (16)..(182): NCBI GI NO: 18396010 NR Description: lipase (class 3) family [Arabidopsis thaliana]
  misc_feature (16)..(185): NCBI GI NO: 10177082 NR Description: gene_id:MOP9
  misc_feature (16)..(185): NCBI GI NO: 30689345 NR Description: expressed protein [Arabidopsis thaliana]
  misc_feature (16)..(182): NCBI GI NO: 18413406 NR Description: lipase (class 3) family [Arabidopsis thaliana]
MGVRDNLPCSTSWRELTHTSWRDDDYRRMVMASLIEAVYLLELERQERRDAAEVAQQWWKPFSYRLAHELVDERDGSVFGAIFEWEDRHLLDRRGASAEERPTGAPSAVIAFRGTLLRAPTIRRDVEDELRLLACNSLRGSARLHGALQALRATIDRFGSENVCLCGHSLGAGFARQVGRMLMASRQQQQPQPQQQQQQQNPAAALEFHLFNAPYLSLPTGVRRVVRTADCLLKTVRTGVAAVGRWHGKALKNVAYANCVLGYTRLDSDGRKLFE

SEQ ID NO: 13805 - protein, 247 aa, Triticum aestivum
  peptide (1)..(247): Ceres Seq. ID no. 13597097
  misc_feature (1)..(243): NCBI GI NO: 34901136 NR Description: contains EST AU161031
  misc_feature (1)..(154): NCBI GI NO: 34910916 NR Description: OSJNBb0063G05.3
  misc_feature (1)..(154): NCBI GI NO: 15241306 NR Description: hypothetical protein [Arabidopsis thaliana]
  misc_feature (1)..(154): NCBI GI NO: 34909578 NR Description: P0046E05.21
  misc_feature (81)..(154): NCBI GI NO: 34904536 NR Description: B1066G12.13
  misc_feature (1)..(38): NCBI GI NO: 34904536 NR Description: B1066G12.13
  misc_feature (1)..(154): NCBI GI NO: 18396010 NR Description: lipase (class 3) family [Arabidopsis thaliana]
  misc_feature (1)..(157): NCBI GI NO: 10177082 NR Description: gene_id:MOP9
  misc_feature (1)..(157): NCBI GI NO: 30689345 NR Description: expressed protein [Arabidopsis thaliana]
  misc_feature (1)..(154): NCBI GI NO: 18413406 NR Description: lipase (class 3) family [Arabidopsis thaliana]
MVMASLIEAVYLLELERQERRDAAEVAQQWWKPFSYRLAHELVDERDGSVFGAIFEWEDRHLLDRRGASAEERPTGAPSAVIAFRGTLLRAPTIRRDVEDELRLLACNSLRGSARLHGALQALRATIDRFGSENVCLCGHSLGAGFARQVGRMLMASRQQQQPQPQQQQQQQNPAAALEFHLFNAPYLSLPTGVRRVVRTADCLLKTVRTGVAAVGRWHGKALKNVAYANCVLGYTRLDSDGRKLFE

SEQ ID NO: 13806 - DNA, 1135 bp, Triticum aestivum
  misc_feature (1)..(1135): Ceres Seq. ID no. 13597171
atttacctcgtcaggtcctcccaacaccataacttagcaggtaggttcgcttagacttcagccgaggtttcttcatcagccaagcccaagcccaatcggattagggaagcgtacttcgactccggccggagtgagggataggaaggaggagggggcttcagccgagacccaagggagaaagatctcacatcagataggcaactgcagcagtagagttcaacaagccgaaggggaaatggcaattggacagactatgccgaaggggtctctcgccaccagcttgagcttcccaagcagcggcagcacaaggatcctggggaggaagagggtcgctgtttctccggctccaagcccctcaggcccgcactccccggtgcggactctgcgcaagcagcgcagcattaggttccacatggatgacaccatctgccttcttgaatcgctgcctcaagatgtcttggttaaagtcctgtgcaaggtgaaccacagcgacctgaggcagctcctcctggtgtcgaagccagtcagcgaagcaacagtggttgctaaggagctgcatttcgccttcgcgacgccgtcgaaggcctccacggacggcgaggaggaagatgatggccccggggcgcccaagcaacacagggttgcacggtcgcgctgccggggcatgaatttggcaagtgtcgccgtcaatctgtcggagtcgttcagcagcttgatgtcagaggtgtaggtgtacataccacggcacgaattttcccgcttgtacttgtccatcggagcgctcttttttcttcataggccacgtcgaacagaaacactttagttagtgatatatgtagtgatcatcatatgtgttagtagtaagttatatatggtcattcttcaatgctgcgattgaagaggacacgctgctttatttctgtgtatgtaatagtataagttatatgtaagcgtcatgagtgttggagctcattagaagagtatttagtgtaagttatatgtaagcgtcatagtgttggaactcagaagagacgtctcttctcactttgtgtatgctgtagtgtacgatctctgtatactcgtgtgcatgggaagtttctcttattaataaaagtaaaatcagtttgtcttgggc

SEQ ID NO: 13807 - protein, 164 aa, Triticum aestivum
  peptide (1)..(164): Ceres Seq. ID no. 13597172
  misc_feature (1)..(164): NCBI GI NO: 34393368 NR Description: unknown protein
  misc_feature (1)..(153): NCBI GI NO: 7485710 NR Description: hypothetical protein F18E5
  misc_feature (1)..(153): NCBI GI NO: 18415709 NR Description: F-box protein family [Arabidopsis thaliana]
  misc_feature (10)..(153): NCBI GI NO: 15219910 NR Description: F-box protein family [Arabidopsis thaliana]
  misc_feature (10)..(153): NCBI GI NO: 28372904 NR Description: At1g61340 [Arabidopsis thaliana]
  misc_feature (24)..(116): NCBI GI NO: 18412772 NR Description: F-box protein family [Arabidopsis thaliana]
MAIGQTMPKGSLATSLSFPSSGSTRILGRKRVAVSPAPSPSGPHSPVRTLRKQRSIRFHMDDTICLLESLPQDVLVKVLCKVNHSDLRQLLLVSKPVSEATVVAKELHFAFATPSKASTDGEEEDDGPGAPKQHRVARSRCRGMNLASVAVNLSESFSSLMSEV

SEQ ID NO: 13808 - protein, 158 aa, Triticum aestivum
  peptide (1)..(158): Ceres Seq. ID no. 13597173
  misc_feature (1)..(158): NCBI GI NO: 34393368 NR Description: unknown protein
  misc_feature (1)..(147): NCBI GI NO: 7485710 NR Description: hypothetical protein F18E5
  misc_feature (1)..(147): NCBI GI NO: 18415709 NR Description: F-box protein family [Arabidopsis thaliana]
  misc_feature (4)..(147): NCBI GI NO: 15219910 NR Description: F-box protein family [Arabidopsis thaliana]
  misc_feature (4)..(147): NCBI GI NO: 28372904 NR Description: At1g61340 [Arabidopsis thaliana]
  misc_feature (18)..(110): NCBI GI NO: 18412772 NR Description: F-box protein family [Arabidopsis thaliana]
MPKGSLATSLSFPSSGSTRILGRKRVAVSPAPSPSGPHSPVRTLRKQRSIRFHMDDTICLLESLPQDVLVKVLCKVNHSDLRQLLLVSKPVSEATVVAKELHFAFATPSKASTDGEEEDDGPGAPKQHRVARSRCRGMNLASVAVNLSESFSSLMSEV

SEQ ID NO: 13809 - protein, 105 aa, Triticum aestivum
  peptide (1)..(105): Ceres Seq. ID no. 13597174
  misc_feature (1)..(105): NCBI GI NO: 34393368 NR Description: unknown protein
  misc_feature (1)..(94): NCBI GI NO: 7485710 NR Description: hypothetical protein F18E5
  misc_feature (1)..(94): NCBI GI NO: 18415709 NR Description: F-box protein family [Arabidopsis thaliana]
  misc_feature (1)..(94): NCBI GI NO: 15219910 NR Description: F-box protein family [Arabidopsis thaliana]
  misc_feature (1)..(94): NCBI GI NO: 28372904 NR Description: At1g61340 [Arabidopsis thaliana]
  misc_feature (1)..(57): NCBI GI NO: 18412772 NR Description: F-box protein family [Arabidopsis thaliana]
MDDTICLLESLPQDVLVKVLCKVNHSDLRQLLLVSKPVSEATVVAKELHFAFATPSKASTDGEEEDDGPGAPKQHRVARSRCRGMNLASVAVNLSESFSSLMSEV

SEQ ID NO: 13810 - DNA, 1357 bp, Triticum aestivum
  misc_feature (1)..(1357): Ceres Seq. ID no. 12616439
ccgttttagctgtagcaggagggagaaaattccggctccaccgtgtcccattcgcattcccccctcgccagcttccagaaaccccccgttcgttcgttcgtccgttccttccttcgattcgcaggcggttcgcgagcgatggcggacgccagcccgcaggcggagaggccgaggctgaggcgcctggagttcgtgcacgtggtggcggtgcaggcggccgtgtgcatcgcggcgctctacgcgctcgccagggaccactccggctcgctccgccccagagtcgacgccgtcgagtccgccgtcaggcgcgtcgccggccccgtcgcccgccgcttccacggcgtccccctccacgtcctcgccttcgtcgaccgcaaggtggacgacgcggtgcaggagctgggccggcacctcccgccggcggtgaagtccgcgtcggcgaaggcgtgccacgcggtccacgccgtgccggagctggccagggagattgccgacggggcgaggcggtccggcgtgaagggcgtggccaaggacgtgtacggcatggtccagccggtggccaagggcctctacgtgcgctgcgagccggtggccaaggacctctacgtgcgctacgagccggcggccgagcacctcgccgtctccgcctggcgctcgctcaacgggctgccggtgttcccgcaggtggcgcacatcgtcgtgcccaccgccgcctactggtgcgagaagtacaacagggtgatctcgttcgcggccgggcgtgggttccccggcgcacggttcctccccggcatccccatcgagcgcatcgccaaggcgttcgggccgagctcggcaggcgagcgctcgccggttgccaagccgacggaacctgatgcccagacttccaaggagcgctcggcggatgccaagccgacgggacttgatgcccagacttccgaggagcgctcaccggatgccaagcctatgggacttgatgcgcagaccgcggaggagagctcgtctgatgccaagcctgtgggacctgatgcgcagaccggggaggagagctcgccggatgccaagcctgtggaatctgacgcccatgccgccggggagagccagccggaggcggccaagactatggatcttggggcacaggcctaggtgtgcctctaatgataatgatgttgtactagctactatgcttttgtgtggtgcgcgtctctaatgttctccgtgcttttgtacaaaagttgcttgatgtcgccttcgtcgacttgatccaatgcaattgggttcgtccttctatggattcgcgagttcgtctctgtggactgtggccactagttaagcactgttttggttttggtgcgtc

SEQ ID NO: 13811 - protein, 335 aa, Triticum aestivum
  peptide (1)..(335): Ceres Seq. ID no. 12616440
  misc_feature (7)..(232): Pfam Name: REF Pfam Description: Rubber elongation factor protein
  misc_feature (1)..(247): NCBI GI NO: 22831130 NR Description: putative stress-related protein
  misc_feature (1)..(247): NCBI GI NO: 29367349 NR Description: stress-related protein-like protein
  misc_feature (9)..(233): NCBI GI NO: 15214303 NR Description: Stress-related protein
  misc_feature (9)..(239): NCBI GI NO: 15230002 NR Description: stress related protein, putative
  misc_feature (1)..(234): NCBI GI NO: 33332330 NR Description: rubber synthesis protein [Parthenium argentatum]
  misc_feature (65)..(233): NCBI GI NO: 37622210 NR Description: small rubber particle protein [Hevea brasiliensis]
  misc_feature (8)..(153): NCBI GI NO: 15214353 NR Description: Hypothetical protein from PAC P0001A07
  misc_feature (95)..(228): NCBI GI NO: 15214302 NR Description: Stress-related protein (PvSRP)
  misc_feature (95)..(245): NCBI GI NO: 15214353 NR Description: Hypothetical protein from PAC P0001A07
  misc_feature (143)..(225): NCBI GI NO: 15227131 NR Description: unknown protein; protein id: At2g47780.1
MADASPQAERPRLRRLEFVHVVAVQAAVCIAALYALARDHSGSLRPRVDAVESAVRRVAGPVARRFHGVPLHVLAFVDRKVDDAVQELGRHLPPAVKSASAKACHAVHAVPELAREIADGARRSGVKGVAKDVYGMVQPVAKGLYVRCEPVAKDLYVRYEPAAEHLAVSAWRSLNGLPVFPQVAHIVVPTAAYWCEKYNRVISFAAGRGFPGARFLPGIPIERIAKAFGPSSAGERSPVAKPTEPDAQTSKERSADAKPTGLDAQTSEERSPDAKPMGLDAQTAEESSSDAKPVGPDAQTGEESSPDAKPVESDAHAAGESQPEAAKTMDLGAQA

SEQ ID NO: 13812 - protein, 290 aa, Triticum aestivum
  peptide (1)..(290): Ceres Seq. ID no. 12616441
  misc_feature (60)..(231): Pfam Name: Pfam Description:  Herpesvirus UL87 family
  misc_feature (22)..(282): NCBI GI NO: 29247944 NR Description: GLP_26_54603_52153 [Giardia lamblia ATCC 50803]
  misc_feature (67)..(290): NCBI GI NO: 14422327 NR Description: putative DNA-binding protein
  misc_feature (4)..(288): NCBI GI NO: 23018055 NR Description: hypothetical protein [Thermobifida fusca]
  misc_feature (42)..(290): NCBI GI NO: 22959520 NR Description: hypothetical protein [Rhodobacter sphaeroides]
VLAVAGGRKFRLHRVPFAFPPRQLPETPRSFVRPFLPSIRRRFASDGGRQPAGGEAEAEAPGVRARGGGAGGRVHRGALRARQGPLRLAPPQSRRRRVRRQARRRPRRPPLPRRPPPRPRLRRPQGGRRGAGAGPAPPAGGEVRVGEGVPRGPRRAGAGQGDCRRGEAVRREGRGQGRVRHGPAGGQGPLRALRAGGQGPLRALRAGGRAPRRLRLALAQRAAGVPAGGAHRRAHRRLLVREVQQGDLVRGRAWVPRRTVPPRHPHRAHRQGVRAELGRRALAGCQADGT

SEQ ID NO: 13813 - protein, 200 aa, Triticum aestivum
  peptide (1)..(200): Ceres Seq. ID no. 12616442
  misc_feature (1)..(97): Pfam Name: REF Pfam Description: Rubber elongation factor protein
  misc_feature (1)..(112): NCBI GI NO: 22831130 NR Description: putative stress-related protein
  misc_feature (1)..(112): NCBI GI NO: 29367349 NR Description: stress-related protein-like protein
  misc_feature (1)..(98): NCBI GI NO: 15214303 NR Description: Stress-related protein
  misc_feature (1)..(104): NCBI GI NO: 15230002 NR Description: stress related protein, putative
  misc_feature (1)..(99): NCBI GI NO: 33332330 NR Description: rubber synthesis protein [Parthenium argentatum]
  misc_feature (1)..(98): NCBI GI NO: 37622210 NR Description: small rubber particle protein [Hevea brasiliensis]
  misc_feature (1)..(18): NCBI GI NO: 15214353 NR Description: Hypothetical protein from PAC P0001A07
  misc_feature (1)..(93): NCBI GI NO: 15214302 NR Description: Stress-related protein (PvSRP)
  misc_feature (1)..(110): NCBI GI NO: 15214353 NR Description: Hypothetical protein from PAC P0001A07
  misc_feature (8)..(90): NCBI GI NO: 15227131 NR Description: unknown protein; protein id: At2g47780.1
MVQPVAKGLYVRCEPVAKDLYVRYEPAAEHLAVSAWRSLNGLPVFPQVAHIVVPTAAYWCEKYNRVISFAAGRGFPGARFLPGIPIERIAKAFGPSSAGERSPVAKPTEPDAQTSKERSADAKPTGLDAQTSEERSPDAKPMGLDAQTAEESSSDAKPVGPDAQTGEESSPDAKPVESDAHAAGESQPEAAKTMDLGAQA

SEQ ID NO: 13814 - DNA, 1378 bp, Triticum aestivum
  misc_feature (1)..(1378): Ceres Seq. ID no. 13597361
aacacaataccatcatcgtccttcctctcatcccctctctctcccacagagacacatcactctctctctctcccatctccatctctgtcagaaggggaggccagagggggacggagaggggcaatggagctggacgagcaggccttcttggaggagctcttctcgctgaggagggacgccacggccgcgtgggagtgcaatgccatgggggacttcttctccccggcctgtgctggcgccgccgccatggactgcttccaggagcggcaccagcccaccgtcagcgtgctgcccaccttcaccgcctccttcgaccacccacagcagcaggcgggggtgaccgcggctggggggttcgactgcctcagcgaggtctacggcggcggccccttccccaatgccgtcggcggcgggtacggcgagatggggtttctcgccgcgatggaccccaaggcggcggcggcggcggctctggtggaggggggcggcctcggcgcctgcaaggtggagcccgggctggcggcggtggacggcggcgcgttcgggtcgggtcagatggcggccgtcccggcgccggcgtcgaggaagaagcgggtggagggcatgccgtccaagaacctgatggcggagcggcgccgccgcaagcgcctcaacgaccgcctctccatgctccgctccgtcgtgcccaagatcagcaagatggacaggacgtcgatcctgggggacaccatcgactacatgaaggagctgctggagaggatccggcggctgcaggaggagatggaggagccgcatgccggtccggcggcggcgccgctgctgagcgtgttccgggagctcaaccccaacgagatgctcgccaggaacacccccaagttcgaggtggagcgcaaggaggaggacacccgggtggagatctactgcgcggccaagccggggctgctgctgtcgacggtgagcacgctcgacacgctgggcctcgacatccagcagtgcgtcgtcagctgcttcaacgacttcgccatgcacgcctcctgctccgagatgcagagggagatgatcagcgcggacgccatcaagcaggagctgttcaagaacgccggctacggagggggctgcttgtgagcaagaagcaccaccaccagcaccaccatgagtccatgaccaccaccaccagcaggaggaggaaggataataaagtagaagtagctgtagcaggcagtagaattagcagttagcactagcaccagcagccagcagtagcgagaaggggccggaagatctgggcggaggccctttatcgcaaatcataaccatgtcgccgtgatcaaaattctctcctgttagcaacaaagatcggcgggcgcctttccgatgc

SEQ ID NO: 13815 - protein, 411 aa, Triticum aestivum
  peptide (1)..(411): Ceres Seq. ID no. 13597362
  misc_feature (136)..(329): NCBI GI NO: 72390 NR Description: circumsporozoite protein precursor
  misc_feature (136)..(329): NCBI GI NO: 117580 NR Description: Circumsporozoite protein precursor (CS)
  misc_feature (142)..(325): NCBI GI NO: 121632 NR Description: GLYCINE-RICH CELL WALL STRUCTURAL PROTEIN 1
  misc_feature (145)..(324): NCBI GI NO: 17540706 NR Description: Cuticle collagen family member (33.8 kD)
  misc_feature (142)..(319): NCBI GI NO: 121632 NR Description: GLYCINE-RICH CELL WALL STRUCTURAL PROTEIN 1
  misc_feature (152)..(305): NCBI GI NO: 17221667 NR Description: circumsporozoite protein
  misc_feature (126)..(304): NCBI GI NO: 2388805 NR Description: attachment region binding protein [Gallus gallus]
  misc_feature (148)..(319): NCBI GI NO: 121632 NR Description: GLYCINE-RICH CELL WALL STRUCTURAL PROTEIN 1
HNTIIVLPLIPSLSHRDTSLSLSPISISVRRGGQRGTERGNGAGRAGLLGGALLAEEGRHGRVGVQCHGGLLLPGLCWRRRHGLLPGAAPAHRQRAAHLHRLLRPPTAAGGGDRGWGVRLPQRGLRRRPLPQCRRRRVRRDGVSRRDGPQGGGGGGSGGGGRPRRLQGGARAGGGGRRRVRVGSDGGRPGAGVEEEAGGGHAVQEPDGGAAPPQAPQRPPLHAPLRRAQDQQDGQDVDPGGHHRLHEGAAGEDPAAAGGDGGAACRSGGGAAAERVPGAQPQRDARQEHPQVRGGAQGGGHPGGDLLRGQAGAAAVDGEHARHAGPRHPAVRRQLLQRLRHARLLLRDAEGDDQRGRHQAGAVQERRLRRGLLVSKKHHHQHHHESMTTTTSRRRKDNKVEVAVAGSRISS

SEQ ID NO: 13816 - protein, 374 aa, Triticum aestivum
  peptide (1)..(374): Ceres Seq. ID no. 13597363
  misc_feature (203)..(251): Pfam Name: Pfam Description:  Helix-loop-helix DNA-binding domain
  misc_feature (119)..(374): NCBI GI NO: 22758263 NR Description: Putative bHLH transcription protein
  misc_feature (42)..(65): NCBI GI NO: 22758263 NR Description: Putative bHLH transcription protein
  misc_feature (195)..(374): NCBI GI NO: 18424973 NR Description: bHLH protein [Arabidopsis thaliana]
  misc_feature (195)..(374): NCBI GI NO: 21537346 NR Description: unknown [Arabidopsis thaliana]
  misc_feature (197)..(374): NCBI GI NO: 15238199 NR Description: bHLH protein [Arabidopsis thaliana]
  misc_feature (197)..(374): NCBI GI NO: 20127062 NR Description: putative bHLH transcription factor
  misc_feature (120)..(346): NCBI GI NO: 37536566 NR Description: hypothetical protein
  misc_feature (194)..(371): NCBI GI NO: 25513489 NR Description: F13K23.12 protein - Arabidopsis thaliana
  misc_feature (194)..(371): NCBI GI NO: 15222101 NR Description: bHLH protein [Arabidopsis thaliana]
  misc_feature (183)..(282): NCBI GI NO: 22331357 NR Description: bHLH protein family [Arabidopsis thaliana]
NTIPSSSFLSSPLSPTETHHSLSLPSPSLSEGEARGGRRGAMELDEQAFLEELFSLRRDATAAWECNAMGDFFSPACAGAAAMDCFQERHQPTVSVLPTFTASFDHPQQQAGVTAAGGFDCLSEVYGGGPFPNAVGGGYGEMGFLAAMDPKAAAAAALVEGGGLGACKVEPGLAAVDGGAFGSGQMAAVPAPASRKKRVEGMPSKNLMAERRRRKRLNDRLSMLRSVVPKISKMDRTSILGDTIDYMKELLERIRRLQEEMEEPHAGPAAAPLLSVFRELNPNEMLARNTPKFEVERKEEDTRVEIYCAAKPGLLLSTVSTLDTLGLDIQQCVVSCFNDFAMHASCSEMQREMISADAIKQELFKNAGYGGGCL

SEQ ID NO: 13817 - protein, 333 aa, Triticum aestivum
  peptide (1)..(333): Ceres Seq. ID no. 13597364
  misc_feature (162)..(210): Pfam Name: Pfam Description:  Helix-loop-helix DNA-binding domain
  misc_feature (78)..(333): NCBI GI NO: 22758263 NR Description: Putative bHLH transcription protein
  misc_feature (1)..(24): NCBI GI NO: 22758263 NR Description: Putative bHLH transcription protein
  misc_feature (154)..(333): NCBI GI NO: 18424973 NR Description: bHLH protein [Arabidopsis thaliana]
  misc_feature (154)..(333): NCBI GI NO: 21537346 NR Description: unknown [Arabidopsis thaliana]
  misc_feature (156)..(333): NCBI GI NO: 15238199 NR Description: bHLH protein [Arabidopsis thaliana]
  misc_feature (156)..(333): NCBI GI NO: 20127062 NR Description: putative bHLH transcription factor
  misc_feature (79)..(305): NCBI GI NO: 37536566 NR Description: hypothetical protein
  misc_feature (153)..(330): NCBI GI NO: 25513489 NR Description: F13K23.12 protein - Arabidopsis thaliana
  misc_feature (153)..(330): NCBI GI NO: 15222101 NR Description: bHLH protein [Arabidopsis thaliana]
  misc_feature (142)..(241): NCBI GI NO: 22331357 NR Description: bHLH protein family [Arabidopsis thaliana]
MELDEQAFLEELFSLRRDATAAWECNAMGDFFSPACAGAAAMDCFQERHQPTVSVLPTFTASFDHPQQQAGVTAAGGFDCLSEVYGGGPFPNAVGGGYGEMGFLAAMDPKAAAAAALVEGGGLGACKVEPGLAAVDGGAFGSGQMAAVPAPASRKKRVEGMPSKNLMAERRRRKRLNDRLSMLRSVVPKISKMDRTSILGDTIDYMKELLERIRRLQEEMEEPHAGPAAAPLLSVFRELNPNEMLARNTPKFEVERKEEDTRVEIYCAAKPGLLLSTVSTLDTLGLDIQQCVVSCFNDFAMHASCSEMQREMISADAIKQELFKNAGYGGGCL

SEQ ID NO: 13818 - DNA, 1343 bp, Triticum aestivum
  misc_feature (1)..(1343): Ceres Seq. ID no. 12625452
aaaaaaagagagagagaaagccaaggcaagccgcggcgagcagaagcggtgggcgcgcgacggcggcggcggttggccctctcgagtcatggtgctacccgccaacctctcgcgcgacgtcggagctcactcgtgctctgcgcaggacggccagggggaagcggggccgccgcgcccgcgcagaccgcccgcgttctacagctccgtgttcgcacagatcgaagaggtcgggtgggggcagctagtgagcgccacaggcgatgacggcgtgtcgtgcctcaccttccgcgtcgtggatgagcagcgacggcaacattcactggagatcacactgcccatgaactacccggcatgccctccttcaattgccgcggatgttccttatctccccaaattacagtggtcaaaaagttcaagactgaaggatgttctctgccaattccaagagcacctgaaggtattgcaagattactggtctacaatggatggcattgacaaggccctttgggttgtcgatactacaaagccgacatatgctatgtctcatcgtcgcatagctttgggtgatgattgctatattttactacatgttgatacgcacaagcccaactccttaccagagtgccgcttcctaggcacagatgggaaactggaaaggctgataaagaattggagaaaaaatcgtaagagatggagcgcccacagaaagttccatgaaaacctggcaactgtgttagattttgctctgccgcaacccccttctgtgagcatcaaagatgaccagcaagctgattgtgggatatgttacgccacgcatctgcccgtcgatgacgaacttgggactcagagcgggtgcgcggcggactacaagtgcgaaaaccctagctgcagcagagccttccactccgtgtgcctgagagactggctgcgcaccattactacgacaaggcagtcgttcgatgttctgttcgggaactgcccttactgcagtgagcctgtcgccgtgaagggcaccgacagctgaacccgccttcttcgcatttacaaatcgagatgctgaagttgggttaatgcggaccagtaaaaaggaagagggacgaaataatctaggtcgcctgctgaaggccggtcgtcatgatctagatgtcatcaatggagctgcaaggggtcaaaattcccaattgtttctacgaaattggcgtccacttgtagagatgaaagaagtgtgccagcctaattactgaaaattgatgtctgtcacgcacccttctagattcgggacgaatgcgtagttgctgactggtatacataacagtggtttggatctctgaatgtcaatgcgc

SEQ ID NO: 13819 - protein, 340 aa, Triticum aestivum
  peptide (1)..(340): Ceres Seq. ID no. 12625453
  misc_feature (132)..(336): NCBI GI NO: 30698155 NR Description: expressed protein [Arabidopsis thaliana]
  misc_feature (132)..(336): NCBI GI NO: 39104597 NR Description: unknown protein [Arabidopsis thaliana]
  misc_feature (62)..(336): NCBI GI NO: 33416848 NR Description: Unknown (protein for MGC:66144) [Danio rerio]
  misc_feature (62)..(336): NCBI GI NO: 8922360 NR Description: hypothetical protein FLJ10335 [Homo sapiens]
  misc_feature (61)..(336): NCBI GI NO: 13385416 NR Description: proliferation of germ cells protein [Mus musculus]
  misc_feature (61)..(340): NCBI GI NO: 34879602 NR Description: similar to PHD finger protein 9
  misc_feature (61)..(336): NCBI GI NO: 12848314 NR Description: unnamed protein product [Mus musculus]
  misc_feature (232)..(336): NCBI GI NO: 10177332 NR Description: gene_id:MPA24.9~unknown protein
  misc_feature (175)..(207): NCBI GI NO: 10177332 NR Description: gene_id:MPA24.9~unknown protein
  misc_feature (87)..(329): NCBI GI NO: 24645585 NR Description: CG12812-PA [Drosophila melanogaster]
KKEREKAKASRGEQKRWARDGGGGWPSRVMVLPANLSRDVGAHSCSAQDGQGEAGPPRPRRPPAFYSSVFAQIEEVGWGQLVSATGDDGVSCLTFRVVDEQRRQHSLEITLPMNYPACPPSIAADVPYLPKLQWSKSSRLKDVLCQFQEHLKVLQDYWSTMDGIDKALWVVDTTKPTYAMSHRRIALGDDCYILLHVDTHKPNSLPECRFLGTDGKLERLIKNWRKNRKRWSAHRKFHENLATVLDFALPQPPSVSIKDDQQADCGICYATHLPVDDELGTQSGCAADYKCENPSCSRAFHSVCLRDWLRTITTTRQSFDVLFGNCPYCSEPVAVKGTDS

SEQ ID NO: 13820 - protein, 311 aa, Triticum aestivum
  peptide (1)..(311): Ceres Seq. ID no. 12625454
  misc_feature (103)..(307): NCBI GI NO: 30698155 NR Description: expressed protein [Arabidopsis thaliana]
  misc_feature (103)..(307): NCBI GI NO: 39104597 NR Description: unknown protein [Arabidopsis thaliana]
  misc_feature (33)..(307): NCBI GI NO: 33416848 NR Description: Unknown (protein for MGC:66144) [Danio rerio]
  misc_feature (33)..(307): NCBI GI NO: 8922360 NR Description: hypothetical protein FLJ10335 [Homo sapiens]
  misc_feature (32)..(307): NCBI GI NO: 13385416 NR Description: proliferation of germ cells protein [Mus musculus]
  misc_feature (32)..(311): NCBI GI NO: 34879602 NR Description: similar to PHD finger protein 9
  misc_feature (32)..(307): NCBI GI NO: 12848314 NR Description: unnamed protein product [Mus musculus]
  misc_feature (203)..(307): NCBI GI NO: 10177332 NR Description: gene_id:MPA24.9~unknown protein
  misc_feature (146)..(178): NCBI GI NO: 10177332 NR Description: gene_id:MPA24.9~unknown protein
  misc_feature (58)..(300): NCBI GI NO: 24645585 NR Description: CG12812-PA [Drosophila melanogaster]
MVLPANLSRDVGAHSCSAQDGQGEAGPPRPRRPPAFYSSVFAQIEEVGWGQLVSATGDDGVSCLTFRVVDEQRRQHSLEITLPMNYPACPPSIAADVPYLPKLQWSKSSRLKDVLCQFQEHLKVLQDYWSTMDGIDKALWVVDTTKPTYAMSHRRIALGDDCYILLHVDTHKPNSLPECRFLGTDGKLERLIKNWRKNRKRWSAHRKFHENLATVLDFALPQPPSVSIKDDQQADCGICYATHLPVDDELGTQSGCAADYKCENPSCSRAFHSVCLRDWLRTITTTRQSFDVLFGNCPYCSEPVAVKGTDS

SEQ ID NO: 13821 - protein, 228 aa, Triticum aestivum
  peptide (1)..(228): Ceres Seq. ID no. 12625455
  misc_feature (20)..(224): NCBI GI NO: 30698155 NR Description: expressed protein [Arabidopsis thaliana]
  misc_feature (20)..(224): NCBI GI NO: 39104597 NR Description: unknown protein [Arabidopsis thaliana]
  misc_feature (1)..(224): NCBI GI NO: 33416848 NR Description: Unknown (protein for MGC:66144) [Danio rerio]
  misc_feature (1)..(224): NCBI GI NO: 8922360 NR Description: hypothetical protein FLJ10335 [Homo sapiens]
  misc_feature (1)..(224): NCBI GI NO: 13385416 NR Description: proliferation of germ cells protein [Mus musculus]
  misc_feature (1)..(228): NCBI GI NO: 34879602 NR Description: similar to PHD finger protein 9
  misc_feature (1)..(224): NCBI GI NO: 12848314 NR Description: unnamed protein product [Mus musculus]
  misc_feature (120)..(224): NCBI GI NO: 10177332 NR Description: gene_id:MPA24.9~unknown protein
  misc_feature (63)..(95): NCBI GI NO: 10177332 NR Description: gene_id:MPA24.9~unknown protein
  misc_feature (1)..(217): NCBI GI NO: 24645585 NR Description: CG12812-PA [Drosophila melanogaster]
MNYPACPPSIAADVPYLPKLQWSKSSRLKDVLCQFQEHLKVLQDYWSTMDGIDKALWVVDTTKPTYAMSHRRIALGDDCYILLHVDTHKPNSLPECRFLGTDGKLERLIKNWRKNRKRWSAHRKFHENLATVLDFALPQPPSVSIKDDQQADCGICYATHLPVDDELGTQSGCAADYKCENPSCSRAFHSVCLRDWLRTITTTRQSFDVLFGNCPYCSEPVAVKGTDS

SEQ ID NO: 13822 - DNA, 681 bp, Triticum aestivum
  misc_feature (1)..(681): Ceres Seq. ID no. 13655489
  misc_feature (622)..(622): n is a, c, t, g, unknown, or other
  misc_feature (623)..(623): n is a, c, t, g, unknown, or other
atctctgtccatacggagtgtcgggctttgaatagtgcaaactttttgtgctcacacactattctagatagacaacctccatggctgctgctcctgctactcaacctcgtgtcatggtgttacccttccctgcacagggccatgtcatcccgctaatggagctgtctcgcaagctcgccgggcacggcgtcgaggtggacttcgtgaacaccgagttcaaccacgacctcgtcatggaagcaatggcagagaagggagcaattcctgatgggatccacatgctcaccgttccggacggcctgggccccggagacgaccacgcggacatcggcaagtttgtcaaggacctgcccgccgccatgtccggccgcctggaggagatgatccggtcgaggaagatcaagtgggtgatcgtggatgtgtccatgagctgggcactgcaggtggccaccacggcgggtgcccgtgttgcctcgttctcgacctactccgcggccgtgtttgctctcaggatgaacctccccaaattgatacaggacggtgttcttgatgaaagtggggatgtgaaggggcaggagcagatcaagatgatgccgcccatcgacgcgtcggagatcccctnngtcagcctggccagcaccagcgcccctgagaggcgcagaaacaatatcgagaacgtcc

SEQ ID NO: 13823 - protein, 200 aa, Triticum aestivum
  peptide (1)..(200): Ceres Seq. ID no. 13655490
  misc_feature (9)..(199): Pfam Name: Pfam Description:  UDP-glucoronosyl and UDP-glucosyl transferase
  misc_feature (4)..(199): NCBI GI NO: 13236650 NR Description: putative glucosyltransferase [Oryza sativa]
  misc_feature (1)..(199): NCBI GI NO: 21326128 NR Description: putative glucosyl transferase [Sorghum bicolor]
  misc_feature (1)..(199): NCBI GI NO: 13236653 NR Description: putative glucosyltransferase [Oryza sativa]
  misc_feature (5)..(186): NCBI GI NO: 21326127 NR Description: putative glucosyl transferase [Sorghum bicolor]
  misc_feature (1)..(199): NCBI GI NO: 21326126 NR Description: putative glucosyl transferase [Sorghum bicolor]
  misc_feature (9)..(180): NCBI GI NO: 21326124 NR Description: putative glucosyl transferase [Sorghum bicolor]
  misc_feature (9)..(178): NCBI GI NO: 21326125 NR Description: putative glucosyl transferase [Sorghum bicolor]
  misc_feature (8)..(178): NCBI GI NO: 13236658 NR Description: putative glucosyltransferase [Oryza sativa]
  misc_feature (11)..(177): NCBI GI NO: 13236656 NR Description: putative glucosyltransferase [Oryza sativa]
  misc_feature (11)..(177): NCBI GI NO: 13236659 NR Description: putative glucosyltransferase [Oryza sativa]
  misc_feature (181)..(181): Xaa is any aa, unknown or other
MAAAPATQPRVMVLPFPAQGHVIPLMELSRKLAGHGVEVDFVNTEFNHDLVMEAMAEKGAIPDGIHMLTVPDGLGPGDDHADIGKFVKDLPAAMSGRLEEMIRSRKIKWVIVDVSMSWALQVATTAGARVASFSTYSAAVFALRMNLPKLIQDGVLDESGDVKGQEQIKMMPPIDASEIPXVSLASTSAPERRRNNIENV

SEQ ID NO: 13824 - protein, 189 aa, Triticum aestivum
  peptide (1)..(189): Ceres Seq. ID no. 13655491
  misc_feature (1)..(188): Pfam Name: Pfam Description:  UDP-glucoronosyl and UDP-glucosyl transferase
  misc_feature (1)..(188): NCBI GI NO: 13236650 NR Description: putative glucosyltransferase [Oryza sativa]
  misc_feature (1)..(188): NCBI GI NO: 21326128 NR Description: putative glucosyl transferase [Sorghum bicolor]
  misc_feature (1)..(188): NCBI GI NO: 13236653 NR Description: putative glucosyltransferase [Oryza sativa]
  misc_feature (1)..(175): NCBI GI NO: 21326127 NR Description: putative glucosyl transferase [Sorghum bicolor]
  misc_feature (1)..(188): NCBI GI NO: 21326126 NR Description: putative glucosyl transferase [Sorghum bicolor]
  misc_feature (1)..(169): NCBI GI NO: 21326124 NR Description: putative glucosyl transferase [Sorghum bicolor]
  misc_feature (1)..(167): NCBI GI NO: 21326125 NR Description: putative glucosyl transferase [Sorghum bicolor]
  misc_feature (1)..(167): NCBI GI NO: 13236658 NR Description: putative glucosyltransferase [Oryza sativa]
  misc_feature (1)..(166): NCBI GI NO: 13236656 NR Description: putative glucosyltransferase [Oryza sativa]
  misc_feature (1)..(166): NCBI GI NO: 13236659 NR Description: putative glucosyltransferase [Oryza sativa]
  misc_feature (170)..(170): Xaa is any aa, unknown or other
MVLPFPAQGHVIPLMELSRKLAGHGVEVDFVNTEFNHDLVMEAMAEKGAIPDGIHMLTVPDGLGPGDDHADIGKFVKDLPAAMSGRLEEMIRSRKIKWVIVDVSMSWALQVATTAGARVASFSTYSAAVFALRMNLPKLIQDGVLDESGDVKGQEQIKMMPPIDASEIPXVSLASTSAPERRRNNIENV

SEQ ID NO: 13825 - protein, 175 aa, Triticum aestivum
  peptide (1)..(175): Ceres Seq. ID no. 13655492
  misc_feature (1)..(174): Pfam Name: Pfam Description:  UDP-glucoronosyl and UDP-glucosyl transferase
  misc_feature (1)..(174): NCBI GI NO: 13236650 NR Description: putative glucosyltransferase [Oryza sativa]
  misc_feature (1)..(174): NCBI GI NO: 21326128 NR Description: putative glucosyl transferase [Sorghum bicolor]
  misc_feature (1)..(174): NCBI GI NO: 13236653 NR Description: putative glucosyltransferase [Oryza sativa]
  misc_feature (1)..(161): NCBI GI NO: 21326127 NR Description: putative glucosyl transferase [Sorghum bicolor]
  misc_feature (1)..(174): NCBI GI NO: 21326126 NR Description: putative glucosyl transferase [Sorghum bicolor]
  misc_feature (1)..(155): NCBI GI NO: 21326124 NR Description: putative glucosyl transferase [Sorghum bicolor]
  misc_feature (1)..(153): NCBI GI NO: 21326125 NR Description: putative glucosyl transferase [Sorghum bicolor]
  misc_feature (1)..(153): NCBI GI NO: 13236658 NR Description: putative glucosyltransferase [Oryza sativa]
  misc_feature (1)..(152): NCBI GI NO: 13236656 NR Description: putative glucosyltransferase [Oryza sativa]
  misc_feature (1)..(152): NCBI GI NO: 13236659 NR Description: putative glucosyltransferase [Oryza sativa]
  misc_feature (156)..(156): Xaa is any aa, unknown or other
MELSRKLAGHGVEVDFVNTEFNHDLVMEAMAEKGAIPDGIHMLTVPDGLGPGDDHADIGKFVKDLPAAMSGRLEEMIRSRKIKWVIVDVSMSWALQVATTAGARVASFSTYSAAVFALRMNLPKLIQDGVLDESGDVKGQEQIKMMPPIDASEIPXVSLASTSAPERRRNNIENV

SEQ ID NO: 13826 - DNA, 1277 bp, Triticum aestivum
  misc_feature (1)..(1277): Ceres Seq. ID no. 15224731
aaggacacgacgaccaaccaagggagaagagaagagaagagaagagaagggagagggcggcgacgagggcgcacgacggcacgccgaacgctctcgcaatgcatcacgccaagaccgactcggaggtgacgtcgagcatggcgccgtcgtcgccttcgcgggcgccctactacgtgcagtcgcccagccacgacgacggcgagaaccactccaagacggccgcctcctccttccactcctccccggccgcctccccgccgcgctcgctcgggaaccactccagggagtcctcctcctcgcgcttctccggcaaggtcccctccgccggctcgtcccgccgcggggtcgccggcggaggcgggaagcgcggcgggggtggcggcggcggcgaggcggcgcgccgcagcccctggatgaaggaggcggccatcgaggaggaggggctcctcatggaggacgacgacgacgccgacggccgcgccggcggcttctcggcgctccccaagaaggtgcgctacgggctggccttcgtcggcgccttcctcgtgctcttcaccttcttcgccctcatcctctggggcgccagccgcaaccagaagcccgttctctccgtcaacagcgtcacgttccacagcttcgtgatccaggcggggacggacgcgtcgctggtgcccacggagatgtccacgatcaacgccacggtgaggctcacgttccgcaacacggggagcttcttcggcgtgcacgtcacggcgcagcccgtcacgctctactactcgcagctcctcatggcatccggcgacatgaagtacttctaccagcctcggaagagccagcgcaaggtggcggtgacggtggtgggcaacaaggtgccgctgtacggcggcggcgcggggctgagcagcacgccggggcccaagggcgtgcccccgccgccggtgccgctgcagctgacgctgaggatcagggcgcgggcgctggtgctgggcaagctggtgaagcccaggttctacaacaacgtgcagtgcagcgtccgcctggacacgaccaagctgggcaaggccatctccctcaagaaatcatgcacccacgtctagccaccctgccagacctttcttcttgttgttgctgcatatgttatgtccgtaatgtaatactcctacgtggattactgccattttgaagggagaaagcatcatgtctgttgtgtatgtacggatgaattttgtcgcctgcgtcgggatggaatgaatgaatgatcacgcgtttcttgccac

SEQ ID NO: 13827 - protein, 393 aa, Triticum aestivum
  peptide (1)..(393): Ceres Seq. ID no. 15224732
  misc_feature (197)..(366): Pfam Name: Pfam Description:  Phosphate transporter family
RTRRPTKGEEKRREEKGEGGDEGARRHAERSRNASRQDRLGGDVEHGAVVAFAGALLRAVAQPRRRREPLQDGRLLLPLLPGRLPAALAREPLQGVLLLALLRQGPLRRLVPPRGRRRRREARRGWRRRRGGAPQPLDEGGGHRGGGAPHGGRRRRRRPRRRLLGAPQEGALRAGLRRRLPRALHLLRPHPLGRQPQPEARSLRQQRHVPQLRDPGGDGRVAGAHGDVHDQRHGEAHVPQHGELLRRARHGAARHALLLAAPHGIRRHEVLLPASEEPAQGGGDGGGQQGAAVRRRRGAEQHAGAQGRAPAAGAAAADAEDQGAGAGAGQAGEAQVLQQRAVQRPPGHDQAGQGHLPQEIMHPRLATLPDLSSCCCCICYVRNVILLRGLLPF

SEQ ID NO: 13828 - protein, 364 aa, Triticum aestivum
  peptide (1)..(364): Ceres Seq. ID no. 15224733
  misc_feature (33)..(364): NCBI GI NO: 32488073 NR Description: OSJNBa0084A10.1
  misc_feature (35)..(315): NCBI GI NO: 18401556 NR Description: expressed protein [Arabidopsis thaliana]
  misc_feature (303)..(362): NCBI GI NO: 18401556 NR Description: expressed protein [Arabidopsis thaliana]
  misc_feature (35)..(364): NCBI GI NO: 5777621 NR Description: CAA30379.1 protein [Oryza sativa]
  misc_feature (35)..(364): NCBI GI NO: 38345517 NR Description: OSJNBa0039K24.20
  misc_feature (69)..(311): NCBI GI NO: 15239097 NR Description: expressed protein [Arabidopsis thaliana]
  misc_feature (309)..(362): NCBI GI NO: 15239097 NR Description: expressed protein [Arabidopsis thaliana]
  misc_feature (69)..(311): NCBI GI NO: 28416677 NR Description: At5g42860 [Arabidopsis thaliana]
  misc_feature (309)..(362): NCBI GI NO: 28416677 NR Description: At5g42860 [Arabidopsis thaliana]
  misc_feature (44)..(363): NCBI GI NO: 34904260 NR Description: P0452F10.18
GHDDQPREKRREEKRRERAATRAHDGTPNALAMHHAKTDSEVTSSMAPSSPSRAPYYVQSPSHDDGENHSKTAASSFHSSPAASPPRSLGNHSRESSSSRFSGKVPSAGSSRRGVAGGGGKRGGGGGGGEAARRSPWMKEAAIEEEGLLMEDDDDADGRAGGFSALPKKVRYGLAFVGAFLVLFTFFALILWGASRNQKPVLSVNSVTFHSFVIQAGTDASLVPTEMSTINATVRLTFRNTGSFFGVHVTAQPVTLYYSQLLMASGDMKYFYQPRKSQRKVAVTVVGNKVPLYGGGAGLSSTPGPKGVPPPPVPLQLTLRIRARALVLGKLVKPRFYNNVQCSVRLDTTKLGKAISLKKSCTHV

SEQ ID NO: 13829 - protein, 332 aa, Triticum aestivum
  peptide (1)..(332): Ceres Seq. ID no. 15224734
  misc_feature (1)..(332): NCBI GI NO: 32488073 NR Description: OSJNBa0084A10.1
  misc_feature (3)..(283): NCBI GI NO: 18401556 NR Description: expressed protein [Arabidopsis thaliana]
  misc_feature (271)..(330): NCBI GI NO: 18401556 NR Description: expressed protein [Arabidopsis thaliana]
  misc_feature (3)..(332): NCBI GI NO: 5777621 NR Description: CAA30379.1 protein [Oryza sativa]
  misc_feature (3)..(332): NCBI GI NO: 38345517 NR Description: OSJNBa0039K24.20
  misc_feature (37)..(279): NCBI GI NO: 15239097 NR Description: expressed protein [Arabidopsis thaliana]
  misc_feature (277)..(330): NCBI GI NO: 15239097 NR Description: expressed protein [Arabidopsis thaliana]
  misc_feature (37)..(279): NCBI GI NO: 28416677 NR Description: At5g42860 [Arabidopsis thaliana]
  misc_feature (277)..(330): NCBI GI NO: 28416677 NR Description: At5g42860 [Arabidopsis thaliana]
  misc_feature (12)..(331): NCBI GI NO: 34904260 NR Description: P0452F10.18
MHHAKTDSEVTSSMAPSSPSRAPYYVQSPSHDDGENHSKTAASSFHSSPAASPPRSLGNHSRESSSSRFSGKVPSAGSSRRGVAGGGGKRGGGGGGGEAARRSPWMKEAAIEEEGLLMEDDDDADGRAGGFSALPKKVRYGLAFVGAFLVLFTFFALILWGASRNQKPVLSVNSVTFHSFVIQAGTDASLVPTEMSTINATVRLTFRNTGSFFGVHVTAQPVTLYYSQLLMASGDMKYFYQPRKSQRKVAVTVVGNKVPLYGGGAGLSSTPGPKGVPPPPVPLQLTLRIRARALVLGKLVKPRFYNNVQCSVRLDTTKLGKAISLKKSCTHV

SEQ ID NO: 13830 - DNA, 1227 bp, Triticum aestivum
  misc_feature (1)..(1227): Ceres Seq. ID no. 13597182
agaacatcctaatcgaaaagcctacaccaaaacttcccttgtcatcgcagatcacgagctagctatctgagcgcaggaaatagctaaacacaccagctcgctcgtaagcacactcccacgccgaccggcaagatggtgaagcctgtgcaggacgaggagaaccagaggctgctcctcgacgaccacaaggagaagcacttcacctccggcgaggtggtccgggacatcatcatcggcgtctctgacggcctcaccgtgcccttcgccctagccgccggcctgtcgggcgccaacgcgtcctcctcgctcgtgctcaccgccgggctcgccgaggtcgccgccggcgccatctccatggggctcggagggtacctcgccgctaagagcgacgccgaccactactaccgggagctgcagcgcgagcaggacgagatcgacaccgtcccggacacagaggccgcggagatcgcggacatactctctgagtacgggctgggccccgaggagtacgggccggtcgtcacctccctccgcaacaacccaaaggcctggctcgagttcatgatgaagttcgagctggggctggagaagccggacccgcggcgcgcgctgacgagcgcggcgacgatcgcgctggcctacgtcgtcggcggcatggtgccgctctccccctacatgttcctggcgtcggtcgacagcgccatgatgacctccgtcgtggtcaccctcgccgcgctgctcttcttcggctacgtcaagggccgcttcaccgggaaccgcccgttcctcagcgccatccagactgccatcatcggcgcgcttgcctcctccgccgcctacggcatggccaaggccgtgcaggccatctgatcgagctcgagccacgccgcgcccgggggacggctaagtaccaagaaaaataagtacagcaagctacctacctgtgtatgtatgatcaagtgttgccatagtggagtggtagctgtacgtgcagactctagcgtccgatctggtaagtgtactggtggcccaagtgtgctgatgtgcaccgttcgttttgttttctgtttcgttttcgagctcgatgatgatgtacactatgttagtagtgtatatgtttgggtgtatttggtttttcttctgtcgcgttaggtaagtatactatttgtaagggaagttgcgttatttaggtgatgtggtaatctgatgggctttgagtcagctgcc

SEQ ID NO: 13831 - protein, 245 aa, Triticum aestivum
  peptide (1)..(245): Ceres Seq. ID no. 13597183
  misc_feature (18)..(243): NCBI GI NO: 38567721 NR Description: B1358B12.19
  misc_feature (8)..(243): NCBI GI NO: 15226346 NR Description: membrane protein -related [Arabidopsis thaliana]
  misc_feature (28)..(242): NCBI GI NO: 40740699 NR Description: hypothetical protein AN3681.2
  misc_feature (28)..(240): NCBI GI NO: 6323249 NR Description: Functions in the homeostasis of both calcium and manganese ions
  misc_feature (19)..(245): NCBI GI NO: 40741878 NR Description: hypothetical protein AN4990.2
  misc_feature (29)..(242): NCBI GI NO: 15599046 NR Description: hypothetical protein [Pseudomonas aeruginosa PA01]
  misc_feature (14)..(238): NCBI GI NO: 25029211 NR Description: putative nodulin 21-related protein
  misc_feature (15)..(236): NCBI GI NO: 23508922 NR Description: hypothetical protein, conserved
  misc_feature (14)..(238): NCBI GI NO: 19554141 NR Description: uncharacterized membrane protein
  misc_feature (9)..(244): NCBI GI NO: 29832730 NR Description: putative membrane protein
MVKPVQDEENQRLLLDDHKEKHFTSGEVVRDIIIGVSDGLTVPFALAAGLSGANASSSLVLTAGLAEVAAGAISMGLGGYLAAKSDADHYYRELQREQDEIDTVPDTEAAEIADILSEYGLGPEEYGPVVTSLRNNPKAWLEFMMKFELGLEKPDPRRALTSAATIALAYVVGGMVPLSPYMFLASVDSAMMTSVVVTLAALLFFGYVKGRFTGNRPFLSAIQTAIIGALASSAAYGMAKAVQAI

SEQ ID NO: 13832 - protein, 171 aa, Triticum aestivum
  peptide (1)..(171): Ceres Seq. ID no. 13597184
  misc_feature (1)..(169): NCBI GI NO: 38567721 NR Description: B1358B12.19
  misc_feature (1)..(169): NCBI GI NO: 15226346 NR Description: membrane protein -related [Arabidopsis thaliana]
  misc_feature (1)..(168): NCBI GI NO: 40740699 NR Description: hypothetical protein AN3681.2
  misc_feature (1)..(166): NCBI GI NO: 6323249 NR Description: Functions in the homeostasis of both calcium and manganese ions
  misc_feature (1)..(171): NCBI GI NO: 40741878 NR Description: hypothetical protein AN4990.2
  misc_feature (1)..(168): NCBI GI NO: 15599046 NR Description: hypothetical protein [Pseudomonas aeruginosa PA01]
  misc_feature (1)..(164): NCBI GI NO: 25029211 NR Description: putative nodulin 21-related protein
  misc_feature (1)..(162): NCBI GI NO: 23508922 NR Description: hypothetical protein, conserved
  misc_feature (1)..(164): NCBI GI NO: 19554141 NR Description: uncharacterized membrane protein
  misc_feature (1)..(170): NCBI GI NO: 29832730 NR Description: putative membrane protein
MGLGGYLAAKSDADHYYRELQREQDEIDTVPDTEAAEIADILSEYGLGPEEYGPVVTSLRNNPKAWLEFMMKFELGLEKPDPRRALTSAATIALAYVVGGMVPLSPYMFLASVDSAMMTSVVVTLAALLFFGYVKGRFTGNRPFLSAIQTAIIGALASSAAYGMAKAVQAI

SEQ ID NO: 13833 - DNA, 501 bp, Triticum aestivum
  misc_feature (1)..(501): Ceres Seq. ID no. 13597185
ccatccccttccccccctctcttcttctccatcaatccccgacgaaaccaaccaaccaacaatggaagttgctgcgcccaagcaactcctccccatggcgccgcgggaccccaactccccgtcctcctccacctcctcctcctcgccgtcttccgccgcgtcgccctccagccaccggcccagcccgctgccgccgtccccgaggcccgtgccccgcaccatcgacaccacccccttccccaccaccttcgtccaggccgacaccgcctccttcaagcaggtcgtccagatgctcaccggcgccgacatgcctccgccgtcctcgcagccgcaggcccagagccagaggccccccgcggccgccaacagcaaggccggcgcgccgtgccggcccaagaagccggcgttcaagctctacgagcgccggagcagcatgaagaacctcaagatgatcgcgccgctcgccatggcggccgccgcgggggcgtcgccgaggaaggc

SEQ ID NO: 13834 - protein, 167 aa, Triticum aestivum
  peptide (1)..(167): Ceres Seq. ID no. 13597186
PSPSPPLFFSINPRRNQPTNNGSCCAQATPPHGAAGPQLPVLLHLLLLAVFRRVALQPPAQPAAAVPEARAPHHRHHPLPHHLRPGRHRLLQAGRPDAHRRRHASAVLAAAGPEPEAPRGRQQQGRRAVPAQEAGVQALRAPEQHEEPQDDRAARHGGRRGGVAEEG

SEQ ID NO: 13835 - protein, 166 aa, Triticum aestivum
  peptide (1)..(166): Ceres Seq. ID no. 13597187
  misc_feature (77)..(104): Pfam Name: Pfam Description:  VQ motif
  misc_feature (27)..(165): NCBI GI NO: 34909488 NR Description: P0481E12.14
  misc_feature (53)..(163): NCBI GI NO: 34903674 NR Description: B1015E06.22
  misc_feature (39)..(165): NCBI GI NO: 25518323 NR Description: hypothetical protein F3H9.7
  misc_feature (39)..(165): NCBI GI NO: 30690315 NR Description: expressed protein [Arabidopsis thaliana]
  misc_feature (39)..(165): NCBI GI NO: 13877535 NR Description: Unknown protein [Arabidopsis thaliana]
  misc_feature (2)..(135): NCBI GI NO: 20138131 NR Description: Vegetative cell wall protein gp1 precursor
  misc_feature (2)..(135): NCBI GI NO: 81286 NR Description: extensin - Volvox carteri (fragment)
  misc_feature (2)..(135): NCBI GI NO: 20138131 NR Description: Vegetative cell wall protein gp1 precursor
  misc_feature (2)..(134): NCBI GI NO: 2429362 NR Description: proline rich protein [Santalum album]
  misc_feature (2)..(108): NCBI GI NO: 12018149 NR Description: gamete-specific hydroxyproline-rich glyco protein a2
HPLPPLSSSPSIPDETNQPTMEVAAPKQLLPMAPRDPNSPSSSTSSSSPSSAASPSSHRPSPLPPSPRPVPRTIDTTPFPTTFVQADTASFKQVVQMLTGADMPPPSSQPQAQSQRPPAAANSKAGAPCRPKKPAFKLYERRSSMKNLKMIAPLAMAAAAGASPRK

SEQ ID NO: 13836 - protein, 146 aa, Triticum aestivum
  peptide (1)..(146): Ceres Seq. ID no. 13597188
  misc_feature (57)..(84): Pfam Name: Pfam Description:  VQ motif
  misc_feature (7)..(145): NCBI GI NO: 34909488 NR Description: P0481E12.14
  misc_feature (33)..(143): NCBI GI NO: 34903674 NR Description: B1015E06.22
  misc_feature (19)..(145): NCBI GI NO: 25518323 NR Description: hypothetical protein F3H9.7
  misc_feature (19)..(145): NCBI GI NO: 30690315 NR Description: expressed protein [Arabidopsis thaliana]
  misc_feature (19)..(145): NCBI GI NO: 13877535 NR Description: Unknown protein [Arabidopsis thaliana]
  misc_feature (1)..(115): NCBI GI NO: 20138131 NR Description: Vegetative cell wall protein gp1 precursor
  misc_feature (1)..(115): NCBI GI NO: 81286 NR Description: extensin - Volvox carteri (fragment)
  misc_feature (1)..(115): NCBI GI NO: 20138131 NR Description: Vegetative cell wall protein gp1 precursor
  misc_feature (1)..(114): NCBI GI NO: 2429362 NR Description: proline rich protein [Santalum album]
  misc_feature (1)..(88): NCBI GI NO: 12018149 NR Description: gamete-specific hydroxyproline-rich glyco protein a2
MEVAAPKQLLPMAPRDPNSPSSSTSSSSPSSAASPSSHRPSPLPPSPRPVPRTIDTTPFPTTFVQADTASFKQVVQMLTGADMPPPSSQPQAQSQRPPAAANSKAGAPCRPKKPAFKLYERRSSMKNLKMIAPLAMAAAAGASPRK

SEQ ID NO: 13837 - DNA, 1424 bp, Triticum aestivum
  misc_feature (1)..(1424): Ceres Seq. ID no. 13597194
ttttggatcccatccaccccttctccgctcctctttaaagccgccgcccgtccccctctgcgttccaccgcactaccgccagcgcagcgacaccagagctcgttcgatagcttagagcggaggcgaggaggaggagatgaggatgtcgctgctgagatccgcgtcgcagcacctgcgccgccgccgcggctactcgtcgacgcccgcgcagccggagcggaaggtggccatcctcggcgcggcgggcggcatcggccagccgctggcgctgctcatgaagctcaacccgctcgtctcctccctctccctctacgacatcgccgccacgcccggcgtcgccgccgacgtatcccacatcaacacccgcgccctggtgaaggggttcgtcggggacgaccagctcggggaggcgctggagggcgccgacctcgtcatcatccccgccggggtgccccgcaagcccggcatgaccagggacgacctcttcaagatcaacgcagggatcgtcaagggcctctgcaccgccatcgccacgcactgccccaacgctctcgtcaatatgatcagcaaccctgtcaactcgactgtcccaattgcagctgaggtgttcaagaaggctggtacctatgatgagaagaagctgtttggtgtgaccactcttgatgttgttcgtgctaaaacattctatgctggaaaggcgaacgtgccagttactggggtgaatgttcctgttgttggtggccatgctggaatcactatcctgccactgttctcacaggctactcctgcaagtaatgcattgtcccatgaggaccttgtcgccctcacgaagaggacacaagatggtggcacggaagttgttgaagcgaaggctggaaagggctcagcaacattgtcgatggcatatgctggtgcagtttttggagatgcatgcttgaaggggctcaacggtgttcctgacatcgtagagtgctcttttgtccaatcaactgtaacagagctgccattctttgcctccaaggtgaggctgggcaagagcggcgtggaggaagtgatggggctgggcgagctgtcggcgttggagaaggaggggctggagagcctcaagggcgagctgctgtcttccatcgagaagggcgtcaagttcgcgcaggaaagctaggctgcaacctgctcagcctataacaatcggttcacacttgaactcatgcaaatttttgttcgaccgctttcgttgcccccaaacccgggtgtgccgctgggcatcgaggcgtcgccgtgctccacaataaaatgtactactggctttgatgtcccgccagactgaactgaacctgtcgtaccagaaacagcagacaccggtgcctatgtgttcatggcattcgtacccgagatcacgaagcgcgaaaccgaagattctgcgg

SEQ ID NO: 13838 - protein, 341 aa, Triticum aestivum
  peptide (1)..(341): Ceres Seq. ID no. 13597195
  misc_feature (173)..(338): Pfam Name: Pfam Description:  lactate/malate dehydrogenase
  misc_feature (1)..(341): NCBI GI NO: 7798706 NR Description: malate dehydrogenase [Vitis vinifera]
  misc_feature (1)..(341): NCBI GI NO: 21388544 NR Description: putative mitochondrial NAD-dependent malatedehydrogenase
  misc_feature (16)..(341): NCBI GI NO: 21388546 NR Description: putative mitochondrial NAD-dependent malatedehydrogenase
  misc_feature (7)..(340): NCBI GI NO: 5929964 NR Description: malate dehydrogenase [Glycine max]
  misc_feature (1)..(341): NCBI GI NO: 21388552 NR Description: putative mitochondrial NAD-dependent malatedehydrogenase
  misc_feature (1)..(338): NCBI GI NO: 126896 NR Description: MALATE DEHYDROGENASE, MITOCHONDRIAL PRECURSOR
  misc_feature (2)..(340): NCBI GI NO: 18404382 NR Description: malate dehydrogenase
  misc_feature (2)..(340): NCBI GI NO: 21592905 NR Description: mitochondrial NAD-dependent malate dehydrogenase
  misc_feature (1)..(340): NCBI GI NO: 7431177 NR Description: malate dehydrogenase (EC 1
  misc_feature (25)..(340): NCBI GI NO: 7431178 NR Description: malate dehydrogenase (EC 1
MRMSLLRSASQHLRRRRGYSSTPAQPERKVAILGAAGGIGQPLALLMKLNPLVSSLSLYDIAATPGVAADVSHINTRALVKGFVGDDQLGEALEGADLVIIPAGVPRKPGMTRDDLFKINAGIVKGLCTAIATHCPNALVNMISNPVNSTVPIAAEVFKKAGTYDEKKLFGVTTLDVVRAKTFYAGKANVPVTGVNVPVVGGHAGITILPLFSQATPASNALSHEDLVALTKRTQDGGTEVVEAKAGKGSATLSMAYAGAVFGDACLKGLNGVPDIVECSFVQSTVTELPFFASKVRLGKSGVEEVMGLGELSALEKEGLESLKGELLSSIEKGVKFAQES

SEQ ID NO: 13839 - protein, 339 aa, Triticum aestivum
  peptide (1)..(339): Ceres Seq. ID no. 13597196
  misc_feature (171)..(336): Pfam Name: Pfam Description:  lactate/malate dehydrogenase
  misc_feature (1)..(339): NCBI GI NO: 7798706 NR Description: malate dehydrogenase [Vitis vinifera]
  misc_feature (1)..(339): NCBI GI NO: 21388544 NR Description: putative mitochondrial NAD-dependent malatedehydrogenase
  misc_feature (14)..(339): NCBI GI NO: 21388546 NR Description: putative mitochondrial NAD-dependent malatedehydrogenase
  misc_feature (5)..(338): NCBI GI NO: 5929964 NR Description: malate dehydrogenase [Glycine max]
  misc_feature (1)..(339): NCBI GI NO: 21388552 NR Description: putative mitochondrial NAD-dependent malatedehydrogenase
  misc_feature (1)..(336): NCBI GI NO: 126896 NR Description: MALATE DEHYDROGENASE, MITOCHONDRIAL PRECURSOR
  misc_feature (1)..(338): NCBI GI NO: 18404382 NR Description: malate dehydrogenase
  misc_feature (1)..(338): NCBI GI NO: 21592905 NR Description: mitochondrial NAD-dependent malate dehydrogenase
  misc_feature (1)..(338): NCBI GI NO: 7431177 NR Description: malate dehydrogenase (EC 1
  misc_feature (23)..(338): NCBI GI NO: 7431178 NR Description: malate dehydrogenase (EC 1
MSLLRSASQHLRRRRGYSSTPAQPERKVAILGAAGGIGQPLALLMKLNPLVSSLSLYDIAATPGVAADVSHINTRALVKGFVGDDQLGEALEGADLVIIPAGVPRKPGMTRDDLFKINAGIVKGLCTAIATHCPNALVNMISNPVNSTVPIAAEVFKKAGTYDEKKLFGVTTLDVVRAKTFYAGKANVPVTGVNVPVVGGHAGITILPLFSQATPASNALSHEDLVALTKRTQDGGTEVVEAKAGKGSATLSMAYAGAVFGDACLKGLNGVPDIVECSFVQSTVTELPFFASKVRLGKSGVEEVMGLGELSALEKEGLESLKGELLSSIEKGVKFAQES

SEQ ID NO: 13840 - protein, 295 aa, Triticum aestivum
  peptide (1)..(295): Ceres Seq. ID no. 13597197
  misc_feature (127)..(292): Pfam Name: Pfam Description:  lactate/malate dehydrogenase
  misc_feature (1)..(295): NCBI GI NO: 7798706 NR Description: malate dehydrogenase [Vitis vinifera]
  misc_feature (1)..(295): NCBI GI NO: 21388544 NR Description: putative mitochondrial NAD-dependent malatedehydrogenase
  misc_feature (1)..(295): NCBI GI NO: 21388546 NR Description: putative mitochondrial NAD-dependent malatedehydrogenase
  misc_feature (1)..(294): NCBI GI NO: 5929964 NR Description: malate dehydrogenase [Glycine max]
  misc_feature (1)..(295): NCBI GI NO: 21388552 NR Description: putative mitochondrial NAD-dependent malatedehydrogenase
  misc_feature (1)..(292): NCBI GI NO: 126896 NR Description: MALATE DEHYDROGENASE, MITOCHONDRIAL PRECURSOR
  misc_feature (1)..(294): NCBI GI NO: 18404382 NR Description: malate dehydrogenase
  misc_feature (1)..(294): NCBI GI NO: 21592905 NR Description: mitochondrial NAD-dependent malate dehydrogenase
  misc_feature (1)..(294): NCBI GI NO: 7431177 NR Description: malate dehydrogenase (EC 1
  misc_feature (1)..(294): NCBI GI NO: 7431178 NR Description: malate dehydrogenase (EC 1
MKLNPLVSSLSLYDIAATPGVAADVSHINTRALVKGFVGDDQLGEALEGADLVIIPAGVPRKPGMTRDDLFKINAGIVKGLCTAIATHCPNALVNMISNPVNSTVPIAAEVFKKAGTYDEKKLFGVTTLDVVRAKTFYAGKANVPVTGVNVPVVGGHAGITILPLFSQATPASNALSHEDLVALTKRTQDGGTEVVEAKAGKGSATLSMAYAGAVFGDACLKGLNGVPDIVECSFVQSTVTELPFFASKVRLGKSGVEEVMGLGELSALEKEGLESLKGELLSSIEKGVKFAQES

SEQ ID NO: 13841 - DNA, 1646 bp, Triticum aestivum
  misc_feature (1)..(1646): Ceres Seq. ID no. 13597198
ccccatccccttccttccacttgacaggtctctccacacccgcggctgcagtccacacccaaaccctagccgtcgcgtcggcagcttccaccgccatggacgaccccgccgccgcagccaccgccgccgccacggaggttggtgtgcccgcatcaccgcccccgccggccgccgaggaggccgatgcctcggcggaggcggaggccgtcccggaggcgaagaggtggcccgggtggccgggggacaacgtgttccggatggttgtgcccgtgctgaaggtcgggagcatcatcgggcggaagggcgagctcatcaagcgtctcgtcgaggagaccaaggccagggtccgcgtcctcgagggtcctgtcggcgccaccgagcgcattgttttggtgtctgcaaaagaagatccgggcttggagctgcctccagctgtggacgctctgattagagtttttaaacgtgtcaatggaataacagatggagctgctgaaggtacccagacagctgctgcacctggtgtatgtgctgcccggttggtggttcctggagctcaagcaattaacctcattgggaagcaaggtgcttcaattaaggcaatccaggagggcacgggtgctacaataagggttatatcagtagatgagcgagatcggcctttctatgtaactgacgatgagaggatagttgagatacagggtgaaacagagaaagttctaaaagcactgcaagcagtttctaatcatctccggaagtttttggttgaccatagtgtacttccattgtttgagaagactaatgccccagtaagtcaagatcgcagtgctgaaacttggaatgatatgccacatcattcaattgtttctacacaagtaaatcaacaacctgaagtgcgtgatgaatatgttcttccaatgaaaagggaccatttgtatcttgaacgggaaccgctggtagaacataacattcatcgctcaggtgtgtcattatatgggcgagatcctgccttgtcagcattacgaccttctggaatgcatggtgctggccctctacttacacagataacacaaaccatgcaaatcccacttacctatgcagaagatatcataggagtcaaaggagcaaacattgcatacatacgggctaacagtggtgctgttgtcacaattcaagagagtttgggaagccctgatgatataactgttgaaataaaggggacgtcgtcccaggtacaatctgctcaacagcttatccaggactccctggctacgcacagagaacctgtgaggagcagttacgcaggagtattagatccgttatataggtccagctacccgtatggcagctcggcctacccgtcatcatcgctgccatcttattctaacatggacgggagtggatattcatcgtcaggtcttggtggttacggttccacttaccgctactaagatggtagctgtttgccatcaagcttgcggccaccctgtctccactcctgggtcatcgttgtgtatgtcagcaatagttgctctgctggcttcatgttcctcagggtggtactattatagtcgtatcgaatcggggtgcgtgatttagtgtctacttgatttgtagatgttcttatttcgaggaagtctgttctagcc

SEQ ID NO: 13842 - protein, 481 aa, Triticum aestivum
  peptide (1)..(481): Ceres Seq. ID no. 15222046
  misc_feature (178)..(233): Pfam Name: Pfam Description:  KH domain
  misc_feature (32)..(481): NCBI GI NO: 37536904 NR Description: putative nucleic acid binding protein
  misc_feature (35)..(479): NCBI GI NO: 15236094 NR Description: KH domain protein [Arabidopsis thaliana]
  misc_feature (45)..(476): NCBI GI NO: 15229321 NR Description: KH domain protein [Arabidopsis thaliana]
  misc_feature (52)..(476): NCBI GI NO: 16924113 NR Description: putative RNA binding protein [Oryza sativa]
  misc_feature (74)..(211): NCBI GI NO: 37534332 NR Description: unknown protein
  misc_feature (321)..(422): NCBI GI NO: 37534332 NR Description: unknown protein
  misc_feature (204)..(284): NCBI GI NO: 37534332 NR Description: unknown protein
  misc_feature (79)..(297): NCBI GI NO: 37535668 NR Description: putative RNA-binding protein
  misc_feature (359)..(418): NCBI GI NO: 37535668 NR Description: putative RNA-binding protein
  misc_feature (81)..(352): NCBI GI NO: 22328051 NR Description: KH domain protein [Arabidopsis thaliana]
PSPSFHLTGLSTPAAAVHTQTLAVASAASTAMDDPAAAATAAATEVGVPASPPPPAAEEADASAEAEAVPEAKRWPGWPGDNVFRMVVPVLKVGSIIGRKGELIKRLVEETKARVRVLEGPVGATERIVLVSAKEDPGLELPPAVDALIRVFKRVNGITDGAAEGTQTAAAPGVCAARLVVPGAQAINLIGKQGASIKAIQEGTGATIRVISVDERDRPFYVTDDERIVEIQGETEKVLKALQAVSNHLRKFLVDHSVLPLFEKTNAPVSQDRSAETWNDMPHHSIVSTQVNQQPEVRDEYVLPMKRDHLYLEREPLVEHNIHRSGVSLYGRDPALSALRPSGMHGAGPLLTQITQTMQIPLTYAEDIIGVKGANIAYIRANSGAVVTIQESLGSPDDITVEIKGTSSQVQSAQQLIQDSLATHREPVRSSYAGVLDPLYRSSYPYGSSAYPSSSLPSYSNMDGSGYSSSGLGGYGSTYRY

SEQ ID NO: 13843 - protein, 450 aa, Triticum aestivum
  peptide (1)..(450): Ceres Seq. ID no. 15222047
  misc_feature (147)..(202): Pfam Name: Pfam Description:  KH domain
  misc_feature (1)..(450): NCBI GI NO: 37536904 NR Description: putative nucleic acid binding protein
  misc_feature (4)..(448): NCBI GI NO: 15236094 NR Description: KH domain protein [Arabidopsis thaliana]
  misc_feature (14)..(445): NCBI GI NO: 15229321 NR Description: KH domain protein [Arabidopsis thaliana]
  misc_feature (21)..(445): NCBI GI NO: 16924113 NR Description: putative RNA binding protein [Oryza sativa]
  misc_feature (43)..(180): NCBI GI NO: 37534332 NR Description: unknown protein
  misc_feature (290)..(391): NCBI GI NO: 37534332 NR Description: unknown protein
  misc_feature (173)..(253): NCBI GI NO: 37534332 NR Description: unknown protein
  misc_feature (48)..(266): NCBI GI NO: 37535668 NR Description: putative RNA-binding protein
  misc_feature (328)..(387): NCBI GI NO: 37535668 NR Description: putative RNA-binding protein
  misc_feature (50)..(321): NCBI GI NO: 22328051 NR Description: KH domain protein [Arabidopsis thaliana]
MDDPAAAATAAATEVGVPASPPPPAAEEADASAEAEAVPEAKRWPGWPGDNVFRMVVPVLKVGSIIGRKGELIKRLVEETKARVRVLEGPVGATERIVLVSAKEDPGLELPPAVDALIRVFKRVNGITDGAAEGTQTAAAPGVCAARLVVPGAQAINLIGKQGASIKAIQEGTGATIRVISVDERDRPFYVTDDERIVEIQGETEKVLKALQAVSNHLRKFLVDHSVLPLFEKTNAPVSQDRSAETWNDMPHHSIVSTQVNQQPEVRDEYVLPMKRDHLYLEREPLVEHNIHRSGVSLYGRDPALSALRPSGMHGAGPLLTQITQTMQIPLTYAEDIIGVKGANIAYIRANSGAVVTIQESLGSPDDITVEIKGTSSQVQSAQQLIQDSLATHREPVRSSYAGVLDPLYRSSYPYGSSAYPSSSLPSYSNMDGSGYSSSGLGGYGSTYRY

SEQ ID NO: 13844 - protein, 396 aa, Triticum aestivum
  peptide (1)..(396): Ceres Seq. ID no. 15222048
  misc_feature (93)..(148): Pfam Name: Pfam Description:  KH domain
  misc_feature (1)..(396): NCBI GI NO: 37536904 NR Description: putative nucleic acid binding protein
  misc_feature (1)..(394): NCBI GI NO: 15236094 NR Description: KH domain protein [Arabidopsis thaliana]
  misc_feature (1)..(391): NCBI GI NO: 15229321 NR Description: KH domain protein [Arabidopsis thaliana]
  misc_feature (1)..(391): NCBI GI NO: 16924113 NR Description: putative RNA binding protein [Oryza sativa]
  misc_feature (1)..(126): NCBI GI NO: 37534332 NR Description: unknown protein
  misc_feature (236)..(337): NCBI GI NO: 37534332 NR Description: unknown protein
  misc_feature (119)..(199): NCBI GI NO: 37534332 NR Description: unknown protein
  misc_feature (1)..(212): NCBI GI NO: 37535668 NR Description: putative RNA-binding protein
  misc_feature (274)..(333): NCBI GI NO: 37535668 NR Description: putative RNA-binding protein
  misc_feature (1)..(267): NCBI GI NO: 22328051 NR Description: KH domain protein [Arabidopsis thaliana]
MVVPVLKVGSIIGRKGELIKRLVEETKARVRVLEGPVGATERIVLVSAKEDPGLELPPAVDALIRVFKRVNGITDGAAEGTQTAAAPGVCAARLVVPGAQAINLIGKQGASIKAIQEGTGATIRVISVDERDRPFYVTDDERIVEIQGETEKVLKALQAVSNHLRKFLVDHSVLPLFEKTNAPVSQDRSAETWNDMPHHSIVSTQVNQQPEVRDEYVLPMKRDHLYLEREPLVEHNIHRSGVSLYGRDPALSALRPSGMHGAGPLLTQITQTMQIPLTYAEDIIGVKGANIAYIRANSGAVVTIQESLGSPDDITVEIKGTSSQVQSAQQLIQDSLATHREPVRSSYAGVLDPLYRSSYPYGSSAYPSSSLPSYSNMDGSGYSSSGLGGYGSTYRY

SEQ ID NO: 13845 - DNA, 1256 bp, Triticum aestivum
  misc_feature (1)..(1256): Ceres Seq. ID no. 12616669
cacaatcgctcgtcccaagcgttcgcacccgccgccgccgccgccgccgcctcaataatctccggggacctaaacctcgacagtaccctaccctccaagctccctccgcctcccgtttttcgttcctccgccgcgccgccaccgcaaggctctcccgcctcgcgccgtgcccgggacgatacgatggtggggctctcggagggggagaagcacttcatccgcggcggcatcgcgcaggacctccgggccgacggccgcaggcggctgcagttccgggccctcaccgtcgagacaggaatcatccctcaggccaacggctcggcgcgtgttaggatgggtgcgaccgaagtcatcgccagcgtcaaggctgagttggggaaaccaaccattcttcatcccgacaaaggaaaagtttccatttatgttgattgtagtccaactgctgcgcctatgtttgagggtagaggttcggaagaattgtctgctgagctctctgttgggctgcaaagatgtttactgggtggtaaaagtggtgcaggggctgcaatcgatttatcgtctctgattgttgttgagggaaaagcctgctgggatctgtacattgatggacttgtggtcagttctgatggtaatttgcttgatgcactggcggctgcgataaaggtagctttgagtgatacaggtataccaaaagttaatgtttctcttaataatgaaacggatggggagcctgaggttgatatcagtgatgaagaatttttgcaattcgacacttctggtgtgcctgtcataattacattgaccaaggttggtaagcactacattgttgatgccacctcggaggaggaatcgcagatgagttctgcggtttccgtttcagtcaacagccatggccagatatgtgggttaaccaagaggggaggcgcagggttggatccaagcgtcatttttgatatgatatccgtggccaagaatgtaagccaacggttctatactctactggaatcagcattcgcagctgctgaagcagtagcggatgagtagagaaaaagcatagaagataccgtgatcacgctgaccgcccgtagttgaccttgctaatgcctcagaagaatgtactatcttggtgccgcaattgccaatgttttgcacaagcttttggttttggtgttatgttgtgtcgagtgccatacgttggtgaaatgttttgatgtataattattttgttgtagctgttcggaggttggattagattt

SEQ ID NO: 13846 - protein, 347 aa, Triticum aestivum
  peptide (1)..(347): Ceres Seq. ID no. 12616670
  misc_feature (91)..(230): Pfam Name: Pfam Description:  3' exoribonuclease family, domain 1
  misc_feature (63)..(347): NCBI GI NO: 18398046 NR Description: putative 3  exoribonuclease; protein id:At3g07750
  misc_feature (63)..(347): NCBI GI NO: 6648187 NR Description: putative 3' exoribonuclease [Arabidopsis thaliana]
  misc_feature (63)..(347): NCBI GI NO: 6466958 NR Description: hypothetical protein [Arabidopsis thaliana]
  misc_feature (63)..(344): NCBI GI NO: 30962875 NR Description: Similar to Exosome complex exonuclease RRP42
  misc_feature (63)..(347): NCBI GI NO: 473949 NR Description: KIAA0116 [Homo sapiens]
  misc_feature (63)..(347): NCBI GI NO: 24307981 NR Description: KIAA0116 protein [Homo sapiens]
  misc_feature (63)..(344): NCBI GI NO: 28548933 NR Description: RIKEN cDNA 2610002K22 [Mus musculus]
  misc_feature (63)..(344): NCBI GI NO: 34866707 NR Description: similar to Exosome complex exonuclease RRP42
  misc_feature (63)..(344): NCBI GI NO: 21362905 NR Description: Exosome complex exonuclease RRP42
  misc_feature (63)..(334): NCBI GI NO: 28573444 NR Description: CG8395-PA [Drosophila melanogaster]
HNRSSQAFAPAAAAAAASIISGDLNLDSTLPSKLPPPPVFRSSAAPPPQGSPASRRARDDTMVGLSEGEKHFIRGGIAQDLRADGRRRLQFRALTVETGIIPQANGSARVRMGATEVIASVKAELGKPTILHPDKGKVSIYVDCSPTAAPMFEGRGSEELSAELSVGLQRCLLGGKSGAGAAIDLSSLIVVEGKACWDLYIDGLVVSSDGNLLDALAAAIKVALSDTGIPKVNVSLNNETDGEPEVDISDEEFLQFDTSGVPVIITLTKVGKHYIVDATSEEESQMSSAVSVSVNSHGQICGLTKRGGAGLDPSVIFDMISVAKNVSQRFYTLLESAFAAAEAVADE

SEQ ID NO: 13847 - protein, 286 aa, Triticum aestivum
  peptide (1)..(286): Ceres Seq. ID no. 12616671
  misc_feature (30)..(169): Pfam Name: Pfam Description:  3' exoribonuclease family, domain 1
  misc_feature (2)..(286): NCBI GI NO: 18398046 NR Description: putative 3  exoribonuclease; protein id:At3g07750
  misc_feature (2)..(286): NCBI GI NO: 6648187 NR Description: putative 3' exoribonuclease [Arabidopsis thaliana]
  misc_feature (2)..(286): NCBI GI NO: 6466958 NR Description: hypothetical protein [Arabidopsis thaliana]
  misc_feature (2)..(283): NCBI GI NO: 30962875 NR Description: Similar to Exosome complex exonuclease RRP42
  misc_feature (2)..(286): NCBI GI NO: 473949 NR Description: KIAA0116 [Homo sapiens]
  misc_feature (2)..(286): NCBI GI NO: 24307981 NR Description: KIAA0116 protein [Homo sapiens]
  misc_feature (2)..(283): NCBI GI NO: 28548933 NR Description: RIKEN cDNA 2610002K22 [Mus musculus]
  misc_feature (2)..(283): NCBI GI NO: 34866707 NR Description: similar to Exosome complex exonuclease RRP42
  misc_feature (2)..(283): NCBI GI NO: 21362905 NR Description: Exosome complex exonuclease RRP42
  misc_feature (2)..(273): NCBI GI NO: 28573444 NR Description: CG8395-PA [Drosophila melanogaster]
MVGLSEGEKHFIRGGIAQDLRADGRRRLQFRALTVETGIIPQANGSARVRMGATEVIASVKAELGKPTILHPDKGKVSIYVDCSPTAAPMFEGRGSEELSAELSVGLQRCLLGGKSGAGAAIDLSSLIVVEGKACWDLYIDGLVVSSDGNLLDALAAAIKVALSDTGIPKVNVSLNNETDGEPEVDISDEEFLQFDTSGVPVIITLTKVGKHYIVDATSEEESQMSSAVSVSVNSHGQICGLTKRGGAGLDPSVIFDMISVAKNVSQRFYTLLESAFAAAEAVADE

SEQ ID NO: 13848 - protein, 236 aa, Triticum aestivum
  peptide (1)..(236): Ceres Seq. ID no. 12616672
  misc_feature (1)..(119): Pfam Name: Pfam Description:  3' exoribonuclease family, domain 1
  misc_feature (1)..(236): NCBI GI NO: 18398046 NR Description: putative 3  exoribonuclease; protein id:At3g07750
  misc_feature (1)..(236): NCBI GI NO: 6648187 NR Description: putative 3' exoribonuclease [Arabidopsis thaliana]
  misc_feature (1)..(236): NCBI GI NO: 6466958 NR Description: hypothetical protein [Arabidopsis thaliana]
  misc_feature (1)..(233): NCBI GI NO: 30962875 NR Description: Similar to Exosome complex exonuclease RRP42
  misc_feature (1)..(236): NCBI GI NO: 473949 NR Description: KIAA0116 [Homo sapiens]
  misc_feature (1)..(236): NCBI GI NO: 24307981 NR Description: KIAA0116 protein [Homo sapiens]
  misc_feature (1)..(233): NCBI GI NO: 28548933 NR Description: RIKEN cDNA 2610002K22 [Mus musculus]
  misc_feature (1)..(233): NCBI GI NO: 34866707 NR Description: similar to Exosome complex exonuclease RRP42
  misc_feature (1)..(233): NCBI GI NO: 21362905 NR Description: Exosome complex exonuclease RRP42
  misc_feature (1)..(223): NCBI GI NO: 28573444 NR Description: CG8395-PA [Drosophila melanogaster]
MGATEVIASVKAELGKPTILHPDKGKVSIYVDCSPTAAPMFEGRGSEELSAELSVGLQRCLLGGKSGAGAAIDLSSLIVVEGKACWDLYIDGLVVSSDGNLLDALAAAIKVALSDTGIPKVNVSLNNETDGEPEVDISDEEFLQFDTSGVPVIITLTKVGKHYIVDATSEEESQMSSAVSVSVNSHGQICGLTKRGGAGLDPSVIFDMISVAKNVSQRFYTLLESAFAAAEAVADE

SEQ ID NO: 13849 - DNA, 1391 bp, Triticum aestivum
  misc_feature (1)..(1391): Ceres Seq. ID no. 13598761
gcaatccgatgaaccagcaaaaccgtggacgagcaccgccggtattctgctcccgaattccacagatttccactccccgctcccaaagccccgatactttatagccggcgacagcaagcccagcaaaatcccatctcccaacccggaaatcctcccactcccgggaatgaatcagcttccccttccccttctctgagatctcagcccgagcctgcgcgccgcgacttccaccggaatccttccctcctagccgcaacatcgccggatcgattcaggcattcttggtggccggagaagcagtctttggtcctctgcttgagatcatcatcagacatgtcgctgctatcgaaattgcggctggttactgtggatgtgactggtactctgcttgcttacaaaggacggcttggtgattactactgcatggctgctaaggctgctggaaagccatgccctgattatgatcgaatgcacgaaggcttcaagcttgcatacactgagatggcaaggaaatacccatgctttggatttgcggcaaagatgccaacgattgaatggtggaggatttgtgtcaaggattcatttgttaaggctgggtatgattacgatgatgagacatttgataaagtgttcaagcgaatttattccgcctttggctcctctgcgccatactctgtttttcctgatgcacagcccttcatgagagggctgagggaaaaggggatcacagttggaatcgtcagcaatgcagagtaccggtacaaagaggtcatcttgcctgcgttagggctgaatcagggctcagagtgggacttcggggtgttctcaggcatcgtcggtgtcgagaaacctgacccaaaaatctacaagatcgcgctggagatggcggggaacgtcgcaccggaagaggcgctccacattggcgacagctaccgcaaggactacgtccctgcacggagcatcgggatgcacgcgctgctcctggaccggttcaagaccgccgacgccgagagctggaggcagtccggcgcgccggtgctccctgatctcgaagccgcacaggcatggctcaccaagaacccgaccgaggaacccgctgaggagccactaggggccgcactgctgcgcaggatggccgagaagctctgaatctcgcccctgggatggttcctgttgtgctcttgctggggagtgagggagccaaggagaagggatgtgttgtagcgatggttcactggccagtttagctagctggagctacttgaactctggtagtaggcttccagtgctgttgttgactgctgaatgtggccaagtgattcagccgtgcgacaaacatcttgcaatgacgaataattctaatcatgtttcgcataatggaggaatttaac

SEQ ID NO: 13850 - protein, 271 aa, Triticum aestivum
  peptide (1)..(271): Ceres Seq. ID no. 13598762
  misc_feature (7)..(220): Pfam Name: Pfam Description:  haloacid dehalogenase-like hydrolase
  misc_feature (1)..(246): NCBI GI NO: 15241564 NR Description: haloacid dehalogenase-like hydrolase family
  misc_feature (183)..(271): NCBI GI NO: 1362147 NR Description: hypothetical protein
  misc_feature (6)..(217): NCBI GI NO: 27714603 NR Description: similar to RIKEN cDNA 2810435D12
  misc_feature (6)..(239): NCBI GI NO: 21312204 NR Description: RIKEN cDNA 2810435D12 [Mus musculus]
  misc_feature (6)..(217): NCBI GI NO: 13654294 NR Description: hypothetical protein MGC12904 [Homo sapiens]
  misc_feature (7)..(219): NCBI GI NO: 33468704 NR Description: SI:zC10E8.6 (novel protein) [Danio rerio]
  misc_feature (4)..(221): NCBI GI NO: 17231587 NR Description: hypothetical protein [Nostoc sp. PCC 7120]
  misc_feature (1)..(217): NCBI GI NO: 21483246 NR Description: GH02773p [Drosophila melanogaster]
  misc_feature (1)..(217): NCBI GI NO: 19923000 NR Description: Rhythmically expressed gene 2 CG3200-PA
  misc_feature (8)..(219): NCBI GI NO: 23130292 NR Description: hypothetical protein [Nostoc punctiforme]
MSLLSKLRLVTVDVTGTLLAYKGRLGDYYCMAAKAAGKPCPDYDRMHEGFKLAYTEMARKYPCFGFAAKMPTIEWWRICVKDSFVKAGYDYDDETFDKVFKRIYSAFGSSAPYSVFPDAQPFMRGLREKGITVGIVSNAEYRYKEVILPALGLNQGSEWDFGVFSGIVGVEKPDPKIYKIALEMAGNVAPEEALHIGDSYRKDYVPARSIGMHALLLDRFKTADAESWRQSGAPVLPDLEAAQAWLTKNPTEEPAEEPLGAALLRRMAEKL

SEQ ID NO: 13851 - protein, 241 aa, Triticum aestivum
  peptide (1)..(241): Ceres Seq. ID no. 13598763
  misc_feature (1)..(190): Pfam Name: Pfam Description:  haloacid dehalogenase-like hydrolase
  misc_feature (1)..(216): NCBI GI NO: 15241564 NR Description: haloacid dehalogenase-like hydrolase family
  misc_feature (153)..(241): NCBI GI NO: 1362147 NR Description: hypothetical protein
  misc_feature (1)..(187): NCBI GI NO: 27714603 NR Description: similar to RIKEN cDNA 2810435D12
  misc_feature (1)..(209): NCBI GI NO: 21312204 NR Description: RIKEN cDNA 2810435D12 [Mus musculus]
  misc_feature (1)..(187): NCBI GI NO: 13654294 NR Description: hypothetical protein MGC12904 [Homo sapiens]
  misc_feature (1)..(189): NCBI GI NO: 33468704 NR Description: SI:zC10E8.6 (novel protein) [Danio rerio]
  misc_feature (1)..(191): NCBI GI NO: 17231587 NR Description: hypothetical protein [Nostoc sp. PCC 7120]
  misc_feature (1)..(187): NCBI GI NO: 21483246 NR Description: GH02773p [Drosophila melanogaster]
  misc_feature (1)..(187): NCBI GI NO: 19923000 NR Description: Rhythmically expressed gene 2 CG3200-PA
  misc_feature (1)..(189): NCBI GI NO: 23130292 NR Description: hypothetical protein [Nostoc punctiforme]
MAAKAAGKPCPDYDRMHEGFKLAYTEMARKYPCFGFAAKMPTIEWWRICVKDSFVKAGYDYDDETFDKVFKRIYSAFGSSAPYSVFPDAQPFMRGLREKGITVGIVSNAEYRYKEVILPALGLNQGSEWDFGVFSGIVGVEKPDPKIYKIALEMAGNVAPEEALHIGDSYRKDYVPARSIGMHALLLDRFKTADAESWRQSGAPVLPDLEAAQAWLTKNPTEEPAEEPLGAALLRRMAEKL

SEQ ID NO: 13852 - protein, 226 aa, Triticum aestivum
  peptide (1)..(226): Ceres Seq. ID no. 13598764
  misc_feature (1)..(175): Pfam Name: Pfam Description:  haloacid dehalogenase-like hydrolase
  misc_feature (1)..(201): NCBI GI NO: 15241564 NR Description: haloacid dehalogenase-like hydrolase family
  misc_feature (138)..(226): NCBI GI NO: 1362147 NR Description: hypothetical protein
  misc_feature (1)..(172): NCBI GI NO: 27714603 NR Description: similar to RIKEN cDNA 2810435D12
  misc_feature (1)..(194): NCBI GI NO: 21312204 NR Description: RIKEN cDNA 2810435D12 [Mus musculus]
  misc_feature (1)..(172): NCBI GI NO: 13654294 NR Description: hypothetical protein MGC12904 [Homo sapiens]
  misc_feature (1)..(174): NCBI GI NO: 33468704 NR Description: SI:zC10E8.6 (novel protein) [Danio rerio]
  misc_feature (1)..(176): NCBI GI NO: 17231587 NR Description: hypothetical protein [Nostoc sp. PCC 7120]
  misc_feature (1)..(172): NCBI GI NO: 21483246 NR Description: GH02773p [Drosophila melanogaster]
  misc_feature (1)..(172): NCBI GI NO: 19923000 NR Description: Rhythmically expressed gene 2 CG3200-PA
  misc_feature (1)..(174): NCBI GI NO: 23130292 NR Description: hypothetical protein [Nostoc punctiforme]
MHEGFKLAYTEMARKYPCFGFAAKMPTIEWWRICVKDSFVKAGYDYDDETFDKVFKRIYSAFGSSAPYSVFPDAQPFMRGLREKGITVGIVSNAEYRYKEVILPALGLNQGSEWDFGVFSGIVGVEKPDPKIYKIALEMAGNVAPEEALHIGDSYRKDYVPARSIGMHALLLDRFKTADAESWRQSGAPVLPDLEAAQAWLTKNPTEEPAEEPLGAALLRRMAEKL

SEQ ID NO: 13853 - DNA, 1750 bp, Triticum aestivum
  misc_feature (1)..(1750): Ceres Seq. ID no. 13584160
aaagtaacaacctccaactcagacacagtcaccaccctgtcccctcccctcctcttcctcggccctcgcttcgttctccgcgggagccggcgagccgccgccccactctctctctccccccgtccaccgcacgcctccgccacgccattcccatatgctcttctccggcgagggcaacagagcatgattctgtggcaaggttgaatggcggtgagttaggagactgcggagcaggggttattaataaattgtgcaagaggcgagccttggccgagatggatgccgttgttgatgttgccgatgctatgggcgctgtgactatagagaacggggcgaagctggagttgcctgacggtgtagaggagcgcggcgaagagcatgatgcgcaggccaacagagaccattcaggggagagtgaggtgatcaacccgcacgaagaggcaggtggagaagccagctcacacccagaagggaggaagatcggccgttccaagggaactgcaagtcatggtcctaaggttgcaaagacaaggagcccaaagagtggagatgaaggtctagcaaggagaggcacccctagttcctctcttcgtaaggcacccattgtgcgagtatcgcatgcagactcaggcactggctcttgtaccaatggtgatccgagtgtcgataagaaaaaatctggaaagattgagtctcgtccgtctgccaaggagacatcattgctcgaggacgcaaaatccagggagggaagtaaagctcaaaagcaatcagaccagcattcttccatcagaagagatgaagaagatttaaatagtgaaagttcaaaagctcgaaggtctggcagcactcctgcctatggattcagtttcaagtgtgatgagagagctgaaaaaagaagagagttctactcaaagcttgaggagaagattcacgcaagagagatggaaataagcaatatgcaagcgaaatcgaaggagactgaagaagctgaactcaaaatgctgagaaaaagcttaaagttcaaggctacgccgatgccaagcttctccccaccaccaaaggttgaactgaaaaagattcctcccactagagctaaatcaccaaagcttggccgttccaagaacaaatctgggctggaggctgaagaaagtaccaccccaagccatcctatccgtatgagccttgatgagaaggctactcaaaatggtgcgaagaaagtaaccccatcaaactcggtgaagaagccccagaggaagtcactcccgaaattgccatcagaggcaagcggcccacttgaggccagacagccaaaaatgccatcagaggcaagcggcccacttgaggccacacagccaaaaagcacggaggacctaaacacagataatcatcaggagtcagggtcgccagcaaagcagcttcaggaaaccgagtcgatcgccagcaacgcccaggagccgatccgagctaaagttacccccgacgaccaagaactcgacgagcaggcatccgtgtagcaacgaccatggtgaccaaatccttcgattttgtgatggcaggtgtgcatgcctctggctttgtcgcgtattgtgccatatttcgatagtgtatctagtgtcctgtgttcagtaaaccaacgctcgtctcgtctttgttgagtctagcatctgtgttgcttctgttcataatcgtaagcgaggctccagtgtcgtgtgcaactgcaaatagttttgtcctattttctactgctgct

SEQ ID NO: 13854 - protein, 503 aa, Triticum aestivum
  peptide (1)..(503): Ceres Seq. ID no. 13584161
  misc_feature (118)..(501): Pfam Name: Pfam Description:  AF-4 proto-oncoprotein
  misc_feature (101)..(503): NCBI GI NO: 18417986 NR Description: expressed protein [Arabidopsis thaliana]
  misc_feature (193)..(496): NCBI GI NO: 15224733 NR Description: expressed protein [Arabidopsis thaliana]
  misc_feature (158)..(453): NCBI GI NO: 18403980 NR Description: expressed protein [Arabidopsis thaliana]
  misc_feature (193)..(453): NCBI GI NO: 25408425 NR Description: hypothetical protein At2g35880
  misc_feature (90)..(421): NCBI GI NO: 34897180 NR Description: unknown protein
  misc_feature (91)..(394): NCBI GI NO: 9294199 NR Description: gb|AAF04893
  misc_feature (91)..(394): NCBI GI NO: 15228950 NR Description: expressed protein [Arabidopsis thaliana]
  misc_feature (62)..(455): NCBI GI NO: 7485356 NR Description: hypothetical protein F10M6
  misc_feature (62)..(455): NCBI GI NO: 7486636 NR Description: hypothetical protein F8B4
  misc_feature (99)..(376): NCBI GI NO: 34393229 NR Description: putative seed specific protein
SNNLQLRHSHHPVPSPPLPRPSLRSPREPASRRPTLSLPPSTARLRHAIPICSSPARATEHDSVARLNGGELGDCGAGVINKLCKRRALAEMDAVVDVADAMGAVTIENGAKLELPDGVEERGEEHDAQANRDHSGESEVINPHEEAGGEASSHPEGRKIGRSKGTASHGPKVAKTRSPKSGDEGLARRGTPSSSLRKAPIVRVSHADSGTGSCTNGDPSVDKKKSGKIESRPSAKETSLLEDAKSREGSKAQKQSDQHSSIRRDEEDLNSESSKARRSGSTPAYGFSFKCDERAEKRREFYSKLEEKIHAREMEISNMQAKSKETEEAELKMLRKSLKFKATPMPSFSPPPKVELKKIPPTRAKSPKLGRSKNKSGLEAEESTTPSHPIRMSLDEKATQNGAKKVTPSNSVKKPQRKSLPKLPSEASGPLEARQPKMPSEASGPLEATQPKSTEDLNTDNHQESGSPAKQLQETESIASNAQEPIRAKVTPDDQELDEQASV

SEQ ID NO: 13855 - protein, 412 aa, Triticum aestivum
  peptide (1)..(412): Ceres Seq. ID no. 13584162
  misc_feature (27)..(410): Pfam Name: Pfam Description:  AF-4 proto-oncoprotein
  misc_feature (10)..(412): NCBI GI NO: 18417986 NR Description: expressed protein [Arabidopsis thaliana]
  misc_feature (102)..(405): NCBI GI NO: 15224733 NR Description: expressed protein [Arabidopsis thaliana]
  misc_feature (67)..(362): NCBI GI NO: 18403980 NR Description: expressed protein [Arabidopsis thaliana]
  misc_feature (102)..(362): NCBI GI NO: 25408425 NR Description: hypothetical protein At2g35880
  misc_feature (1)..(330): NCBI GI NO: 34897180 NR Description: unknown protein
  misc_feature (1)..(303): NCBI GI NO: 9294199 NR Description: gb|AAF04893
  misc_feature (1)..(303): NCBI GI NO: 15228950 NR Description: expressed protein [Arabidopsis thaliana]
  misc_feature (1)..(364): NCBI GI NO: 7485356 NR Description: hypothetical protein F10M6
  misc_feature (1)..(364): NCBI GI NO: 7486636 NR Description: hypothetical protein F8B4
  misc_feature (8)..(285): NCBI GI NO: 34393229 NR Description: putative seed specific protein
MDAVVDVADAMGAVTIENGAKLELPDGVEERGEEHDAQANRDHSGESEVINPHEEAGGEASSHPEGRKIGRSKGTASHGPKVAKTRSPKSGDEGLARRGTPSSSLRKAPIVRVSHADSGTGSCTNGDPSVDKKKSGKIESRPSAKETSLLEDAKSREGSKAQKQSDQHSSIRRDEEDLNSESSKARRSGSTPAYGFSFKCDERAEKRREFYSKLEEKIHAREMEISNMQAKSKETEEAELKMLRKSLKFKATPMPSFSPPPKVELKKIPPTRAKSPKLGRSKNKSGLEAEESTTPSHPIRMSLDEKATQNGAKKVTPSNSVKKPQRKSLPKLPSEASGPLEARQPKMPSEASGPLEATQPKSTEDLNTDNHQESGSPAKQLQETESIASNAQEPIRAKVTPDDQELDEQASV

SEQ ID NO: 13856 - protein, 402 aa, Triticum aestivum
  peptide (1)..(402): Ceres Seq. ID no. 13584163
  misc_feature (17)..(400): Pfam Name: Pfam Description:  AF-4 proto-oncoprotein
  misc_feature (1)..(402): NCBI GI NO: 18417986 NR Description: expressed protein [Arabidopsis thaliana]
  misc_feature (92)..(395): NCBI GI NO: 15224733 NR Description: expressed protein [Arabidopsis thaliana]
  misc_feature (57)..(352): NCBI GI NO: 18403980 NR Description: expressed protein [Arabidopsis thaliana]
  misc_feature (92)..(352): NCBI GI NO: 25408425 NR Description: hypothetical protein At2g35880
  misc_feature (1)..(320): NCBI GI NO: 34897180 NR Description: unknown protein
  misc_feature (1)..(293): NCBI GI NO: 9294199 NR Description: gb|AAF04893
  misc_feature (1)..(293): NCBI GI NO: 15228950 NR Description: expressed protein [Arabidopsis thaliana]
  misc_feature (1)..(354): NCBI GI NO: 7485356 NR Description: hypothetical protein F10M6
  misc_feature (1)..(354): NCBI GI NO: 7486636 NR Description: hypothetical protein F8B4
  misc_feature (1)..(275): NCBI GI NO: 34393229 NR Description: putative seed specific protein
MGAVTIENGAKLELPDGVEERGEEHDAQANRDHSGESEVINPHEEAGGEASSHPEGRKIGRSKGTASHGPKVAKTRSPKSGDEGLARRGTPSSSLRKAPIVRVSHADSGTGSCTNGDPSVDKKKSGKIESRPSAKETSLLEDAKSREGSKAQKQSDQHSSIRRDEEDLNSESSKARRSGSTPAYGFSFKCDERAEKRREFYSKLEEKIHAREMEISNMQAKSKETEEAELKMLRKSLKFKATPMPSFSPPPKVELKKIPPTRAKSPKLGRSKNKSGLEAEESTTPSHPIRMSLDEKATQNGAKKVTPSNSVKKPQRKSLPKLPSEASGPLEARQPKMPSEASGPLEATQPKSTEDLNTDNHQESGSPAKQLQETESIASNAQEPIRAKVTPDDQELDEQASV

SEQ ID NO: 13857 - DNA, 482 bp, Triticum aestivum
  misc_feature (1)..(482): Ceres Seq. ID no. 13584164
aacacacacataccaacagagcaacaaccaacaaagaacagagtaccatatcaactagccgtagccacacagagagatcgacggaagagccttagctttagccatcgcctagcacagcacaccaccgcaccaccaccagcacctacataagcacgcatggcgcgctgggccatcgccatccacggaggcgcgggcgtggaccccaacctgccggagcaccgccaggaggaggccaagcgcgtgctggcccggtgcctgcaggtcggcgtcgacctgctccgggctggtgcgacggcgctggacgtcgtggaggccgtggtgcgggagctggagacggacccctgcttcaactcgggccgcggctccgcgctcacacgcgccggcaccgtcgagatggaggccagcatcatggacggccgcggccgccgctgcggcgccgtctccggtgtgtccaccgttaaaaaccccgtgtccctggcccg

SEQ ID NO: 13858 - protein, 108 aa, Triticum aestivum
  peptide (1)..(108): Ceres Seq. ID no. 13584165
  misc_feature (2)..(107): Pfam Name: Pfam Description:  Asparaginase
  misc_feature (1)..(107): NCBI GI NO: 11066973 NR Description: asparaginase [Hordeum vulgare]
  misc_feature (1)..(107): NCBI GI NO: 10241428 NR Description: putative l-asparaginase
  misc_feature (1)..(107): NCBI GI NO: 18401029 NR Description: L-asparaginase -related [Arabidopsis thaliana]
  misc_feature (1)..(107): NCBI GI NO: 29420787 NR Description: L-asparaginase [Glycine max]
  misc_feature (1)..(107): NCBI GI NO: 23428804 NR Description: L-asparaginase [Glycine max]
  misc_feature (1)..(107): NCBI GI NO: 1076292 NR Description: asparaginase (EC 3.5.1.1) - Arabidopsis thaliana
  misc_feature (1)..(107): NCBI GI NO: 15241528 NR Description: asparaginase [Arabidopsis thaliana]
  misc_feature (1)..(107): NCBI GI NO: 231573 NR Description: L-ASPARAGINASE (L-ASPARAGINE AMIDOHYDROLASE)
  misc_feature (1)..(107): NCBI GI NO: 6685231 NR Description: L-asparaginase (L-asparagine amidohydrolase)
  misc_feature (1)..(107): NCBI GI NO: 1703447 NR Description: L-ASPARAGINASE (L-ASPARAGINE AMIDOHYDROLASE)
MARWAIAIHGGAGVDPNLPEHRQEEAKRVLARCLQVGVDLLRAGATALDVVEAVVRELETDPCFNSGRGSALTRAGTVEMEASIMDGRGRRCGAVSGVSTVKNPVSLA

SEQ ID NO: 13859 - DNA, 531 bp, Triticum aestivum
  misc_feature (1)..(531): Ceres Seq. ID no. 13584209
  misc_feature (487)..(487): n is a, c, t, g, unknown, or other
tataacatctctaatcgaaaaaaattaaaaagacagaacaccgaagcaccgaagcgcagctccaccaccatttcacactctcccctgcttcacttcactgagaagcacacggacgaaaagctgcttgctgggagccatggctcccccgctcctcctcctcgtcctcttcctcctcccggccctcgccgccggccaccagcacccctcctcctacggctcctccgccctctccgaatggcgcaacgccaagtcctcctacttcgccgccgaccccggagacgccatcggtggcgcgtgcgggttcggggatctggggaagcacgggtacgggatggcgacggtggggctgagcacggcgctgttcgagcgcggcgccgcctgcggcggctgctacgaggtcaagtgcgtggaggacctcaagtactgcctccccggcacctccatcgtcgtcacggccaccaacttctgcccgcccaactacggcttncccgccgacgccggcggcgtctgcaacccgcccaaccaccattt

SEQ ID NO: 13860 - protein, 177 aa, Triticum aestivum
  peptide (1)..(177): Ceres Seq. ID no. 13584210
  misc_feature (163)..(163): Xaa is any aa, unknown or other
YNISNRKKLKRQNTEAPKRSSTTISHSPLLHFTEKHTDEKLLAGSHGSPAPPPRPLPPPGPRRRPPAPLLLRLLRPLRMAQRQVLLLRRRPRRRHRWRVRVRGSGEARVRDGDGGAEHGAVRARRRLRRLLRGQVRGGPQVLPPRHLHRRHGHQLLPAQLRLXRRRRRRLQPAQPPF

SEQ ID NO: 13861 - protein, 131 aa, Triticum aestivum
  peptide (1)..(131): Ceres Seq. ID no. 13584211
  misc_feature (4)..(130): NCBI GI NO: 7407665 NR Description: alpha-expansin OsEXP10 [Oryza sativa]
  misc_feature (4)..(130): NCBI GI NO: 6714416 NR Description: putative expansin precursor [Arabidopsis thaliana]
  misc_feature (4)..(130): NCBI GI NO: 18396479 NR Description: expansin, putative (EXP13) [Arabidopsis thaliana]
  misc_feature (4)..(130): NCBI GI NO: 21618283 NR Description: Alpha-expansin 13 precursor
  misc_feature (6)..(130): NCBI GI NO: 4138912 NR Description: expansin precursor [Lycopersicon esculentum]
  misc_feature (3)..(130): NCBI GI NO: 29467505 NR Description: expansin [Pyrus communis]
  misc_feature (1)..(130): NCBI GI NO: 7407661 NR Description: alpha-expansin OsEXP6 [Oryza sativa]
  misc_feature (13)..(130): NCBI GI NO: 29467507 NR Description: expansin [Pyrus communis]
  misc_feature (11)..(130): NCBI GI NO: 17484121 NR Description: alpha-expansin [Prunus cerasus]
  misc_feature (11)..(130): NCBI GI NO: 29466641 NR Description: expansin [Prunus persica]
  misc_feature (117)..(117): Xaa is any aa, unknown or other
MAPPLLLLVLFLLPALAAGHQHPSSYGSSALSEWRNAKSSYFAADPGDAIGGACGFGDLGKHGYGMATVGLSTALFERGAACGGCYEVKCVEDLKYCLPGTSIVVTATNFCPPNYGXPADAGGVCNPPNHH

SEQ ID NO: 13862 - protein, 99 aa, Triticum aestivum
  peptide (1)..(99): Ceres Seq. ID no. 13584212
  misc_feature (85)..(85): Xaa is any aa, unknown or other
MAQRQVLLLRRRPRRRHRWRVRVRGSGEARVRDGDGGAEHGAVRARRRLRRLLRGQVRGGPQVLPPRHLHRRHGHQLLPAQLRLXRRRRRRLQPAQPPF

SEQ ID NO: 13863 - DNA, 1303 bp, Triticum aestivum
  misc_feature (1)..(1303): Ceres Seq. ID no. 13584292
gtggctgcatcatcaccaccaccacctcggaagtccttggcgagcgtgcgtgcgtgcgtgcgagctgtaggagggctgtgatgaaaagttgcatctgttaacggacacgagttctgctaccaagttcgacatgggttcaggaaacctgatggtgaagaaggtggtgaggcccagctcttttgacctcgacatacatctcgacaaaagctggaaggaggacgttacctgcccaatctgtctggattacccccacaatgcagtcctactgaggtgcacatcttatgagaagggctgcaggccgtttgtgtgcgacaccgaccagacccgctccaactgtcttgagaggttcaaaggtgcttatgagctgcctgccaatgtcaaggtctcgtctatagctgtggcccctcttgatagcatccacatcgtgtcgtctcacgcaaacaatcgcccaagttgcccgttgtgcagaggtgatgttatcgggtggattgtaatcagcgaggctcgtctgcatcttaaccagaagaagagatgctgtgaagaggattgctgctcctttactggcaacttcaatgagcttcagaagcacacacaacaaaagcatccagattcacgcccttcagaaatcgaccctgccaggcaagtcgattgggacaacttccagcaatcttctgatatcgtggatgtcttgagcacaatacatgcacaagttcctaatggcatcgttctcggagactatgtcattgaatatggggatgatgatactggagatgactatgaagtgctccgcagggttaggaggaagtggtggtcttttatttgttgcaaggctttttgtagatatccaaggagccgaagaagagggagaggaagggacaatagaggaagtggaaggaggaacagcaatcaggctcatctggagaacttcaatctcgaggttccgacacaagctgttgacctgagggaactcagatttgatgaaatcgatgatgagtacattgttacaggggcagtacctagtatggcaacaccaggaagaatggccagtttccattacagggatacaagatatggtcggtgatcgggcgtactacttaatagaaccagctgataaagaaaaggatttgcagccgcgatgtgatgccgcagccttcaggaaactccacccccgcccatttttcgtttcttttcctgcccccgtcgttgctaggtgccgctccagcccggacttcctgtgcataaaaagtagcaacagaaaccctctgccgccgccgttcgtttgcaatagattttcatttaccct

SEQ ID NO: 13864 - protein, 316 aa, Triticum aestivum
  peptide (1)..(316): Ceres Seq. ID no. 13584293
  misc_feature (9)..(310): NCBI GI NO: 7486671 NR Description: hypothetical protein F8F16
  misc_feature (9)..(294): NCBI GI NO: 18417801 NR Description: expressed protein [Arabidopsis thaliana]
  misc_feature (109)..(214): NCBI GI NO: 15230170 NR Description: expressed protein [Arabidopsis thaliana]
  misc_feature (11)..(82): NCBI GI NO: 15230170 NR Description: expressed protein [Arabidopsis thaliana]
  misc_feature (105)..(209): NCBI GI NO: 38346521 NR Description: OSJNBa0027H09.16
  misc_feature (23)..(74): NCBI GI NO: 38346521 NR Description: OSJNBa0027H09.16
  misc_feature (109)..(216): NCBI GI NO: 25365932 NR Description: unknown protein T32E8.10
  misc_feature (109)..(216): NCBI GI NO: 30699285 NR Description: expressed protein [Arabidopsis thaliana]
  misc_feature (25)..(77): NCBI GI NO: 25365932 NR Description: unknown protein T32E8.10
  misc_feature (25)..(77): NCBI GI NO: 30699285 NR Description: expressed protein [Arabidopsis thaliana]
MGSGNLMVKKVVRPSSFDLDIHLDKSWKEDVTCPICLDYPHNAVLLRCTSYEKGCRPFVCDTDQTRSNCLERFKGAYELPANVKVSSIAVAPLDSIHIVSSHANNRPSCPLCRGDVIGWIVISEARLHLNQKKRCCEEDCCSFTGNFNELQKHTQQKHPDSRPSEIDPARQVDWDNFQQSSDIVDVLSTIHAQVPNGIVLGDYVIEYGDDDTGDDYEVLRRVRRKWWSFICCKAFCRYPRSRRRGRGRDNRGSGRRNSNQAHLENFNLEVPTQAVDLRELRFDEIDDEYIVTGAVPSMATPGRMASFHYRDTRYGR

SEQ ID NO: 13865 - protein, 310 aa, Triticum aestivum
  peptide (1)..(310): Ceres Seq. ID no. 13584294
  misc_feature (3)..(304): NCBI GI NO: 7486671 NR Description: hypothetical protein F8F16
  misc_feature (3)..(288): NCBI GI NO: 18417801 NR Description: expressed protein [Arabidopsis thaliana]
  misc_feature (103)..(208): NCBI GI NO: 15230170 NR Description: expressed protein [Arabidopsis thaliana]
  misc_feature (5)..(76): NCBI GI NO: 15230170 NR Description: expressed protein [Arabidopsis thaliana]
  misc_feature (99)..(203): NCBI GI NO: 38346521 NR Description: OSJNBa0027H09.16
  misc_feature (17)..(68): NCBI GI NO: 38346521 NR Description: OSJNBa0027H09.16
  misc_feature (103)..(210): NCBI GI NO: 25365932 NR Description: unknown protein T32E8.10
  misc_feature (103)..(210): NCBI GI NO: 30699285 NR Description: expressed protein [Arabidopsis thaliana]
  misc_feature (19)..(71): NCBI GI NO: 25365932 NR Description: unknown protein T32E8.10
  misc_feature (19)..(71): NCBI GI NO: 30699285 NR Description: expressed protein [Arabidopsis thaliana]
MVKKVVRPSSFDLDIHLDKSWKEDVTCPICLDYPHNAVLLRCTSYEKGCRPFVCDTDQTRSNCLERFKGAYELPANVKVSSIAVAPLDSIHIVSSHANNRPSCPLCRGDVIGWIVISEARLHLNQKKRCCEEDCCSFTGNFNELQKHTQQKHPDSRPSEIDPARQVDWDNFQQSSDIVDVLSTIHAQVPNGIVLGDYVIEYGDDDTGDDYEVLRRVRRKWWSFICCKAFCRYPRSRRRGRGRDNRGSGRRNSNQAHLENFNLEVPTQAVDLRELRFDEIDDEYIVTGAVPSMATPGRMASFHYRDTRYGR

SEQ ID NO: 13866 - DNA, 1205 bp, Triticum aestivum
  misc_feature (1)..(1205): Ceres Seq. ID no. 13584213
accattacctagaacattcctaatcgaaaaactagaacggtggtagtactagtgtgctccactaccaccaccaacaccacgagtgagggcggtggccaaaagacaggagataaggcgagactgtgagagggacagggcgggagacctcgacgacccctctcattgtttctttccggccgtccagcgccggcaggcagcgaagctagggcagatcgaatcaacagacgcgcgccggccgccggacaagatgatgggtcgcccggtgttcgtgctcttcggctcctccatcgtgcagtacagcttcagcaacggcggatggggagccaccctcaccgacgtctacgcccgcaaggctgatattgttctcagaggatatattgcatggaactcaaggcgagcacttcaagtcattaccaaaattttccccaaggattcagcagtgcagcctagcttggtggtagtttactttggtggcaatgattcgattgctccgcacccttctgggcttggacctcatgtgccacttgaggagtacatggacaacatgaggaagataggagagcacctcaagagcctgtccgacaagactcgtgtgatctttctgagctgcccgccgctcaacgaggagctgctcaagaaatcaacgagcactgcactgagcgagattgtgcggaccaatgaaacctgccgtctctactctgaagcatgtatatctgtatcgaaagagatgggcatcaaggtggtcgatctttggaacgccatgcagaaacgagaggactgggccacagcatgctttacggacgggctgcatttgtcagaagaggggagcaatatagttgtggaagagatcctgaggatcctcaaggaggcggagtgggatccatgcctacactggaaggcgatgccgaccgagttcggggaggactcgccctacgaccttgtcgcctctagcggcaaatccaccatcaacccatccgagtggacattccacaggaaaagatcatgggaatgaacggatcgccaggacatgtgtgagatcgagcagctgcacgtgatattttgcgccggcgctcttcggtcgctttgtgttattcatctgatggaagaacgtgataagatgtttctgaattgcaagtgtccatcgggtcgtagaattaataatgaacatgtttgagttgaacaacgttgagctgagttgggtgtgc

SEQ ID NO: 13867 - protein, 254 aa, Triticum aestivum
  peptide (1)..(254): Ceres Seq. ID no. 13584214
  misc_feature (8)..(201): Pfam Name: Pfam Description:  GDSL-like Lipase/Acylhydrolase
  misc_feature (1)..(254): NCBI GI NO: 21554235 NR Description: CPRD49 [Arabidopsis thaliana]
  misc_feature (1)..(254): NCBI GI NO: 18399151 NR Description: GDSL-motif lipase/hydrolase protein
  misc_feature (4)..(254): NCBI GI NO: 13161403 NR Description: CPRD49 [Vigna unguiculata]
  misc_feature (1)..(254): NCBI GI NO: 18404664 NR Description: GDSL-motif lipase/hydrolase protein
  misc_feature (1)..(238): NCBI GI NO: 16974631 NR Description: At2g38180/F16M14.11 [Arabidopsis thaliana]
  misc_feature (1)..(207): NCBI GI NO: 38454102 NR Description: At5g45920 [Arabidopsis thaliana]
  misc_feature (4)..(230): NCBI GI NO: 15242002 NR Description: GDSL-motif lipase/hydrolase protein
  misc_feature (2)..(207): NCBI GI NO: 15242539 NR Description: GDSL-motif lipase/hydrolase protein
  misc_feature (2)..(230): NCBI GI NO: 37535366 NR Description: putative esterase
  misc_feature (4)..(206): NCBI GI NO: 34903948 NR Description: OSJNBa0038J17.19
MMGRPVFVLFGSSIVQYSFSNGGWGATLTDVYARKADIVLRGYIAWNSRRALQVITKIFPKDSAVQPSLVVVYFGGNDSIAPHPSGLGPHVPLEEYMDNMRKIGEHLKSLSDKTRVIFLSCPPLNEELLKKSTSTALSEIVRTNETCRLYSEACISVSKEMGIKVVDLWNAMQKREDWATACFTDGLHLSEEGSNIVVEEILRILKEAEWDPCLHWKAMPTEFGEDSPYDLVASSGKSTINPSEWTFHRKRSWE

SEQ ID NO: 13868 - protein, 253 aa, Triticum aestivum
  peptide (1)..(253): Ceres Seq. ID no. 13584215
  misc_feature (7)..(200): Pfam Name: Pfam Description:  GDSL-like Lipase/Acylhydrolase
  misc_feature (1)..(253): NCBI GI NO: 21554235 NR Description: CPRD49 [Arabidopsis thaliana]
  misc_feature (1)..(253): NCBI GI NO: 18399151 NR Description: GDSL-motif lipase/hydrolase protein
  misc_feature (3)..(253): NCBI GI NO: 13161403 NR Description: CPRD49 [Vigna unguiculata]
  misc_feature (1)..(253): NCBI GI NO: 18404664 NR Description: GDSL-motif lipase/hydrolase protein
  misc_feature (1)..(237): NCBI GI NO: 16974631 NR Description: At2g38180/F16M14.11 [Arabidopsis thaliana]
  misc_feature (1)..(206): NCBI GI NO: 38454102 NR Description: At5g45920 [Arabidopsis thaliana]
  misc_feature (3)..(229): NCBI GI NO: 15242002 NR Description: GDSL-motif lipase/hydrolase protein
  misc_feature (1)..(206): NCBI GI NO: 15242539 NR Description: GDSL-motif lipase/hydrolase protein
  misc_feature (1)..(229): NCBI GI NO: 37535366 NR Description: putative esterase
  misc_feature (3)..(205): NCBI GI NO: 34903948 NR Description: OSJNBa0038J17.19
MGRPVFVLFGSSIVQYSFSNGGWGATLTDVYARKADIVLRGYIAWNSRRALQVITKIFPKDSAVQPSLVVVYFGGNDSIAPHPSGLGPHVPLEEYMDNMRKIGEHLKSLSDKTRVIFLSCPPLNEELLKKSTSTALSEIVRTNETCRLYSEACISVSKEMGIKVVDLWNAMQKREDWATACFTDGLHLSEEGSNIVVEEILRILKEAEWDPCLHWKAMPTEFGEDSPYDLVASSGKSTINPSEWTFHRKRSWE

SEQ ID NO: 13869 - protein, 158 aa, Triticum aestivum
  peptide (1)..(158): Ceres Seq. ID no. 13584216
  misc_feature (1)..(105): Pfam Name: Pfam Description:  GDSL-like Lipase/Acylhydrolase
  misc_feature (1)..(158): NCBI GI NO: 21554235 NR Description: CPRD49 [Arabidopsis thaliana]
  misc_feature (1)..(158): NCBI GI NO: 18399151 NR Description: GDSL-motif lipase/hydrolase protein
  misc_feature (1)..(158): NCBI GI NO: 13161403 NR Description: CPRD49 [Vigna unguiculata]
  misc_feature (1)..(158): NCBI GI NO: 18404664 NR Description: GDSL-motif lipase/hydrolase protein
  misc_feature (1)..(142): NCBI GI NO: 16974631 NR Description: At2g38180/F16M14.11 [Arabidopsis thaliana]
  misc_feature (1)..(111): NCBI GI NO: 38454102 NR Description: At5g45920 [Arabidopsis thaliana]
  misc_feature (1)..(134): NCBI GI NO: 15242002 NR Description: GDSL-motif lipase/hydrolase protein
  misc_feature (1)..(111): NCBI GI NO: 15242539 NR Description: GDSL-motif lipase/hydrolase protein
  misc_feature (1)..(134): NCBI GI NO: 37535366 NR Description: putative esterase
  misc_feature (1)..(110): NCBI GI NO: 34903948 NR Description: OSJNBa0038J17.19
MDNMRKIGEHLKSLSDKTRVIFLSCPPLNEELLKKSTSTALSEIVRTNETCRLYSEACISVSKEMGIKVVDLWNAMQKREDWATACFTDGLHLSEEGSNIVVEEILRILKEAEWDPCLHWKAMPTEFGEDSPYDLVASSGKSTINPSEWTFHRKRSWE

SEQ ID NO: 13870 - DNA, 586 bp, Triticum aestivum
  misc_feature (1)..(586): Ceres Seq. ID no. 15173379
caccacaagagaagagagagagagagagagagagagagcctgagcagcgacgatgtcgagcttgatgacgaagaaggagatcgggcagacccacgacgtgctccgcttcggcgtcaacgacagcgtcagggccgacctcgcgccggcgcaccccgtccaggccaccatccataaggagaccaagttctgggacgagaagaagaggttcgggaccgaggccatctacgggtccgccttcaacatccgcaaggacctggacgcccaaatcctctccaggttccaaaggcccccaggtgcattgccatcatctatgctaggatatgaggcaatgacaggttccttggatgattttggatttgaagattaccttaacttgccccaggactctgacagcctgcgcataccggacatgcaccacgggatggaggttcggcttggcctgtcgaagggccctgtctgccccagcttcagttgattccttccacccatgtattttgcttcccgtccagcatctacactgtatcatggattggtgaaacatgagaagtaaataattgggtattgcatcagtctgaatttcatgaac

SEQ ID NO: 13871 - protein, 140 aa, Triticum aestivum
  peptide (1)..(140): Ceres Seq. ID no. 15173380
  misc_feature (9)..(131): Pfam Name: Pfam Description:  Proteasome maturation factor UMP1
  misc_feature (9)..(139): NCBI GI NO: 25493097 NR Description: hypothetical protein [imported] - Picea mariana
  misc_feature (9)..(139): NCBI GI NO: 9828633 NR Description: F1N21.7 [Arabidopsis thaliana]
  misc_feature (9)..(139): NCBI GI NO: 18408726 NR Description: expressed protein [Arabidopsis thaliana]
  misc_feature (11)..(139): NCBI GI NO: 15240969 NR Description: expressed protein [Arabidopsis thaliana]
  misc_feature (93)..(139): NCBI GI NO: 6049098 NR Description: unknown [Picea abies]
  misc_feature (95)..(139): NCBI GI NO: 2996130 NR Description: hypothetical protein [Picea mariana]
  misc_feature (95)..(139): NCBI GI NO: 2996132 NR Description: hypothetical protein [Picea mariana]
  misc_feature (95)..(139): NCBI GI NO: 2996128 NR Description: hypothetical protein [Picea mariana]
  misc_feature (12)..(130): NCBI GI NO: 27691986 NR Description: similar to hypothetical protein HSPC014
MSSLMTKKEIGQTHDVLRFGVNDSVRADLAPAHPVQATIHKETKFWDEKKRFGTEAIYGSAFNIRKDLDAQILSRFQRPPGALPSSMLGYEAMTGSLDDFGFEDYLNLPQDSDSLRIPDMHHGMEVRLGLSKGPVCPSFS

SEQ ID NO: 13872 - protein, 136 aa, Triticum aestivum
  peptide (1)..(136): Ceres Seq. ID no. 15173381
  misc_feature (5)..(127): Pfam Name: Pfam Description:  Proteasome maturation factor UMP1
  misc_feature (5)..(135): NCBI GI NO: 25493097 NR Description: hypothetical protein [imported] - Picea mariana
  misc_feature (5)..(135): NCBI GI NO: 9828633 NR Description: F1N21.7 [Arabidopsis thaliana]
  misc_feature (5)..(135): NCBI GI NO: 18408726 NR Description: expressed protein [Arabidopsis thaliana]
  misc_feature (7)..(135): NCBI GI NO: 15240969 NR Description: expressed protein [Arabidopsis thaliana]
  misc_feature (89)..(135): NCBI GI NO: 6049098 NR Description: unknown [Picea abies]
  misc_feature (91)..(135): NCBI GI NO: 2996130 NR Description: hypothetical protein [Picea mariana]
  misc_feature (91)..(135): NCBI GI NO: 2996132 NR Description: hypothetical protein [Picea mariana]
  misc_feature (91)..(135): NCBI GI NO: 2996128 NR Description: hypothetical protein [Picea mariana]
  misc_feature (8)..(126): NCBI GI NO: 27691986 NR Description: similar to hypothetical protein HSPC014
MTKKEIGQTHDVLRFGVNDSVRADLAPAHPVQATIHKETKFWDEKKRFGTEAIYGSAFNIRKDLDAQILSRFQRPPGALPSSMLGYEAMTGSLDDFGFEDYLNLPQDSDSLRIPDMHHGMEVRLGLSKGPVCPSFS

SEQ ID NO: 13873 - DNA, 623 bp, Triticum aestivum
  misc_feature (1)..(623): Ceres Seq. ID no. 15173386
acatccaattccaatcacaagctccaaacaagcacagcaaaccaatccagagtaccatcggctatcaatcagcaggaggaagaaatagctgctcgatcggggaagaatcaagaggctcggcgaagatgcaggcggcgaaggagaaggtgaaggacggggtgagcgcggtgaaggccaagaccaagatcacgcaggccaaggcgtcggagaaggcggaggcggccacggcgaggtcgcacgccgagcgggagctggcgcacgagcgcggcaaggccaaggtcgccgcggccaagatggagctgcaccaggacaaggcgctccaccgggaggaggccatggagcaccgcatccacaagcacggcggccacggccgccaccaccacaagcacggcgtcggcatcgtggccgcgcccccaccggcaactggggcgggagccggggcgtaccaccatcctcccgccgccggtggccactactactaatccctaggcagctcgatcgccagctagatgggcacatgcgtcgcttctgtgtgatgtgatcttgatagctaataagcctctactttgtactctgtgtgtaatgacttaccaacgcgtgctttttaattttgcacttggttg

SEQ ID NO: 13874 - protein, 159 aa, Triticum aestivum
  peptide (1)..(159): Ceres Seq. ID no. 15173387
  misc_feature (42)..(114): Pfam Name: LEA Pfam Description: Late embryogenesis abundant
  misc_feature (42)..(159): NCBI GI NO: 34897842 NR Description: P0514G12.41
  misc_feature (42)..(136): NCBI GI NO: 18652404 NR Description: unknown [Hordeum vulgare]
  misc_feature (42)..(104): NCBI GI NO: 18652403 NR Description: unknown [Hordeum vulgare]
  misc_feature (42)..(151): NCBI GI NO: 15223243 NR Description: late-embryogenesis abundant protein -related
  misc_feature (42)..(132): NCBI GI NO: 4102692 NR Description: late-embryogenesis abundant protein [Glycine max]
  misc_feature (42)..(152): NCBI GI NO: 4836407 NR Description: seed maturation protein PM29 [Glycine max]
  misc_feature (42)..(148): NCBI GI NO: 38346714 NR Description: OSJNBa0086O06.12
  misc_feature (42)..(125): NCBI GI NO: 15226951 NR Description: late embryogenesis abundant proteins -related
IQFQSQAPNKHSKPIQSTIGYQSAGGRNSCSIGEESRGSAKMQAAKEKVKDGVSAVKAKTKITQAKASEKAEAATARSHAERELAHERGKAKVAAAKMELHQDKALHREEAMEHRIHKHGGHGRHHHKHGVGIVAAPPPATGAGAGAYHHPPAAGGHYY

SEQ ID NO: 13875 - protein, 118 aa, Triticum aestivum
  peptide (1)..(118): Ceres Seq. ID no. 15173388
  misc_feature (1)..(73): Pfam Name: LEA Pfam Description: Late embryogenesis abundant
  misc_feature (1)..(118): NCBI GI NO: 34897842 NR Description: P0514G12.41
  misc_feature (1)..(95): NCBI GI NO: 18652404 NR Description: unknown [Hordeum vulgare]
  misc_feature (1)..(63): NCBI GI NO: 18652403 NR Description: unknown [Hordeum vulgare]
  misc_feature (1)..(110): NCBI GI NO: 15223243 NR Description: late-embryogenesis abundant protein -related
  misc_feature (1)..(91): NCBI GI NO: 4102692 NR Description: late-embryogenesis abundant protein [Glycine max]
  misc_feature (1)..(111): NCBI GI NO: 4836407 NR Description: seed maturation protein PM29 [Glycine max]
  misc_feature (1)..(107): NCBI GI NO: 38346714 NR Description: OSJNBa0086O06.12
  misc_feature (1)..(84): NCBI GI NO: 15226951 NR Description: late embryogenesis abundant proteins -related
MQAAKEKVKDGVSAVKAKTKITQAKASEKAEAATARSHAERELAHERGKAKVAAAKMELHQDKALHREEAMEHRIHKHGGHGRHHHKHGVGIVAAPPPATGAGAGAYHHPPAAGGHYY

SEQ ID NO: 13876 - DNA, 884 bp, Triticum aestivum
  misc_feature (1)..(884): Ceres Seq. ID no. 13584263
gaagcccccgtccgattcaacaggcaaaacccccctcacgctcacgcgatgggagtcgccgcctccgccgccccccctcccccggaggccgccgcgcccgccgatccaccatccaaagaagatgcccagcatgccgctgccgccgccgccgcagcagcagcagctgcgcccgccgattcaccggcaaaggaagaggtccagtccgccgccgccgccgctcccggcggcggggcggacgcggcgggggagacggtggtcctggacgccgccgcggagggcggcgaggaggaggaaggggagtgcgggttttgcgtgtacatgaagggcggcgggtgcaaggaggagttcgtggggtgggagaagtgcgtggagcaggcggaggcggagggcagcgacgtcgtcgagcgctgccacgacgccaccgccgcgctgcgcaggtgcatggacaagttcccggactactacgagcccatcctccgcgccgagcgcgccatggccgaggatctcgaggccttcaaggccagcgaagcctccgagccctcccccgcctcgccgccgcccccggcggcsgaggaggaacagggcgacgataagaagcaggcggaggcggtggtggcgaaggaggatctcgcggcctgatcccgccgcctaggcgtgggatcttgcgattttttggtgagatttgaggcatcctagatgtgaattattttgttttacctggacgtgatctgcaaggtgggagagggcggcctctccaagaaaagttcgattcttttggtgggaattatacacttgttcacgagttctagctcgtgaactaatatggagaagtgatcttgtgctgtaataataatccaatgcatcgatactgatttgrcrcggtc

SEQ ID NO: 13877 - protein, 212 aa, Triticum aestivum
  peptide (1)..(212): Ceres Seq. ID no. 15222788
  misc_feature (16)..(208): Pfam Name: Pfam Description:  MARCKS family
  misc_feature (46)..(200): NCBI GI NO: 34394883 NR Description: unknown protein
  misc_feature (17)..(179): NCBI GI NO: 8778401 NR Description: F16A14.27 [Arabidopsis thaliana]
  misc_feature (17)..(179): NCBI GI NO: 30683589 NR Description: expressed protein [Arabidopsis thaliana]
  misc_feature (17)..(179): NCBI GI NO: 21592562 NR Description: unknown [Arabidopsis thaliana]
  misc_feature (83)..(211): NCBI GI NO: 15242817 NR Description: hypothetical protein [Arabidopsis thaliana]
  misc_feature (87)..(169): NCBI GI NO: 15242783 NR Description: hypothetical protein [Arabidopsis thaliana]
  misc_feature (84)..(170): NCBI GI NO: 15241716 NR Description: hypothetical protein [Arabidopsis thaliana]
  misc_feature (14)..(82): NCBI GI NO: 2204081 NR Description: insoluble protein [Pinctada fucata]
  misc_feature (190)..(190): Xaa is any aa, unknown or other
EAPVRFNRQNPPHAHAMGVAASAAPPPPEAAAPADPPSKEDAQHAAAAAAAAAAAAPADSPAKEEVQSAAAAAPGGGADAAGETVVLDAAAEGGEEEEGECGFCVYMKGGGCKEEFVGWEKCVEQAEAEGSDVVERCHDATAALRRCMDKFPDYYEPILRAERAMAEDLEAFKASEASEPSPASPPPPAXEEEQGDDKKQAEAVVAKEDLAA

SEQ ID NO: 13878 - protein, 196 aa, Triticum aestivum
  peptide (1)..(196): Ceres Seq. ID no. 15222789
  misc_feature (28)..(196): NCBI GI NO: 34894910 NR Description: OJ1008_F01.9
  misc_feature (16)..(196): NCBI GI NO: 34910872 NR Description: P0003E08.2
  misc_feature (61)..(196): NCBI GI NO: 30793991 NR Description: unknown protein [Arabidopsis thaliana]
  misc_feature (79)..(196): NCBI GI NO: 37533408 NR Description: hypothetical protein
  misc_feature (28)..(196): NCBI GI NO: 24663664 NR Description: CG11274-PA [Drosophila melanogaster]
  misc_feature (61)..(196): NCBI GI NO: 15224564 NR Description: glycine-rich protein [Arabidopsis thaliana]
  misc_feature (48)..(196): NCBI GI NO: 37535678 NR Description: hypothetical protein
  misc_feature (13)..(196): NCBI GI NO: 23018055 NR Description: hypothetical protein [Thermobifida fusca]
  misc_feature (36)..(196): NCBI GI NO: 2388805 NR Description: attachment region binding protein [Gallus gallus]
  misc_feature (77)..(196): NCBI GI NO: 2204081 NR Description: insoluble protein [Pinctada fucata]
  misc_feature (190)..(190): Xaa is any aa, unknown or other
SPRPIQQAKPPSRSRDGSRRLRRPPSPGGRRARRSTIQRRCPACRCRRRRSSSSCARRFTGKGRGPVRRRRRSRRRGGRGGGDGGPGRRRGGRRGGGRGVRVLRVHEGRRVQGGVRGVGEVRGAGGGGGQRRRRALPRRHRRAAQVHGQVPGLLRAHPPRRARHGRGSRGLQGQRSLRALPRLAAAPGGXGGTGRR

SEQ ID NO: 13879 - protein, 196 aa, Triticum aestivum
  peptide (1)..(196): Ceres Seq. ID no. 15222790
  misc_feature (1)..(192): Pfam Name: Pfam Description:  MARCKS family
  misc_feature (30)..(184): NCBI GI NO: 34394883 NR Description: unknown protein
  misc_feature (1)..(163): NCBI GI NO: 8778401 NR Description: F16A14.27 [Arabidopsis thaliana]
  misc_feature (1)..(163): NCBI GI NO: 30683589 NR Description: expressed protein [Arabidopsis thaliana]
  misc_feature (1)..(163): NCBI GI NO: 21592562 NR Description: unknown [Arabidopsis thaliana]
  misc_feature (67)..(195): NCBI GI NO: 15242817 NR Description: hypothetical protein [Arabidopsis thaliana]
  misc_feature (71)..(153): NCBI GI NO: 15242783 NR Description: hypothetical protein [Arabidopsis thaliana]
  misc_feature (68)..(154): NCBI GI NO: 15241716 NR Description: hypothetical protein [Arabidopsis thaliana]
  misc_feature (1)..(66): NCBI GI NO: 2204081 NR Description: insoluble protein [Pinctada fucata]
  misc_feature (174)..(174): Xaa is any aa, unknown or other
MGVAASAAPPPPEAAAPADPPSKEDAQHAAAAAAAAAAAAPADSPAKEEVQSAAAAAPGGGADAAGETVVLDAAAEGGEEEEGECGFCVYMKGGGCKEEFVGWEKCVEQAEAEGSDVVERCHDATAALRRCMDKFPDYYEPILRAERAMAEDLEAFKASEASEPSPASPPPPAXEEEQGDDKKQAEAVVAKEDLAA

SEQ ID NO: 13880 - DNA, 851 bp, Triticum aestivum
  misc_feature (1)..(851): Ceres Seq. ID no. 15173393
gaatccatccacctctcgagctcttttctgaagccgcaagcgagcagagcacaccgcacacgtagcagtttccctttcagatattttcttcgactagccaccatgactgctttggccaagccctccgcctcagcgccgaagccgaagaagacctccgccgctggagccgcccacccgacctacttcgagatgatcaaggaggcgatcgcggctctcaaggacaggaccgggtcgagctcggtcgccatcgccaagttcatcgaggagaagcacggcaaggccctcccggccaacttcaagaagatgctctccgtccagctccgctcctccgccgccaagggcaagctcgtcaaggtcaaggcctcctacaagctctccgacgccgccaagaaggactcccccaagcccaaggccaagcccgccgcccccaaggctgcggcgaagcccgcaaaggacgccgccaagcccaagaagaaggcctccgcgaagcccaagaaggccgccgccgctggcacgaagcgcaaggcacccgagaagaagaagctggtcgccaaagccaagaagtcgcccgcggcgaaggccaaggcgaagccgaagaccgtccgctccccggccgccaagaaggcccgcaaggtcgcctccgcttgatctgatctgatctgatcttataggtggttttaagtgtgcgttggtgctctgggtctgtacaaaaggatgcctcatcctccctgatttaggcttcggttctgctaggcaggttctatgtactatcgctggtggtgtttagtgtctggaatgttcaggtgtcagatgtatccagctcaaactctgaaatgaatttgcagtttcgc

SEQ ID NO: 13881 - protein, 215 aa, Triticum aestivum
  peptide (1)..(215): Ceres Seq. ID no. 15173394
  misc_feature (57)..(127): Pfam Name: Pfam Description:  linker histone H1 and H5 family
  misc_feature (31)..(215): NCBI GI NO: 22135471 NR Description: histone H1-like protein HON101 [Zea mays]
  misc_feature (39)..(215): NCBI GI NO: 32489126 NR Description: OSJNBb0018J12.6
  misc_feature (36)..(215): NCBI GI NO: 4106696 NR Description: ribosome-sedimenting protein [Pisum sativum]
  misc_feature (36)..(215): NCBI GI NO: 4996567 NR Description: ribosome-sedimenting protein [Pisum sativum]
  misc_feature (36)..(215): NCBI GI NO: 21465095 NR Description: histone H1 [Pisum sativum subsp. abyssinicum]
  misc_feature (36)..(215): NCBI GI NO: 13540401 NR Description: histone H1 [Lens culinaris]
  misc_feature (36)..(215): NCBI GI NO: 13540395 NR Description: histone H1 [Pisum sativum]
  misc_feature (36)..(215): NCBI GI NO: 13540391 NR Description: histone H1 [Pisum sativum]
  misc_feature (36)..(215): NCBI GI NO: 13540403 NR Description: histone H1 [Lens culinaris]
  misc_feature (36)..(215): NCBI GI NO: 13540405 NR Description: histone H1 [Lens culinaris]
ESIHLSSSFLKPQASRAHRTRSSFPFRYFLRLATMTALAKPSASAPKPKKTSAAGAAHPTYFEMIKEAIAALKDRTGSSSVAIAKFIEEKHGKALPANFKKMLSVQLRSSAAKGKLVKVKASYKLSDAAKKDSPKPKAKPAAPKAAAKPAKDAAKPKKKASAKPKKAAAAGTKRKAPEKKKLVAKAKKSPAAKAKAKPKTVRSPAAKKARKVASA

SEQ ID NO: 13882 - protein, 181 aa, Triticum aestivum
  peptide (1)..(181): Ceres Seq. ID no. 15173395
  misc_feature (23)..(93): Pfam Name: Pfam Description:  linker histone H1 and H5 family
  misc_feature (1)..(181): NCBI GI NO: 22135471 NR Description: histone H1-like protein HON101 [Zea mays]
  misc_feature (5)..(181): NCBI GI NO: 32489126 NR Description: OSJNBb0018J12.6
  misc_feature (2)..(181): NCBI GI NO: 4106696 NR Description: ribosome-sedimenting protein [Pisum sativum]
  misc_feature (2)..(181): NCBI GI NO: 4996567 NR Description: ribosome-sedimenting protein [Pisum sativum]
  misc_feature (2)..(181): NCBI GI NO: 21465095 NR Description: histone H1 [Pisum sativum subsp. abyssinicum]
  misc_feature (2)..(181): NCBI GI NO: 13540401 NR Description: histone H1 [Lens culinaris]
  misc_feature (2)..(181): NCBI GI NO: 13540395 NR Description: histone H1 [Pisum sativum]
  misc_feature (2)..(181): NCBI GI NO: 13540391 NR Description: histone H1 [Pisum sativum]
  misc_feature (2)..(181): NCBI GI NO: 13540403 NR Description: histone H1 [Lens culinaris]
  misc_feature (2)..(181): NCBI GI NO: 13540405 NR Description: histone H1 [Lens culinaris]
MTALAKPSASAPKPKKTSAAGAAHPTYFEMIKEAIAALKDRTGSSSVAIAKFIEEKHGKALPANFKKMLSVQLRSSAAKGKLVKVKASYKLSDAAKKDSPKPKAKPAAPKAAAKPAKDAAKPKKKASAKPKKAAAAGTKRKAPEKKKLVAKAKKSPAAKAKAKPKTVRSPAAKKARKVASA

SEQ ID NO: 13883 - protein, 152 aa, Triticum aestivum
  peptide (1)..(152): Ceres Seq. ID no. 15173396
  misc_feature (1)..(64): Pfam Name: Pfam Description:  linker histone H1 and H5 family
  misc_feature (1)..(152): NCBI GI NO: 22135471 NR Description: histone H1-like protein HON101 [Zea mays]
  misc_feature (1)..(152): NCBI GI NO: 32489126 NR Description: OSJNBb0018J12.6
  misc_feature (1)..(152): NCBI GI NO: 4106696 NR Description: ribosome-sedimenting protein [Pisum sativum]
  misc_feature (1)..(152): NCBI GI NO: 4996567 NR Description: ribosome-sedimenting protein [Pisum sativum]
  misc_feature (1)..(152): NCBI GI NO: 21465095 NR Description: histone H1 [Pisum sativum subsp. abyssinicum]
  misc_feature (1)..(152): NCBI GI NO: 13540401 NR Description: histone H1 [Lens culinaris]
  misc_feature (1)..(152): NCBI GI NO: 13540395 NR Description: histone H1 [Pisum sativum]
  misc_feature (1)..(152): NCBI GI NO: 13540391 NR Description: histone H1 [Pisum sativum]
  misc_feature (1)..(152): NCBI GI NO: 13540403 NR Description: histone H1 [Lens culinaris]
  misc_feature (1)..(152): NCBI GI NO: 13540405 NR Description: histone H1 [Lens culinaris]
MIKEAIAALKDRTGSSSVAIAKFIEEKHGKALPANFKKMLSVQLRSSAAKGKLVKVKASYKLSDAAKKDSPKPKAKPAAPKAAAKPAKDAAKPKKKASAKPKKAAAAGTKRKAPEKKKLVAKAKKSPAAKAKAKPKTVRSPAAKKARKVASA

SEQ ID NO: 13884 - DNA, 801 bp, Triticum aestivum
  misc_feature (1)..(801): Ceres Seq. ID no. 12586124
ccgctgttctacccttgctgcttcctaccctctcttgccgcctctgctgtgagcgagcgagcgcgaggaatggaggcgaggcgggagatcgccaagcgggcgcgcacggccggcacgagcaacgacgacgacgccgggagccaggggagcgcgggaggggcggcggcggcgtcctccagggccgacgtgagcaccggcgcggcggagatggacggggaggagttggccgtcgtggcggcggcggaggctgaggtggcgggctcggcggagacggaggagcacgtccagcgcatcctcctcgccatcgacaacttcacccgcaaggtgtcggagatgctggactccgggcgcgccatgttcaaggacctcgccgccgacttcgaggaccgcctctgcacgatccacaaggagagggtggagaagtgggaggaggagatccgggagctgcgcgcccgtgacgccgccaacgagcagacccgcgccgtcctccacaacgcccaactccagctcttccacatccgcgaatagtcagtcgagttcagtctgcttcgatcagctagctgttccacacatcttcagcaaaggcaagacatccaacagcactgtctgcatgcaacagcagcagctcccctgtttcttctgcatgctttctgctgtatatctttctgaacttatcagcacagctatattaacaagtccagtttgatgtagtactactaatactgtatgctcgtatgaatctgccacctgcagtgagttgccacttctgaatctgaacatgaatgccttgcactttagttg

SEQ ID NO: 13885 - protein, 175 aa, Triticum aestivum
  peptide (1)..(175): Ceres Seq. ID no. 12586125
  misc_feature (13)..(170): NCBI GI NO: 34902406 NR Description: Unknown protein
  misc_feature (32)..(170): NCBI GI NO: 29367593 NR Description: unknown [Oryza sativa (japonica cultivar-group)]
  misc_feature (47)..(138): NCBI GI NO: 13324791 NR Description: unknown protein [Oryza sativa]
  misc_feature (39)..(167): NCBI GI NO: 30679873 NR Description: expressed protein [Arabidopsis thaliana]
  misc_feature (42)..(167): NCBI GI NO: 11283453 NR Description: hypothetical protein F15A17
PLFYPCCFLPSLAASAVSERARGMEARREIAKRARTAGTSNDDDAGSQGSAGGAAAASSRADVSTGAAEMDGEELAVVAAAEAEVAGSAETEEHVQRILLAIDNFTRKVSEMLDSGRAMFKDLAADFEDRLCTIHKERVEKWEEEIRELRARDAANEQTRAVLHNAQLQLFHIRE

SEQ ID NO: 13886 - protein, 152 aa, Triticum aestivum
  peptide (1)..(152): Ceres Seq. ID no. 12586126
  misc_feature (1)..(147): NCBI GI NO: 34902406 NR Description: Unknown protein
  misc_feature (9)..(147): NCBI GI NO: 29367593 NR Description: unknown [Oryza sativa (japonica cultivar-group)]
  misc_feature (24)..(115): NCBI GI NO: 13324791 NR Description: unknown protein [Oryza sativa]
  misc_feature (16)..(144): NCBI GI NO: 30679873 NR Description: expressed protein [Arabidopsis thaliana]
  misc_feature (19)..(144): NCBI GI NO: 11283453 NR Description: hypothetical protein F15A17
MEARREIAKRARTAGTSNDDDAGSQGSAGGAAAASSRADVSTGAAEMDGEELAVVAAAEAEVAGSAETEEHVQRILLAIDNFTRKVSEMLDSGRAMFKDLAADFEDRLCTIHKERVEKWEEEIRELRARDAANEQTRAVLHNAQLQLFHIRE

SEQ ID NO: 13887 - protein, 106 aa, Triticum aestivum
  peptide (1)..(106): Ceres Seq. ID no. 12586127
  misc_feature (1)..(101): NCBI GI NO: 34902406 NR Description: Unknown protein
  misc_feature (1)..(101): NCBI GI NO: 29367593 NR Description: unknown [Oryza sativa (japonica cultivar-group)]
  misc_feature (1)..(69): NCBI GI NO: 13324791 NR Description: unknown protein [Oryza sativa]
  misc_feature (1)..(98): NCBI GI NO: 30679873 NR Description: expressed protein [Arabidopsis thaliana]
  misc_feature (1)..(98): NCBI GI NO: 11283453 NR Description: hypothetical protein F15A17
MDGEELAVVAAAEAEVAGSAETEEHVQRILLAIDNFTRKVSEMLDSGRAMFKDLAADFEDRLCTIHKERVEKWEEEIRELRARDAANEQTRAVLHNAQLQLFHIRE

SEQ ID NO: 13888 - DNA, 939 bp, Triticum aestivum
  misc_feature (1)..(939): Ceres Seq. ID no. 15173400
gactccagtccccccaaattacaacctctctctctcgccgtctgctcgctcgctcgtcccccaaatcccaccccctccccgaccgaaccccagcggcgtcgccggcgatggagtgcgtcatcggcgtggtgggcagcgacttcgcggtggtggcggcggacacgtccgccgtgcagagcatcctcgtccacaagacggacgaggacaagatcatgctcctcgactcccacaagctcatgggcgcctccggggagcccggcgaccgcgtgcagttcaccgagttcatccagaagaacctccacctctaccagttccgcaacaacatgccgctcagcaccgccgccaccgccaacttcacccgcggcgagctcgccaccgccctgcgcaagaatccctactccgtaaacatcatacttgcagggtttgataaagacgctggtgcatcgatgtactacattgactacatcgcgacgctccacaagatcgacaagggagcattcgggtacgggtcgtacttctgtctgtcgctgatggacaagttgtaccgccctgacatgtctgtcgaggaagcggtagaccttgttgacaagtgcatcaaggagatcagactccggctggtcgtcgcgcctcagaatttcgccatcaagatcgtggacaaggatggcgccagggactatgctaggcgtgagatcggaggtgacagtcctgcagccgcaaccgcaaccgcagcagtagcaacaattgcctgaggtgattggccctgtcggtggtcatttggctgggtggaggctgaacccttcctgtcaattgtttccgagtactgtcactatgtaatcgcaatacgtttcggttcgagaactgtgttgcaaattctcccagatgtggactagtctgtttatgaccccctatttcatggttatatgtttcactgtttcttgt

SEQ ID NO: 13889 - protein, 248 aa, Triticum aestivum
  peptide (1)..(248): Ceres Seq. ID no. 15173401
  misc_feature (36)..(217): Pfam Name: Pfam Description:  Proteasome A-type and B-type
  misc_feature (36)..(248): NCBI GI NO: 27552546 NR Description: 20S proteasome beta 4 subunit
  misc_feature (36)..(248): NCBI GI NO: 17380213 NR Description: Proteasome subunit beta type 2
  misc_feature (36)..(228): NCBI GI NO: 15233580 NR Description: 20S proteasome beta subunit D2 (PBD2)
  misc_feature (36)..(229): NCBI GI NO: 15228805 NR Description: 20S proteasome beta subunit D (PBD1)
  misc_feature (36)..(169): NCBI GI NO: 14594929 NR Description: putative beta4 proteasome subunit
  misc_feature (36)..(224): NCBI GI NO: 29841035 NR Description: similar to NM_017284 proteasome
  misc_feature (36)..(224): NCBI GI NO: 19113828 NR Description: proteasome component; c7-I subfamily
  misc_feature (36)..(224): NCBI GI NO: 4506195 NR Description: proteasome beta 2 subunit
  misc_feature (36)..(224): NCBI GI NO: 30585195 NR Description: Homo sapiens proteasome
  misc_feature (36)..(221): NCBI GI NO: 8394079 NR Description: proteasome
LQSPQITTSLSRRLLARSSPKSHPLPDRTPAASPAMECVIGVVGSDFAVVAADTSAVQSILVHKTDEDKIMLLDSHKLMGASGEPGDRVQFTEFIQKNLHLYQFRNNMPLSTAATANFTRGELATALRKNPYSVNIILAGFDKDAGASMYYIDYIATLHKIDKGAFGYGSYFCLSLMDKLYRPDMSVEEAVDLVDKCIKEIRLRLVVAPQNFAIKIVDKDGARDYARREIGGDSPAAATATAAVATIA

SEQ ID NO: 13890 - protein, 213 aa, Triticum aestivum; identical to SEQ ID NO: 6856
  peptide (1)..(213): Ceres Seq. ID no. 15173402
  misc_feature (1)..(182): Pfam Name: Pfam Description:  Proteasome A-type and B-type
  misc_feature (1)..(213): NCBI GI NO: 27552546 NR Description: 20S proteasome beta 4 subunit
  misc_feature (1)..(213): NCBI GI NO: 17380213 NR Description: Proteasome subunit beta type 2
  misc_feature (1)..(193): NCBI GI NO: 15233580 NR Description: 20S proteasome beta subunit D2 (PBD2)
  misc_feature (1)..(194): NCBI GI NO: 15228805 NR Description: 20S proteasome beta subunit D (PBD1)
  misc_feature (1)..(134): NCBI GI NO: 14594929 NR Description: putative beta4 proteasome subunit
  misc_feature (1)..(189): NCBI GI NO: 29841035 NR Description: similar to NM_017284 proteasome
  misc_feature (1)..(189): NCBI GI NO: 19113828 NR Description: proteasome component; c7-I subfamily
  misc_feature (1)..(189): NCBI GI NO: 4506195 NR Description: proteasome beta 2 subunit
  misc_feature (1)..(189): NCBI GI NO: 30585195 NR Description: Homo sapiens proteasome
  misc_feature (1)..(186): NCBI GI NO: 8394079 NR Description: proteasome

SEQ ID NO: 13891 - protein, 178 aa, Triticum aestivum; identical to SEQ ID NO: 6857
  peptide (1)..(178): Ceres Seq. ID no. 15173403
  misc_feature (1)..(147): Pfam Name: Pfam Description:  Proteasome A-type and B-type
  misc_feature (1)..(178): NCBI GI NO: 27552546 NR Description: 20S proteasome beta 4 subunit
  misc_feature (1)..(178): NCBI GI NO: 17380213 NR Description: Proteasome subunit beta type 2
  misc_feature (1)..(158): NCBI GI NO: 15233580 NR Description: 20S proteasome beta subunit D2 (PBD2)
  misc_feature (1)..(159): NCBI GI NO: 15228805 NR Description: 20S proteasome beta subunit D (PBD1)
  misc_feature (1)..(99): NCBI GI NO: 14594929 NR Description: putative beta4 proteasome subunit
  misc_feature (1)..(154): NCBI GI NO: 29841035 NR Description: similar to NM_017284 proteasome
  misc_feature (1)..(154): NCBI GI NO: 19113828 NR Description: proteasome component; c7-I subfamily
  misc_feature (1)..(154): NCBI GI NO: 4506195 NR Description: proteasome beta 2 subunit
  misc_feature (1)..(154): NCBI GI NO: 30585195 NR Description: Homo sapiens proteasome
  misc_feature (1)..(151): NCBI GI NO: 8394079 NR Description: proteasome

SEQ ID NO: 13892 - DNA, 850 bp, Triticum aestivum
  misc_feature (1)..(850): Ceres Seq. ID no. 12616797
actgactgggttggacttggggctgccctccccacggccacgctagaccgcccgctcctgccaagatccaacacaactttccgccccctcgtccggtcgtcgggccgtcgccgccgaacaccgcccccctccaccgaagcgcggcagctcgaaggttcgtgttctaataagcttattccccttgaggcagcatgcctaagataaagacgagccgtgtgaagtatcctgaaggatgggagcttattgaaccaactctccgtgatttggaagccaaaatgagagaagctgagaatgatacacatgatgggaagaggaagtgtgaggctctctggccaatcttccgtatttctcaccaaaagagccgttatatatatgatctctactatcgaaggaaggagataaaaaaggagctgtatgagttttgcttggaccaaggttatgcagacaaaaatctgattgctaagtggaaaaagccaggttatgagcgtctctgctgcctccgctgcatacagacacgagaccacaactttgcaaccacctgcgtctgcagggtccccaagcacctcagggaagagacggtgatagaatgtgtccactgcggatgcaaggggtgtgccagcggcgattgaagtcgccactcgttgttaagaataatctgaaaccgattgctcgagatgctctgttggatccctgatgaatgaatgaaaacaagtaacgtacaatcaggtgattcgtccatatattcactgtaaactctcgagccttggtatgtctttgcgtgagaagactcggttttctgccgtggaagttgacaactgtttcgctgagaatgttatgttaacccgatctt

SEQ ID NO: 13893 - protein, 145 aa, Triticum aestivum
  peptide (1)..(145): Ceres Seq. ID no. 12616798
  misc_feature (1)..(143): Pfam Name: Pfam Description:  G10 protein
  misc_feature (1)..(145): NCBI GI NO: 34908438 NR Description: putative G10 protein
  misc_feature (1)..(145): NCBI GI NO: 15233517 NR Description: G10 - like protein; protein id: At4g21110
  misc_feature (1)..(130): NCBI GI NO: 5852181 NR Description: zhb0011.1 [Oryza sativa (indica cultivar-group)]
  misc_feature (1)..(144): NCBI GI NO: 544359 NR Description: G10 PROTEIN HOMOLOG
  misc_feature (1)..(142): NCBI GI NO: 15029378 NR Description: G10 protein [Branchiostoma belcheri]
  misc_feature (2)..(142): NCBI GI NO: 15128111 NR Description: G10-like protein [Branchiostoma belcheri]
  misc_feature (1)..(142): NCBI GI NO: 120625 NR Description: G10 PROTEIN
  misc_feature (1)..(142): NCBI GI NO: 32171175 NR Description: maternal G10 transcript [Homo sapiens]
  misc_feature (1)..(142): NCBI GI NO: 31207407 NR Description: ENSANGP00000020650 [Anopheles gambiae]
  misc_feature (1)..(140): NCBI GI NO: 16758328 NR Description: maternal G10 transcript [Rattus norvegicus]
MPKIKTSRVKYPEGWELIEPTLRDLEAKMREAENDTHDGKRKCEALWPIFRISHQKSRYIYDLYYRRKEIKKELYEFCLDQGYADKNLIAKWKKPGYERLCCLRCIQTRDHNFATTCVCRVPKHLREETVIECVHCGCKGCASGD

SEQ ID NO: 13894 - protein, 117 aa, Triticum aestivum
  peptide (1)..(117): Ceres Seq. ID no. 12616799
  misc_feature (1)..(115): Pfam Name: Pfam Description:  G10 protein
  misc_feature (1)..(117): NCBI GI NO: 34908438 NR Description: putative G10 protein
  misc_feature (1)..(117): NCBI GI NO: 15233517 NR Description: G10 - like protein; protein id: At4g21110
  misc_feature (1)..(102): NCBI GI NO: 5852181 NR Description: zhb0011.1 [Oryza sativa (indica cultivar-group)]
  misc_feature (1)..(116): NCBI GI NO: 544359 NR Description: G10 PROTEIN HOMOLOG
  misc_feature (1)..(114): NCBI GI NO: 15029378 NR Description: G10 protein [Branchiostoma belcheri]
  misc_feature (1)..(114): NCBI GI NO: 15128111 NR Description: G10-like protein [Branchiostoma belcheri]
  misc_feature (1)..(114): NCBI GI NO: 120625 NR Description: G10 PROTEIN
  misc_feature (1)..(114): NCBI GI NO: 32171175 NR Description: maternal G10 transcript [Homo sapiens]
  misc_feature (1)..(114): NCBI GI NO: 31207407 NR Description: ENSANGP00000020650 [Anopheles gambiae]
  misc_feature (1)..(112): NCBI GI NO: 16758328 NR Description: maternal G10 transcript [Rattus norvegicus]
MREAENDTHDGKRKCEALWPIFRISHQKSRYIYDLYYRRKEIKKELYEFCLDQGYADKNLIAKWKKPGYERLCCLRCIQTRDHNFATTCVCRVPKHLREETVIECVHCGCKGCASGD

SEQ ID NO: 13895 - DNA, 882 bp, Triticum aestivum
  misc_feature (1)..(882): Ceres Seq. ID no. 13585616
ctagctcgattcgattccgccgccgccgcccaagcccgaggaggacgattcgattccgccgccgccgcccaagccgcccaagcccgaggaggacgattcgattccgccgccgccgcccaagccgcccaagcccgaggaggacgattcgattccaccgccgccgccgccgcccaagcccgaggaggagaggagaggagaggagaggatggcgtccgtggggccgacgctcgagtccctcgtcgaccgtgagcctcccttccccttccttccttcctccctccctaaacctagcagcttgtttcagtttcaatctcaccgtctttctttcttgttttctgtatgtatgtatgtatgtatgtatgtagaagtgatctccgtcatcaccaacgacggccgcaacatcgtggggactctgcggggcttcgaccaggccaccaacataatcctcgacgagtcccacgagagggtctactccactaaggagggagtacagcagcttgtccttggtctgtacatcatcaggggtgataacataggcgtggtgggtgaggtggacgaggagctggacgcggcgctggacatgtcgaagctgagagcgcagcccctcaagccagtcatccactgaagatgatgaaatgttctatcgatctgatcctgatcgcgcaagccgaagctgatgttgctcagtcaatctgtaccgtaggttaatcgattgatcgctcactcatatctcatatctcatatcatggacccttgtatgatgaaaaaaaacagggtttgctgcgtcgatggaccggtcatgttcttgtatgagagagtgatacatgcatctctgtgcacgtaagtaatgaatgaatgaatgaagtaggcaattgatgttgg

SEQ ID NO: 13896 - protein, 139 aa, Triticum aestivum
  peptide (1)..(139): Ceres Seq. ID no. 13585617
  misc_feature (54)..(115): Pfam Name: Pfam Description:  LSM domain
  misc_feature (11)..(139): NCBI GI NO: 25404943 NR Description: protein F1E22.8 [imported] - Arabidopsis thaliana
  misc_feature (54)..(139): NCBI GI NO: 15218779 NR Description: small nuclear ribonucleo protein -related
  misc_feature (52)..(139): NCBI GI NO: 7706425 NR Description: U6 snRNA-associated Sm-like protein LSm8
  misc_feature (52)..(139): NCBI GI NO: 24655606 NR Description: CG2021-PA [Drosophila melanogaster]
  misc_feature (55)..(137): NCBI GI NO: 17544148 NR Description: SM protein (10.8 kD) [Caenorhabditis elegans]
  misc_feature (55)..(137): NCBI GI NO: 39584186 NR Description: Hypothetical protein CBG05470
  misc_feature (52)..(137): NCBI GI NO: 23612724 NR Description: u6 snRNA-associated sm-like protein, putative
  misc_feature (56)..(139): NCBI GI NO: 19076009 NR Description: splicing factor [Schizosaccharomyces pombe]
  misc_feature (52)..(110): NCBI GI NO: 28279736 NR Description: Similar to U6 snRNA-associated Sm-like protein LSm8
  misc_feature (1)..(27): NCBI GI NO: 26000243 NR Description: adhesin FhaB [Bordetella avium]
MASVGPTLESLVDREPPFPFLPSSLPKPSSLFQFQSHRLSFLFSVCMYVCMYVEVISVITNDGRNIVGTLRGFDQATNIILDESHERVYSTKEGVQQLVLGLYIIRGDNIGVVGEVDEELDAALDMSKLRAQPLKPVIH

SEQ ID NO: 13897 - protein, 120 aa, Triticum aestivum
  peptide (1)..(120): Ceres Seq. ID no. 13585618
  misc_feature (19)..(75): Pfam Name: Pfam Description:  Protamine P1
SSIRFRRRRPSPRRTIRFRRRRPSRPSPRRTIRFRRRRPSRPSPRRTIRFHRRRRRPSPRRRGEERRGWRPWGRRSSPSSTVSLPSPSFLPPSLNLAACFSFNLTVFLSCFLYVCMYVCM

SEQ ID NO: 13898 - protein, 93 aa, Triticum aestivum
  peptide (1)..(93): Ceres Seq. ID no. 13585619
  misc_feature (8)..(69): Pfam Name: Pfam Description:  LSM domain
  misc_feature (1)..(93): NCBI GI NO: 25404943 NR Description: protein F1E22.8 [imported] - Arabidopsis thaliana
  misc_feature (8)..(93): NCBI GI NO: 15218779 NR Description: small nuclear ribonucleo protein -related
  misc_feature (6)..(93): NCBI GI NO: 7706425 NR Description: U6 snRNA-associated Sm-like protein LSm8
  misc_feature (6)..(93): NCBI GI NO: 24655606 NR Description: CG2021-PA [Drosophila melanogaster]
  misc_feature (9)..(91): NCBI GI NO: 17544148 NR Description: SM protein (10.8 kD) [Caenorhabditis elegans]
  misc_feature (9)..(91): NCBI GI NO: 39584186 NR Description: Hypothetical protein CBG05470
  misc_feature (6)..(91): NCBI GI NO: 23612724 NR Description: u6 snRNA-associated sm-like protein, putative
  misc_feature (10)..(93): NCBI GI NO: 19076009 NR Description: splicing factor [Schizosaccharomyces pombe]
  misc_feature (6)..(64): NCBI GI NO: 28279736 NR Description: Similar to U6 snRNA-associated Sm-like protein LSm8
MYVCMYVEVISVITNDGRNIVGTLRGFDQATNIILDESHERVYSTKEGVQQLVLGLYIIRGDNIGVVGEVDEELDAALDMSKLRAQPLKPVIH

SEQ ID NO: 13899 - DNA, 1162 bp, Triticum aestivum
  misc_feature (1)..(1162): Ceres Seq. ID no. 13598468
aacacaaaaacgaaatgccactgctgcagctgccgaccgcgtgtggcgccgctgcggcgtcggcgtcggcgccgggccccttcttgctctcacggccgccgccctcgcggctgcgcgcgtcgcacgtcctcttcgccttccctcgcctgaggaaatacggccgccggagccgcgagccggtacccaccaccctcgacgacgacgacgaggaggaggcggatgaggacgacgacgacgacatggaggaggcggttgacgaggacatcttcctcaagaaccggcccaagccggccggtttcggcgtggggaagacctacaccaccgacgtcgaagagcagcttctccgggagatgggcatcggcggcgccgggcgcaagagcaaatcggctccgcccaagagcagcaaaaccaacggctcggccacagaaaccgccgcagattgcagtaatgatggcgttcatgttcgtatttggaacctcccgaaaaagaagaacatacataaggacctgaacctagctttcaaagggtttcctggcctggtaactataaacccagcaaactctggaactaagaagacccgtgatcctatttgtaagggttttgcatttgtcaaactggagtcagtggacgctgcgacgaggtttgttgaactgtactctcgtaaagctgtgtcgttcggcaaggttgagaagccaatcaagtgctgtattgttgaagggcacatctctacggatccttcaggtccagcatccagcagtcagccaccagggtcgaacccacaacggttggtagccgtaagatgagcagcacagttgatctgtcatcaatccagttgccactcggtacttcaacagacggagaattccgggaagaaggttcgctacatagatatcggcatgcttcgctcaagattgcgaagacacggaccgtttggtcggaattcccgattttgtagatgatatcaagcattgacattagcaggaaaccctttctccaatgggtttatttagaagataggcagggattagactcaggtatgcagtggttttttttagttaaattcacgtgaatgtattgtgtctaaattaggtccactgtttcggagaaggatttgaatctaaatccgcggcgtcgttataaatccccagattaaagttgctgc

SEQ ID NO: 13900 - protein, 266 aa, Triticum aestivum
  peptide (1)..(266): Ceres Seq. ID no. 13598469
  misc_feature (65)..(238): NCBI GI NO: 25406039 NR Description: F20P5.8 [imported] - Arabidopsis thaliana
  misc_feature (65)..(238): NCBI GI NO: 30698005 NR Description: RNA recognition motif (RRM)-containing protein
HKNEMPLLQLPTACGAAAASASAPGPFLLSRPPPSRLRASHVLFAFPRLRKYGRRSREPVPTTLDDDDEEEADEDDDDDMEEAVDEDIFLKNRPKPAGFGVGKTYTTDVEEQLLREMGIGGAGRKSKSAPPKSSKTNGSATETAADCSNDGVHVRIWNLPKKKNIHKDLNLAFKGFPGLVTINPANSGTKKTRDPICKGFAFVKLESVDAATRFVELYSRKAVSFGKVEKPIKCCIVEGHISTDPSGPASSSQPPGSNPQRLVAVR

SEQ ID NO: 13901 - protein, 262 aa, Triticum aestivum
  peptide (1)..(262): Ceres Seq. ID no. 13598470
  misc_feature (61)..(234): NCBI GI NO: 25406039 NR Description: F20P5.8 [imported] - Arabidopsis thaliana
  misc_feature (61)..(234): NCBI GI NO: 30698005 NR Description: RNA recognition motif (RRM)-containing protein
MPLLQLPTACGAAAASASAPGPFLLSRPPPSRLRASHVLFAFPRLRKYGRRSREPVPTTLDDDDEEEADEDDDDDMEEAVDEDIFLKNRPKPAGFGVGKTYTTDVEEQLLREMGIGGAGRKSKSAPPKSSKTNGSATETAADCSNDGVHVRIWNLPKKKNIHKDLNLAFKGFPGLVTINPANSGTKKTRDPICKGFAFVKLESVDAATRFVELYSRKAVSFGKVEKPIKCCIVEGHISTDPSGPASSSQPPGSNPQRLVAVR

SEQ ID NO: 13902 - protein, 187 aa, Triticum aestivum
  peptide (1)..(187): Ceres Seq. ID no. 13598471
  misc_feature (1)..(159): NCBI GI NO: 25406039 NR Description: F20P5.8 [imported] - Arabidopsis thaliana
  misc_feature (1)..(159): NCBI GI NO: 30698005 NR Description: RNA recognition motif (RRM)-containing protein
MEEAVDEDIFLKNRPKPAGFGVGKTYTTDVEEQLLREMGIGGAGRKSKSAPPKSSKTNGSATETAADCSNDGVHVRIWNLPKKKNIHKDLNLAFKGFPGLVTINPANSGTKKTRDPICKGFAFVKLESVDAATRFVELYSRKAVSFGKVEKPIKCCIVEGHISTDPSGPASSSQPPGSNPQRLVAVR

SEQ ID NO: 13903 - DNA, 1623 bp, Triticum aestivum
  misc_feature (1)..(1623): Ceres Seq. ID no. 13655660
aaaaaccctccttcgcccattcattccccactcctttcgccccaaaccccctccacccgccgcattcccatggctaccaccgccgcggctgccgccgccgccgccgccaccgcctccacccgggcaaacagcctctcccgcatcttctcctcctcctcgccaatcgtacaaccacccaagcgcaatcccaagaccaagagcgcgccgaagccgaagccgacgccgaaaccgcccgccgccgatgccgtctccatcgcggacgagaagcccccgaagcccctcggcgcacagcccgccgccaaaggtgattccgacgggaagcacaagctcccgaagccccttgggcttctcgtcaaggccctcagccggcagcgcgaccctgacaagctgatctccggcttcatccaagcgtcaaccgtgtcgtcgcgcttccgcgaccggcaccgcgtgttcgagatagcggtgagccgcctcacttccctcggccgccaagacggcatcgaggccatcatcgaagcgcagatgcccttcctcgagacctcagccgagggattcgcctcgcgcctcatccgcctctacggccgtgcctccatgccatcccacgcggccgcaaccttccataaacttcccgcgcagcataaatccaacatgacattcaactcccttctttcctgttacgccgatgccggagattttgacgggctcactgctgcattccaggagatcccagccacttacccctcgattgttcccaccgtatactcttacaacgtactcatccacgcattgtgccggaagcccgacgtctcagctgctcttgacgctgtccatctcatggagaagatcggtgtttcacctgacattattactttcaacacgctgttgaatgggttttgcaacaatggccgcttggatgaagcagagacagtatgggagatgatcaaggagaggaatttggagcctgacgccaagtgctacaatgccaagctgcggggtttggttgcagaagggaggattgatgatgcagctgctgtgctggagggattggagaaggatgggccaaaacccgatacagtatcctacaatgagttgattcgaggatattgcaaagccgggaagttacaggaggccaagaagctgtatgatgatttggtaaaaaatgagtgtgccccaaataagggaacatatgagactcttctgccacaccttctgcaggctggggagctggattgtgcactgacgtactgttataaaatctttagtcataaaaggaaccttagagtggagtgtggtgtgctgcaggatgtagtgaatgcattggtagatgtattgagggtggaggaggctgccaagattattgtgctggggcggaagaagtactacccccgaaagggtttgaggatgcctgatagtacaaaaaggcagtgaattaagagctgaaactgatgaggaagaagcaatatcagaagaagagtgtgaagtggagcacgagactgaaaaataaattcataggtcagacttttactgatgcatgccaaatttcaccatggcctggtttactctgttcctctgttggcatgatacaacaaaaagtgcaagttaaagtagtggttaaactagtcc

SEQ ID NO: 13904 - protein, 475 aa, Triticum aestivum
  peptide (1)..(475): Ceres Seq. ID no. 13655661
  misc_feature (324)..(358): Pfam Name: Pfam Description:  PPR repeat
  misc_feature (73)..(474): NCBI GI NO: 34910148 NR Description: B1070A12.17
  misc_feature (34)..(82): NCBI GI NO: 34910148 NR Description: B1070A12.17
  misc_feature (111)..(468): NCBI GI NO: 18399887 NR Description: pentatricopeptide (PPR) repeat-containing protein
  misc_feature (111)..(468): NCBI GI NO: 21617993 NR Description: unknown [Arabidopsis thaliana]
  misc_feature (113)..(469): NCBI GI NO: 15222796 NR Description: pentatricopeptide (PPR) repeat-containing protein
  misc_feature (138)..(463): NCBI GI NO: 15231160 NR Description: pentatricopeptide (PPR) repeat-containing protein
  misc_feature (100)..(462): NCBI GI NO: 15234493 NR Description: pentatricopeptide (PPR) repeat-containing protein
  misc_feature (100)..(462): NCBI GI NO: 25455786 NR Description: membrane-associated salt-inducible protein like
  misc_feature (121)..(463): NCBI GI NO: 18398767 NR Description: pentatricopeptide (PPR) repeat-containing protein
  misc_feature (98)..(460): NCBI GI NO: 21553755 NR Description: putative membrane-associated salt-inducible protein
KNPPSPIHSPLLSPQTPSTRRIPMATTAAAAAAAAATASTRANSLSRIFSSSSPIVQPPKRNPKTKSAPKPKPTPKPPAADAVSIADEKPPKPLGAQPAAKGDSDGKHKLPKPLGLLVKALSRQRDPDKLISGFIQASTVSSRFRDRHRVFEIAVSRLTSLGRQDGIEAIIEAQMPFLETSAEGFASRLIRLYGRASMPSHAAATFHKLPAQHKSNMTFNSLLSCYADAGDFDGLTAAFQEIPATYPSIVPTVYSYNVLIHALCRKPDVSAALDAVHLMEKIGVSPDIITFNTLLNGFCNNGRLDEAETVWEMIKERNLEPDAKCYNAKLRGLVAEGRIDDAAAVLEGLEKDGPKPDTVSYNELIRGYCKAGKLQEAKKLYDDLVKNECAPNKGTYETLLPHLLQAGELDCALTYCYKIFSHKRNLRVECGVLQDVVNALVDVLRVEEAAKIIVLGRKKYYPRKGLRMPDSTKRQ

SEQ ID NO: 13905 - protein, 452 aa, Triticum aestivum
  peptide (1)..(452): Ceres Seq. ID no. 13655662
  misc_feature (301)..(335): Pfam Name: Pfam Description:  PPR repeat
  misc_feature (50)..(451): NCBI GI NO: 34910148 NR Description: B1070A12.17
  misc_feature (11)..(59): NCBI GI NO: 34910148 NR Description: B1070A12.17
  misc_feature (88)..(445): NCBI GI NO: 18399887 NR Description: pentatricopeptide (PPR) repeat-containing protein
  misc_feature (88)..(445): NCBI GI NO: 21617993 NR Description: unknown [Arabidopsis thaliana]
  misc_feature (90)..(446): NCBI GI NO: 15222796 NR Description: pentatricopeptide (PPR) repeat-containing protein
  misc_feature (115)..(440): NCBI GI NO: 15231160 NR Description: pentatricopeptide (PPR) repeat-containing protein
  misc_feature (77)..(439): NCBI GI NO: 15234493 NR Description: pentatricopeptide (PPR) repeat-containing protein
  misc_feature (77)..(439): NCBI GI NO: 25455786 NR Description: membrane-associated salt-inducible protein like
  misc_feature (98)..(440): NCBI GI NO: 18398767 NR Description: pentatricopeptide (PPR) repeat-containing protein
  misc_feature (75)..(437): NCBI GI NO: 21553755 NR Description: putative membrane-associated salt-inducible protein
MATTAAAAAAAAATASTRANSLSRIFSSSSPIVQPPKRNPKTKSAPKPKPTPKPPAADAVSIADEKPPKPLGAQPAAKGDSDGKHKLPKPLGLLVKALSRQRDPDKLISGFIQASTVSSRFRDRHRVFEIAVSRLTSLGRQDGIEAIIEAQMPFLETSAEGFASRLIRLYGRASMPSHAAATFHKLPAQHKSNMTFNSLLSCYADAGDFDGLTAAFQEIPATYPSIVPTVYSYNVLIHALCRKPDVSAALDAVHLMEKIGVSPDIITFNTLLNGFCNNGRLDEAETVWEMIKERNLEPDAKCYNAKLRGLVAEGRIDDAAAVLEGLEKDGPKPDTVSYNELIRGYCKAGKLQEAKKLYDDLVKNECAPNKGTYETLLPHLLQAGELDCALTYCYKIFSHKRNLRVECGVLQDVVNALVDVLRVEEAAKIIVLGRKKYYPRKGLRMPDSTKRQ

SEQ ID NO: 13906 - protein, 301 aa, Triticum aestivum
  peptide (1)..(301): Ceres Seq. ID no. 13655663
  misc_feature (150)..(184): Pfam Name: Pfam Description:  PPR repeat
  misc_feature (1)..(300): NCBI GI NO: 34910148 NR Description: B1070A12.17
  misc_feature (1)..(294): NCBI GI NO: 18399887 NR Description: pentatricopeptide (PPR) repeat-containing protein
  misc_feature (1)..(294): NCBI GI NO: 21617993 NR Description: unknown [Arabidopsis thaliana]
  misc_feature (1)..(295): NCBI GI NO: 15222796 NR Description: pentatricopeptide (PPR) repeat-containing protein
  misc_feature (1)..(289): NCBI GI NO: 15231160 NR Description: pentatricopeptide (PPR) repeat-containing protein
  misc_feature (1)..(288): NCBI GI NO: 15234493 NR Description: pentatricopeptide (PPR) repeat-containing protein
  misc_feature (1)..(288): NCBI GI NO: 25455786 NR Description: membrane-associated salt-inducible protein like
  misc_feature (1)..(289): NCBI GI NO: 18398767 NR Description: pentatricopeptide (PPR) repeat-containing protein
  misc_feature (1)..(286): NCBI GI NO: 21553755 NR Description: putative membrane-associated salt-inducible protein
  misc_feature (1)..(290): NCBI GI NO: 34908820 NR Description: P0557A01.33
MPFLETSAEGFASRLIRLYGRASMPSHAAATFHKLPAQHKSNMTFNSLLSCYADAGDFDGLTAAFQEIPATYPSIVPTVYSYNVLIHALCRKPDVSAALDAVHLMEKIGVSPDIITFNTLLNGFCNNGRLDEAETVWEMIKERNLEPDAKCYNAKLRGLVAEGRIDDAAAVLEGLEKDGPKPDTVSYNELIRGYCKAGKLQEAKKLYDDLVKNECAPNKGTYETLLPHLLQAGELDCALTYCYKIFSHKRNLRVECGVLQDVVNALVDVLRVEEAAKIIVLGRKKYYPRKGLRMPDSTKRQ

SEQ ID NO: 13907 - DNA, 1071 bp, Triticum aestivum
  misc_feature (1)..(1071): Ceres Seq. ID no. 13655656
caaaaaaaaaaggtttcatctcttcaagcagggcaggccgagccacaggttcctccgcaccctcggccttccctcccatcaccagtttccagccgcgagcgaacccgacgcgagtgcggttcgagggagagagaagaggggactagcaccatggccgccaggctgctgctcctctccttcgattgcccggccgtcgctggcgggcggcggtctcgtctgtctgcaatgccacggatgtcttccggtgctcccctcgtgcggcccccagcctcatccgtcggcgcgttcgcggtcaccgccgccagaggcaacctgccgcaccacacctccgtggttgtggagggtggtggagtttacactgttcgtgactttatgactaaaagggaacaactccatgttgtgaaaccatccacttcagtagatgaagctcttgacaggctggtggagcatcgaataactggctttcctgttaccgatgatcactggaatttggttggtgtggtctcagattatgatctgttagcactggacttgatatcaggaaatggacaggctgaagcggacatatttcctgaggtggacagcacttggaagactttccatcagatacaaaagctcttaagcaaaaccaatgggaaagtagttagtgatgttatgacttctgcacctcttgtggtgcgtgaaactactaaccttgaagatgctgcaaggttacttcttgttactaaataccgcaggctgccagtagtcgacagttcgggcaaattggttggaatcatcacaagagggaacgtcgtcagagctgctcttgagtttaagaaaaatgttgaagggagtctttgaagtggaactgtagatgatcctttccgaaggtggaacttgaacatattgctagtaggcaagcatactgaaaaaattgtttacacaacatgctagtttaattgcagttgggatacatgtattgtgagcatcatgcatcatccttaaatttcaaaattttgaattgaaggaattttcaaagcctctgctaaataaagggcaaagaacccaaaaaaatgcattcaatgtttc

SEQ ID NO: 13908 - protein, 280 aa, Triticum aestivum
  peptide (1)..(280): Ceres Seq. ID no. 13655657
  misc_feature (217)..(270): Pfam Name: Pfam Description:  CBS domain
  misc_feature (114)..(280): NCBI GI NO: 34015153 NR Description: putative CBS domain containing protein
  misc_feature (71)..(279): NCBI GI NO: 18418376 NR Description: CBS domain containing protein
  misc_feature (89)..(275): NCBI GI NO: 15234564 NR Description: CBS domain containing protein
  misc_feature (71)..(180): NCBI GI NO: 7486280 NR Description: hypothetical protein F28A23
  misc_feature (198)..(259): NCBI GI NO: 7486280 NR Description: hypothetical protein F28A23
  misc_feature (134)..(268): NCBI GI NO: 23040753 NR Description: hypothetical protein
  misc_feature (120)..(268): NCBI GI NO: 16331252 NR Description: IMP dehydrogenase [Synechocystis sp. PCC 6803]
  misc_feature (120)..(268): NCBI GI NO: 17231305 NR Description: hypothetical protein [Nostoc sp. PCC 7120]
  misc_feature (120)..(268): NCBI GI NO: 24251259 NR Description: unknown protein [Synechococcus sp. PCC 7942]
  misc_feature (120)..(268): NCBI GI NO: 23127710 NR Description: hypothetical protein [Nostoc punctiforme]
QKKKVSSLQAGQAEPQVPPHPRPSLPSPVSSRERTRRECGSREREEGTSTMAARLLLLSFDCPAVAGGRRSRLSAMPRMSSGAPLVRPPASSVGAFAVTAARGNLPHHTSVVVEGGGVYTVRDFMTKREQLHVVKPSTSVDEALDRLVEHRITGFPVTDDHWNLVGVVSDYDLLALDLISGNGQAEADIFPEVDSTWKTFHQIQKLLSKTNGKVVSDVMTSAPLVVRETTNLEDAARLLLVTKYRRLPVVDSSGKLVGIITRGNVVRAALEFKKNVEGSL

SEQ ID NO: 13909 - protein, 230 aa, Triticum aestivum
  peptide (1)..(230): Ceres Seq. ID no. 13655658
  misc_feature (167)..(220): Pfam Name: Pfam Description:  CBS domain
  misc_feature (64)..(230): NCBI GI NO: 34015153 NR Description: putative CBS domain containing protein
  misc_feature (21)..(229): NCBI GI NO: 18418376 NR Description: CBS domain containing protein
  misc_feature (39)..(225): NCBI GI NO: 15234564 NR Description: CBS domain containing protein
  misc_feature (21)..(130): NCBI GI NO: 7486280 NR Description: hypothetical protein F28A23
  misc_feature (148)..(209): NCBI GI NO: 7486280 NR Description: hypothetical protein F28A23
  misc_feature (84)..(218): NCBI GI NO: 23040753 NR Description: hypothetical protein
  misc_feature (70)..(218): NCBI GI NO: 16331252 NR Description: IMP dehydrogenase [Synechocystis sp. PCC 6803]
  misc_feature (70)..(218): NCBI GI NO: 17231305 NR Description: hypothetical protein [Nostoc sp. PCC 7120]
  misc_feature (70)..(218): NCBI GI NO: 24251259 NR Description: unknown protein [Synechococcus sp. PCC 7942]
  misc_feature (70)..(218): NCBI GI NO: 23127710 NR Description: hypothetical protein [Nostoc punctiforme]
MAARLLLLSFDCPAVAGGRRSRLSAMPRMSSGAPLVRPPASSVGAFAVTAARGNLPHHTSVVVEGGGVYTVRDFMTKREQLHVVKPSTSVDEALDRLVEHRITGFPVTDDHWNLVGVVSDYDLLALDLISGNGQAEADIFPEVDSTWKTFHQIQKLLSKTNGKVVSDVMTSAPLVVRETTNLEDAARLLLVTKYRRLPVVDSSGKLVGIITRGNVVRAALEFKKNVEGSL

SEQ ID NO: 13910 - protein, 205 aa, Triticum aestivum
  peptide (1)..(205): Ceres Seq. ID no. 13655659
  misc_feature (142)..(195): Pfam Name: Pfam Description:  CBS domain
  misc_feature (39)..(205): NCBI GI NO: 34015153 NR Description: putative CBS domain containing protein
  misc_feature (1)..(204): NCBI GI NO: 18418376 NR Description: CBS domain containing protein
  misc_feature (14)..(200): NCBI GI NO: 15234564 NR Description: CBS domain containing protein
  misc_feature (1)..(105): NCBI GI NO: 7486280 NR Description: hypothetical protein F28A23
  misc_feature (123)..(184): NCBI GI NO: 7486280 NR Description: hypothetical protein F28A23
  misc_feature (59)..(193): NCBI GI NO: 23040753 NR Description: hypothetical protein
  misc_feature (45)..(193): NCBI GI NO: 16331252 NR Description: IMP dehydrogenase [Synechocystis sp. PCC 6803]
  misc_feature (45)..(193): NCBI GI NO: 17231305 NR Description: hypothetical protein [Nostoc sp. PCC 7120]
  misc_feature (45)..(193): NCBI GI NO: 24251259 NR Description: unknown protein [Synechococcus sp. PCC 7942]
  misc_feature (45)..(193): NCBI GI NO: 23127710 NR Description: hypothetical protein [Nostoc punctiforme]
MPRMSSGAPLVRPPASSVGAFAVTAARGNLPHHTSVVVEGGGVYTVRDFMTKREQLHVVKPSTSVDEALDRLVEHRITGFPVTDDHWNLVGVVSDYDLLALDLISGNGQAEADIFPEVDSTWKTFHQIQKLLSKTNGKVVSDVMTSAPLVVRETTNLEDAARLLLVTKYRRLPVVDSSGKLVGIITRGNVVRAALEFKKNVEGSL

SEQ ID NO: 13911 - DNA, 667 bp, Triticum aestivum
  misc_feature (1)..(667): Ceres Seq. ID no. 13655537
acagtctcacacccgccgctcagccgtaacttcacaaagatgctgaggtccaccggccgccttctgctgctcgcgctagcggcgagccacctgctgctcaccgccgccggcgctggctgcgagccgagcggcacgctccggccgacccagagccacgcgtgccaggactgctgcaaggccgggcaggcgtacccgacgtacaggtgctcgccgccggtctcctcgtccacccgggcggtcatgactctgaacgacttcgacgcgggcggcgacggcggggacccgtccgagtgcgacggcgcgttccaccgcagctcggagcgcgtggcggcgctgtccacggggtggtacagcgggggctcccgctgcggcaagagcatacggatccgggccaacggcaggtccgtgctcgccaaggtcgtcgacgagtgcgacaccgtgaacgggtgcgaccgcgagcacgccttccagccgccgtgccgcaacaacgtcgtcgacgcctcccaggcggtctgggacgcgctgggcatcaccggggaggaggtcggcgagtacaacgtcacttggtcagatgcatgacctatatatgtgcatggacgaatagagtgtacacgcggacccaaaatgaataaacggaatttataagggccgcctatttaacagggct

SEQ ID NO: 13912 - protein, 192 aa, Triticum aestivum
  peptide (1)..(192): Ceres Seq. ID no. 13655538
  misc_feature (18)..(192): NCBI GI NO: 38346744 NR Description: OSJNBa0081G05.7
  misc_feature (40)..(192): NCBI GI NO: 7406671 NR Description: putative ripening-related protein [Vitis vinifera]
  misc_feature (38)..(192): NCBI GI NO: 37535592 NR Description: hypothetical protein
  misc_feature (39)..(185): NCBI GI NO: 37535604 NR Description: hypothetical protein
  misc_feature (22)..(189): NCBI GI NO: 37535588 NR Description: hypothetical protein
  misc_feature (68)..(192): NCBI GI NO: 37535576 NR Description: hypothetical protein
  misc_feature (51)..(190): NCBI GI NO: 37535604 NR Description: hypothetical protein
  misc_feature (79)..(191): NCBI GI NO: 37535578 NR Description: hypothetical protein
  misc_feature (56)..(178): NCBI GI NO: 34897980 NR Description: hypothetical protein~predicted by FGENESH etc.
TVSHPPLSRNFTKMLRSTGRLLLLALAASHLLLTAAGAGCEPSGTLRPTQSHACQDCCKAGQAYPTYRCSPPVSSSTRAVMTLNDFDAGGDGGDPSECDGAFHRSSERVAALSTGWYSGGSRCGKSIRIRANGRSVLAKVVDECDTVNGCDREHAFQPPCRNNVVDASQAVWDALGITGEEVGEYNVTWSDA

SEQ ID NO: 13913 - protein, 179 aa, Triticum aestivum
  peptide (1)..(179): Ceres Seq. ID no. 13655539
  misc_feature (5)..(179): NCBI GI NO: 38346744 NR Description: OSJNBa0081G05.7
  misc_feature (27)..(179): NCBI GI NO: 7406671 NR Description: putative ripening-related protein [Vitis vinifera]
  misc_feature (25)..(179): NCBI GI NO: 37535592 NR Description: hypothetical protein
  misc_feature (26)..(172): NCBI GI NO: 37535604 NR Description: hypothetical protein
  misc_feature (9)..(176): NCBI GI NO: 37535588 NR Description: hypothetical protein
  misc_feature (55)..(179): NCBI GI NO: 37535576 NR Description: hypothetical protein
  misc_feature (38)..(177): NCBI GI NO: 37535604 NR Description: hypothetical protein
  misc_feature (66)..(178): NCBI GI NO: 37535578 NR Description: hypothetical protein
  misc_feature (43)..(165): NCBI GI NO: 34897980 NR Description: hypothetical protein~predicted by FGENESH etc.
MLRSTGRLLLLALAASHLLLTAAGAGCEPSGTLRPTQSHACQDCCKAGQAYPTYRCSPPVSSSTRAVMTLNDFDAGGDGGDPSECDGAFHRSSERVAALSTGWYSGGSRCGKSIRIRANGRSVLAKVVDECDTVNGCDREHAFQPPCRNNVVDASQAVWDALGITGEEVGEYNVTWSDA

SEQ ID NO: 13914 - protein, 112 aa, Triticum aestivum
  peptide (1)..(112): Ceres Seq. ID no. 13655540
  misc_feature (1)..(112): NCBI GI NO: 38346744 NR Description: OSJNBa0081G05.7
  misc_feature (1)..(112): NCBI GI NO: 7406671 NR Description: putative ripening-related protein [Vitis vinifera]
  misc_feature (1)..(112): NCBI GI NO: 37535592 NR Description: hypothetical protein
  misc_feature (1)..(105): NCBI GI NO: 37535604 NR Description: hypothetical protein
  misc_feature (1)..(109): NCBI GI NO: 37535588 NR Description: hypothetical protein
  misc_feature (1)..(112): NCBI GI NO: 37535576 NR Description: hypothetical protein
  misc_feature (1)..(110): NCBI GI NO: 37535604 NR Description: hypothetical protein
  misc_feature (1)..(111): NCBI GI NO: 37535578 NR Description: hypothetical protein
  misc_feature (1)..(98): NCBI GI NO: 34897980 NR Description: hypothetical protein~predicted by FGENESH etc.
MTLNDFDAGGDGGDPSECDGAFHRSSERVAALSTGWYSGGSRCGKSIRIRANGRSVLAKVVDECDTVNGCDREHAFQPPCRNNVVDASQAVWDALGITGEEVGEYNVTWSDA

SEQ ID NO: 13915 - DNA, 1347 bp, Triticum aestivum
  misc_feature (1)..(1347): Ceres Seq. ID no. 13655547
tcctctctagacactgctgttgactccgccgttctctcaacccacatggctctcgaagcgcgcctccgcctcccgctcgccgggccaactccggccaccgctttcctctcaggatctaaccccaaacccagtcacatatccttctccctcaaacccacctccacttctctctccgccgccaatgcgccgcccatcgtcgtcgtgggctccgccaacgcggacatctacgtcgaggtcgaccgtctcccgctcgtcggcgagacggttgccgcgagtgccggtcacagcctcgccggcgggaagggcgccaatcaagctgcctgtggggggcggctggcgctggggcccacctacctcgtggcgcgcgtgggggacgacgccaacgggcgcctcctcgagggggcactcgcggacgccggcggcgtccgcctcgaccgcgtcgctcgcgcccccggcgcgccctcggggcacgctgttgtcatgctcatgcccgacgggcagaactccatcatcatcgttggcggcgccaacatggagagctgggcaccggaggtcgacccggaggacctggacctgatccggcaggccggcgtgctactgctgcaacgggagatacccgattgggtcaacattcaggtcgctcaggctgcaaaaggcgcaggtgtgcctgttatcttggatgcaggtggaatggatgctcctgtccccagagaactactcgaactggtggatatttttagtccaaatgagacagagctagcacgtttgactgggatgcctacagagacttttgaacaaatcagccaggctgcaggagcatgccataaaatgggtgtgaaagaagttttggttaaacttggatcacaaggatctgctctgtttgtcgagggagaggaaccaattaggcaggcgataatacctgccgcagaagtggtagacaccaccggcgctggtgacaccttcacctcagcttttgctgtagctctggtggaggggaagccaaagaaagagtgcatgaaatttgctgctgccgccgcctcactgtgtgttcgagtgaagggagccattcccagcatgcctgacaggaaaactgtgatgagccttctagaatctgtgcaagatgaataaccgtagaaacggtgactttagccctattcatcagcaataatgtgagctgttaagcttcaatctcctcgttcggttcatttatctcgggtatctatatatatttgtagccccttgtcaagttatggtagaggaaataagagaaaatggcattcctagcgccgtcctccgcagaaacagaatcgctggttcaggagttctaggtctgttgtttttatagcc

SEQ ID NO: 13916 - protein, 375 aa, Triticum aestivum
  peptide (1)..(375): Ceres Seq. ID no. 13655548
  misc_feature (62)..(284): Pfam Name: Pfam Description:  pfkB family carbohydrate kinase
  misc_feature (18)..(284): NCBI GI NO: 34910896 NR Description: P0003E08.15
  misc_feature (278)..(373): NCBI GI NO: 34910896 NR Description: P0003E08.15
  misc_feature (21)..(370): NCBI GI NO: 15220039 NR Description: putative ribokinase; protein id: At1g17160.1
  misc_feature (21)..(370): NCBI GI NO: 25518633 NR Description: hypothetical protein F20D23
  misc_feature (65)..(370): NCBI GI NO: 23002722 NR Description: hypothetical protein [Lactobacillus gasseri]
  misc_feature (65)..(369): NCBI GI NO: 23039770 NR Description: hypothetical protein
  misc_feature (62)..(365): NCBI GI NO: 23019471 NR Description: hypothetical protein [Thermobifida fusca]
  misc_feature (65)..(371): NCBI GI NO: 15602017 NR Description: RbsK [Pasteurella multocida]
  misc_feature (65)..(365): NCBI GI NO: 32042035 NR Description: hypothetical protein
  misc_feature (65)..(365): NCBI GI NO: 32042037 NR Description: hypothetical protein
SSLDTAVDSAVLSTHMALEARLRLPLAGPTPATAFLSGSNPKPSHISFSLKPTSTSLSAANAPPIVVVGSANADIYVEVDRLPLVGETVAASAGHSLAGGKGANQAACGGRLALGPTYLVARVGDDANGRLLEGALADAGGVRLDRVARAPGAPSGHAVVMLMPDGQNSIIIVGGANMESWAPEVDPEDLDLIRQAGVLLLQREIPDWVNIQVAQAAKGAGVPVILDAGGMDAPVPRELLELVDIFSPNETELARLTGMPTETFEQISQAAGACHKMGVKEVLVKLGSQGSALFVEGEEPIRQAIIPAAEVVDTTGAGDTFTSAFAVALVEGKPKKECMKFAAAAASLCVRVKGAIPSMPDRKTVMSLLESVQDE

SEQ ID NO: 13917 - protein, 360 aa, Triticum aestivum
  peptide (1)..(360): Ceres Seq. ID no. 13655549
  misc_feature (47)..(269): Pfam Name: Pfam Description:  pfkB family carbohydrate kinase
  misc_feature (3)..(269): NCBI GI NO: 34910896 NR Description: P0003E08.15
  misc_feature (263)..(358): NCBI GI NO: 34910896 NR Description: P0003E08.15
  misc_feature (6)..(355): NCBI GI NO: 15220039 NR Description: putative ribokinase; protein id: At1g17160.1
  misc_feature (6)..(355): NCBI GI NO: 25518633 NR Description: hypothetical protein F20D23
  misc_feature (50)..(355): NCBI GI NO: 23002722 NR Description: hypothetical protein [Lactobacillus gasseri]
  misc_feature (50)..(354): NCBI GI NO: 23039770 NR Description: hypothetical protein
  misc_feature (47)..(350): NCBI GI NO: 23019471 NR Description: hypothetical protein [Thermobifida fusca]
  misc_feature (50)..(356): NCBI GI NO: 15602017 NR Description: RbsK [Pasteurella multocida]
  misc_feature (50)..(350): NCBI GI NO: 32042035 NR Description: hypothetical protein
  misc_feature (50)..(350): NCBI GI NO: 32042037 NR Description: hypothetical protein
MALEARLRLPLAGPTPATAFLSGSNPKPSHISFSLKPTSTSLSAANAPPIVVVGSANADIYVEVDRLPLVGETVAASAGHSLAGGKGANQAACGGRLALGPTYLVARVGDDANGRLLEGALADAGGVRLDRVARAPGAPSGHAVVMLMPDGQNSIIIVGGANMESWAPEVDPEDLDLIRQAGVLLLQREIPDWVNIQVAQAAKGAGVPVILDAGGMDAPVPRELLELVDIFSPNETELARLTGMPTETFEQISQAAGACHKMGVKEVLVKLGSQGSALFVEGEEPIRQAIIPAAEVVDTTGAGDTFTSAFAVALVEGKPKKECMKFAAAAASLCVRVKGAIPSMPDRKTVMSLLESVQDE

SEQ ID NO: 13918 - protein, 215 aa, Triticum aestivum
  peptide (1)..(215): Ceres Seq. ID no. 13655550
  misc_feature (1)..(124): Pfam Name: Pfam Description:  pfkB family carbohydrate kinase
  misc_feature (1)..(124): NCBI GI NO: 34910896 NR Description: P0003E08.15
  misc_feature (118)..(213): NCBI GI NO: 34910896 NR Description: P0003E08.15
  misc_feature (1)..(210): NCBI GI NO: 15220039 NR Description: putative ribokinase; protein id: At1g17160.1
  misc_feature (1)..(210): NCBI GI NO: 25518633 NR Description: hypothetical protein F20D23
  misc_feature (1)..(210): NCBI GI NO: 23002722 NR Description: hypothetical protein [Lactobacillus gasseri]
  misc_feature (1)..(209): NCBI GI NO: 23039770 NR Description: hypothetical protein
  misc_feature (1)..(205): NCBI GI NO: 23019471 NR Description: hypothetical protein [Thermobifida fusca]
  misc_feature (1)..(211): NCBI GI NO: 15602017 NR Description: RbsK [Pasteurella multocida]
  misc_feature (1)..(205): NCBI GI NO: 32042035 NR Description: hypothetical protein
  misc_feature (1)..(205): NCBI GI NO: 32042037 NR Description: hypothetical protein
MLMPDGQNSIIIVGGANMESWAPEVDPEDLDLIRQAGVLLLQREIPDWVNIQVAQAAKGAGVPVILDAGGMDAPVPRELLELVDIFSPNETELARLTGMPTETFEQISQAAGACHKMGVKEVLVKLGSQGSALFVEGEEPIRQAIIPAAEVVDTTGAGDTFTSAFAVALVEGKPKKECMKFAAAAASLCVRVKGAIPSMPDRKTVMSLLESVQDE

SEQ ID NO: 13919 - DNA, 1220 bp, Triticum aestivum
  misc_feature (1)..(1220): Ceres Seq. ID no. 13597295
atacataccggcccctccatcttcaacttcaagatggctgcgtctcacccaagcacagaaatggctgcgtcgccgatggtgcggccgacggtgcaggagctggcggcggccggcgccgaggagccgccgcggcagtacgtgctgccggagcaagaccgtcacggcgacctgctggccgccgacgagtttccggagcccatccccctcgtcgaccttagccggctcacggacgccgacgaggccgagaggctccgggcggctctgcagacctggggcttcttcctggccaccaaccatgggatcgaggactctctcatggacgccatgacgagcgtgtcgagggagttcttccggcagccggcggaggagaggcagaaatgcagcaacctggtggacggcaacggcaaggactaccaggtggaagggtatggcagtgacaaggtggtgtccgacgatcaggtcctcaactggagcgaccggttgcatctgagagtggagccggaggatgagaggaatttcgccaagtggcccagtcaccccgaatctttcagggatgtgctacaagagtatgcatcaagaatcaagaaaataagagacctcgtcttacggtcgatagccaagctcctggagattgacgaggactacttcgtcaaccagatatcaaacaaggcccccgggtttgctagattcaactactaccctccatgtccgaggcctgacctagttttgggcctcagggctcactccgacggtggtctccttaccatccttttcaacgatgacaccgtcggtggcttgcaagttcagagagatgggagatggtacaatgttccagcaaagcctcacacattgctgattaacctagcagactgcctagaaataatgaacaatggaatctttacgagcccggttcacagagtggtgacgaacgtcgagaaggataggctttccttggctgtgttttacgccgtggatgcagaaacgatgttggagccagcgcccggtttgctggatgacaagcgaccgccaagatataagaaaatggtggccaaggattttgtggctgggctctttgaacatttccgtcaagggaagagattcattgacaccctgaaaatataggttcgctgtttattatggagccgtagaagtgattgctataaagaataaagagatggttttatctattgtgccagtgggggtctaccttcgcctttctt

SEQ ID NO: 13920 - protein, 373 aa, Triticum aestivum
  peptide (1)..(373): Ceres Seq. ID no. 13597296
  misc_feature (224)..(324): Pfam Name: II Pfam Description: 2OG-Fe
  misc_feature (21)..(373): NCBI GI NO: 33115140 NR Description: iron/ascorbate-dependent oxidoreductase
  misc_feature (31)..(373): NCBI GI NO: 24413982 NR Description: ethylene-forming-enzyme-like dioxygenase-like
  misc_feature (31)..(349): NCBI GI NO: 34898470 NR Description: ESTs D47168
  misc_feature (21)..(373): NCBI GI NO: 24413984 NR Description: ethylene-forming-enzyme-like dioxygenase-like
  misc_feature (27)..(373): NCBI GI NO: 34898468 NR Description: Similar to Prunus armeniaca ethylene-forming-enzyme-like dioxygenase
  misc_feature (27)..(272): NCBI GI NO: 24413981 NR Description: contains EST C72504
  misc_feature (294)..(373): NCBI GI NO: 24413981 NR Description: contains EST C72504
  misc_feature (185)..(373): NCBI GI NO: 24413983 NR Description: ethylene-forming-enzyme-like dioxygenase-like
  misc_feature (27)..(142): NCBI GI NO: 24413983 NR Description: ethylene-forming-enzyme-like dioxygenase-like
  misc_feature (27)..(373): NCBI GI NO: 34898472 NR Description: Similar to Prunus armeniaca ethylene-forming-enzyme-like dioxygenase
IHTGPSIFNFKMAASHPSTEMAASPMVRPTVQELAAAGAEEPPRQYVLPEQDRHGDLLAADEFPEPIPLVDLSRLTDADEAERLRAALQTWGFFLATNHGIEDSLMDAMTSVSREFFRQPAEERQKCSNLVDGNGKDYQVEGYGSDKVVSDDQVLNWSDRLHLRVEPEDERNFAKWPSHPESFRDVLQEYASRIKKIRDLVLRSIAKLLEIDEDYFVNQISNKAPGFARFNYYPPCPRPDLVLGLRAHSDGGLLTILFNDDTVGGLQVQRDGRWYNVPAKPHTLLINLADCLEIMNNGIFTSPVHRVVTNVEKDRLSLAVFYAVDAETMLEPAPGLLDDKRPPRYKKMVAKDFVAGLFEHFRQGKRFIDTLKI

SEQ ID NO: 13921 - protein, 362 aa, Triticum aestivum
  peptide (1)..(362): Ceres Seq. ID no. 13597297
  misc_feature (213)..(313): Pfam Name: II Pfam Description: 2OG-Fe
  misc_feature (10)..(362): NCBI GI NO: 33115140 NR Description: iron/ascorbate-dependent oxidoreductase
  misc_feature (20)..(362): NCBI GI NO: 24413982 NR Description: ethylene-forming-enzyme-like dioxygenase-like
  misc_feature (20)..(338): NCBI GI NO: 34898470 NR Description: ESTs D47168
  misc_feature (10)..(362): NCBI GI NO: 24413984 NR Description: ethylene-forming-enzyme-like dioxygenase-like
  misc_feature (16)..(362): NCBI GI NO: 34898468 NR Description: Similar to Prunus armeniaca ethylene-forming-enzyme-like dioxygenase
  misc_feature (16)..(261): NCBI GI NO: 24413981 NR Description: contains EST C72504
  misc_feature (283)..(362): NCBI GI NO: 24413981 NR Description: contains EST C72504
  misc_feature (174)..(362): NCBI GI NO: 24413983 NR Description: ethylene-forming-enzyme-like dioxygenase-like
  misc_feature (16)..(131): NCBI GI NO: 24413983 NR Description: ethylene-forming-enzyme-like dioxygenase-like
  misc_feature (16)..(362): NCBI GI NO: 34898472 NR Description: Similar to Prunus armeniaca ethylene-forming-enzyme-like dioxygenase
MAASHPSTEMAASPMVRPTVQELAAAGAEEPPRQYVLPEQDRHGDLLAADEFPEPIPLVDLSRLTDADEAERLRAALQTWGFFLATNHGIEDSLMDAMTSVSREFFRQPAEERQKCSNLVDGNGKDYQVEGYGSDKVVSDDQVLNWSDRLHLRVEPEDERNFAKWPSHPESFRDVLQEYASRIKKIRDLVLRSIAKLLEIDEDYFVNQISNKAPGFARFNYYPPCPRPDLVLGLRAHSDGGLLTILFNDDTVGGLQVQRDGRWYNVPAKPHTLLINLADCLEIMNNGIFTSPVHRVVTNVEKDRLSLAVFYAVDAETMLEPAPGLLDDKRPPRYKKMVAKDFVAGLFEHFRQGKRFIDTLKI

SEQ ID NO: 13922 - protein, 353 aa, Triticum aestivum
  peptide (1)..(353): Ceres Seq. ID no. 13597298
  misc_feature (204)..(304): Pfam Name: II Pfam Description: 2OG-Fe
  misc_feature (1)..(353): NCBI GI NO: 33115140 NR Description: iron/ascorbate-dependent oxidoreductase
  misc_feature (11)..(353): NCBI GI NO: 24413982 NR Description: ethylene-forming-enzyme-like dioxygenase-like
  misc_feature (11)..(329): NCBI GI NO: 34898470 NR Description: ESTs D47168
  misc_feature (1)..(353): NCBI GI NO: 24413984 NR Description: ethylene-forming-enzyme-like dioxygenase-like
  misc_feature (7)..(353): NCBI GI NO: 34898468 NR Description: Similar to Prunus armeniaca ethylene-forming-enzyme-like dioxygenase
  misc_feature (7)..(252): NCBI GI NO: 24413981 NR Description: contains EST C72504
  misc_feature (274)..(353): NCBI GI NO: 24413981 NR Description: contains EST C72504
  misc_feature (165)..(353): NCBI GI NO: 24413983 NR Description: ethylene-forming-enzyme-like dioxygenase-like
  misc_feature (7)..(122): NCBI GI NO: 24413983 NR Description: ethylene-forming-enzyme-like dioxygenase-like
  misc_feature (7)..(353): NCBI GI NO: 34898472 NR Description: Similar to Prunus armeniaca ethylene-forming-enzyme-like dioxygenase
MAASPMVRPTVQELAAAGAEEPPRQYVLPEQDRHGDLLAADEFPEPIPLVDLSRLTDADEAERLRAALQTWGFFLATNHGIEDSLMDAMTSVSREFFRQPAEERQKCSNLVDGNGKDYQVEGYGSDKVVSDDQVLNWSDRLHLRVEPEDERNFAKWPSHPESFRDVLQEYASRIKKIRDLVLRSIAKLLEIDEDYFVNQISNKAPGFARFNYYPPCPRPDLVLGLRAHSDGGLLTILFNDDTVGGLQVQRDGRWYNVPAKPHTLLINLADCLEIMNNGIFTSPVHRVVTNVEKDRLSLAVFYAVDAETMLEPAPGLLDDKRPPRYKKMVAKDFVAGLFEHFRQGKRFIDTLKI

SEQ ID NO: 13923 - DNA, 1054 bp, Triticum aestivum
  misc_feature (1)..(1054): Ceres Seq. ID no. 12617286
attacctagaacatcctaatcgaaaaaaacccagtggctgcagcggcagcagtggccatgggcgagaggctcccccagccgtcgccgccgccgccgccgcaattccagctcgggaaccccatgtccgccccggcgtcgccctactccgcgctccaccctctcctcctcccgtccacgaacccgcacctcctcctcaagcccaagacgctgaccctctcgctctcctcctcctccctcgcctccatgccctcctcctcctccccgcccgcccccgcctccgacgcatgggaactcgtccacccaaccgtccccgttgccgccgcctcccccatcgacggcggcctcgacgactgcgccatcttcccaccgcgcctccacgagggcctgggcctcgaggcggaggccgaggaggccgcgaccaaggaagagaaggaggaggagactgacgacgaggaggagtggctgtgggggtgggggaggtgccgcgcggcggcgaggcgcgcgtgggcggccggttcagaggccgtgctcgtgcatggagagtgcggatgtcccggggttaggccggccatatggtcggccgcggcggcggccgttgtggtcggcgcgctgttgtacgtgcgccggcgagacaggagggagagagacctcctcgtcatgctctcgcaggagaaggataagaggatagcgcaacttctgcatcaaattgctttactgagtgacatcagaggcggcagcgaagcaattaaaatcatgaggaactcttaaccgttgcttcactgtagaagaggtttggatgtaatactgtgtagcactttggttaggtagttgcagaatgttttcatccagaagtgctccaagaccgtgtagcttgatcaagtaattagctcagttgcatgatcttgcatatataagatgtttctgtaattgaagaactgcaaacatcagctctggaaacccccctttgttgttaagatttgtaaatagatgagtgataacattgtcacttataaatttgtggaaatatgttcaaattgtgctggactcaggtact

SEQ ID NO: 13924 - protein, 236 aa, Triticum aestivum
  peptide (1)..(236): Ceres Seq. ID no. 12617287
  misc_feature (7)..(210): NCBI GI NO: 29027780 NR Description: OJ1710_H11.31
MGERLPQPSPPPPPQFQLGNPMSAPASPYSALHPLLLPSTNPHLLLKPKTLTLSLSSSSLASMPSSSSPPAPASDAWELVHPTVPVAAASPIDGGLDDCAIFPPRLHEGLGLEAEAEEAATKEEKEEETDDEEEWLWGWGRCRAAARRAWAAGSEAVLVHGECGCPGVRPAIWSAAAAAVVVGALLYVRRRDRRERDLLVMLSQEKDKRIAQLLHQIALLSDIRGGSEAIKIMRNS

SEQ ID NO: 13925 - protein, 215 aa, Triticum aestivum
  peptide (1)..(215): Ceres Seq. ID no. 12617288
  misc_feature (1)..(189): NCBI GI NO: 29027780 NR Description: OJ1710_H11.31
MSAPASPYSALHPLLLPSTNPHLLLKPKTLTLSLSSSSLASMPSSSSPPAPASDAWELVHPTVPVAAASPIDGGLDDCAIFPPRLHEGLGLEAEAEEAATKEEKEEETDDEEEWLWGWGRCRAAARRAWAAGSEAVLVHGECGCPGVRPAIWSAAAAAVVVGALLYVRRRDRRERDLLVMLSQEKDKRIAQLLHQIALLSDIRGGSEAIKIMRNS

SEQ ID NO: 13926 - protein, 174 aa, Triticum aestivum
  peptide (1)..(174): Ceres Seq. ID no. 12617289
  misc_feature (1)..(148): NCBI GI NO: 29027780 NR Description: OJ1710_H11.31
MPSSSSPPAPASDAWELVHPTVPVAAASPIDGGLDDCAIFPPRLHEGLGLEAEAEEAATKEEKEEETDDEEEWLWGWGRCRAAARRAWAAGSEAVLVHGECGCPGVRPAIWSAAAAAVVVGALLYVRRRDRRERDLLVMLSQEKDKRIAQLLHQIALLSDIRGGSEAIKIMRNS

SEQ ID NO: 13927 - DNA, 500 bp, Triticum aestivum
  misc_feature (1)..(500): Ceres Seq. ID no. 13584430
ataaagtactaataaacagagggagtacaagtacaacgcgtttgcatacgaaaatactacaaagttaacatacattttagtctcgcagctaggcacgaaaaattcttagccactgcaacactcttgacacaactaccggtgcaccagtgcatatacggcggactcgtcgtcatcgtcatgcgccggtcagcacctagcgtgctccagctgatcacagccgcacggcggtcctcccgcggccagcgcggccgaaggagagcacccggaccaggcggcgccacagcgccccgagcgacggcatccgccggctcgtccggaccgccggggtcgttgtcgccgccctcttcctccgccacagcgacggcatcgcgcgctagctagtcaagtcgagccttcttgcggagttccggttgtacggtgaaaggcttcaagatggcgagtgcacgagtggacaaatgggagatcgatggtggtgtctggtgttttttgattaggatgtt

SEQ ID NO: 13928 - protein, 67 aa, Triticum aestivum
  peptide (1)..(67): Ceres Seq. ID no. 13584431
  misc_feature (14)..(58): Pfam Name: 20 copies Pfam Description: Collagen triple helix repeat
MRRSAPSVLQLITAARRSSRGQRGRRRAPGPGGATAPRATASAGSSGPPGSLSPPSSSATATASRAS

SEQ ID NO: 13929 - DNA, 697 bp, Triticum aestivum
  misc_feature (1)..(697): Ceres Seq. ID no. 14302208
agacacccgcaagtccgactcatcgctcaacgtcagtgccaacctgccgttcagcaagagcacgcacgcttgcacctttatgtaaagcaaaacccgacgccgtcaccagctttggtctcttctcttcccattgctcaaaatacctcggcagagagtattctcaactcccggctcagccttcccttcccttccctctcctgcctccgcccactccactcagtgctccagaagctcggatggcggcccagaaggtggtgctcagggtcccgaccatgaccgacgacaaggccaagcagaaggccatcgaagcggtcgcggatatctacggcattgattccatagttgcggatctgaaggacaataagatgatcatcataggcgagatggacactgtggcaatcgcaaagaaattaaagaaggttgggaagattgacattgtgtccgttggacctgcaaaggaagaaaagaaagaagagaagaaagaagaaaagaaagaggagaaaaaagaggaaaagaaagaagagaagaaagaggagaagaaagaggagaaaaaatgataaagcataccacaccatcccatggcctttctcctctgtgcacttctaatagctttgtctacggatctatgtttctaagagatatgactttgtaccattatatctaaagtacatattagtgatatttctttacagaagat

SEQ ID NO: 13930 - protein, 184 aa, Triticum aestivum
  peptide (1)..(184): Ceres Seq. ID no. 14302209
  misc_feature (92)..(180): Pfam Name: Pfam Description:  Ubiquitin carboxyl-terminal hydrolase
  misc_feature (82)..(184): NCBI GI NO: 37535864 NR Description: hypothetical protein
  misc_feature (81)..(184): NCBI GI NO: 18420713 NR Description: heavy-metal-associated domain-containing protein
  misc_feature (81)..(184): NCBI GI NO: 21554550 NR Description: unknown [Arabidopsis thaliana]
  misc_feature (81)..(184): NCBI GI NO: 26452654 NR Description: unknown protein [Arabidopsis thaliana]
  misc_feature (82)..(164): NCBI GI NO: 32489836 NR Description: OSJNBb0039L24.19
  misc_feature (117)..(184): NCBI GI NO: 10176843 NR Description: gene_id:MRO11.20~unknown protein
  misc_feature (82)..(184): NCBI GI NO: 13543783 NR Description: Unknown (protein for MGC:7642) [Mus musculus]
  misc_feature (79)..(171): NCBI GI NO: 32488374 NR Description: OSJNBa0043A12.4
  misc_feature (82)..(184): NCBI GI NO: 15223416 NR Description: heavy-metal-associated domain-containing protein
  misc_feature (83)..(184): NCBI GI NO: 25517980 NR Description: F22L4.5 protein - Arabidopsis thaliana
TPASPTHRSTSVPTCRSARARTLAPLCKAKPDAVTSFGLFSSHCSKYLGREYSQLPAQPSLPFPLLPPPTPLSAPEARMAAQKVVLRVPTMTDDKAKQKAIEAVADIYGIDSIVADLKDNKMIIIGEMDTVAIAKKLKKVGKIDIVSVGPAKEEKKEEKKEEKKEEKKEEKKEEKKEEKKEEKK

SEQ ID NO: 13931 - protein, 106 aa, Triticum aestivum
  peptide (1)..(106): Ceres Seq. ID no. 14302210
  misc_feature (14)..(102): Pfam Name: Pfam Description:  Ubiquitin carboxyl-terminal hydrolase
  misc_feature (4)..(106): NCBI GI NO: 37535864 NR Description: hypothetical protein
  misc_feature (3)..(106): NCBI GI NO: 18420713 NR Description: heavy-metal-associated domain-containing protein
  misc_feature (3)..(106): NCBI GI NO: 21554550 NR Description: unknown [Arabidopsis thaliana]
  misc_feature (3)..(106): NCBI GI NO: 26452654 NR Description: unknown protein [Arabidopsis thaliana]
  misc_feature (4)..(86): NCBI GI NO: 32489836 NR Description: OSJNBb0039L24.19
  misc_feature (39)..(106): NCBI GI NO: 10176843 NR Description: gene_id:MRO11.20~unknown protein
  misc_feature (4)..(106): NCBI GI NO: 13543783 NR Description: Unknown (protein for MGC:7642) [Mus musculus]
  misc_feature (1)..(93): NCBI GI NO: 32488374 NR Description: OSJNBa0043A12.4
  misc_feature (4)..(106): NCBI GI NO: 15223416 NR Description: heavy-metal-associated domain-containing protein
  misc_feature (5)..(106): NCBI GI NO: 25517980 NR Description: F22L4.5 protein - Arabidopsis thaliana
MAAQKVVLRVPTMTDDKAKQKAIEAVADIYGIDSIVADLKDNKMIIIGEMDTVAIAKKLKKVGKIDIVSVGPAKEEKKEEKKEEKKEEKKEEKKEEKKEEKKEEKK

SEQ ID NO: 13932 - protein, 94 aa, Triticum aestivum
  peptide (1)..(94): Ceres Seq. ID no. 14302211
  misc_feature (2)..(90): Pfam Name: Pfam Description:  Ubiquitin carboxyl-terminal hydrolase
  misc_feature (1)..(94): NCBI GI NO: 37535864 NR Description: hypothetical protein
  misc_feature (1)..(94): NCBI GI NO: 18420713 NR Description: heavy-metal-associated domain-containing protein
  misc_feature (1)..(94): NCBI GI NO: 21554550 NR Description: unknown [Arabidopsis thaliana]
  misc_feature (1)..(94): NCBI GI NO: 26452654 NR Description: unknown protein [Arabidopsis thaliana]
  misc_feature (1)..(74): NCBI GI NO: 32489836 NR Description: OSJNBb0039L24.19
  misc_feature (27)..(94): NCBI GI NO: 10176843 NR Description: gene_id:MRO11.20~unknown protein
  misc_feature (1)..(94): NCBI GI NO: 13543783 NR Description: Unknown (protein for MGC:7642) [Mus musculus]
  misc_feature (1)..(81): NCBI GI NO: 32488374 NR Description: OSJNBa0043A12.4
  misc_feature (1)..(94): NCBI GI NO: 15223416 NR Description: heavy-metal-associated domain-containing protein
  misc_feature (1)..(94): NCBI GI NO: 25517980 NR Description: F22L4.5 protein - Arabidopsis thaliana
MTDDKAKQKAIEAVADIYGIDSIVADLKDNKMIIIGEMDTVAIAKKLKKVGKIDIVSVGPAKEEKKEEKKEEKKEEKKEEKKEEKKEEKKEEKK

SEQ ID NO: 13933 - DNA, 1112 bp, Triticum aestivum
  misc_feature (1)..(1112): Ceres Seq. ID no. 13591076
tttctcttccttcgttcgttctggtcgtttcggtgaatcgatctcgcccaccaaacccgaccacccgatcccccggacagccggagagcgaggcgaagcggcgaggcgtaccgcaaccatgctcagggtcgcaggtcgacgcatatcctcccacctcgcatggcgccccgccgcggccgcctccgccggcagcagccccctcgccggcggcctccctggcgacgacttcccccgggaccagaatccgcgcttcgccatcgaatcacccttctacgtcgctgccagaggcttttcggctgaatctcttgttccgaggaaccaggatgtagagttggctgagctcacaccaactacggcagctctgaagaatccctgtgccaaaattgtgtacgatgagtataaccacgagaggtacccacctggtgaccccagcaagcgtgcctttgcctactttgtgttgagtggtgggagatttgtgtacgcatccttgttgcgtttgctcgtcttaaagtttgtcctgagtatgtcagcaagtaaggatgtgcttgccctcgcttcccttgaggttgacctgtcaagtattgagcccggtaccactgtgactgtaaagtggcggggcaagccagttttcatcaggcgcaggaccgaagatgatgtgaagctggccaacagcgttgatgttacatctctccgtgacccacaggaggatgcggtgcgtgtcaagaaccctgagtggcttgttgtcattggtgtctgcactcacttgggctgcattcccctccccaactctggggacttcggtggctggttctgcccatgtcatggctcacactacgacatctcaggtagaatcaggaagggcccagcaccatacaacctggaggtcccgacctacagtttcttggaagataacaaaatgcttattggctaagagcactggccgtaagattaatccctatggtgctgtgctgccattttgtgttggtttgaccattcgtcttcttgttgctcggatagtcctatgatggactgttatcttagtgcagtactcttactagcactggatagtaaagaataatctgctgctactttggtacttttaattaatttcc

SEQ ID NO: 13934 - protein, 309 aa, Triticum aestivum
  peptide (1)..(309): Ceres Seq. ID no. 13591077
  misc_feature (209)..(305): Pfam Name: Pfam Description:  Rieske [2Fe-2S] domain
  misc_feature (40)..(309): NCBI GI NO: 1717957 NR Description: Ubiquinol-cytochrome C reductase iron-sulfur subunit
  misc_feature (40)..(309): NCBI GI NO: 38347166 NR Description: OSJNBa0039C07.12
  misc_feature (40)..(309): NCBI GI NO: 1717950 NR Description: Ubiquinol-cytochrome C reductase iron-sulfur subunit 2
  misc_feature (40)..(309): NCBI GI NO: 1076675 NR Description: ubiquinol-cytochrome-c reductase (EC 1
  misc_feature (40)..(309): NCBI GI NO: 1717951 NR Description: Ubiquinol-cytochrome C reductase iron-sulfur subunit 3
  misc_feature (40)..(309): NCBI GI NO: 1717953 NR Description: Ubiquinol-cytochrome C reductase iron-sulfur subunit 5
  misc_feature (40)..(309): NCBI GI NO: 586145 NR Description: Ubiquinol-cytochrome C reductase iron-sulfur subunit
  misc_feature (54)..(309): NCBI GI NO: 1717949 NR Description: Ubiquinol-cytochrome C reductase iron-sulfur subunit 1
  misc_feature (40)..(309): NCBI GI NO: 18417067 NR Description: ubiquinol--cytochrome C reductase
  misc_feature (40)..(309): NCBI GI NO: 21553507 NR Description: ubiquinol--cytochrome-c reductase-like protein
FSSFVRSGRFGESISPTKPDHPIPRTAGERGEAARRTATMLRVAGRRISSHLAWRPAAAASAGSSPLAGGLPGDDFPRDQNPRFAIESPFYVAARGFSAESLVPRNQDVELAELTPTTAALKNPCAKIVYDEYNHERYPPGDPSKRAFAYFVLSGGRFVYASLLRLLVLKFVLSMSASKDVLALASLEVDLSSIEPGTTVTVKWRGKPVFIRRRTEDDVKLANSVDVTSLRDPQEDAVRVKNPEWLVVIGVCTHLGCIPLPNSGDFGGWFCPCHGSHYDISGRIRKGPAPYNLEVPTYSFLEDNKMLIG

SEQ ID NO: 13935 - protein, 270 aa, Triticum aestivum
  peptide (1)..(270): Ceres Seq. ID no. 13591078
  misc_feature (170)..(266): Pfam Name: Pfam Description:  Rieske [2Fe-2S] domain
  misc_feature (1)..(270): NCBI GI NO: 1717957 NR Description: Ubiquinol-cytochrome C reductase iron-sulfur subunit
  misc_feature (1)..(270): NCBI GI NO: 38347166 NR Description: OSJNBa0039C07.12
  misc_feature (1)..(270): NCBI GI NO: 1717950 NR Description: Ubiquinol-cytochrome C reductase iron-sulfur subunit 2
  misc_feature (1)..(270): NCBI GI NO: 1076675 NR Description: ubiquinol-cytochrome-c reductase (EC 1
  misc_feature (1)..(270): NCBI GI NO: 1717951 NR Description: Ubiquinol-cytochrome C reductase iron-sulfur subunit 3
  misc_feature (1)..(270): NCBI GI NO: 1717953 NR Description: Ubiquinol-cytochrome C reductase iron-sulfur subunit 5
  misc_feature (1)..(270): NCBI GI NO: 586145 NR Description: Ubiquinol-cytochrome C reductase iron-sulfur subunit
  misc_feature (15)..(270): NCBI GI NO: 1717949 NR Description: Ubiquinol-cytochrome C reductase iron-sulfur subunit 1
  misc_feature (1)..(270): NCBI GI NO: 18417067 NR Description: ubiquinol--cytochrome C reductase
  misc_feature (1)..(270): NCBI GI NO: 21553507 NR Description: ubiquinol--cytochrome-c reductase-like protein
MLRVAGRRISSHLAWRPAAAASAGSSPLAGGLPGDDFPRDQNPRFAIESPFYVAARGFSAESLVPRNQDVELAELTPTTAALKNPCAKIVYDEYNHERYPPGDPSKRAFAYFVLSGGRFVYASLLRLLVLKFVLSMSASKDVLALASLEVDLSSIEPGTTVTVKWRGKPVFIRRRTEDDVKLANSVDVTSLRDPQEDAVRVKNPEWLVVIGVCTHLGCIPLPNSGDFGGWFCPCHGSHYDISGRIRKGPAPYNLEVPTYSFLEDNKMLIG

SEQ ID NO: 13936 - DNA, 860 bp, Triticum aestivum
  misc_feature (1)..(860): Ceres Seq. ID no. 13597399
atcgcattgccgcgccttcccttcattcccacccgcctacttcacgcgcaccaaccaccccctccgctgcttcagttcgtccgctccatccatcccgtttctattccgagtggacgccaggcgcataggtatatttggctgtagagagcctgatttagaagataggaggagcacatctttgagagggaggagcatgccgacgggaaccatgaggaggatgttcgtcgagtcgtcctcgtcctcctccgggagcggcagggaggcggagccggcggtggtgctgtgcgcgccccggccccgcagggtccacgcccagccctgcagcgccgacctcatcctcggccccccgcccttcctgctcaacgcctcctccggcagcataaagcagagacaagggaagagcaaaacgcgggaggaggagggggaggggggctgggcgctgttcggcggctcgccgccggcgcgcgcggacaacccgctcgtccacgacccccacttcctgctcaaccagcgccaccacgccgccgcggaattcaacctcgcggcggtttttgaccaccacctccaccaccacagccgcaaccaccaccacgccccaaccacatatagcaatagcggcaatagccacagttttgccccgtcgtacacgcacgccgcgccggcggtgaggatccaggggttcgacgtcgccgcctgccggggctcccacgccagcaacggcggaggccgcgtgctctccgcccgcgcatgagcctgagccctgcggaattgcatcatgttggttatgcagctgtaccatgtaatggaattgcatcaagttgattcaataatttctcctgagtttcgaaaaaaaaaaaaaa

SEQ ID NO: 13937 - protein, 249 aa, Triticum aestivum
  peptide (1)..(249): Ceres Seq. ID no. 13597400
  misc_feature (70)..(249): NCBI GI NO: 34907108 NR Description: OSJNBa0052O12.19
SHCRAFPSFPPAYFTRTNHPLRCFSSSAPSIPFLFRVDARRIGIFGCREPDLEDRRSTSLRGRSMPTGTMRRMFVESSSSSSGSGREAEPAVVLCAPRPRRVHAQPCSADLILGPPPFLLNASSGSIKQRQGKSKTREEEGEGGWALFGGSPPARADNPLVHDPHFLLNQRHHAAAEFNLAAVFDHHLHHHSRNHHHAPTTYSNSGNSHSFAPSYTHAAPAVRIQGFDVAACRGSHASNGGGRVLSARA

SEQ ID NO: 13938 - protein, 185 aa, Triticum aestivum
  peptide (1)..(185): Ceres Seq. ID no. 13597401
  misc_feature (6)..(185): NCBI GI NO: 34907108 NR Description: OSJNBa0052O12.19
MPTGTMRRMFVESSSSSSGSGREAEPAVVLCAPRPRRVHAQPCSADLILGPPPFLLNASSGSIKQRQGKSKTREEEGEGGWALFGGSPPARADNPLVHDPHFLLNQRHHAAAEFNLAAVFDHHLHHHSRNHHHAPTTYSNSGNSHSFAPSYTHAAPAVRIQGFDVAACRGSHASNGGGRVLSARA

SEQ ID NO: 13939 - protein, 180 aa, Triticum aestivum
  peptide (1)..(180): Ceres Seq. ID no. 13597402
  misc_feature (1)..(180): NCBI GI NO: 34907108 NR Description: OSJNBa0052O12.19
MRRMFVESSSSSSGSGREAEPAVVLCAPRPRRVHAQPCSADLILGPPPFLLNASSGSIKQRQGKSKTREEEGEGGWALFGGSPPARADNPLVHDPHFLLNQRHHAAAEFNLAAVFDHHLHHHSRNHHHAPTTYSNSGNSHSFAPSYTHAAPAVRIQGFDVAACRGSHASNGGGRVLSARA

SEQ ID NO: 13940 - DNA, 1056 bp, Triticum aestivum
  misc_feature (1)..(1056): Ceres Seq. ID no. 13597418
actttattgtgtttaaacacgccaaaggccaaaagcggggaagaaagaggacgaaagaaagcgtcgccgccgcggagcaaatcgagcaagcagccggcgacgcgacgcggccgaatcggagcaggcagtctcgccggccggccgtcccatcgaccgaccccccgctcggccccccgaggaaccgatagggtccatctccctgccggcgatggcgtcgtccgcggatccgtgggtgcgggagtacggcgaggcggcgcgcctggcggacgacgtcgccgccatggtcgccgaccgggcggcgctcccgcagtccggcccggaggtcatgcgccacacctccgccattcgccggaagatcaccatcctcgggaccaggctggacagcctcgaggggatgctcgccaggcttccccccaaatccatcacggacaaggagctgaataagcaccgagacacgctttcaaatttgaaatctagagcaaaacagatggcagaaagtttcaacatgtcgacctttgccaacagggaggatttgcttggtcagagcaagaaagctgctgatgacatgaacagagtagccgggttggataaccaagggattgttggccttcagaggcaaatcatgaaagaacaagatgagggtcttgagaagctggaacagaccgtgctgagcacaaaacatattgcgttagcagtcaatgaggaacttgacctgcacgcaagactgattgatgacctagatgatcatgtggatggtacaaactcgcgccttcaacgtgtgcaaaagaggcttgcggttctgaacaagcgcgccaagggcggctgctcctgcatgtccctgctgctgtccaccgtcggtatagtgatgcttgtggttattgtctggctcctcatcaagtatctgtaacctctgcccaactcaaatcagtttcaagtgtgcagttctttcaaagacagtatggttacttccgcttcgccatcattttggcgagaaatggaaaatatgtatgccacatgtccccttatcgggttgaaatgtgaagttcagacttttgc

SEQ ID NO: 13941 - protein, 232 aa, Triticum aestivum
  peptide (1)..(232): Ceres Seq. ID no. 13597419
  misc_feature (141)..(203): Pfam Name: Pfam Description:  SNARE domain
  misc_feature (1)..(232): NCBI GI NO: 18412435 NR Description: syntaxin of plants 52 (SYP52)
  misc_feature (1)..(232): NCBI GI NO: 18394339 NR Description: syntaxin of plants 51 (SYP51)
  misc_feature (1)..(232): NCBI GI NO: 21592406 NR Description: unknown [Arabidopsis thaliana]
  misc_feature (1)..(174): NCBI GI NO: 25372945 NR Description: protein F20B17.2 [imported] - Arabidopsis thaliana
  misc_feature (159)..(232): NCBI GI NO: 25372945 NR Description: protein F20B17.2 [imported] - Arabidopsis thaliana
  misc_feature (1)..(231): NCBI GI NO: 34902234 NR Description: Hypothetical protein
  misc_feature (1)..(174): NCBI GI NO: 15219172 NR Description: hypothetical protein [Arabidopsis thaliana]
  misc_feature (1)..(195): NCBI GI NO: 22329605 NR Description: hypothetical protein [Arabidopsis thaliana]
  misc_feature (6)..(226): NCBI GI NO: 13928908 NR Description: syntaxin 8; syntaxin-like protein 3I35
  misc_feature (6)..(226): NCBI GI NO: 9055356 NR Description: syntaxin 8; syntaxin-like protein 3I35
MASSADPWVREYGEAARLADDVAAMVADRAALPQSGPEVMRHTSAIRRKITILGTRLDSLEGMLARLPPKSITDKELNKHRDTLSNLKSRAKQMAESFNMSTFANREDLLGQSKKAADDMNRVAGLDNQGIVGLQRQIMKEQDEGLEKLEQTVLSTKHIALAVNEELDLHARLIDDLDDHVDGTNSRLQRVQKRLAVLNKRAKGGCSCMSLLLSTVGIVMLVVIVWLLIKYL

SEQ ID NO: 13942 - protein, 208 aa, Triticum aestivum
  peptide (1)..(208): Ceres Seq. ID no. 13597420
  misc_feature (117)..(179): Pfam Name: Pfam Description:  SNARE domain
  misc_feature (1)..(208): NCBI GI NO: 18412435 NR Description: syntaxin of plants 52 (SYP52)
  misc_feature (1)..(208): NCBI GI NO: 18394339 NR Description: syntaxin of plants 51 (SYP51)
  misc_feature (1)..(208): NCBI GI NO: 21592406 NR Description: unknown [Arabidopsis thaliana]
  misc_feature (1)..(150): NCBI GI NO: 25372945 NR Description: protein F20B17.2 [imported] - Arabidopsis thaliana
  misc_feature (135)..(208): NCBI GI NO: 25372945 NR Description: protein F20B17.2 [imported] - Arabidopsis thaliana
  misc_feature (1)..(207): NCBI GI NO: 34902234 NR Description: Hypothetical protein
  misc_feature (1)..(150): NCBI GI NO: 15219172 NR Description: hypothetical protein [Arabidopsis thaliana]
  misc_feature (1)..(171): NCBI GI NO: 22329605 NR Description: hypothetical protein [Arabidopsis thaliana]
  misc_feature (1)..(202): NCBI GI NO: 13928908 NR Description: syntaxin 8; syntaxin-like protein 3I35
  misc_feature (1)..(202): NCBI GI NO: 9055356 NR Description: syntaxin 8; syntaxin-like protein 3I35
MVADRAALPQSGPEVMRHTSAIRRKITILGTRLDSLEGMLARLPPKSITDKELNKHRDTLSNLKSRAKQMAESFNMSTFANREDLLGQSKKAADDMNRVAGLDNQGIVGLQRQIMKEQDEGLEKLEQTVLSTKHIALAVNEELDLHARLIDDLDDHVDGTNSRLQRVQKRLAVLNKRAKGGCSCMSLLLSTVGIVMLVVIVWLLIKYL

SEQ ID NO: 13943 - protein, 193 aa, Triticum aestivum
  peptide (1)..(193): Ceres Seq. ID no. 13597421
  misc_feature (102)..(164): Pfam Name: Pfam Description:  SNARE domain
  misc_feature (1)..(193): NCBI GI NO: 18412435 NR Description: syntaxin of plants 52 (SYP52)
  misc_feature (1)..(193): NCBI GI NO: 18394339 NR Description: syntaxin of plants 51 (SYP51)
  misc_feature (1)..(193): NCBI GI NO: 21592406 NR Description: unknown [Arabidopsis thaliana]
  misc_feature (1)..(135): NCBI GI NO: 25372945 NR Description: protein F20B17.2 [imported] - Arabidopsis thaliana
  misc_feature (120)..(193): NCBI GI NO: 25372945 NR Description: protein F20B17.2 [imported] - Arabidopsis thaliana
  misc_feature (1)..(192): NCBI GI NO: 34902234 NR Description: Hypothetical protein
  misc_feature (1)..(135): NCBI GI NO: 15219172 NR Description: hypothetical protein [Arabidopsis thaliana]
  misc_feature (1)..(156): NCBI GI NO: 22329605 NR Description: hypothetical protein [Arabidopsis thaliana]
  misc_feature (1)..(187): NCBI GI NO: 13928908 NR Description: syntaxin 8; syntaxin-like protein 3I35
  misc_feature (1)..(187): NCBI GI NO: 9055356 NR Description: syntaxin 8; syntaxin-like protein 3I35
MRHTSAIRRKITILGTRLDSLEGMLARLPPKSITDKELNKHRDTLSNLKSRAKQMAESFNMSTFANREDLLGQSKKAADDMNRVAGLDNQGIVGLQRQIMKEQDEGLEKLEQTVLSTKHIALAVNEELDLHARLIDDLDDHVDGTNSRLQRVQKRLAVLNKRAKGGCSCMSLLLSTVGIVMLVVIVWLLIKYL

SEQ ID NO: 13944 - DNA, 876 bp, Triticum aestivum
  misc_feature (1)..(876): Ceres Seq. ID no. 12586195
aaagccatttcatcagatcccagccaagtacatcacgcacccacgagcacgaccaggcacgcacggcagaagcgatgggcgtcgtctcggcggtggcggacgcggtggtcgtcctcttctccctcaccatcgcggtgggggtcccgctcatcgacgcgcaggccgtcctctcgcacgacgcctacccggcgcagctgcgggacctcaagcgctggtacgccgccgagttcgacgactacctcatggcccacccgccgcccttcttccgcggcctcttgtgcctcgagctcgccttcctctggccgctctccgtcgccaccgtctacggcgtcctcgcccgccgccgatgggccgccaccacctccctcatggtcggcgtcaccaccctcacctccctgtcggcaatatttggcgagatgctgggctcagggaaggcaacgacgaagctgcttcagatgtatgttccatacgccgtgtttgctgtcattgccatcctgcgcggtctctgctcatgctcggcgccggcgtcgccggcatcttctgctcggaagaagagggtctagatttgatttgcatttctgacatttttcatcgataaaacattcaagtttcactaggtgtaagatgctttcttctgaggctgtaccgtccaacctactccctccgttcgggattacttgtctcgaaaatagatgtaactagaactaaaatacgtctagatacatccatctctacgacaagtaatttcgaacggagggagtatcattcaacacccagtggaaatggaatgtccatactgccattgttaaattttgttcacaatttgaaaaagattgtactgcatctgttctacttctatgatagatcatgttcaag

SEQ ID NO: 13945 - protein, 198 aa, Triticum aestivum
  peptide (1)..(198): Ceres Seq. ID no. 12586196
KPFHQIPAKYITHPRARPGTHGRSDGRRLGGGGRGGRPLLPHHRGGGPAHRRAGRPLARRLPGAAAGPQALVRRRVRRLPHGPPAALLPRPLVPRARLPLAALRRHRLRRPRPPPMGRHHLPHGRRHHPHLPVGNIWRDAGLREGNDEAASDVCSIRRVCCHCHPARSLLMLGAGVAGIFCSEEEGLDLICISDIFHR

SEQ ID NO: 13946 - protein, 193 aa, Triticum aestivum
  peptide (1)..(193): Ceres Seq. ID no. 12586197
  misc_feature (40)..(132): Pfam Name: Pfam Description:  Extensin-like region
  misc_feature (4)..(131): NCBI GI NO: 32699068 NR Description: hypothetical protein FLJ35107 [Homo sapiens]
  misc_feature (4)..(149): NCBI GI NO: 32699068 NR Description: hypothetical protein FLJ35107 [Homo sapiens]
  misc_feature (4)..(130): NCBI GI NO: 32699068 NR Description: hypothetical protein FLJ35107 [Homo sapiens]
  misc_feature (4)..(130): NCBI GI NO: 11359723 NR Description: proteophosphoglycan, membrane-associated
  misc_feature (4)..(128): NCBI GI NO: 11359723 NR Description: proteophosphoglycan, membrane-associated
  misc_feature (4)..(130): NCBI GI NO: 11359723 NR Description: proteophosphoglycan, membrane-associated
  misc_feature (4)..(130): NCBI GI NO: 13592175 NR Description: ppg3 [Leishmania major]
  misc_feature (4)..(130): NCBI GI NO: 11359723 NR Description: proteophosphoglycan, membrane-associated
KAISSDPSQVHHAPTSTTRHARQKRWASSRRWRTRWSSSSPSPSRWGSRSSTRRPSSRTTPTRRSCGTSSAGTPPSSTTTSWPTRRPSSAASCASSSPSSGRSPSPPSTASSPAADGPPPPPSWSASPPSPPCRQYLARCWAQGRQRRSCFRCMFHTPCLLSLPSCAVSAHARRRRRRHLLLGRRGSRFDLHF

SEQ ID NO: 13947 - protein, 186 aa, Triticum aestivum
  peptide (1)..(186): Ceres Seq. ID no. 12586198
  misc_feature (25)..(185): NCBI GI NO: 28411944 NR Description: OSJNBa0027N13.37
  misc_feature (25)..(185): NCBI GI NO: 28411943 NR Description: OSJNBa0027N13.35
  misc_feature (25)..(185): NCBI GI NO: 18402955 NR Description: expressed protein; protein id: At2g32380
  misc_feature (25)..(182): NCBI GI NO: 18390494 NR Description: expressed protein; protein id: At1g05210
  misc_feature (25)..(183): NCBI GI NO: 15220447 NR Description: hypothetical protein; protein id: At1g05220.1
  misc_feature (13)..(140): NCBI GI NO: 2135212 NR Description: gene MAC30 protein - human (fragment)
  misc_feature (25)..(140): NCBI GI NO: 27688749 NR Description: similar to RIKEN cDNA 1810014L12
  misc_feature (25)..(140): NCBI GI NO: 19526880 NR Description: RIKEN cDNA 1810014L12 [Mus musculus]
SHFIRSQPSTSRTHEHDQARTAEAMGVVSAVADAVVVLFSLTIAVGVPLIDAQAVLSHDAYPAQLRDLKRWYAAEFDDYLMAHPPPFFRGLLCLELAFLWPLSVATVYGVLARRRWAATTSLMVGVTTLTSLSAIFGEMLGSGKATTKLLQMYVPYAVFAVIAILRGLCSCSAPASPASSARKKRV

SEQ ID NO: 13948 - protein, 162 aa, Triticum aestivum
  peptide (1)..(162): Ceres Seq. ID no. 12586199
  misc_feature (1)..(161): NCBI GI NO: 28411944 NR Description: OSJNBa0027N13.37
  misc_feature (1)..(161): NCBI GI NO: 28411943 NR Description: OSJNBa0027N13.35
  misc_feature (1)..(161): NCBI GI NO: 18402955 NR Description: expressed protein; protein id: At2g32380
  misc_feature (1)..(158): NCBI GI NO: 18390494 NR Description: expressed protein; protein id: At1g05210
  misc_feature (1)..(159): NCBI GI NO: 15220447 NR Description: hypothetical protein; protein id: At1g05220.1
  misc_feature (1)..(116): NCBI GI NO: 2135212 NR Description: gene MAC30 protein - human (fragment)
  misc_feature (1)..(116): NCBI GI NO: 27688749 NR Description: similar to RIKEN cDNA 1810014L12
  misc_feature (1)..(116): NCBI GI NO: 19526880 NR Description: RIKEN cDNA 1810014L12 [Mus musculus]
MGVVSAVADAVVVLFSLTIAVGVPLIDAQAVLSHDAYPAQLRDLKRWYAAEFDDYLMAHPPPFFRGLLCLELAFLWPLSVATVYGVLARRRWAATTSLMVGVTTLTSLSAIFGEMLGSGKATTKLLQMYVPYAVFAVIAILRGLCSCSAPASPASSARKKRV

SEQ ID NO: 13949 - DNA, 733 bp, Triticum aestivum
  misc_feature (1)..(733): Ceres Seq. ID no. 12586420
aaatccaattccaaccacaagctccaatcaaacacagcaaaccaatccagattaccatcggctatcaatcagcaggaggaggaaatcgctgctcgattggggaagaatcaagaggctcggcgaagatgcaggcggcgaaggagaaggtgaaggacggcgtgagcgcggtgaaggccaagaccaagatcacgcaggccaaggcgtcggagaaggcggaggcggccacggcgaggtcgcacgcggagcgggagctggcgcacgagcgcggcaaggccaaggtcgccgctgccaagatggagctgcaccaggacaaggcgctccaccgcgaggaggccatggagcaccgcatccacaagcacggcggccacggccggcaccaccacaagcacggcgtcggcatcgtggccgcgcccccgccggcgaccggggccggggcgggggcgtaccaccctcctcctgccgccggtggccactactactaattacagctaagcagctccatcgctagctagatgggcacatgcgtcgcgtgtgtgttatgcgatctcgcaagctaagtttgtattttgtactgttttgtgcttgacttacccacgcgtgctttttaagtttgcacttggtttgcacttaaagatgagagctgtatgtatgtatggatgcatgcaaccttgttgcttgctttcttttataatactctaaagagcggtaaatcaattacgtttgtttggcagcg

SEQ ID NO: 13950 - protein, 168 aa, Triticum aestivum
  peptide (1)..(168): Ceres Seq. ID no. 12586421
  misc_feature (44)..(147): NCBI GI NO: 10954052 NR Description: ovarian fibroin-like substance-3 [Cyprinus carpio]
NPIPTTSSNQTQQTNPDYHRLSISRRRKSLLDWGRIKRLGEDAGGEGEGEGRRERGEGQDQDHAGQGVGEGGGGHGEVARGAGAGARARQGQGRRCQDGAAPGQGAPPRGGHGAPHPQARRPRPAPPQARRRHRGRAPAGDRGRGGGVPPSSCRRWPLLLITAKQLHR

SEQ ID NO: 13951 - protein, 159 aa, Triticum aestivum
  peptide (1)..(159): Ceres Seq. ID no. 12586422
  misc_feature (42)..(114): Pfam Name: LEA Pfam Description: Late embryogenesis abundant
  misc_feature (42)..(159): NCBI GI NO: 34897842 NR Description: P0514G12.41
  misc_feature (42)..(136): NCBI GI NO: 18652404 NR Description: unknown [Hordeum vulgare]
  misc_feature (42)..(104): NCBI GI NO: 18652403 NR Description: unknown [Hordeum vulgare]
  misc_feature (42)..(151): NCBI GI NO: 15223243 NR Description: late-embryogenesis abundant protein, putative
  misc_feature (42)..(132): NCBI GI NO: 4102692 NR Description: late-embryogenesis abundant protein [Glycine max]
  misc_feature (42)..(148): NCBI GI NO: 38346714 NR Description: OSJNBa0086O06.12
  misc_feature (42)..(126): NCBI GI NO: 4836407 NR Description: seed maturation protein PM29 [Glycine max]
  misc_feature (42)..(125): NCBI GI NO: 15226951 NR Description: similar to late embryogenesis abundant proteins
  misc_feature (44)..(139): NCBI GI NO: 7446478 NR Description: hypothetical protein - Douglas fir
IQFQPQAPIKHSKPIQITIGYQSAGGGNRCSIGEESRGSAKMQAAKEKVKDGVSAVKAKTKITQAKASEKAEAATARSHAERELAHERGKAKVAAAKMELHQDKALHREEAMEHRIHKHGGHGRHHHKHGVGIVAAPPPATGAGAGAYHPPPAAGGHYY

SEQ ID NO: 13952 - protein, 118 aa, Triticum aestivum
  peptide (1)..(118): Ceres Seq. ID no. 12586423
  misc_feature (1)..(73): Pfam Name: LEA Pfam Description: Late embryogenesis abundant
  misc_feature (1)..(118): NCBI GI NO: 34897842 NR Description: P0514G12.41
  misc_feature (1)..(95): NCBI GI NO: 18652404 NR Description: unknown [Hordeum vulgare]
  misc_feature (1)..(63): NCBI GI NO: 18652403 NR Description: unknown [Hordeum vulgare]
  misc_feature (1)..(110): NCBI GI NO: 15223243 NR Description: late-embryogenesis abundant protein, putative
  misc_feature (1)..(91): NCBI GI NO: 4102692 NR Description: late-embryogenesis abundant protein [Glycine max]
  misc_feature (1)..(107): NCBI GI NO: 38346714 NR Description: OSJNBa0086O06.12
  misc_feature (1)..(85): NCBI GI NO: 4836407 NR Description: seed maturation protein PM29 [Glycine max]
  misc_feature (1)..(84): NCBI GI NO: 15226951 NR Description: similar to late embryogenesis abundant proteins
  misc_feature (3)..(98): NCBI GI NO: 7446478 NR Description: hypothetical protein - Douglas fir
MQAAKEKVKDGVSAVKAKTKITQAKASEKAEAATARSHAERELAHERGKAKVAAAKMELHQDKALHREEAMEHRIHKHGGHGRHHHKHGVGIVAAPPPATGAGAGAYHPPPAAGGHYY

SEQ ID NO: 13953 - DNA, 1148 bp, Triticum aestivum
  misc_feature (1)..(1148): Ceres Seq. ID no. 12617350
atcccatcaccacagcaccagtcacaagcaaaagtaggagctcgatcaccgagtgttagctctcacagttcgcaagtgttttatttccaggggtgcagtttcagcaggtcggcaatggctacgattgctctgatagtggccatggtgctcagcctggcgcagctctccgctgggagcaggaggctgatggagctgtacgtgcctccggagagcgaccggctcacgtaccaccagggcggcgtgctcagcggcgacatctccgtgtccatcctctggtacggcaagttcacgcccgcgcagaggtccattgtctccgacttcgtcgtctcgctaaactccgcgccgaacggggccgccacgccctcggtcgggcagtggtggggcaccatcgagcagctctacctgtccaaggcggctgccgccaacggccaggccggcgccacgcacgtgctcctcgccgagcaggtgaccgacgagcagtgctccctcggcacgtcgctcactctggcccagatcgaccagctcgccgcgagcgtcggcgccaagaagggcggcatcgcgctggtgttcaccgacgaggacgtcgccgtggagggcttctgcagcagccggtgcggcaggcacgggtcgtccaccggcggcgactccacgcacatctgggtcggcaactccgtgaagcagtgccccgggcagtgcgcgtggccgttcgcgcagccgcagtacgggccgcagggcgcgcccctggtggcgcccaacggcaacgtcgggatggacggcatggtgatggtcctcgccaccatggtggccggcaccgtgagcaacccgtacggggacggctactaccagggccccaagggcgcgtccctggaggcgtgcacggcgtgccccggcgtctacggcagcggggcgtacccgggctacgccggcaacctgctcgtcgaccccagcaccggcgccagctacaatgccaacggcgccaacgggaggaagtacctgctcccggcgttgtacgaccccgccacggcctcctgcaacacgcttgtctagtccggtgcgtccatccgggcacgtacaggctttccctgtacgcttgagaagttgtacatagtgtaacgtgttggaagaaatggaaattgcttcgttcgttt

SEQ ID NO: 13954 - protein, 348 aa, Triticum aestivum
  peptide (1)..(348): Ceres Seq. ID no. 12617351
  misc_feature (74)..(348): Pfam Name: Pfam Description:  Phosphate-induced protein 1 conserved region
  misc_feature (39)..(348): NCBI GI NO: 3759184 NR Description: phi-1 [Nicotiana tabacum]
  misc_feature (39)..(348): NCBI GI NO: 21593043 NR Description: putative phi-1-like phosphate-induced protein
  misc_feature (48)..(348): NCBI GI NO: 15236667 NR Description: putative phi-1-like phosphate-induced protein
  misc_feature (76)..(347): NCBI GI NO: 15219504 NR Description: phosphate-induced
  misc_feature (40)..(348): NCBI GI NO: 31074969 NR Description: erg-1 [Solanum tuberosum]
  misc_feature (74)..(348): NCBI GI NO: 15237656 NR Description: phi-1-like protein; protein id: At5g64260
  misc_feature (114)..(344): NCBI GI NO: 37533672 NR Description: putative phosphate-induced protein
  misc_feature (82)..(348): NCBI GI NO: 15242420 NR Description: putative protein; protein id: At5g09440
  misc_feature (174)..(347): NCBI GI NO: 13194680 NR Description: phosphate-induced protein 1-like protein
  misc_feature (76)..(279): NCBI GI NO: 11762144 NR Description: At1g35140 [Arabidopsis thaliana]
IPSPQHQSQAKVGARSPSVSSHSSQVFYFQGCSFSRSAMATIALIVAMVLSLAQLSAGSRRLMELYVPPESDRLTYHQGGVLSGDISVSILWYGKFTPAQRSIVSDFVVSLNSAPNGAATPSVGQWWGTIEQLYLSKAAAANGQAGATHVLLAEQVTDEQCSLGTSLTLAQIDQLAASVGAKKGGIALVFTDEDVAVEGFCSSRCGRHGSSTGGDSTHIWVGNSVKQCPGQCAWPFAQPQYGPQGAPLVAPNGNVGMDGMVMVLATMVAGTVSNPYGDGYYQGPKGASLEACTACPGVYGSGAYPGYAGNLLVDPSTGASYNANGANGRKYLLPALYDPATASCNTLV

SEQ ID NO: 13955 - protein, 310 aa, Triticum aestivum
  peptide (1)..(310): Ceres Seq. ID no. 12617352
  misc_feature (36)..(310): Pfam Name: Pfam Description:  Phosphate-induced protein 1 conserved region
  misc_feature (1)..(310): NCBI GI NO: 3759184 NR Description: phi-1 [Nicotiana tabacum]
  misc_feature (1)..(310): NCBI GI NO: 21593043 NR Description: putative phi-1-like phosphate-induced protein
  misc_feature (10)..(310): NCBI GI NO: 15236667 NR Description: putative phi-1-like phosphate-induced protein
  misc_feature (38)..(309): NCBI GI NO: 15219504 NR Description: phosphate-induced
  misc_feature (2)..(310): NCBI GI NO: 31074969 NR Description: erg-1 [Solanum tuberosum]
  misc_feature (36)..(310): NCBI GI NO: 15237656 NR Description: phi-1-like protein; protein id: At5g64260
  misc_feature (76)..(306): NCBI GI NO: 37533672 NR Description: putative phosphate-induced protein
  misc_feature (44)..(310): NCBI GI NO: 15242420 NR Description: putative protein; protein id: At5g09440
  misc_feature (136)..(309): NCBI GI NO: 13194680 NR Description: phosphate-induced protein 1-like protein
  misc_feature (38)..(241): NCBI GI NO: 11762144 NR Description: At1g35140 [Arabidopsis thaliana]
MATIALIVAMVLSLAQLSAGSRRLMELYVPPESDRLTYHQGGVLSGDISVSILWYGKFTPAQRSIVSDFVVSLNSAPNGAATPSVGQWWGTIEQLYLSKAAAANGQAGATHVLLAEQVTDEQCSLGTSLTLAQIDQLAASVGAKKGGIALVFTDEDVAVEGFCSSRCGRHGSSTGGDSTHIWVGNSVKQCPGQCAWPFAQPQYGPQGAPLVAPNGNVGMDGMVMVLATMVAGTVSNPYGDGYYQGPKGASLEACTACPGVYGSGAYPGYAGNLLVDPSTGASYNANGANGRKYLLPALYDPATASCNTLV

SEQ ID NO: 13956 - protein, 301 aa, Triticum aestivum
  peptide (1)..(301): Ceres Seq. ID no. 12617353
  misc_feature (27)..(301): Pfam Name: Pfam Description:  Phosphate-induced protein 1 conserved region
  misc_feature (1)..(301): NCBI GI NO: 3759184 NR Description: phi-1 [Nicotiana tabacum]
  misc_feature (1)..(301): NCBI GI NO: 21593043 NR Description: putative phi-1-like phosphate-induced protein
  misc_feature (1)..(301): NCBI GI NO: 15236667 NR Description: putative phi-1-like phosphate-induced protein
  misc_feature (29)..(300): NCBI GI NO: 15219504 NR Description: phosphate-induced
  misc_feature (1)..(301): NCBI GI NO: 31074969 NR Description: erg-1 [Solanum tuberosum]
  misc_feature (27)..(301): NCBI GI NO: 15237656 NR Description: phi-1-like protein; protein id: At5g64260
  misc_feature (67)..(297): NCBI GI NO: 37533672 NR Description: putative phosphate-induced protein
  misc_feature (35)..(301): NCBI GI NO: 15242420 NR Description: putative protein; protein id: At5g09440
  misc_feature (127)..(300): NCBI GI NO: 13194680 NR Description: phosphate-induced protein 1-like protein
  misc_feature (29)..(232): NCBI GI NO: 11762144 NR Description: At1g35140 [Arabidopsis thaliana]
MVLSLAQLSAGSRRLMELYVPPESDRLTYHQGGVLSGDISVSILWYGKFTPAQRSIVSDFVVSLNSAPNGAATPSVGQWWGTIEQLYLSKAAAANGQAGATHVLLAEQVTDEQCSLGTSLTLAQIDQLAASVGAKKGGIALVFTDEDVAVEGFCSSRCGRHGSSTGGDSTHIWVGNSVKQCPGQCAWPFAQPQYGPQGAPLVAPNGNVGMDGMVMVLATMVAGTVSNPYGDGYYQGPKGASLEACTACPGVYGSGAYPGYAGNLLVDPSTGASYNANGANGRKYLLPALYDPATASCNTLV

SEQ ID NO: 13957 - DNA, 599 bp, Triticum aestivum
  misc_feature (1)..(599): Ceres Seq. ID no. 15173361
actcggaaaaagatctccgctttgccctgcctgcctgcgccggacggagccaccccacccaccaaagcgatccgccggaccggcgagcggcgagcggcggagcaagggagagatggcggcgacgggggaggagacggtgcgtgcgtcgcacatcctgatcaagcacgaggggtcccggcgcaaggcgtcctggaaggaccccgagggccgggtcatctccgccaccacgcgcgccgacgccgccgcgcgcctcggcgacctccgcgcccagatcctcgccggccgcggctccttcgccgacctcgccgcgcagcactccgactgctcctccgcccgccgcggcggcgacctagggcctgcggctcttctcattctggcagccccaagcttgaatgaagaaaaatgtcttgtatcgtctcaccattttgctacggccatttgagctggttgataccatcatcacaggtcaatgtttgagcttatgatgtcttgatcgggaaatgtggaaatgtttttttttcttcatttcatctgtgataaatcatttcaaatgaatgttgtatgcaccatgaaatatctcctacttatagtaaggtttc

SEQ ID NO: 13958 - protein, 146 aa, Triticum aestivum
  peptide (1)..(146): Ceres Seq. ID no. 15173362
  misc_feature (39)..(118): NCBI GI NO: 38344861 NR Description: OSJNBa0020P07.4
  misc_feature (35)..(118): NCBI GI NO: 22218833 NR Description: Chain A
  misc_feature (44)..(118): NCBI GI NO: 15227956 NR Description: peptidyl-prolyl cis-trans isomerase -related
  misc_feature (24)..(119): NCBI GI NO: 1688322 NR Description: PinA [Dictyostelium discoideum]
  misc_feature (27)..(118): NCBI GI NO: 7448078 NR Description: Pin1 protein homolog dodo - fruit fly
  misc_feature (27)..(118): NCBI GI NO: 17647355 NR Description: dodo CG17051-PA [Drosophila melanogaster]
  misc_feature (40)..(118): NCBI GI NO: 19075413 NR Description: peptidyl-prolyl cis-trans isomerase.
  misc_feature (24)..(119): NCBI GI NO: 39584693 NR Description: Hypothetical protein CBG19616
  misc_feature (16)..(118): NCBI GI NO: 12655856 NR Description: peptidyl prolyl cis/trans isomerase
  misc_feature (39)..(118): NCBI GI NO: 2739197 NR Description: peptidyl-prolyl cis/trans isomerase
LGKRSPLCPACLRRTEPPHPPKRSAGPASGERRSKGEMAATGEETVRASHILIKHEGSRRKASWKDPEGRVISATTRADAAARLGDLRAQILAGRGSFADLAAQHSDCSSARRGGDLGPAALLILAAPSLNEEKCLVSSHHFATAI

SEQ ID NO: 13959 - protein, 131 aa, Triticum aestivum
  peptide (1)..(131): Ceres Seq. ID no. 15173363
TRKKISALPCLPAPDGATPPTKAIRRTGERRAAEQGRDGGDGGGDGACVAHPDQARGVPAQGVLEGPRGPGHLRHHARRRRRAPRRPPRPDPRRPRLLRRPRRAALRLLLRPPRRRPRACGSSHSGSPKLE

SEQ ID NO: 13960 - protein, 109 aa, Triticum aestivum
  peptide (1)..(109): Ceres Seq. ID no. 15173364
  misc_feature (2)..(81): NCBI GI NO: 38344861 NR Description: OSJNBa0020P07.4
  misc_feature (1)..(81): NCBI GI NO: 22218833 NR Description: Chain A
  misc_feature (7)..(81): NCBI GI NO: 15227956 NR Description: peptidyl-prolyl cis-trans isomerase -related
  misc_feature (1)..(82): NCBI GI NO: 1688322 NR Description: PinA [Dictyostelium discoideum]
  misc_feature (1)..(81): NCBI GI NO: 7448078 NR Description: Pin1 protein homolog dodo - fruit fly
  misc_feature (1)..(81): NCBI GI NO: 17647355 NR Description: dodo CG17051-PA [Drosophila melanogaster]
  misc_feature (3)..(81): NCBI GI NO: 19075413 NR Description: peptidyl-prolyl cis-trans isomerase.
  misc_feature (1)..(82): NCBI GI NO: 39584693 NR Description: Hypothetical protein CBG19616
  misc_feature (1)..(81): NCBI GI NO: 12655856 NR Description: peptidyl prolyl cis/trans isomerase
  misc_feature (2)..(81): NCBI GI NO: 2739197 NR Description: peptidyl-prolyl cis/trans isomerase
MAATGEETVRASHILIKHEGSRRKASWKDPEGRVISATTRADAAARLGDLRAQILAGRGSFADLAAQHSDCSSARRGGDLGPAALLILAAPSLNEEKCLVSSHHFATAI

SEQ ID NO: 13961 - DNA, 1006 bp, Triticum aestivum
  misc_feature (1)..(1006): Ceres Seq. ID no. 13597299
atactttcccctaccatcagcagagccacatcagggggcccgggtggaggtttgggtcgctcctactcagaaaccccagattcccaaattcctcctcgacctccatcccgtggaatccaaccaacgcggggaggcacccagcacgccggcggcgatgatccagctcctgttcgtggtgctcgtcgccgaggcggccgtggcgacggtgctgctattcaagacgccgctgcggaagctcgccatgctgggcctcgaccgcctcaagcgcggccgccgggcgcccgtcgccgtcaagaccgttgccggcgtcgtcatcacgctcctcgcctccacgctctacagcatggccgagatcagcggccgcgccggggaccccgaggccggaggcggcgccgccctctctcccaccgaccaggtcctcttctcgcgccacctcctcgaggcgtccctcatgggttacactttgtttcttgctctagttattgaccgactccaccaatatatcagagaactacgtgggctaaagaagaatgtcgaggctgtatcgaagcagaacaaaacgttagaggaaggaaaacatggaagatctcaggagatagcgaaataccaggaagaggttgccactctgaacgaggagatgaagaaactgaagctgcaagtacaagagaagaccgaggaggtccatgttgctgaggacaaggcacttgctattcaaaagcaatctgaaagcttgctgcttgaatatgaccggctcctggaggataaccaacatcttcgggagcagctgcagtcaattgatctcaggctctccaatccttcctgagagaagaatgtattgaagtagaacattatcctatcgtcaacctacttcgtgcttgaaattgtctgtttcacttttggtgcgaagtcgagtttactctttccgtaggatgttattacccagatgacatgctaatttagtaatgcctctcttatcggttttattgtcttacctaacaatatgttg

SEQ ID NO: 13962 - protein, 273 aa, Triticum aestivum
  peptide (1)..(273): Ceres Seq. ID no. 13597300
  misc_feature (55)..(249): Pfam Name: Pfam Description:  B-cell receptor-associated protein 31-like
  misc_feature (52)..(265): NCBI GI NO: 9759015 NR Description: gene_id:K16E1.4~unknown protein
  misc_feature (52)..(265): NCBI GI NO: 18422225 NR Description: expressed protein [Arabidopsis thaliana]
  misc_feature (52)..(265): NCBI GI NO: 21553655 NR Description: unknown [Arabidopsis thaliana]
  misc_feature (52)..(273): NCBI GI NO: 22655198 NR Description: unknown protein [Arabidopsis thaliana]
  misc_feature (52)..(262): NCBI GI NO: 34897474 NR Description: unknown protein
  misc_feature (52)..(262): NCBI GI NO: 15239667 NR Description: hypothetical protein [Arabidopsis thaliana]
  misc_feature (52)..(262): NCBI GI NO: 15231412 NR Description: expressed protein [Arabidopsis thaliana]
  misc_feature (52)..(222): NCBI GI NO: 30682503 NR Description: expressed protein [Arabidopsis thaliana]
  misc_feature (52)..(187): NCBI GI NO: 18402620 NR Description: expressed protein [Arabidopsis thaliana]
YFPLPSAEPHQGARVEVWVAPTQKPQIPKFLLDLHPVESNQRGEAPSTPAAMIQLLFVVLVAEAAVATVLLFKTPLRKLAMLGLDRLKRGRRAPVAVKTVAGVVITLLASTLYSMAEISGRAGDPEAGGGAALSPTDQVLFSRHLLEASLMGYTLFLALVIDRLHQYIRELRGLKKNVEAVSKQNKTLEEGKHGRSQEIAKYQEEVATLNEEMKKLKLQVQEKTEEVHVAEDKALAIQKQSESLLLEYDRLLEDNQHLREQLQSIDLRLSNPS

SEQ ID NO: 13963 - protein, 222 aa, Triticum aestivum
  peptide (1)..(222): Ceres Seq. ID no. 13597301
  misc_feature (4)..(198): Pfam Name: Pfam Description:  B-cell receptor-associated protein 31-like
  misc_feature (1)..(214): NCBI GI NO: 9759015 NR Description: gene_id:K16E1.4~unknown protein
  misc_feature (1)..(214): NCBI GI NO: 18422225 NR Description: expressed protein [Arabidopsis thaliana]
  misc_feature (1)..(214): NCBI GI NO: 21553655 NR Description: unknown [Arabidopsis thaliana]
  misc_feature (1)..(222): NCBI GI NO: 22655198 NR Description: unknown protein [Arabidopsis thaliana]
  misc_feature (1)..(211): NCBI GI NO: 34897474 NR Description: unknown protein
  misc_feature (1)..(211): NCBI GI NO: 15239667 NR Description: hypothetical protein [Arabidopsis thaliana]
  misc_feature (1)..(211): NCBI GI NO: 15231412 NR Description: expressed protein [Arabidopsis thaliana]
  misc_feature (1)..(171): NCBI GI NO: 30682503 NR Description: expressed protein [Arabidopsis thaliana]
  misc_feature (1)..(136): NCBI GI NO: 18402620 NR Description: expressed protein [Arabidopsis thaliana]
MIQLLFVVLVAEAAVATVLLFKTPLRKLAMLGLDRLKRGRRAPVAVKTVAGVVITLLASTLYSMAEISGRAGDPEAGGGAALSPTDQVLFSRHLLEASLMGYTLFLALVIDRLHQYIRELRGLKKNVEAVSKQNKTLEEGKHGRSQEIAKYQEEVATLNEEMKKLKLQVQEKTEEVHVAEDKALAIQKQSESLLLEYDRLLEDNQHLREQLQSIDLRLSNPS

SEQ ID NO: 13964 - protein, 193 aa, Triticum aestivum
  peptide (1)..(193): Ceres Seq. ID no. 13597302
  misc_feature (1)..(169): Pfam Name: Pfam Description:  B-cell receptor-associated protein 31-like
  misc_feature (1)..(185): NCBI GI NO: 9759015 NR Description: gene_id:K16E1.4~unknown protein
  misc_feature (1)..(185): NCBI GI NO: 18422225 NR Description: expressed protein [Arabidopsis thaliana]
  misc_feature (1)..(185): NCBI GI NO: 21553655 NR Description: unknown [Arabidopsis thaliana]
  misc_feature (1)..(193): NCBI GI NO: 22655198 NR Description: unknown protein [Arabidopsis thaliana]
  misc_feature (1)..(182): NCBI GI NO: 34897474 NR Description: unknown protein
  misc_feature (1)..(182): NCBI GI NO: 15239667 NR Description: hypothetical protein [Arabidopsis thaliana]
  misc_feature (1)..(182): NCBI GI NO: 15231412 NR Description: expressed protein [Arabidopsis thaliana]
  misc_feature (1)..(142): NCBI GI NO: 30682503 NR Description: expressed protein [Arabidopsis thaliana]
  misc_feature (1)..(107): NCBI GI NO: 18402620 NR Description: expressed protein [Arabidopsis thaliana]
MLGLDRLKRGRRAPVAVKTVAGVVITLLASTLYSMAEISGRAGDPEAGGGAALSPTDQVLFSRHLLEASLMGYTLFLALVIDRLHQYIRELRGLKKNVEAVSKQNKTLEEGKHGRSQEIAKYQEEVATLNEEMKKLKLQVQEKTEEVHVAEDKALAIQKQSESLLLEYDRLLEDNQHLREQLQSIDLRLSNPS

SEQ ID NO: 13965 - DNA, 760 bp, Triticum aestivum
  misc_feature (1)..(760): Ceres Seq. ID no. 13585373
gtggaccttttgtactagtacttcagacagacagaagcagaagcaaccagccgaagctcgttcctcgtagacagttggacagtcgtctcgatccatcgtccatcccgtctcgccagcagccgaccatggccgcgcaggcgccgccgccgccgccgccggagcagaagatgatggtggccatcgacgagagcgagtgcagccactacgcgctcgagtgggccctgcgcaacctcgcgccccgccgcctcatcctcttcaccgtccagcccttctcccctctcagctacctccccgtcggctccccgcttggcccgtcggtggcgtcgccggagctcatcaggtcggtgaccgagcaccagcggcagctcgcccaggcgctcgtcgacaaggccaaggccatctgcgccgagcacggggttgatgcagagaccgtcatcgaggtgggtgatcccaaggaaaccatatgcgaagctgcggagaagttgaatgttgatctgctcatcctgggaagccacagccgtgggcctgtacaaaggtttttccttggcagtgtgagcaactactgtagccaccacgcgaagtgcccggttcttgttgtgaagaagaaagaatgaaactccgctatctactgtattcatggacatcgtgtgaagaacccttgagatgtgtatctacatgttgtttgtcacagcatctagttgcatacttgcatatgaataaacatactttgccaatttgaaaacaactatatattcagtct

SEQ ID NO: 13966 - protein, 203 aa, Triticum aestivum
  peptide (1)..(203): Ceres Seq. ID no. 13585374
  misc_feature (54)..(200): Pfam Name: Pfam Description:  Universal stress protein family
  misc_feature (46)..(203): NCBI GI NO: 34914610 NR Description: P0520B06.18
  misc_feature (54)..(202): NCBI GI NO: 18408994 NR Description: expressed protein [Arabidopsis thaliana]
  misc_feature (24)..(200): NCBI GI NO: 18399413 NR Description: ethylene-responsive protein -related
  misc_feature (56)..(203): NCBI GI NO: 30681321 NR Description: ER6 protein -related [Arabidopsis thaliana]
  misc_feature (24)..(200): NCBI GI NO: 30681955 NR Description: ethylene-responsive protein -related
  misc_feature (24)..(187): NCBI GI NO: 30681959 NR Description: ethylene-responsive protein -related
  misc_feature (178)..(200): NCBI GI NO: 30681959 NR Description: ethylene-responsive protein -related
  misc_feature (24)..(200): NCBI GI NO: 21594903 NR Description: ethylene-responsive protein, putative
  misc_feature (56)..(203): NCBI GI NO: 25402571 NR Description: hypothetical protein
  misc_feature (56)..(200): NCBI GI NO: 5669654 NR Description: ER6 protein [Lycopersicon esculentum]
GPFVLVLQTDRSRSNQPKLVPRRQLDSRLDPSSIPSRQQPTMAAQAPPPPPPEQKMMVAIDESECSHYALEWALRNLAPRRLILFTVQPFSPLSYLPVGSPLGPSVASPELIRSVTEHQRQLAQALVDKAKAICAEHGVDAETVIEVGDPKETICEAAEKLNVDLLILGSHSRGPVQRFFLGSVSNYCSHHAKCPVLVVKKKE

SEQ ID NO: 13967 - protein, 162 aa, Triticum aestivum
  peptide (1)..(162): Ceres Seq. ID no. 13585375
  misc_feature (13)..(159): Pfam Name: Pfam Description:  Universal stress protein family
  misc_feature (5)..(162): NCBI GI NO: 34914610 NR Description: P0520B06.18
  misc_feature (13)..(161): NCBI GI NO: 18408994 NR Description: expressed protein [Arabidopsis thaliana]
  misc_feature (1)..(159): NCBI GI NO: 18399413 NR Description: ethylene-responsive protein -related
  misc_feature (15)..(162): NCBI GI NO: 30681321 NR Description: ER6 protein -related [Arabidopsis thaliana]
  misc_feature (1)..(159): NCBI GI NO: 30681955 NR Description: ethylene-responsive protein -related
  misc_feature (1)..(146): NCBI GI NO: 30681959 NR Description: ethylene-responsive protein -related
  misc_feature (137)..(159): NCBI GI NO: 30681959 NR Description: ethylene-responsive protein -related
  misc_feature (1)..(159): NCBI GI NO: 21594903 NR Description: ethylene-responsive protein, putative
  misc_feature (15)..(162): NCBI GI NO: 25402571 NR Description: hypothetical protein
  misc_feature (15)..(159): NCBI GI NO: 5669654 NR Description: ER6 protein [Lycopersicon esculentum]
MAAQAPPPPPPEQKMMVAIDESECSHYALEWALRNLAPRRLILFTVQPFSPLSYLPVGSPLGPSVASPELIRSVTEHQRQLAQALVDKAKAICAEHGVDAETVIEVGDPKETICEAAEKLNVDLLILGSHSRGPVQRFFLGSVSNYCSHHAKCPVLVVKKKE

SEQ ID NO: 13968 - protein, 148 aa, Triticum aestivum
  peptide (1)..(148): Ceres Seq. ID no. 13585376
  misc_feature (1)..(145): Pfam Name: Pfam Description:  Universal stress protein family
  misc_feature (1)..(148): NCBI GI NO: 34914610 NR Description: P0520B06.18
  misc_feature (1)..(147): NCBI GI NO: 18408994 NR Description: expressed protein [Arabidopsis thaliana]
  misc_feature (1)..(145): NCBI GI NO: 18399413 NR Description: ethylene-responsive protein -related
  misc_feature (1)..(148): NCBI GI NO: 30681321 NR Description: ER6 protein -related [Arabidopsis thaliana]
  misc_feature (1)..(145): NCBI GI NO: 30681955 NR Description: ethylene-responsive protein -related
  misc_feature (1)..(132): NCBI GI NO: 30681959 NR Description: ethylene-responsive protein -related
  misc_feature (123)..(145): NCBI GI NO: 30681959 NR Description: ethylene-responsive protein -related
  misc_feature (1)..(145): NCBI GI NO: 21594903 NR Description: ethylene-responsive protein, putative
  misc_feature (1)..(148): NCBI GI NO: 25402571 NR Description: hypothetical protein
  misc_feature (1)..(145): NCBI GI NO: 5669654 NR Description: ER6 protein [Lycopersicon esculentum]
MMVAIDESECSHYALEWALRNLAPRRLILFTVQPFSPLSYLPVGSPLGPSVASPELIRSVTEHQRQLAQALVDKAKAICAEHGVDAETVIEVGDPKETICEAAEKLNVDLLILGSHSRGPVQRFFLGSVSNYCSHHAKCPVLVVKKKE

SEQ ID NO: 13969 - DNA, 999 bp, Triticum aestivum
  misc_feature (1)..(999): Ceres Seq. ID no. 15173326
cctatcggcgagaagtgggggagatcttcgtcttccgcactcgcgcgcgcaagctcactcgctccagatcttcccttaccgtcgtagatctcacgaccccaagccgccaagcccccaacgaaaccctagctcgcgcccctccgccgcgtaggggcgccgtcatgggcatcgtgttcacgcggctcttctcgtcggtattcggaaaccgcgaggcccgcatcctcgtcctcggcctcgacaatgccggcaagactactatcctctatcggctgcagatggggggaggtcgtttccacgatcccaagtgggtttcctgttctgcgatcgggttcaacgtggagacggtgcagtacaataacatcaagttccaagtttgggatctcggtggtcaaacaagcatcaggccatactggagatgctacttttcaaacactcaggctatcatatatgttgttgattcaagtgatactgataggctggtaactgcaaaagaagaatttcattccatccttgaggagcatgagctgaaaggtgcggttgtccttgtatatgcaaataaacaggaccttccaggtgcacttaatgatgctgccataactgaatcattagaacttcacaagattaagagccgccaatgggcaattttcaaaacatctgctataaaaggggaggggctttttgaaggcttgaactggctcagtaatgcactcaagtccggaggcagctaatgtaggaggcccagcctccattccgtgaatcattgcttgatggtaaggaacagggacgatgacagccttctcgctagtctgcgtgaaaatgagaatctctttatttttactccggaagttatacacaatcagttttctgtagagtgcttgttgaagtttccagatacaacactaggtgtaccatgtcgagagcaagaatatatttgtagaaaataccgagcaaatgattacggtttgaaatatgtggcttcaccgcgtaaaatttcacccc

SEQ ID NO: 13970 - protein, 241 aa, Triticum aestivum
  peptide (1)..(241): Ceres Seq. ID no. 15173327
  misc_feature (57)..(236): Pfam Name: Pfam Description:  ADP-ribosylation factor family
  misc_feature (54)..(241): NCBI GI NO: 40253742 NR Description: putative ADP-ribosylation factor 3
  misc_feature (54)..(239): NCBI GI NO: 3182922 NR Description: ADP-ribosylation factor 1
  misc_feature (54)..(239): NCBI GI NO: 30682545 NR Description: ADP-ribosylation factor 3 (ARF3)
  misc_feature (54)..(238): NCBI GI NO: 4502227 NR Description: ADP-ribosylation factor-like 1 [Homo sapiens]
  misc_feature (54)..(238): NCBI GI NO: 13385340 NR Description: ADP-ribosylation-like 1 [Mus musculus]
  misc_feature (54)..(238): NCBI GI NO: 11693150 NR Description: ADP-ribosylation factor-like 1 [Rattus norvegicus]
  misc_feature (54)..(238): NCBI GI NO: 39653273 NR Description: ADP-ribosylation factor [Medicago sativa]
  misc_feature (54)..(238): NCBI GI NO: 11131026 NR Description: ADP-ribosylation factor
  misc_feature (54)..(237): NCBI GI NO: 23508140 NR Description: ADP-ribosylation factor-like protein
  misc_feature (54)..(236): NCBI GI NO: 29841386 NR Description: similar to GenBank Accession Number M61127 GTP-binding protein in Drosophila melanogaster
YRREVGEIFVFRTRARKLTRSRSSLTVVDLTTPSRQAPNETLARAPPPRRGAVMGIVFTRLFSSVFGNREARILVLGLDNAGKTTILYRLQMGGGRFHDPKWVSCSAIGFNVETVQYNNIKFQVWDLGGQTSIRPYWRCYFSNTQAIIYVVDSSDTDRLVTAKEEFHSILEEHELKGAVVLVYANKQDLPGALNDAAITESLELHKIKSRQWAIFKTSAIKGEGLFEGLNWLSNALKSGGS

SEQ ID NO: 13971 - protein, 188 aa, Triticum aestivum
  peptide (1)..(188): Ceres Seq. ID no. 15173328
  misc_feature (4)..(183): Pfam Name: Pfam Description:  ADP-ribosylation factor family
  misc_feature (1)..(188): NCBI GI NO: 40253742 NR Description: putative ADP-ribosylation factor 3
  misc_feature (1)..(186): NCBI GI NO: 3182922 NR Description: ADP-ribosylation factor 1
  misc_feature (1)..(186): NCBI GI NO: 30682545 NR Description: ADP-ribosylation factor 3 (ARF3)
  misc_feature (1)..(185): NCBI GI NO: 4502227 NR Description: ADP-ribosylation factor-like 1 [Homo sapiens]
  misc_feature (1)..(185): NCBI GI NO: 13385340 NR Description: ADP-ribosylation-like 1 [Mus musculus]
  misc_feature (1)..(185): NCBI GI NO: 11693150 NR Description: ADP-ribosylation factor-like 1 [Rattus norvegicus]
  misc_feature (1)..(185): NCBI GI NO: 39653273 NR Description: ADP-ribosylation factor [Medicago sativa]
  misc_feature (1)..(185): NCBI GI NO: 11131026 NR Description: ADP-ribosylation factor
  misc_feature (1)..(184): NCBI GI NO: 23508140 NR Description: ADP-ribosylation factor-like protein
  misc_feature (1)..(183): NCBI GI NO: 29841386 NR Description: similar to GenBank Accession Number M61127 GTP-binding protein in Drosophila melanogaster
MGIVFTRLFSSVFGNREARILVLGLDNAGKTTILYRLQMGGGRFHDPKWVSCSAIGFNVETVQYNNIKFQVWDLGGQTSIRPYWRCYFSNTQAIIYVVDSSDTDRLVTAKEEFHSILEEHELKGAVVLVYANKQDLPGALNDAAITESLELHKIKSRQWAIFKTSAIKGEGLFEGLNWLSNALKSGGS

SEQ ID NO: 13972 - protein, 150 aa, Triticum aestivum
  peptide (1)..(150): Ceres Seq. ID no. 15173329
  misc_feature (1)..(145): Pfam Name: Pfam Description:  ADP-ribosylation factor family
  misc_feature (1)..(150): NCBI GI NO: 40253742 NR Description: putative ADP-ribosylation factor 3
  misc_feature (1)..(148): NCBI GI NO: 3182922 NR Description: ADP-ribosylation factor 1
  misc_feature (1)..(148): NCBI GI NO: 30682545 NR Description: ADP-ribosylation factor 3 (ARF3)
  misc_feature (1)..(147): NCBI GI NO: 4502227 NR Description: ADP-ribosylation factor-like 1 [Homo sapiens]
  misc_feature (1)..(147): NCBI GI NO: 13385340 NR Description: ADP-ribosylation-like 1 [Mus musculus]
  misc_feature (1)..(147): NCBI GI NO: 11693150 NR Description: ADP-ribosylation factor-like 1 [Rattus norvegicus]
  misc_feature (1)..(147): NCBI GI NO: 39653273 NR Description: ADP-ribosylation factor [Medicago sativa]
  misc_feature (1)..(147): NCBI GI NO: 11131026 NR Description: ADP-ribosylation factor
  misc_feature (1)..(146): NCBI GI NO: 23508140 NR Description: ADP-ribosylation factor-like protein
  misc_feature (1)..(145): NCBI GI NO: 29841386 NR Description: similar to GenBank Accession Number M61127 GTP-binding protein in Drosophila melanogaster
MGGGRFHDPKWVSCSAIGFNVETVQYNNIKFQVWDLGGQTSIRPYWRCYFSNTQAIIYVVDSSDTDRLVTAKEEFHSILEEHELKGAVVLVYANKQDLPGALNDAAITESLELHKIKSRQWAIFKTSAIKGEGLFEGLNWLSNALKSGGS

SEQ ID NO: 13973 - DNA, 978 bp, Triticum aestivum
  misc_feature (1)..(978): Ceres Seq. ID no. 15173334
atcgtcttgagccggccctcttctccttcctcccactcaaggatacaaggggaacaaggcaggggtctaggtgctactccggcacggtggcacacccatctctcttcaagcttggcccgcccagcaatttgtttgtagctccgccactgctgagacccctacgttcccagccacgccttgcccactcgcgctgtgtgtgcctcggagatggccggcacgtcatgttgtgataggatggtttcccagcttcagtcgacatccaagtactacactggatatcccaaggatctagggccatcaagaatcataccgttcacatcagagcgtcagtttgtgcagctattacatgaaggacggcctgtagttgcggcctttaccattaagtgcacttatacacagcatcttgacaaagtactggaggaagctgctgctacattttatcctcatataacgtttgttcgggtggaatgcccaaagtatcctgggttttgcctcacgaggcaaaagactgagtatccatttcttgaagtattttacaacccagaacaggctgctaacccaggtaagatcgtggatccgagcatcacgaaatactccgcaaaagtcctacctttcaactatgaccagagcgtgtatggatttcgagagtattttaagaagtatgggttcaagtattccgaagcaaactaggtttgtcatggtggagccctgcagagtcagccagtccaactccaactggtttgaatttactttcagcctgtactaacagtgatactgcattcttaagaatcagcaccccctgcatactgggctggctctgccttggcaaatggttggaaaaatggccaagctgttagctaggtttccagtatgctcaagattgtagtagaatttctggatgttgcatgttgttctttgtcaaatctctgaactgcattatcagactcgctattaataaaatatattctgcggctcact

SEQ ID NO: 13974 - protein, 160 aa, Triticum aestivum
  peptide (1)..(160): Ceres Seq. ID no. 15173335
  misc_feature (1)..(158): NCBI GI NO: 15242070 NR Description: hypothetical protein [Arabidopsis thaliana]
MAGTSCCDRMVSQLQSTSKYYTGYPKDLGPSRIIPFTSERQFVQLLHEGRPVVAAFTIKCTYTQHLDKVLEEAAATFYPHITFVRVECPKYPGFCLTRQKTEYPFLEVFYNPEQAANPGKIVDPSITKYSAKVLPFNYDQSVYGFREYFKKYGFKYSEAN

SEQ ID NO: 13975 - protein, 151 aa, Triticum aestivum
  peptide (1)..(151): Ceres Seq. ID no. 15173336
  misc_feature (1)..(149): NCBI GI NO: 15242070 NR Description: hypothetical protein [Arabidopsis thaliana]
MVSQLQSTSKYYTGYPKDLGPSRIIPFTSERQFVQLLHEGRPVVAAFTIKCTYTQHLDKVLEEAAATFYPHITFVRVECPKYPGFCLTRQKTEYPFLEVFYNPEQAANPGKIVDPSITKYSAKVLPFNYDQSVYGFREYFKKYGFKYSEAN

SEQ ID NO: 13976 - DNA, 669 bp, Triticum aestivum
  misc_feature (1)..(669): Ceres Seq. ID no. 15173341
acaacactcaaatctgaattccccctcgccaaatctccccgcaccatcgcggatcgcgccaaatctcaaatccgctctagccgccatggacgcctcagccaccggcgccgtctccaaggtgaagaagtacgtggtgggcgcaagcttggcggcggccccaggaagcaggcggtggcgcggtccgtcaaggccgggctgcagttccccgtcggccgcatcggccgcttcctcaagaagggccgctacgcgcagcgcgtcggcatgggcgcccccgtctacctcgcctccgtcctcgagtacctcgccgccgagctgctcgagctcgccggcaacgccgccaaggacaacaagaagtcccgcatcatcccgcgccacctgctgctcgccatccggaacgaccaggagctcggcaagctgctcgccggcgtcaccatcgcgcacggcggtgtgcttcccaacatcaaccccgtgctgctccccaagaagacggccgagaaggagaccaagaaggccgccaagtcccccaagaaggcttagtcgattgtggcaggctatctagtgcatcgtaatagaattagtgtttgcagtttggctaatggtgttgatgtgatgttctgatctgctgagaaaaagatcgtcagaaatctctctgacttacagtaaattcat

SEQ ID NO: 13977 - protein, 185 aa, Triticum aestivum
  peptide (1)..(185): Ceres Seq. ID no. 15173342
  misc_feature (66)..(160): Pfam Name: Pfam Description:  Mucin-like glycoprotein
  misc_feature (3)..(160): NCBI GI NO: 11359723 NR Description: proteophosphoglycan, membrane-associated
  misc_feature (3)..(160): NCBI GI NO: 11359723 NR Description: proteophosphoglycan, membrane-associated
  misc_feature (6)..(173): NCBI GI NO: 11359723 NR Description: proteophosphoglycan, membrane-associated
  misc_feature (6)..(175): NCBI GI NO: 11359723 NR Description: proteophosphoglycan, membrane-associated
  misc_feature (3)..(156): NCBI GI NO: 11359723 NR Description: proteophosphoglycan, membrane-associated
  misc_feature (6)..(173): NCBI GI NO: 11359723 NR Description: proteophosphoglycan, membrane-associated
  misc_feature (3)..(159): NCBI GI NO: 11359723 NR Description: proteophosphoglycan, membrane-associated
  misc_feature (3)..(148): NCBI GI NO: 11359723 NR Description: proteophosphoglycan, membrane-associated
  misc_feature (1)..(175): NCBI GI NO: 39580884 NR Description: Hypothetical protein CBG21477
QHSNLNSPSPNLPAPSRIAPNLKSALAAMDASATGAVSKVKKYVVGASLAAAPGSRRWRGPSRPGCSSPSAASAASSRRAATRSASAWAPPSTSPPSSSTSPPSCSSSPATPPRTTRSPASSRATCCSPSGTTRSSASCSPASPSRTAVCFPTSTPCCSPRRRPRRRPRRPPSPPRRLSRLWQAI

SEQ ID NO: 13978 - protein, 178 aa, Triticum aestivum
  peptide (1)..(178): Ceres Seq. ID no. 15173343
  misc_feature (46)..(162): Pfam Name: Pfam Description:  Core histone H2A/H2B/H3/H4
  misc_feature (46)..(178): NCBI GI NO: 34914498 NR Description: putative histone H2A
  misc_feature (45)..(178): NCBI GI NO: 122007 NR Description: Histone H2A
  misc_feature (39)..(178): NCBI GI NO: 729671 NR Description: Histone H2A
  misc_feature (46)..(178): NCBI GI NO: 121982 NR Description: HISTONE H2A.2.2
  misc_feature (45)..(178): NCBI GI NO: 27529852 NR Description: H2A histone [Nicotiana tabacum]
  misc_feature (45)..(178): NCBI GI NO: 729669 NR Description: Histone H2A
  misc_feature (45)..(178): NCBI GI NO: 122003 NR Description: HISTONE H2A
  misc_feature (46)..(178): NCBI GI NO: 7649159 NR Description: histone H2A [Euphorbia esula]
  misc_feature (51)..(177): NCBI GI NO: 121974 NR Description: HISTONE H2A.2.1
  misc_feature (43)..(173): NCBI GI NO: 34858256 NR Description: similar to Histone H2A.o (H2A/o) (H2A.2) (H2a-615)
TTLKSEFPLAKSPRTIADRAKSQIRSSRHGRLSHRRRLQGEEVRGGRKLGGGPRKQAVARSVKAGLQFPVGRIGRFLKKGRYAQRVGMGAPVYLASVLEYLAAELLELAGNAAKDNKKSRIIPRHLLLAIRNDQELGKLLAGVTIAHGGVLPNINPVLLPKKTAEKETKKAAKSPKKA

SEQ ID NO: 13979 - protein, 157 aa, Triticum aestivum
  peptide (1)..(157): Ceres Seq. ID no. 15173344
  misc_feature (38)..(132): Pfam Name: Pfam Description:  Mucin-like glycoprotein
  misc_feature (1)..(132): NCBI GI NO: 11359723 NR Description: proteophosphoglycan, membrane-associated
  misc_feature (1)..(132): NCBI GI NO: 11359723 NR Description: proteophosphoglycan, membrane-associated
  misc_feature (1)..(145): NCBI GI NO: 11359723 NR Description: proteophosphoglycan, membrane-associated
  misc_feature (1)..(147): NCBI GI NO: 11359723 NR Description: proteophosphoglycan, membrane-associated
  misc_feature (1)..(128): NCBI GI NO: 11359723 NR Description: proteophosphoglycan, membrane-associated
  misc_feature (1)..(145): NCBI GI NO: 11359723 NR Description: proteophosphoglycan, membrane-associated
  misc_feature (1)..(131): NCBI GI NO: 11359723 NR Description: proteophosphoglycan, membrane-associated
  misc_feature (1)..(120): NCBI GI NO: 11359723 NR Description: proteophosphoglycan, membrane-associated
  misc_feature (1)..(147): NCBI GI NO: 39580884 NR Description: Hypothetical protein CBG21477
MDASATGAVSKVKKYVVGASLAAAPGSRRWRGPSRPGCSSPSAASAASSRRAATRSASAWAPPSTSPPSSSTSPPSCSSSPATPPRTTRSPASSRATCCSPSGTTRSSASCSPASPSRTAVCFPTSTPCCSPRRRPRRRPRRPPSPPRRLSRLWQAI

SEQ ID NO: 13980 - protein, 91 aa, Triticum aestivum
  peptide (1)..(91): Ceres Seq. ID no. 15173345
  misc_feature (1)..(75): Pfam Name: Pfam Description:  Core histone H2A/H2B/H3/H4
  misc_feature (1)..(91): NCBI GI NO: 34914498 NR Description: putative histone H2A
  misc_feature (1)..(91): NCBI GI NO: 122007 NR Description: Histone H2A
  misc_feature (1)..(91): NCBI GI NO: 729671 NR Description: Histone H2A
  misc_feature (1)..(91): NCBI GI NO: 121982 NR Description: HISTONE H2A.2.2
  misc_feature (1)..(91): NCBI GI NO: 27529852 NR Description: H2A histone [Nicotiana tabacum]
  misc_feature (1)..(91): NCBI GI NO: 729669 NR Description: Histone H2A
  misc_feature (1)..(91): NCBI GI NO: 122003 NR Description: HISTONE H2A
  misc_feature (1)..(91): NCBI GI NO: 7649159 NR Description: histone H2A [Euphorbia esula]
  misc_feature (1)..(90): NCBI GI NO: 121974 NR Description: HISTONE H2A.2.1
  misc_feature (1)..(86): NCBI GI NO: 34858256 NR Description: similar to Histone H2A.o (H2A/o) (H2A.2) (H2a-615)
MGAPVYLASVLEYLAAELLELAGNAAKDNKKSRIIPRHLLLAIRNDQELGKLLAGVTIAHGGVLPNINPVLLPKKTAEKETKKAAKSPKKA

SEQ ID NO: 13981 - DNA, 1065 bp, Triticum aestivum
  misc_feature (1)..(1065): Ceres Seq. ID no. 15225478
atcacctcgcgatccccagatcccacacgggaaaaatgtgcacagtggagaagcgcggccgcgtccacctcatcaccctcaccggcgccggtgagcaccgactcagcccatccctcatctcggccctccgcacagccgtggccaccgtccgcgcctcccccggtgccggtgccctcgtgctggccgccgagggcaagtacttctccaacggcttcgaccaagcctgggcgcgcacggtcccgccccacctccacgactccatgagaggagccttccgcgccctcgtggccgacctcctcgcgctgcccatgcccaccgtggccgccgtcacgggccacgcagccgccgccggctgcgcgctggccctcgcgcacgactccgtcgtcatgcgcgcctcccgcgggttcctgtacatgagcgaggtcgacgtcggcctcaagttcgccgactacttcggggagctactccggcagaaggtccccaacgcagcggccaggagggacatggtcctcggggggaagaagatgacggcggctgaggcggtgcggctgggcatcgtggacgcggccgcggacggcggcgtcgaagacgtggtggccgcgggcgtcgcggcagccgaggtgctcgcgacgaggggttgggacggggagatcgtggccgagatccggaaggcgatgtggcccgccgtgtggggcaaggtcaaggaccacggcgccgaggcagcggcagcgcggccgcgtctgtaggctccggtatatcgtacgaggccactccttgtgctcgagcattcgcgtagcctgaagaattgctctggatccacggcatgccgtggatctgggaacttcagctgagaacagagtaatgttcaggaactgctcgaacagaatcgtgtcgccaagaagatccgcaccggcgacatgtgatgagcgcaccgtgctggtggttttccttgtactcctattgatcttcgcatcgggtttcattgactgttgttactctgacggaagctcgttgctgatagacttctgaacttctgaagcatgactgaatgaagagatgaagatg

SEQ ID NO: 13982 - protein, 247 aa, Triticum aestivum
  peptide (1)..(247): Ceres Seq. ID no. 15225479
  misc_feature (22)..(191): Pfam Name: Pfam Description:  Enoyl-CoA hydratase/isomerase family
  misc_feature (9)..(245): NCBI GI NO: 34903766 NR Description: unnamed protein product
  misc_feature (12)..(247): NCBI GI NO: 15236498 NR Description: enoyl-CoA hydratase/isomerase family
  misc_feature (12)..(227): NCBI GI NO: 21555734 NR Description: carnitine racemase like protein
  misc_feature (12)..(227): NCBI GI NO: 15236499 NR Description: enoyl-CoA hydratase/isomerase family
  misc_feature (12)..(225): NCBI GI NO: 15218713 NR Description: enoyl-CoA hydratase/isomerase family
  misc_feature (12)..(226): NCBI GI NO: 23017142 NR Description: COG1024: Enoyl-CoA hydratase/carnithine racemase
  misc_feature (20)..(226): NCBI GI NO: 15828352 NR Description: possible enoyl-CoA hydratase
  misc_feature (18)..(246): NCBI GI NO: 32404374 NR Description: hypothetical protein ( hypothetical proteinB2A19
  misc_feature (9)..(226): NCBI GI NO: 40739395 NR Description: hypothetical protein AN6767.2
  misc_feature (19)..(203): NCBI GI NO: 21230604 NR Description: conserved hypothetical protein
HLAIPRSHTGKMCTVEKRGRVHLITLTGAGEHRLSPSLISALRTAVATVRASPGAGALVLAAEGKYFSNGFDQAWARTVPPHLHDSMRGAFRALVADLLALPMPTVAAVTGHAAAAGCALALAHDSVVMRASRGFLYMSEVDVGLKFADYFGELLRQKVPNAAARRDMVLGGKKMTAAEAVRLGIVDAAADGGVEDVVAAGVAAAEVLATRGWDGEIVAEIRKAMWPAVWGKVKDHGAEAAAARPRL

SEQ ID NO: 13983 - protein, 236 aa, Triticum aestivum
  peptide (1)..(236): Ceres Seq. ID no. 15225480
  misc_feature (11)..(180): Pfam Name: Pfam Description:  Enoyl-CoA hydratase/isomerase family
  misc_feature (1)..(234): NCBI GI NO: 34903766 NR Description: unnamed protein product
  misc_feature (1)..(236): NCBI GI NO: 15236498 NR Description: enoyl-CoA hydratase/isomerase family
  misc_feature (1)..(216): NCBI GI NO: 21555734 NR Description: carnitine racemase like protein
  misc_feature (1)..(216): NCBI GI NO: 15236499 NR Description: enoyl-CoA hydratase/isomerase family
  misc_feature (1)..(214): NCBI GI NO: 15218713 NR Description: enoyl-CoA hydratase/isomerase family
  misc_feature (1)..(215): NCBI GI NO: 23017142 NR Description: COG1024: Enoyl-CoA hydratase/carnithine racemase
  misc_feature (9)..(215): NCBI GI NO: 15828352 NR Description: possible enoyl-CoA hydratase
  misc_feature (7)..(235): NCBI GI NO: 32404374 NR Description: hypothetical protein ( hypothetical proteinB2A19
  misc_feature (1)..(215): NCBI GI NO: 40739395 NR Description: hypothetical protein AN6767.2
  misc_feature (8)..(192): NCBI GI NO: 21230604 NR Description: conserved hypothetical protein
MCTVEKRGRVHLITLTGAGEHRLSPSLISALRTAVATVRASPGAGALVLAAEGKYFSNGFDQAWARTVPPHLHDSMRGAFRALVADLLALPMPTVAAVTGHAAAAGCALALAHDSVVMRASRGFLYMSEVDVGLKFADYFGELLRQKVPNAAARRDMVLGGKKMTAAEAVRLGIVDAAADGGVEDVVAAGVAAAEVLATRGWDGEIVAEIRKAMWPAVWGKVKDHGAEAAAARPRL

SEQ ID NO: 13984 - protein, 161 aa, Triticum aestivum
  peptide (1)..(161): Ceres Seq. ID no. 15225481
  misc_feature (1)..(105): Pfam Name: Pfam Description:  Enoyl-CoA hydratase/isomerase family
  misc_feature (1)..(159): NCBI GI NO: 34903766 NR Description: unnamed protein product
  misc_feature (1)..(161): NCBI GI NO: 15236498 NR Description: enoyl-CoA hydratase/isomerase family
  misc_feature (1)..(141): NCBI GI NO: 21555734 NR Description: carnitine racemase like protein
  misc_feature (1)..(141): NCBI GI NO: 15236499 NR Description: enoyl-CoA hydratase/isomerase family
  misc_feature (1)..(139): NCBI GI NO: 15218713 NR Description: enoyl-CoA hydratase/isomerase family
  misc_feature (1)..(140): NCBI GI NO: 23017142 NR Description: COG1024: Enoyl-CoA hydratase/carnithine racemase
  misc_feature (1)..(140): NCBI GI NO: 15828352 NR Description: possible enoyl-CoA hydratase
  misc_feature (1)..(160): NCBI GI NO: 32404374 NR Description: hypothetical protein ( hypothetical proteinB2A19
  misc_feature (1)..(140): NCBI GI NO: 40739395 NR Description: hypothetical protein AN6767.2
  misc_feature (1)..(117): NCBI GI NO: 21230604 NR Description: conserved hypothetical protein
MRGAFRALVADLLALPMPTVAAVTGHAAAAGCALALAHDSVVMRASRGFLYMSEVDVGLKFADYFGELLRQKVPNAAARRDMVLGGKKMTAAEAVRLGIVDAAADGGVEDVVAAGVAAAEVLATRGWDGEIVAEIRKAMWPAVWGKVKDHGAEAAAARPRL

SEQ ID NO: 13985 - DNA, 658 bp, Triticum aestivum
  misc_feature (1)..(658): Ceres Seq. ID no. 13655523
gtgccaagaaaggatatattcaggcgcagttctactcagatggtgaacgatccatacaccctggtgatagccctcaatagctcgggttctgcagaaggtgaactttatgtggatgatgggaaaagttatgattatcagcaaggggcattcatccatcggcgttttgtatttgcagacaataaactaacttcaatcaatattgcgcctgatagtctgggcaagaaggtgtattcaactgagtgtgtgattgaaagaattatagtgcttgggttatcatcgggagcaaagaaggctatcattgaacctgggaaccaagaagtggaaattgatctgggaccgattagtttaaggagtggttcaaagtctgttgcgccaacagtcaggaggcccaatgttcgtgttgtagatgattggacgataaggatcgcatgatatgcagcccattcacatctggagcctgatgtctccattgttcgctgtcaggctataaactcgagcaatgctagaagcgtagtttcagactcgtaaatgttatctgtggacacccaaatttcattgtttcagacttccagtggacccaaaatttctgcaggtgcctggtacgcatgctgtttgtactcccaattttgacataagtcgtgacataaattgctgatgc

SEQ ID NO: 13986 - protein, 143 aa, Triticum aestivum
  peptide (1)..(143): Ceres Seq. ID no. 13655524
  misc_feature (1)..(100): Pfam Name: Pfam Description:  Glycosyl hydrolases family 31
  misc_feature (1)..(142): NCBI GI NO: 15237538 NR Description: glycosyl hydrolase family 31
  misc_feature (1)..(142): NCBI GI NO: 7489249 NR Description: probable alpha-glucosidase (EC 3.2.1.20) - potato
  misc_feature (1)..(143): NCBI GI NO: 34856729 NR Description: similar to FLJ00088 protein [Rattus norvegicus]
  misc_feature (1)..(130): NCBI GI NO: 40739683 NR Description: hypothetical protein AN8217.2
  misc_feature (1)..(142): NCBI GI NO: 13529302 NR Description: Unknown (protein for IMAGE:3458604) [Homo sapiens]
  misc_feature (1)..(142): NCBI GI NO: 31219761 NR Description: ENSANGP00000010269 [Anopheles gambiae]
  misc_feature (1)..(142): NCBI GI NO: 21357605 NR Description: CG14476-PB [Drosophila melanogaster]
  misc_feature (1)..(142): NCBI GI NO: 1890664 NR Description: glucosidase II [Sus scrofa]
  misc_feature (1)..(142): NCBI GI NO: 1613878 NR Description: ModA [Dictyostelium discoideum]
  misc_feature (1)..(142): NCBI GI NO: 34861580 NR Description: similar to alpha glucosidase II, alpha subunit
VPRKDIFRRSSTQMVNDPYTLVIALNSSGSAEGELYVDDGKSYDYQQGAFIHRRFVFADNKLTSINIAPDSLGKKVYSTECVIERIIVLGLSSGAKKAIIEPGNQEVEIDLGPISLRSGSKSVAPTVRRPNVRVVDDWTIRIA

SEQ ID NO: 13987 - protein, 130 aa, Triticum aestivum
  peptide (1)..(130): Ceres Seq. ID no. 13655525
  misc_feature (1)..(87): Pfam Name: Pfam Description:  Glycosyl hydrolases family 31
  misc_feature (1)..(129): NCBI GI NO: 15237538 NR Description: glycosyl hydrolase family 31
  misc_feature (1)..(129): NCBI GI NO: 7489249 NR Description: probable alpha-glucosidase (EC 3.2.1.20) - potato
  misc_feature (1)..(130): NCBI GI NO: 34856729 NR Description: similar to FLJ00088 protein [Rattus norvegicus]
  misc_feature (1)..(117): NCBI GI NO: 40739683 NR Description: hypothetical protein AN8217.2
  misc_feature (1)..(129): NCBI GI NO: 13529302 NR Description: Unknown (protein for IMAGE:3458604) [Homo sapiens]
  misc_feature (1)..(129): NCBI GI NO: 31219761 NR Description: ENSANGP00000010269 [Anopheles gambiae]
  misc_feature (1)..(129): NCBI GI NO: 21357605 NR Description: CG14476-PB [Drosophila melanogaster]
  misc_feature (1)..(129): NCBI GI NO: 1890664 NR Description: glucosidase II [Sus scrofa]
  misc_feature (1)..(129): NCBI GI NO: 1613878 NR Description: ModA [Dictyostelium discoideum]
  misc_feature (1)..(129): NCBI GI NO: 34861580 NR Description: similar to alpha glucosidase II, alpha subunit
MVNDPYTLVIALNSSGSAEGELYVDDGKSYDYQQGAFIHRRFVFADNKLTSINIAPDSLGKKVYSTECVIERIIVLGLSSGAKKAIIEPGNQEVEIDLGPISLRSGSKSVAPTVRRPNVRVVDDWTIRIA

SEQ ID NO: 13988 - DNA, 804 bp, Triticum aestivum
  misc_feature (1)..(804): Ceres Seq. ID no. 15175453
aaaagggtcctcgaatcttgggctgcctccatcgccgccgcctagatcccacgcgtcgccgcagccggcgtcacaccccttccctccccgggttcgtcgccgaacttccccgccgcccgccgcagtctcctcccctccgacctcctgccaccaccgaccgccgccggctcctccccatcttcaactctaccgaccgccaccacccaagctaaaatatcgacccaggaatggcagtgtcctggacacgagtattgaagagtggagttattccaagagacacaactcaattggttgggacaagaggctttgccgttgtggccaagggaaagaaggacggaaaaggtggcgcggctgatgctaaacctgtgcccagcaaagaaatgaagagcacacgtgtgtttggggtgaatatcctgaaggagggttctgacccgaatatccaaccagactctgagtgccctggctggctgtggcacatgatcgacaagcatctggtgctgagcgagcttcggaggaaagatgccaagacgctgccctatgaagaccagaagcgtttcgtcaagctggacaaccggactcgggatcaaggagaacaatgctctcacagctaagaactgatcaggacaatctcatctcatcatagtgtcttcttatctggagtagttgattttgggaataatgtagcattgaagtcaagctcacagtagaatgtagcctatgcgaccgagcatattgtttgtcatgttcttgggaagatttaacttgtgtatcttgcagcaaatgctgtagcaagtttcccatgcc

SEQ ID NO: 13989 - protein, 127 aa, Triticum aestivum
  peptide (1)..(127): Ceres Seq. ID no. 15175454
  misc_feature (12)..(116): NCBI GI NO: 18395929 NR Description: expressed protein [Arabidopsis thaliana]
  misc_feature (20)..(118): NCBI GI NO: 15241366 NR Description: hypothetical protein [Arabidopsis thaliana]
MAVSWTRVLKSGVIPRDTTQLVGTRGFAVVAKGKKDGKGGAADAKPVPSKEMKSTRVFGVNILKEGSDPNIQPDSECPGWLWHMIDKHLVLSELRRKDAKTLPYEDQKRFVKLDNRTRDQGEQCSHS

SEQ ID NO: 13990 - protein, 117 aa, Triticum aestivum
  peptide (1)..(117): Ceres Seq. ID no. 15175455
  misc_feature (10)..(74): Pfam Name: Pfam Description:  Extensin-like region
  misc_feature (9)..(68): NCBI GI NO: 82091 NR Description: hydroxyproline-rich glycoprotein - tomato
  misc_feature (9)..(73): NCBI GI NO: 24745586 NR Description: extensin [Solanum tuberosum]
  misc_feature (9)..(74): NCBI GI NO: 81870 NR Description: hydroxyproline-rich glycoprotein (clone Hyp3
  misc_feature (9)..(74): NCBI GI NO: 169345 NR Description: hydroxyproline-rich glycoprotein
  misc_feature (9)..(73): NCBI GI NO: 37051101 NR Description: hydroxyproline-rich glycoprotein-2 [Pisum sativum]
  misc_feature (9)..(72): NCBI GI NO: 2108256 NR Description: extensin [Bromheadia finlaysoniana]
  misc_feature (9)..(68): NCBI GI NO: 7488674 NR Description: extensin homolog HRGP2 - soybean (fragment)
  misc_feature (12)..(74): NCBI GI NO: 82091 NR Description: hydroxyproline-rich glycoprotein - tomato
  misc_feature (10)..(74): NCBI GI NO: 7488997 NR Description: extensin class I (clone uG) - tomato (fragment)
KGSSNLGLPPSPPPRSHASPQPASHPFPPRVRRRTSPPPAAVSSPPTSCHHRPPPAPPHLQLYRPPPPKLKYRPRNGSVLDTSIEEWSYSKRHNSIGWDKRLCRCGQGKEGRKRWRG

SEQ ID NO: 13991 - protein, 76 aa, Triticum aestivum
  peptide (1)..(76): Ceres Seq. ID no. 15175456
  misc_feature (1)..(65): NCBI GI NO: 18395929 NR Description: expressed protein [Arabidopsis thaliana]
  misc_feature (1)..(67): NCBI GI NO: 15241366 NR Description: hypothetical protein [Arabidopsis thaliana]
MKSTRVFGVNILKEGSDPNIQPDSECPGWLWHMIDKHLVLSELRRKDAKTLPYEDQKRFVKLDNRTRDQGEQCSHS

SEQ ID NO: 13992 - DNA, 1052 bp, Triticum aestivum
  misc_feature (1)..(1052): Ceres Seq. ID no. 12617020
gtcataaattctctcccctttcccggatcacacaacctctctccgagtctcctctcttttccagcttttccctccccccaccaaacttccaccccttcctcgagacctccggccacccacccgccaaggcctccctccgctccgcgctgtccccgctggaccaccgcagcactcccctgtccgatcgggaacgaggagagtgtgccacaggagagcgcgatccgtccgtccggccccaagacgagcgccatggcagacgccggctctcatatcgccgccgtcgtcgccacctccatctgcgcccactgtcaacgagaaattccatcgtcaaacatcgacttgcattcctacactgtgctcgtaaccttcaaaagtgcgagcactgtggagaaatggttcccaggaagcttatggaagaacactacaatgaaaatcacgctccggtaaattgctccctgtgcaaagaaaccttgcgaccggagatacttgatcttcacaaaagtgaacagtgcacacagaggatggttgcgtgtgcatattgtgagtacgaattgcctgcaattgatattcatgaacatcaggatgtatgtggaaaccgaacggagttttgtcaaacatgcaagaagtatattagacttcgtgaatggatagggcatgaaatgcagtgccacgttagctcaaatggttctgaagaatcatcaagtgccagaaccattccagagagagaagtgcggcctcctccaccggtacgaccagcgcgtgctgtgcctgctgcacaacacaggcgacttctctttacgattgctgtaactggaatcgccgtcatggttggatcaatactgttccagaaggaggagagtttctaggtccggcagccatggacttcatatgccagagttgttttcaacagtagtatgataagataatataatcttttgatgtataatgttatccccatattcagttggcacgtcttgcttgcttaagagtacagttccagtcatggccttgttggaagaatcgaaataaccatccaaatatttgttgttctc

SEQ ID NO: 13993 - protein, 287 aa, Triticum aestivum
  peptide (1)..(287): Ceres Seq. ID no. 12617021
  misc_feature (117)..(184): Pfam Name: Pfam Description:  TRAF-type zinc finger
  misc_feature (96)..(283): NCBI GI NO: 33354198 NR Description: XIAP associated factor-1-like protein
  misc_feature (116)..(284): NCBI GI NO: 18391087 NR Description: expressed protein; protein id: At1g09920
  misc_feature (116)..(284): NCBI GI NO: 21593788 NR Description: unknown [Arabidopsis thaliana]
  misc_feature (98)..(201): NCBI GI NO: 34899048 NR Description: contains ESTsAU068068
  misc_feature (117)..(243): NCBI GI NO: 1869901 NR Description: XIAP associated factor-1 (ZAP-1) [Homo sapiens]
  misc_feature (117)..(243): NCBI GI NO: 40288191 NR Description: XIAP associated factor-1 isoform 1 [Homo sapiens]
  misc_feature (116)..(246): NCBI GI NO: 34872552 NR Description: similar to FLN29 gene product [Rattus norvegicus]
  misc_feature (116)..(239): NCBI GI NO: 5729828 NR Description: FLN29 gene product [Homo sapiens]
  misc_feature (116)..(246): NCBI GI NO: 26986577 NR Description: FLN29 gene product [Mus musculus]
  misc_feature (119)..(227): NCBI GI NO: 18414447 NR Description: UFD1 like protein; protein id: At4g15420
HKFSPLSRITQPLSESPLFSSFSLPPPNFHPFLETSGHPPAKASLRSALSPLDHRSTPLSDRERGECATGERDPSVRPQDERHGRRRLSYRRRRRHLHLRPLSTRNSIVKHRLAFLHCARNLQKCEHCGEMVPRKLMEEHYNENHAPVNCSLCKETLRPEILDLHKSEQCTQRMVACAYCEYELPAIDIHEHQDVCGNRTEFCQTCKKYIRLREWIGHEMQCHVSSNGSEESSSARTIPEREVRPPPPVRPARAVPAAQHRRLLFTIAVTGIAVMVGSILFQKEESF

SEQ ID NO: 13994 - protein, 157 aa, Triticum aestivum
  peptide (1)..(157): Ceres Seq. ID no. 12617022
  misc_feature (1)..(54): Pfam Name: Pfam Description:  TRAF-type zinc finger
  misc_feature (1)..(153): NCBI GI NO: 33354198 NR Description: XIAP associated factor-1-like protein
  misc_feature (1)..(154): NCBI GI NO: 18391087 NR Description: expressed protein; protein id: At1g09920
  misc_feature (1)..(154): NCBI GI NO: 21593788 NR Description: unknown [Arabidopsis thaliana]
  misc_feature (1)..(71): NCBI GI NO: 34899048 NR Description: contains ESTsAU068068
  misc_feature (1)..(113): NCBI GI NO: 1869901 NR Description: XIAP associated factor-1 (ZAP-1) [Homo sapiens]
  misc_feature (1)..(113): NCBI GI NO: 40288191 NR Description: XIAP associated factor-1 isoform 1 [Homo sapiens]
  misc_feature (1)..(116): NCBI GI NO: 34872552 NR Description: similar to FLN29 gene product [Rattus norvegicus]
  misc_feature (1)..(109): NCBI GI NO: 5729828 NR Description: FLN29 gene product [Homo sapiens]
  misc_feature (1)..(116): NCBI GI NO: 26986577 NR Description: FLN29 gene product [Mus musculus]
  misc_feature (1)..(97): NCBI GI NO: 18414447 NR Description: UFD1 like protein; protein id: At4g15420
MVPRKLMEEHYNENHAPVNCSLCKETLRPEILDLHKSEQCTQRMVACAYCEYELPAIDIHEHQDVCGNRTEFCQTCKKYIRLREWIGHEMQCHVSSNGSEESSSARTIPEREVRPPPPVRPARAVPAAQHRRLLFTIAVTGIAVMVGSILFQKEESF

SEQ ID NO: 13995 - protein, 151 aa, Triticum aestivum
  peptide (1)..(151): Ceres Seq. ID no. 12617023
  misc_feature (1)..(147): NCBI GI NO: 33354198 NR Description: XIAP associated factor-1-like protein
  misc_feature (1)..(148): NCBI GI NO: 18391087 NR Description: expressed protein; protein id: At1g09920
  misc_feature (1)..(148): NCBI GI NO: 21593788 NR Description: unknown [Arabidopsis thaliana]
  misc_feature (1)..(65): NCBI GI NO: 34899048 NR Description: contains ESTsAU068068
  misc_feature (1)..(107): NCBI GI NO: 1869901 NR Description: XIAP associated factor-1 (ZAP-1) [Homo sapiens]
  misc_feature (1)..(107): NCBI GI NO: 40288191 NR Description: XIAP associated factor-1 isoform 1 [Homo sapiens]
  misc_feature (1)..(110): NCBI GI NO: 34872552 NR Description: similar to FLN29 gene product [Rattus norvegicus]
  misc_feature (1)..(103): NCBI GI NO: 5729828 NR Description: FLN29 gene product [Homo sapiens]
  misc_feature (1)..(110): NCBI GI NO: 26986577 NR Description: FLN29 gene product [Mus musculus]
  misc_feature (1)..(91): NCBI GI NO: 18414447 NR Description: UFD1 like protein; protein id: At4g15420
MEEHYNENHAPVNCSLCKETLRPEILDLHKSEQCTQRMVACAYCEYELPAIDIHEHQDVCGNRTEFCQTCKKYIRLREWIGHEMQCHVSSNGSEESSSARTIPEREVRPPPPVRPARAVPAAQHRRLLFTIAVTGIAVMVGSILFQKEESF

SEQ ID NO: 13996 - DNA, 752 bp, Triticum aestivum
  misc_feature (1)..(752): Ceres Seq. ID no. 13591134
agcgcgtccccattccgatccgttggcttcctgttcatacattctcccctcccggcgccgcctccagcctagggtttcctcccgccgtccgccgccatggctcgccgcagcggaggaggaaggtcttcccgccctgctccacgtgctgctccagtgagaaacccaccagcgccagcccgtcaagctcctccacctgctactacccagaatagcggtggtggtatcatgagtggaattgggtccaccattgctcagggcatggctttcggtactggcagtgccatggcgcacagggctgttgatgctgtgatgggtccccgcaccattcagcatgagactgttgtcggtgaggctgctgcatctatgactccaatggacaatgctgctgatgacaagtgtggcaacccttccaaggccttccaagattgcatcaaccactacggaagcgacatcagcaagtgccagttctacctcgacatgctgaacgagtgccgccgtggaggagcaggagctggtgcaactctttaagctactatctttgcttgattgcggcttaattggtcggaacctgttttcagtcatgatgatgatgatatatatctcctaaataattcattggcaatattatgaacctatgccacagcttatgtctattacctaccctagtttgtggtctctgttgtcctgggagtatttccttgtattgatgttggaattaccttcatggcagtgggtttataaatatggagttt

SEQ ID NO: 13997 - protein, 143 aa, Triticum aestivum
  peptide (1)..(143): Ceres Seq. ID no. 13591135
  misc_feature (1)..(139): NCBI GI NO: 13174237 NR Description: unknown protein [Oryza sativa]
  misc_feature (1)..(141): NCBI GI NO: 15237688 NR Description: expressed protein [Arabidopsis thaliana]
  misc_feature (1)..(141): NCBI GI NO: 15242455 NR Description: expressed protein [Arabidopsis thaliana]
  misc_feature (38)..(134): NCBI GI NO: 23509031 NR Description: hypothetical protein, conserved
MARRSGGGRSSRPAPRAAPVRNPPAPARQAPPPATTQNSGGGIMSGIGSTIAQGMAFGTGSAMAHRAVDAVMGPRTIQHETVVGEAAASMTPMDNAADDKCGNPSKAFQDCINHYGSDISKCQFYLDMLNECRRGGAGAGATL

SEQ ID NO: 13998 - protein, 100 aa, Triticum aestivum
  peptide (1)..(100): Ceres Seq. ID no. 13591136
  misc_feature (1)..(96): NCBI GI NO: 13174237 NR Description: unknown protein [Oryza sativa]
  misc_feature (1)..(98): NCBI GI NO: 15237688 NR Description: expressed protein [Arabidopsis thaliana]
  misc_feature (1)..(98): NCBI GI NO: 15242455 NR Description: expressed protein [Arabidopsis thaliana]
  misc_feature (1)..(91): NCBI GI NO: 23509031 NR Description: hypothetical protein, conserved
MSGIGSTIAQGMAFGTGSAMAHRAVDAVMGPRTIQHETVVGEAAASMTPMDNAADDKCGNPSKAFQDCINHYGSDISKCQFYLDMLNECRRGGAGAGATL

SEQ ID NO: 13999 - protein, 89 aa, Triticum aestivum
  peptide (1)..(89): Ceres Seq. ID no. 13591137
  misc_feature (1)..(85): NCBI GI NO: 13174237 NR Description: unknown protein [Oryza sativa]
  misc_feature (1)..(87): NCBI GI NO: 15237688 NR Description: expressed protein [Arabidopsis thaliana]
  misc_feature (1)..(87): NCBI GI NO: 15242455 NR Description: expressed protein [Arabidopsis thaliana]
  misc_feature (1)..(80): NCBI GI NO: 23509031 NR Description: hypothetical protein, conserved
MAFGTGSAMAHRAVDAVMGPRTIQHETVVGEAAASMTPMDNAADDKCGNPSKAFQDCINHYGSDISKCQFYLDMLNECRRGGAGAGATL

SEQ ID NO: 14000 - DNA, 882 bp, Triticum aestivum
  misc_feature (1)..(882): Ceres Seq. ID no. 13662677
ctcactttccccagcagagcaagcaaccacctcggagaggcagagcgcaatggcaatggcgtccatcctcgtgcaggtgtccgccctgctcctcaacctcatcgccttcggcctcgccgtcgccgccgagcagcgccgcagcaaggccacggtgacgccggatctggccaaggagtacgactactgcgtctacgactcggacgtcgccaccggctacggcgtcggcgcgctgctcctcctcgtcgccgcgcaggccgtcgtcatgctcgccagccgctgcttctgctgcggccgcgggctcaagccggggggctcgcgcgcctgcgccctcatgctcttcctcttctcatggttgaccttcctcgtcgcagcggcgtgtttgctggcaggatcagtccgtaatgcataccacacccggtacagggggatcttcaacggcgacccgctctcttgcgagacgctgcgcaagggcgtcttcgctgctggtgcagccttcaccttcttcaccgccatcctcagcgagttctactacatcagctactccaaatcccgggatgccgccggcggcgctccatacggcggctccagcatcggcatgggcccttacacttaaggagcttgtgtgctggaggtttatggaaaggttcagtccgtttcactttcagggcggatcatgcatatgtagttcgtggagtgcggtgttcttgtttttttttataaaggtgttcttgttaacattagagtggtagatacggtggaaatgagttcgctgtcttcactggttatgtatgagattgcctggtgtgcatccggacatttcgttgttgcagatgttgggtgtaattggtatctccaaatgatattaatatatttcatttgttc

SEQ ID NO: 14001 - protein, 203 aa, Triticum aestivum
  peptide (1)..(203): Ceres Seq. ID no. 13662678
  misc_feature (19)..(203): NCBI GI NO: 34394069 NR Description: unknown protein
  misc_feature (19)..(202): NCBI GI NO: 38016521 NR Description: fiber protein Fb34 [Gossypium barbadense]
  misc_feature (19)..(185): NCBI GI NO: 18404242 NR Description: expressed protein [Arabidopsis thaliana]
  misc_feature (19)..(192): NCBI GI NO: 18400781 NR Description: expressed protein [Arabidopsis thaliana]
  misc_feature (19)..(192): NCBI GI NO: 18416991 NR Description: expressed protein [Arabidopsis thaliana]
  misc_feature (29)..(203): NCBI GI NO: 22748411 NR Description: hypothetical protein
  misc_feature (19)..(199): NCBI GI NO: 38344206 NR Description: OSJNBa0064G10.22
  misc_feature (19)..(185): NCBI GI NO: 18407003 NR Description: expressed protein [Arabidopsis thaliana]
  misc_feature (19)..(185): NCBI GI NO: 21554630 NR Description: unknown [Arabidopsis thaliana]
  misc_feature (20)..(202): NCBI GI NO: 18391509 NR Description: expressed protein [Arabidopsis thaliana]
SLSPAEQATTSERQSAMAMASILVQVSALLLNLIAFGLAVAAEQRRSKATVTPDLAKEYDYCVYDSDVATGYGVGALLLLVAAQAVVMLASRCFCCGRGLKPGGSRACALMLFLFSWLTFLVAAACLLAGSVRNAYHTRYRGIFNGDPLSCETLRKGVFAAGAAFTFFTAILSEFYYISYSKSRDAAGGAPYGGSSIGMGPYT

SEQ ID NO: 14002 - protein, 187 aa, Triticum aestivum
  peptide (1)..(187): Ceres Seq. ID no. 13662679
  misc_feature (3)..(187): NCBI GI NO: 34394069 NR Description: unknown protein
  misc_feature (3)..(186): NCBI GI NO: 38016521 NR Description: fiber protein Fb34 [Gossypium barbadense]
  misc_feature (3)..(169): NCBI GI NO: 18404242 NR Description: expressed protein [Arabidopsis thaliana]
  misc_feature (3)..(176): NCBI GI NO: 18400781 NR Description: expressed protein [Arabidopsis thaliana]
  misc_feature (3)..(176): NCBI GI NO: 18416991 NR Description: expressed protein [Arabidopsis thaliana]
  misc_feature (13)..(187): NCBI GI NO: 22748411 NR Description: hypothetical protein
  misc_feature (3)..(183): NCBI GI NO: 38344206 NR Description: OSJNBa0064G10.22
  misc_feature (3)..(169): NCBI GI NO: 18407003 NR Description: expressed protein [Arabidopsis thaliana]
  misc_feature (3)..(169): NCBI GI NO: 21554630 NR Description: unknown [Arabidopsis thaliana]
  misc_feature (4)..(186): NCBI GI NO: 18391509 NR Description: expressed protein [Arabidopsis thaliana]
MAMASILVQVSALLLNLIAFGLAVAAEQRRSKATVTPDLAKEYDYCVYDSDVATGYGVGALLLLVAAQAVVMLASRCFCCGRGLKPGGSRACALMLFLFSWLTFLVAAACLLAGSVRNAYHTRYRGIFNGDPLSCETLRKGVFAAGAAFTFFTAILSEFYYISYSKSRDAAGGAPYGGSSIGMGPYT

SEQ ID NO: 14003 - protein, 185 aa, Triticum aestivum
  peptide (1)..(185): Ceres Seq. ID no. 13662680
  misc_feature (1)..(185): NCBI GI NO: 34394069 NR Description: unknown protein
  misc_feature (1)..(184): NCBI GI NO: 38016521 NR Description: fiber protein Fb34 [Gossypium barbadense]
  misc_feature (1)..(167): NCBI GI NO: 18404242 NR Description: expressed protein [Arabidopsis thaliana]
  misc_feature (1)..(174): NCBI GI NO: 18400781 NR Description: expressed protein [Arabidopsis thaliana]
  misc_feature (1)..(174): NCBI GI NO: 18416991 NR Description: expressed protein [Arabidopsis thaliana]
  misc_feature (11)..(185): NCBI GI NO: 22748411 NR Description: hypothetical protein
  misc_feature (1)..(181): NCBI GI NO: 38344206 NR Description: OSJNBa0064G10.22
  misc_feature (1)..(167): NCBI GI NO: 18407003 NR Description: expressed protein [Arabidopsis thaliana]
  misc_feature (1)..(167): NCBI GI NO: 21554630 NR Description: unknown [Arabidopsis thaliana]
  misc_feature (2)..(184): NCBI GI NO: 18391509 NR Description: expressed protein [Arabidopsis thaliana]
MASILVQVSALLLNLIAFGLAVAAEQRRSKATVTPDLAKEYDYCVYDSDVATGYGVGALLLLVAAQAVVMLASRCFCCGRGLKPGGSRACALMLFLFSWLTFLVAAACLLAGSVRNAYHTRYRGIFNGDPLSCETLRKGVFAAGAAFTFFTAILSEFYYISYSKSRDAAGGAPYGGSSIGMGPYT

SEQ ID NO: 14004 - DNA, 735 bp, Triticum aestivum
  misc_feature (1)..(735): Ceres Seq. ID no. 12586244
atctcatccatcacacttcacacaagctactagaaagtactctgctcaatcggtcgatgagggtgtcaagcatggcgtccaagggtctcgttgtgtttgctgtcctgcttgctgcggctttcctcgtggccacagctgaacaaactcaggccaagaaggaagagactaaggccggtgttcagggttaccacggcggcggcagcggaggcggtggctaccatggcggcggcggcggcggcggggggtaccctggccacgggggcggcggcggcgggtatcctggccacggtggcggcggaggtggcggcggctaccctggccacggtggtggcggaggtggcggcggctaccctggccatgggggtggcggcggcggcggcggcagcggctgccggtaccagtgctgcgggcacgggcatagtggctgccgctgctgcgcaagccccaacgagatcccggagcccatgtatcgggcggaggtccgcaactaagtatcagatgctacatacggacgttgctacttgcctgcacgtagtaactactcgtatatgtggtcaataagaaggtaggtgcatgtatgtatgtatgtacgcatacgtatagattgcacagttatgttgatccaataatgccaggactctgtcctgatcgtgtattcaccctgtaagacttctctttcttgcataatacatgcaactgtcatgcatgtataacaaaatctcatgactcttgttc

SEQ ID NO: 14005 - protein, 162 aa, Triticum aestivum
  peptide (1)..(162): Ceres Seq. ID no. 12586245
  misc_feature (63)..(155): Pfam Name: LMP1 Pfam Description: Herpesvirus latent membrane protein 1
  misc_feature (26)..(141): NCBI GI NO: 121644 NR Description: Glycine-rich cell wall structural protein precursor
  misc_feature (58)..(153): NCBI GI NO: 121644 NR Description: Glycine-rich cell wall structural protein precursor
  misc_feature (24)..(159): NCBI GI NO: 27461096 NR Description: glycine-rich protein
  misc_feature (93)..(162): NCBI GI NO: 1076719 NR Description: glycine rich protein - barley (fragment)
  misc_feature (58)..(141): NCBI GI NO: 121644 NR Description: Glycine-rich cell wall structural protein precursor
  misc_feature (24)..(150): NCBI GI NO: 15224548 NR Description: putative glycine-rich protein
  misc_feature (24)..(150): NCBI GI NO: 259447 NR Description: glycine-rich protein; atGRP [Arabidopsis thaliana]
  misc_feature (58)..(144): NCBI GI NO: 121644 NR Description: Glycine-rich cell wall structural protein precursor
  misc_feature (24)..(129): NCBI GI NO: 15224547 NR Description: putative glycine-rich protein
  misc_feature (57)..(147): NCBI GI NO: 121631 NR Description: Glycine-rich protein 2
LIHHTSHKLLESTLLNRSMRVSSMASKGLVVFAVLLAAAFLVATAEQTQAKKEETKAGVQGYHGGGSGGGGYHGGGGGGGGYPGHGGGGGGYPGHGGGGGGGGYPGHGGGGGGGGYPGHGGGGGGGGSGCRYQCCGHGHSGCRCCASPNEIPEPMYRAEVRN

SEQ ID NO: 14006 - protein, 144 aa, Triticum aestivum
  peptide (1)..(144): Ceres Seq. ID no. 12586246
  misc_feature (45)..(137): Pfam Name: LMP1 Pfam Description: Herpesvirus latent membrane protein 1
  misc_feature (8)..(123): NCBI GI NO: 121644 NR Description: Glycine-rich cell wall structural protein precursor
  misc_feature (40)..(135): NCBI GI NO: 121644 NR Description: Glycine-rich cell wall structural protein precursor
  misc_feature (6)..(141): NCBI GI NO: 27461096 NR Description: glycine-rich protein
  misc_feature (75)..(144): NCBI GI NO: 1076719 NR Description: glycine rich protein - barley (fragment)
  misc_feature (40)..(123): NCBI GI NO: 121644 NR Description: Glycine-rich cell wall structural protein precursor
  misc_feature (6)..(132): NCBI GI NO: 15224548 NR Description: putative glycine-rich protein
  misc_feature (6)..(132): NCBI GI NO: 259447 NR Description: glycine-rich protein; atGRP [Arabidopsis thaliana]
  misc_feature (40)..(126): NCBI GI NO: 121644 NR Description: Glycine-rich cell wall structural protein precursor
  misc_feature (6)..(111): NCBI GI NO: 15224547 NR Description: putative glycine-rich protein
  misc_feature (39)..(129): NCBI GI NO: 121631 NR Description: Glycine-rich protein 2
MRVSSMASKGLVVFAVLLAAAFLVATAEQTQAKKEETKAGVQGYHGGGSGGGGYHGGGGGGGGYPGHGGGGGGYPGHGGGGGGGGYPGHGGGGGGGGYPGHGGGGGGGGSGCRYQCCGHGHSGCRCCASPNEIPEPMYRAEVRN

SEQ ID NO: 14007 - protein, 139 aa, Triticum aestivum
  peptide (1)..(139): Ceres Seq. ID no. 12586247
  misc_feature (40)..(132): Pfam Name: LMP1 Pfam Description: Herpesvirus latent membrane protein 1
  misc_feature (3)..(118): NCBI GI NO: 121644 NR Description: Glycine-rich cell wall structural protein precursor
  misc_feature (35)..(130): NCBI GI NO: 121644 NR Description: Glycine-rich cell wall structural protein precursor
  misc_feature (1)..(136): NCBI GI NO: 27461096 NR Description: glycine-rich protein
  misc_feature (70)..(139): NCBI GI NO: 1076719 NR Description: glycine rich protein - barley (fragment)
  misc_feature (35)..(118): NCBI GI NO: 121644 NR Description: Glycine-rich cell wall structural protein precursor
  misc_feature (1)..(127): NCBI GI NO: 15224548 NR Description: putative glycine-rich protein
  misc_feature (1)..(127): NCBI GI NO: 259447 NR Description: glycine-rich protein; atGRP [Arabidopsis thaliana]
  misc_feature (35)..(121): NCBI GI NO: 121644 NR Description: Glycine-rich cell wall structural protein precursor
  misc_feature (1)..(106): NCBI GI NO: 15224547 NR Description: putative glycine-rich protein
  misc_feature (34)..(124): NCBI GI NO: 121631 NR Description: Glycine-rich protein 2
MASKGLVVFAVLLAAAFLVATAEQTQAKKEETKAGVQGYHGGGSGGGGYHGGGGGGGGYPGHGGGGGGYPGHGGGGGGGGYPGHGGGGGGGGYPGHGGGGGGGGSGCRYQCCGHGHSGCRCCASPNEIPEPMYRAEVRN

SEQ ID NO: 14008 - DNA, 951 bp, Triticum aestivum
  misc_feature (1)..(951): Ceres Seq. ID no. 12586030
atcaaagaaagtggcagtagggttcgagagagctgctctctgacgatggcgatgctccggtacgccgccagcctggcgctccgccggtcggcatctccacctgacaccgtggtctcgcgcttcttgggcagcgctggatgcggcaaccccgccgccggcctgccgctcctccggcggccgtcacctccgcctggtgttgctgctgctgcgacggcggcggcctctcgcttcttcagcaacggcagccggcctggatccagcaacaccaactcgacgcttggcaagcctattgaggacaccaaggaagatgtgtacccaaggacccgcaagtcacctgccaagatacgcataattctgaaatctttcaataaccagaagaacaatctgaaggagcttgcgccgtacatgcataaggtcgggttgcctgaatcgcggtccttatacaccgtgctgcgatcacctcatattgataagaaatccagggagcaattctcaacgcatgtgaagaaagtgtttgtggagaaaacagcggagacgcatgaactggccaagaagttctactggttgaaacggcttcgtatattgggggctcagtacgaagtcgtcattaatttcaagacacgcttgggtaagaagattggctgcagcaaaggtggtggcctgcttcgacatccaaaacagggttcaggcatagaataaaaaggaggtactagagctgctttcaggccacacacaagctatccatccaacttgtgtggatcttaatttctggccttggtctgatctagcatataagtagtactatatattctatgtaatgtcatatggaactaaggatgcatgtgacctatctgagaatgttcttgtttggtaatcatccatgtatttcgaaagatggtgataataatatgtggagaagaggatcgacgatgcctgtcttctttttttgcg

SEQ ID NO: 14009 - protein, 232 aa, Triticum aestivum
  peptide (1)..(232): Ceres Seq. ID no. 12586031
  misc_feature (114)..(203): Pfam Name: Pfam Description:  Ribosomal protein S10p/S20e
  misc_feature (113)..(213): NCBI GI NO: 9229951 NR Description: mitochondrial ribosomal protein S10
  misc_feature (113)..(209): NCBI GI NO: 11528351 NR Description: ribosomal protein S10 [Zea mays]
  misc_feature (113)..(211): NCBI GI NO: 9229953 NR Description: mitochondrial ribosomal protein S10
  misc_feature (113)..(209): NCBI GI NO: 11177526 NR Description: ribosomal protein S10 [Zea mays]
  misc_feature (114)..(211): NCBI GI NO: 2119076 NR Description: ribosomal protein S10 - potato mitochondrion
  misc_feature (1)..(209): NCBI GI NO: 21536735 NR Description: putative 40S ribosomal protein S10
  misc_feature (1)..(209): NCBI GI NO: 15228720 NR Description: putative 40S ribosomal protein S10
  misc_feature (114)..(211): NCBI GI NO: 1362069 NR Description: ribosomal protein S10 - garden pea mitochondrion
  misc_feature (114)..(211): NCBI GI NO: 1710792 NR Description: MITOCHONDRIAL RIBOSOMAL PROTEIN S10
  misc_feature (9)..(209): NCBI GI NO: 2119078 NR Description: ribosomal protein S10 precursor
IKESGSRVRESCSLTMAMLRYAASLALRRSASPPDTVVSRFLGSAGCGNPAAGLPLLRRPSPPPGVAAAATAAASRFFSNGSRPGSSNTNSTLGKPIEDTKEDVYPRTRKSPAKIRIILKSFNNQKNNLKELAPYMHKVGLPESRSLYTVLRSPHIDKKSREQFSTHVKKVFVEKTAETHELAKKFYWLKRLRILGAQYEVVINFKTRLGKKIGCSKGGGLLRHPKQGSGIE

SEQ ID NO: 14010 - protein, 217 aa, Triticum aestivum
  peptide (1)..(217): Ceres Seq. ID no. 12586032
  misc_feature (99)..(188): Pfam Name: Pfam Description:  Ribosomal protein S10p/S20e
  misc_feature (98)..(198): NCBI GI NO: 9229951 NR Description: mitochondrial ribosomal protein S10
  misc_feature (98)..(194): NCBI GI NO: 11528351 NR Description: ribosomal protein S10 [Zea mays]
  misc_feature (98)..(196): NCBI GI NO: 9229953 NR Description: mitochondrial ribosomal protein S10
  misc_feature (98)..(194): NCBI GI NO: 11177526 NR Description: ribosomal protein S10 [Zea mays]
  misc_feature (99)..(196): NCBI GI NO: 2119076 NR Description: ribosomal protein S10 - potato mitochondrion
  misc_feature (1)..(194): NCBI GI NO: 21536735 NR Description: putative 40S ribosomal protein S10
  misc_feature (1)..(194): NCBI GI NO: 15228720 NR Description: putative 40S ribosomal protein S10
  misc_feature (99)..(196): NCBI GI NO: 1362069 NR Description: ribosomal protein S10 - garden pea mitochondrion
  misc_feature (99)..(196): NCBI GI NO: 1710792 NR Description: MITOCHONDRIAL RIBOSOMAL PROTEIN S10
  misc_feature (1)..(194): NCBI GI NO: 2119078 NR Description: ribosomal protein S10 precursor
MAMLRYAASLALRRSASPPDTVVSRFLGSAGCGNPAAGLPLLRRPSPPPGVAAAATAAASRFFSNGSRPGSSNTNSTLGKPIEDTKEDVYPRTRKSPAKIRIILKSFNNQKNNLKELAPYMHKVGLPESRSLYTVLRSPHIDKKSREQFSTHVKKVFVEKTAETHELAKKFYWLKRLRILGAQYEVVINFKTRLGKKIGCSKGGGLLRHPKQGSGIE

SEQ ID NO: 14011 - protein, 215 aa, Triticum aestivum
  peptide (1)..(215): Ceres Seq. ID no. 12586033
  misc_feature (97)..(186): Pfam Name: Pfam Description:  Ribosomal protein S10p/S20e
  misc_feature (96)..(196): NCBI GI NO: 9229951 NR Description: mitochondrial ribosomal protein S10
  misc_feature (96)..(192): NCBI GI NO: 11528351 NR Description: ribosomal protein S10 [Zea mays]
  misc_feature (96)..(194): NCBI GI NO: 9229953 NR Description: mitochondrial ribosomal protein S10
  misc_feature (96)..(192): NCBI GI NO: 11177526 NR Description: ribosomal protein S10 [Zea mays]
  misc_feature (97)..(194): NCBI GI NO: 2119076 NR Description: ribosomal protein S10 - potato mitochondrion
  misc_feature (1)..(192): NCBI GI NO: 21536735 NR Description: putative 40S ribosomal protein S10
  misc_feature (1)..(192): NCBI GI NO: 15228720 NR Description: putative 40S ribosomal protein S10
  misc_feature (97)..(194): NCBI GI NO: 1362069 NR Description: ribosomal protein S10 - garden pea mitochondrion
  misc_feature (97)..(194): NCBI GI NO: 1710792 NR Description: MITOCHONDRIAL RIBOSOMAL PROTEIN S10
  misc_feature (1)..(192): NCBI GI NO: 2119078 NR Description: ribosomal protein S10 precursor
MLRYAASLALRRSASPPDTVVSRFLGSAGCGNPAAGLPLLRRPSPPPGVAAAATAAASRFFSNGSRPGSSNTNSTLGKPIEDTKEDVYPRTRKSPAKIRIILKSFNNQKNNLKELAPYMHKVGLPESRSLYTVLRSPHIDKKSREQFSTHVKKVFVEKTAETHELAKKFYWLKRLRILGAQYEVVINFKTRLGKKIGCSKGGGLLRHPKQGSGIE

SEQ ID NO: 14012 - DNA, 1031 bp, Triticum aestivum
  misc_feature (1)..(1031): Ceres Seq. ID no. 13597220
acaagtcctcccgagtccacctccttccccttcccccgatcttatcctcggcgaagctgctctaatggcggatccgccggcgtcgtccccggccgacgaggcgcgggatccaggtagctcagaagctgctcctcatgggagtagtacgtcgcaagacacgaaagagcaggaagacatgaaaggagaagcggctgttgcgacctctgaacccgtgagggaggaactggtccagagtgccgttagttttctgagtcaccccaaagtcgtggcatcttccgatgtccagaggcgttccttcctggaaaataaagggctcaccatggacgaaattgaagaagcatttcgacgtttacttagcccaccttcaaactctacaaactcaaatatgtgtgaatctcaaggaagtcctgatcctgaaactttaacccctgtggtgccccggcacccaaaatcatatatggaggtcatggaaatgatacagaggggagagcggccagatgatatccaggatattaatgatgagccaccaaaccctgatcagccaatctcgaaacccagtatggcacccaagcccaagccgtgggagaagcaaggccaacaaagttccggcctggacctgaaagctcacacaagcaaccccagcgaatcgtcgtcaggagttcaaaccgatggcaccagccaggccacgggatcaaacaacagctccggtcacgggaacttgatgctgacggcagagccggctacaggctctgaagcccccgtggatggcgttgccacctcgccaaagcagtaactctggaaatgcatagacgaacggcggtgggatcaggacatgatgtgaatcagcgtcgacctgatgctgcttcagattccagcaccacattgttgcatcttccgttattatcagaaactagtttagtttagggggtcagcgacatttttgggaagctgggattggattcttgctggaaatgagcacctacaatatgtacttatcattggcattgggcaaaaaaaaaaaaaaaaaagct

SEQ ID NO: 14013 - protein, 263 aa, Triticum aestivum
  peptide (1)..(263): Ceres Seq. ID no. 13597221
  misc_feature (71)..(145): Pfam Name: Pex14p Pfam Description: Peroxisomal membrane anchor protein
  misc_feature (122)..(247): NCBI GI NO: 21593914 NR Description: unknown [Arabidopsis thaliana]
  misc_feature (122)..(247): NCBI GI NO: 20466350 NR Description: putative protein [Arabidopsis thaliana]
  misc_feature (122)..(247): NCBI GI NO: 11094252 NR Description: PEX14 [Arabidopsis thaliana]
  misc_feature (122)..(247): NCBI GI NO: 11121113 NR Description: peroxin Pex14 [Arabidopsis thaliana]
  misc_feature (122)..(247): NCBI GI NO: 30697742 NR Description: (PEX14) protein [Arabidopsis thaliana]
  misc_feature (25)..(145): NCBI GI NO: 11121113 NR Description: peroxin Pex14 [Arabidopsis thaliana]
  misc_feature (25)..(145): NCBI GI NO: 11094252 NR Description: PEX14 [Arabidopsis thaliana]
  misc_feature (25)..(145): NCBI GI NO: 30697742 NR Description: (PEX14) protein [Arabidopsis thaliana]
  misc_feature (44)..(117): NCBI GI NO: 9945056 NR Description: rice EST D22333 corresponds to a region of thepredicated gene
QVLPSPPPSPSPDLILGEAALMADPPASSPADEARDPGSSEAAPHGSSTSQDTKEQEDMKGEAAVATSEPVREELVQSAVSFLSHPKVVASSDVQRRSFLENKGLTMDEIEEAFRRLLSPPSNSTNSNMCESQGSPDPETLTPVVPRHPKSYMEVMEMIQRGERPDDIQDINDEPPNPDQPISKPSMAPKPKPWEKQGQQSSGLDLKAHTSNPSESSSGVQTDGTSQATGSNNSSGHGNLMLTAEPATGSEAPVDGVATSPKQ

SEQ ID NO: 14014 - protein, 242 aa, Triticum aestivum
  peptide (1)..(242): Ceres Seq. ID no. 13597222
  misc_feature (50)..(124): Pfam Name: Pex14p Pfam Description: Peroxisomal membrane anchor protein
  misc_feature (101)..(226): NCBI GI NO: 21593914 NR Description: unknown [Arabidopsis thaliana]
  misc_feature (101)..(226): NCBI GI NO: 20466350 NR Description: putative protein [Arabidopsis thaliana]
  misc_feature (101)..(226): NCBI GI NO: 11094252 NR Description: PEX14 [Arabidopsis thaliana]
  misc_feature (101)..(226): NCBI GI NO: 30697742 NR Description: (PEX14) protein [Arabidopsis thaliana]
  misc_feature (101)..(226): NCBI GI NO: 11121113 NR Description: peroxin Pex14 [Arabidopsis thaliana]
  misc_feature (4)..(124): NCBI GI NO: 11121113 NR Description: peroxin Pex14 [Arabidopsis thaliana]
  misc_feature (4)..(124): NCBI GI NO: 11094252 NR Description: PEX14 [Arabidopsis thaliana]
  misc_feature (4)..(124): NCBI GI NO: 30697742 NR Description: (PEX14) protein [Arabidopsis thaliana]
  misc_feature (23)..(96): NCBI GI NO: 9945056 NR Description: rice EST D22333 corresponds to a region of thepredicated gene
MADPPASSPADEARDPGSSEAAPHGSSTSQDTKEQEDMKGEAAVATSEPVREELVQSAVSFLSHPKVVASSDVQRRSFLENKGLTMDEIEEAFRRLLSPPSNSTNSNMCESQGSPDPETLTPVVPRHPKSYMEVMEMIQRGERPDDIQDINDEPPNPDQPISKPSMAPKPKPWEKQGQQSSGLDLKAHTSNPSESSSGVQTDGTSQATGSNNSSGHGNLMLTAEPATGSEAPVDGVATSPKQ

SEQ ID NO: 14015 - protein, 205 aa, Triticum aestivum
  peptide (1)..(205): Ceres Seq. ID no. 13597223
  misc_feature (13)..(87): Pfam Name: Pex14p Pfam Description: Peroxisomal membrane anchor protein
  misc_feature (64)..(189): NCBI GI NO: 21593914 NR Description: unknown [Arabidopsis thaliana]
  misc_feature (64)..(189): NCBI GI NO: 20466350 NR Description: putative protein [Arabidopsis thaliana]
  misc_feature (64)..(189): NCBI GI NO: 11094252 NR Description: PEX14 [Arabidopsis thaliana]
  misc_feature (64)..(189): NCBI GI NO: 30697742 NR Description: (PEX14) protein [Arabidopsis thaliana]
  misc_feature (64)..(189): NCBI GI NO: 11121113 NR Description: peroxin Pex14 [Arabidopsis thaliana]
  misc_feature (1)..(87): NCBI GI NO: 11121113 NR Description: peroxin Pex14 [Arabidopsis thaliana]
  misc_feature (1)..(87): NCBI GI NO: 11094252 NR Description: PEX14 [Arabidopsis thaliana]
  misc_feature (1)..(87): NCBI GI NO: 30697742 NR Description: (PEX14) protein [Arabidopsis thaliana]
  misc_feature (1)..(59): NCBI GI NO: 9945056 NR Description: rice EST D22333 corresponds to a region of thepredicated gene
MKGEAAVATSEPVREELVQSAVSFLSHPKVVASSDVQRRSFLENKGLTMDEIEEAFRRLLSPPSNSTNSNMCESQGSPDPETLTPVVPRHPKSYMEVMEMIQRGERPDDIQDINDEPPNPDQPISKPSMAPKPKPWEKQGQQSSGLDLKAHTSNPSESSSGVQTDGTSQATGSNNSSGHGNLMLTAEPATGSEAPVDGVATSPKQ

SEQ ID NO: 14016 - DNA, 750 bp, Triticum aestivum
  misc_feature (1)..(750): Ceres Seq. ID no. 15175269
aacacctccaactcaaaaggcccccactttgccgtctctttcacctaacaataatatctgcctacctgtcttgcacaccatacaggtccaagcccgcccgcccgcccatagagctcgccgcctccctccctgtctccttccccgcctctctctcgtcgtcgtcccccgcagcgccggccgaagcaaagcacggggacttaaccgccgccatgagctactacggccagcagcagccgcccgtcggcgcgcctccaccgcaagggtatccaggaaaagaggagtacccgccggcaggctaccctccggccgggtacccaccgccggggcagggacaaggctaccctccccagggatacccgccgcagcaggggggttatccgccgcagcaggggtatccgccacagcagggagggtacccgccgcagcaagggtacccgcagcaggggtacccgcctcagtacgcgcagcagccgccgcggcagcagcagagcagtggcccgtccttcatggagggatgcctggccgccctttgttgctgctgtctgttggatgcttgcttctaagttgatttctaagcggcagggaacagacttggtgcagctgctatgtgttccatattggaaattgggattggcttgttgattaatagtagtacttcgtagaggagattacaagaactccttaccgtcatgtttgtatgttcagatgattggtgtaccttttcgcataaaaaaagatgtttgttgtaag

SEQ ID NO: 14017 - protein, 188 aa, Triticum aestivum
  peptide (1)..(188): Ceres Seq. ID no. 15175270
TPPTQKAPTLPSLSPNNNICLPVLHTIQVQARPPAHRARRLPPCLLPRLSLVVVPRSAGRSKARGLNRRHELLRPAAAARRRASTARVSRKRGVPAGRLPSGRVPTAGAGTRLPSPGIPAAAGGLSAAAGVSATAGRVPAAARVPAAGVPASVRAAAAAAAAEQWPVLHGGMPGRPLLLLSVGCLLLS

SEQ ID NO: 14018 - protein, 186 aa, Triticum aestivum
  peptide (1)..(186): Ceres Seq. ID no. 15175271
  misc_feature (73)..(169): Pfam Name: Pfam Description:  Extensin-like region
  misc_feature (58)..(186): NCBI GI NO: 15229624 NR Description: proline-rich protein family [Arabidopsis thaliana]
  misc_feature (84)..(186): NCBI GI NO: 15227350 NR Description: proline-rich protein family [Arabidopsis thaliana]
  misc_feature (88)..(186): NCBI GI NO: 40538901 NR Description: expressed protein
  misc_feature (76)..(186): NCBI GI NO: 21554421 NR Description: unknown [Arabidopsis thaliana]
  misc_feature (88)..(186): NCBI GI NO: 34393718 NR Description: adhesive/proline-rich protein homolog-like protein
  misc_feature (88)..(186): NCBI GI NO: 1808688 NR Description: hypothetical protein [Sporobolus stapfianus]
  misc_feature (70)..(155): NCBI GI NO: 40538901 NR Description: expressed protein
  misc_feature (44)..(160): NCBI GI NO: 113965 NR Description: Annexin A7 (Annexin VII) (Synexin)
  misc_feature (64)..(160): NCBI GI NO: 671859 NR Description: annexin VII [Dictyostelium discoideum]
  misc_feature (30)..(151): NCBI GI NO: 6469591 NR Description: unknown [Eufolliculina uhligi]
HLQLKRPPLCRLFHLTIISAYLSCTPYRSKPARPPIELAASLPVSFPASLSSSSPAAPAEAKHGDLTAAMSYYGQQQPPVGAPPPQGYPGKEEYPPAGYPPAGYPPPGQGQGYPPQGYPPQQGGYPPQQGYPPQQGGYPPQQGYPQQGYPPQYAQQPPRQQQSSGPSFMEGCLAALCCCCLLDACF

SEQ ID NO: 14019 - protein, 117 aa, Triticum aestivum
  peptide (1)..(117): Ceres Seq. ID no. 15175272
  misc_feature (4)..(100): Pfam Name: Pfam Description:  Extensin-like region
  misc_feature (1)..(117): NCBI GI NO: 15229624 NR Description: proline-rich protein family [Arabidopsis thaliana]
  misc_feature (15)..(117): NCBI GI NO: 15227350 NR Description: proline-rich protein family [Arabidopsis thaliana]
  misc_feature (19)..(117): NCBI GI NO: 40538901 NR Description: expressed protein
  misc_feature (7)..(117): NCBI GI NO: 21554421 NR Description: unknown [Arabidopsis thaliana]
  misc_feature (19)..(117): NCBI GI NO: 34393718 NR Description: adhesive/proline-rich protein homolog-like protein
  misc_feature (19)..(117): NCBI GI NO: 1808688 NR Description: hypothetical protein [Sporobolus stapfianus]
  misc_feature (1)..(86): NCBI GI NO: 40538901 NR Description: expressed protein
  misc_feature (1)..(91): NCBI GI NO: 113965 NR Description: Annexin A7 (Annexin VII) (Synexin)
  misc_feature (1)..(91): NCBI GI NO: 671859 NR Description: annexin VII [Dictyostelium discoideum]
  misc_feature (1)..(82): NCBI GI NO: 6469591 NR Description: unknown [Eufolliculina uhligi]
MSYYGQQQPPVGAPPPQGYPGKEEYPPAGYPPAGYPPPGQGQGYPPQGYPPQQGGYPPQQGYPPQQGGYPPQQGYPQQGYPPQYAQQPPRQQQSSGPSFMEGCLAALCCCCLLDACF

SEQ ID NO: 14020 - DNA, 2292 bp, Triticum aestivum
  misc_feature (1)..(2292): Ceres Seq. ID no. 13655640
acagccgacgaatacaaaacatttcctgattctggcagccgagacggcactgtcaaaccaaggctcctagcaacaagaaagaatgtcgtcccttgtacgccttatcctgacaatctccttgggcctaaacctcgcagccttgatcaccaccgccaacgaccaattcatctactccggattcagtggttccaacctcgccgtcgacgacaccgccaccatcacgccggacgggctcctggagctgacaaacggcacggcgtaccagaaaggccacgcgttccacccggccccgttccgcctccgcgactccacggccaacggcgtcggcgatggcaaggtgcggtccttctccgtcgccttcgtgttcggcatcgtctccgcctaccccgacttcagcgcccacggcatggccttcgtcatcgccccgcggaggaacttctccgatgctcttcctgccaagtatctgggccttaccaacgtccagaacgatggcaacgccagcaacagcatcttcgccgtggagctggacaccatccagagcgtggagttcaaggacatcaacgccaaccacgtcggcatcgacatcaacggcctgcagtccctacggtcatacaacgccggctactacgatgacgagagcggcgacttccgaggcatgaagctcatcagccgcgaggccatgcaagtgtggattgattaccacggggagaggaaggagatcaacgtgacactggctcccttcgacatggccaagcctgctaggccactcctctcggccagctacgacctctccacggtgctcactgagctggtgtatctcgggttctcagcggcgaccggtcgtgtcaactcgcggcatttcgttctcggttggagcttgggcgtgagcagacaagctccggccatcgacatggccaagctgcccaagttgcctcgggttggccccaagcctcggtccaaggtcctggacatcgttctaccaatagttacggccacatttgtacttggtttgggtggtatccttgtcctggtcatgcggaggagatcaaggtacgctgaactgcgggaagattgggaggttgagttcggaccacaccgcttcttgtacaaggatttattccgtgcaactgacggattcaaggacaagcatctacttggcgcaggggggtttggaagggtatacagaggcgtgcttgagacatctaaactggaggttgcggtgaagagggtgtctcacgagtcaagacaggggatgagggagttcatagctgagattacaagcatcggccgcatccgacatcgtaatcttgtagagttgctcggttactgccgtcgaaaaggtgaacttcttttggtgtacgcctacatgcccaacggaagcctggataaacatctatacaacactagagaggatcagcctactctgaattgggctttgaggtttcagaccgtcaaagatgtcgcgtccggcttgctttatctgcatgagaggtgggagaaagttgtcatccacagagacatcaaggccagcaacgtgctcctcgacaaagacatgaacgcccagcttggtgactttgggctagcaaggctgtacgaccatggggcagactcgcaaaccacgcacgtggtcggcaccatgggttacttggctccggagctcatacgcacgggcagggcgtcccctctgaccgatatgttcgcctttggcatattccttcttgaggttgcatgcggacagaaacccatcaaggagaatgcgcaaggcggacagatagcgctcgtcgactgggtgctggagcactggcgtgatggtacgctcatggagacggtggacgcgaggctccagggtgagttcgacatcgaccaggcagggctggtgctcacgctagcgctcatgtgctcacaccttctcgctagcgcgaggcctggcattggacaagtcatgcgctatctgaccggtgttacgcccctccctgagctcacaccaacagatgtgctcaccttgatgcaaaacaaggggtttgacgaatccgccatgtcatatccggatctggtgtcgagctttggcacaatttccaccctctcgggaggaagataacctcagtgctagcttaattcacggcttcaataagttttactagtattatgcatgtgtagtgccagaagttcgtaattagaattgtaaacccaataattatcctttggccgcagtacactttcaaattaccgtggccaacatgtaagaagttatattgttcaaaactcagaactcgaaacaaggtgatacggggc

SEQ ID NO: 14021 - protein, 671 aa, Triticum aestivum
  peptide (1)..(671): Ceres Seq. ID no. 13655641
  misc_feature (1)..(671): NCBI GI NO: 34899502 NR Description: putative receptor-like protein kinase
  misc_feature (1)..(671): NCBI GI NO: 34899508 NR Description: putative receptor-like protein kinase
  misc_feature (7)..(671): NCBI GI NO: 34899520 NR Description: putative receptor-like protein kinase
  misc_feature (8)..(671): NCBI GI NO: 38346765 NR Description: OSJNBa0081C01.16
  misc_feature (1)..(671): NCBI GI NO: 38346766 NR Description: OSJNBa0081C01.17
  misc_feature (20)..(671): NCBI GI NO: 38112427 NR Description: lectin-like receptor kinase 7;2
  misc_feature (1)..(619): NCBI GI NO: 31324528 NR Description: receptor kinase Lecrk [Gossypium hirsutum]
  misc_feature (20)..(671): NCBI GI NO: 38112425 NR Description: lectin-like receptor kinase 7;1
  misc_feature (8)..(635): NCBI GI NO: 15810557 NR Description: putative receptor protein kinase
  misc_feature (8)..(635): NCBI GI NO: 15239263 NR Description: receptor like protein kinase
MSSLVRLILTISLGLNLAALITTANDQFIYSGFSGSNLAVDDTATITPDGLLELTNGTAYQKGHAFHPAPFRLRDSTANGVGDGKVRSFSVAFVFGIVSAYPDFSAHGMAFVIAPRRNFSDALPAKYLGLTNVQNDGNASNSIFAVELDTIQSVEFKDINANHVGIDINGLQSLRSYNAGYYDDESGDFRGMKLISREAMQVWIDYHGERKEINVTLAPFDMAKPARPLLSASYDLSTVLTELVYLGFSAATGRVNSRHFVLGWSLGVSRQAPAIDMAKLPKLPRVGPKPRSKVLDIVLPIVTATFVLGLGGILVLVMRRRSRYAELREDWEVEFGPHRFLYKDLFRATDGFKDKHLLGAGGFGRVYRGVLETSKLEVAVKRVSHESRQGMREFIAEITSIGRIRHRNLVELLGYCRRKGELLLVYAYMPNGSLDKHLYNTREDQPTLNWALRFQTVKDVASGLLYLHERWEKVVIHRDIKASNVLLDKDMNAQLGDFGLARLYDHGADSQTTHVVGTMGYLAPELIRTGRASPLTDMFAFGIFLLEVACGQKPIKENAQGGQIALVDWVLEHWRDGTLMETVDARLQGEFDIDQAGLVLTLALMCSHLLASARPGIGQVMRYLTGVTPLPELTPTDVLTLMQNKGFDESAMSYPDLVSSFGTISTLSGGR

SEQ ID NO: 14022 - protein, 563 aa, Triticum aestivum
  peptide (1)..(563): Ceres Seq. ID no. 13655642
  misc_feature (1)..(563): NCBI GI NO: 34899502 NR Description: putative receptor-like protein kinase
  misc_feature (1)..(563): NCBI GI NO: 34899508 NR Description: putative receptor-like protein kinase
  misc_feature (1)..(563): NCBI GI NO: 34899520 NR Description: putative receptor-like protein kinase
  misc_feature (1)..(563): NCBI GI NO: 38346765 NR Description: OSJNBa0081C01.16
  misc_feature (1)..(563): NCBI GI NO: 38346766 NR Description: OSJNBa0081C01.17
  misc_feature (1)..(563): NCBI GI NO: 38112427 NR Description: lectin-like receptor kinase 7;2
  misc_feature (1)..(511): NCBI GI NO: 31324528 NR Description: receptor kinase Lecrk [Gossypium hirsutum]
  misc_feature (1)..(563): NCBI GI NO: 38112425 NR Description: lectin-like receptor kinase 7;1
  misc_feature (1)..(527): NCBI GI NO: 15810557 NR Description: putative receptor protein kinase
  misc_feature (1)..(527): NCBI GI NO: 15239263 NR Description: receptor like protein kinase
MAFVIAPRRNFSDALPAKYLGLTNVQNDGNASNSIFAVELDTIQSVEFKDINANHVGIDINGLQSLRSYNAGYYDDESGDFRGMKLISREAMQVWIDYHGERKEINVTLAPFDMAKPARPLLSASYDLSTVLTELVYLGFSAATGRVNSRHFVLGWSLGVSRQAPAIDMAKLPKLPRVGPKPRSKVLDIVLPIVTATFVLGLGGILVLVMRRRSRYAELREDWEVEFGPHRFLYKDLFRATDGFKDKHLLGAGGFGRVYRGVLETSKLEVAVKRVSHESRQGMREFIAEITSIGRIRHRNLVELLGYCRRKGELLLVYAYMPNGSLDKHLYNTREDQPTLNWALRFQTVKDVASGLLYLHERWEKVVIHRDIKASNVLLDKDMNAQLGDFGLARLYDHGADSQTTHVVGTMGYLAPELIRTGRASPLTDMFAFGIFLLEVACGQKPIKENAQGGQIALVDWVLEHWRDGTLMETVDARLQGEFDIDQAGLVLTLALMCSHLLASARPGIGQVMRYLTGVTPLPELTPTDVLTLMQNKGFDESAMSYPDLVSSFGTISTLSGGR

SEQ ID NO: 14023 - protein, 480 aa, Triticum aestivum
  peptide (1)..(480): Ceres Seq. ID no. 13655643
  misc_feature (1)..(480): NCBI GI NO: 34899502 NR Description: putative receptor-like protein kinase
  misc_feature (1)..(480): NCBI GI NO: 34899508 NR Description: putative receptor-like protein kinase
  misc_feature (1)..(480): NCBI GI NO: 34899520 NR Description: putative receptor-like protein kinase
  misc_feature (1)..(480): NCBI GI NO: 38346765 NR Description: OSJNBa0081C01.16
  misc_feature (1)..(480): NCBI GI NO: 38346766 NR Description: OSJNBa0081C01.17
  misc_feature (1)..(480): NCBI GI NO: 38112427 NR Description: lectin-like receptor kinase 7;2
  misc_feature (1)..(428): NCBI GI NO: 31324528 NR Description: receptor kinase Lecrk [Gossypium hirsutum]
  misc_feature (1)..(480): NCBI GI NO: 38112425 NR Description: lectin-like receptor kinase 7;1
  misc_feature (1)..(444): NCBI GI NO: 15810557 NR Description: putative receptor protein kinase
  misc_feature (1)..(444): NCBI GI NO: 15239263 NR Description: receptor like protein kinase
MKLISREAMQVWIDYHGERKEINVTLAPFDMAKPARPLLSASYDLSTVLTELVYLGFSAATGRVNSRHFVLGWSLGVSRQAPAIDMAKLPKLPRVGPKPRSKVLDIVLPIVTATFVLGLGGILVLVMRRRSRYAELREDWEVEFGPHRFLYKDLFRATDGFKDKHLLGAGGFGRVYRGVLETSKLEVAVKRVSHESRQGMREFIAEITSIGRIRHRNLVELLGYCRRKGELLLVYAYMPNGSLDKHLYNTREDQPTLNWALRFQTVKDVASGLLYLHERWEKVVIHRDIKASNVLLDKDMNAQLGDFGLARLYDHGADSQTTHVVGTMGYLAPELIRTGRASPLTDMFAFGIFLLEVACGQKPIKENAQGGQIALVDWVLEHWRDGTLMETVDARLQGEFDIDQAGLVLTLALMCSHLLASARPGIGQVMRYLTGVTPLPELTPTDVLTLMQNKGFDESAMSYPDLVSSFGTISTLSGGR

SEQ ID NO: 14024 - DNA, 1866 bp, Triticum aestivum
  misc_feature (1)..(1866): Ceres Seq. ID no. 12465371
cccgaataacctcggattccaggattcccattcggtgataccgcgaggggctccacctccggctcgcctcaaccctaaccccctgcccccctcccctccggcgagatgcccaccggcgcctcggcgtgacgcgacccctcgtcggcggcgaggagcgcgaaccggtggcggcggagggtggatcgagatggaggcgaggcctcggccttccggcgtgcggagggtgaccgccaagaagcggccgaggccggatgcgtcctccaacagcgcgcggaagctacagcgccgggagattgccgcattccccgagcgcaccttcgccgccagcaccacgcgggagcggttccgcaacatccagctccaggaagaatttgatacatatgatcctaaggagaacagttcgctactaccttacttgaggaagcggtctgaaattatcgagatagttggagcccgtgatattatctttgctttatcacagctgggagtatgtgctgcgttcagtagagtgacaaaccagcggatttgctttctgaatggaagtccagatgaagtcatccgtagtttgttctataacaagaacaatgactcgcttataaccgtatcagtttatggttctgaaaatttcagtgctttaagatgcaggacaactcgaatcgagtatatacgccgtggaaagccagatgctggtttccctctttttgagacagaatcgttaaggtggcctggtttcgtggaatttgatgatgtaaacggaaaagtgctgacttactctgctcaagacagtacttacaaggtgtttgacttgaagaattacacacttctgtatacgatatctgataaagatgttcaagagataaaaatcagccctggtataatgctattgatatactctagaaaaaagggctatattcctcttgagattctttctattgaagatggtaagcgcttgaagtcattcaggcatcttcttcatcgcaacaagaagatcgatttcatcgagcaattcaatgaaaagcttctagttaagcaggatggggagaaccttcaaattcttgatgtaacaaactctaagatcacagaagtgagcagcaatgagtttgtgactccatcagcttttatttttctgtacgagatgcagttgttcctgaccttccgtaatcgatcagtatcagtttggaatttccgtggtgaactggtgacatcctttgaggatcatttgttgtggcatcctgattgcaatacaaacagtatttacataactagcaaccaagacctcattatctcttactgcaaagctgaaccggatgatccatcttcagaagacaatgcctgttctataaacatcagcgacatattgaccgggaaatgcatggccaagataaaggcagggaacctgtgcaaacagaagtcgtcgaagttcctgtgcacgcctctagaggccctgggcgacattacatctctgtactacgacgaagagcgtgaggagatcatcaccggcaaccatcaaggcctcatccatgtgtggtcaaattaacagcttggtccagtgcaggcaggttacatcaggcaccaggggatcttcgttagcatttagctagtagtggcaccagtttagtgggcagcctgacctagccgtgggtatctttcgccgcatgggccttcatgttgggaatgtttgtgtatagtactgtagttcatccatcgccagcctgttagctatttgacatttgtcatgtgttttttgggggatccgtgtagctttaggagatgcttatcataggggtcatcgaagagggaaagtttcgggtgcatcgcatgtaagcattattgacctttaagctatttatctgattctgatttccg

SEQ ID NO: 14025 - protein, 511 aa, Triticum aestivum
  peptide (1)..(511): Ceres Seq. ID no. 12465372
  misc_feature (63)..(511): NCBI GI NO: 15128395 NR Description: P0454H12.13
  misc_feature (63)..(511): NCBI GI NO: 34909262 NR Description: B1148D12.19
  misc_feature (65)..(511): NCBI GI NO: 18410015 NR Description: putative protein; protein id: At3g54190
  misc_feature (65)..(511): NCBI GI NO: 25344227 NR Description: hypothetical protein At2g38630
  misc_feature (65)..(511): NCBI GI NO: 30687585 NR Description: expressed protein [Arabidopsis thaliana]
  misc_feature (65)..(511): NCBI GI NO: 11281174 NR Description: hypothetical protein F24B22
  misc_feature (71)..(117): NCBI GI NO: 37535068 NR Description: hypothetical protein
  misc_feature (223)..(262): NCBI GI NO: 37535068 NR Description: hypothetical protein
PNNLGFQDSHSVIPRGAPPPARLNPNPLPPSPPARCPPAPRRDATPRRRRGARTGGGGGWIEMEARPRPSGVRRVTAKKRPRPDASSNSARKLQRREIAAFPERTFAASTTRERFRNIQLQEEFDTYDPKENSSLLPYLRKRSEIIEIVGARDIIFALSQLGVCAAFSRVTNQRICFLNGSPDEVIRSLFYNKNNDSLITVSVYGSENFSALRCRTTRIEYIRRGKPDAGFPLFETESLRWPGFVEFDDVNGKVLTYSAQDSTYKVFDLKNYTLLYTISDKDVQEIKISPGIMLLIYSRKKGYIPLEILSIEDGKRLKSFRHLLHRNKKIDFIEQFNEKLLVKQDGENLQILDVTNSKITEVSSNEFVTPSAFIFLYEMQLFLTFRNRSVSVWNFRGELVTSFEDHLLWHPDCNTNSIYITSNQDLIISYCKAEPDDPSSEDNACSINISDILTGKCMAKIKAGNLCKQKSSKFLCTPLEALGDITSLYYDEEREEIITGNHQGLIHVWSN

SEQ ID NO: 14026 - protein, 449 aa, Triticum aestivum
  peptide (1)..(449): Ceres Seq. ID no. 12465373
  misc_feature (1)..(449): NCBI GI NO: 15128395 NR Description: P0454H12.13
  misc_feature (1)..(449): NCBI GI NO: 34909262 NR Description: B1148D12.19
  misc_feature (3)..(449): NCBI GI NO: 18410015 NR Description: putative protein; protein id: At3g54190
  misc_feature (3)..(449): NCBI GI NO: 25344227 NR Description: hypothetical protein At2g38630
  misc_feature (3)..(449): NCBI GI NO: 30687585 NR Description: expressed protein [Arabidopsis thaliana]
  misc_feature (3)..(449): NCBI GI NO: 11281174 NR Description: hypothetical protein F24B22
  misc_feature (9)..(55): NCBI GI NO: 37535068 NR Description: hypothetical protein
  misc_feature (161)..(200): NCBI GI NO: 37535068 NR Description: hypothetical protein
MEARPRPSGVRRVTAKKRPRPDASSNSARKLQRREIAAFPERTFAASTTRERFRNIQLQEEFDTYDPKENSSLLPYLRKRSEIIEIVGARDIIFALSQLGVCAAFSRVTNQRICFLNGSPDEVIRSLFYNKNNDSLITVSVYGSENFSALRCRTTRIEYIRRGKPDAGFPLFETESLRWPGFVEFDDVNGKVLTYSAQDSTYKVFDLKNYTLLYTISDKDVQEIKISPGIMLLIYSRKKGYIPLEILSIEDGKRLKSFRHLLHRNKKIDFIEQFNEKLLVKQDGENLQILDVTNSKITEVSSNEFVTPSAFIFLYEMQLFLTFRNRSVSVWNFRGELVTSFEDHLLWHPDCNTNSIYITSNQDLIISYCKAEPDDPSSEDNACSINISDILTGKCMAKIKAGNLCKQKSSKFLCTPLEALGDITSLYYDEEREEIITGNHQGLIHVWSN

SEQ ID NO: 14027 - DNA, 830 bp, Triticum aestivum
  misc_feature (1)..(830): Ceres Seq. ID no. 13597309
ccaaattagttagagctttctctcttctcttctcttctcttctcttctcttctcttctctgctctccactgtccaggaacagcaggagcaggaaaaagaaaaagaggaggaagaagatgtcgatcaagcactgcgacaagcacgactgcgagcggcggcggctgtaccgccagttctgcgccgccctggtggccgtcatcctgctcatcctgctcatcgtcctcatcgtctggctcgtgctccgccccaccaggccgcgcttctacctcaacggcctcaccgtggcgtgcctcaacgccacctcctccccggcgtcctacctcaccgtgacgctgcaagcgacgatcgccgcccgcaaccccaactcccgcgtcggcatctacttcgaccggatggacgcctacgccgagtacaaggggcagcaggtgaccgtccccaccgcgcttcccgtggtgtaccagggccacctcgacgtgtccgtgtggtcgccgttcctggtggggtcgaacgtgccgctggccccctacctggcggtggcgctggcgcaggacgagacggccggctacgtgctgctcacggtgcgggtggacggctggatcaggtggaaggccggggccttcatcaccgggcactaccacctccgggtcaggtgccccgccctgctcaccgtcaacggagggcagggcagctacggctccatcgccggcggcggcgggaacggctacttcaacttccagcgcgccgcgccatgcgttgtcgacgtctgaacccaaccgttctctgaaatccagagcccttttggttctgctgggccgtccctgaaactaatt

SEQ ID NO: 14028 - protein, 254 aa, Triticum aestivum
  peptide (1)..(254): Ceres Seq. ID no. 13597310
  misc_feature (39)..(254): NCBI GI NO: 38637038 NR Description: harpin-induced protein 1 family (HIN1)-like
  misc_feature (41)..(241): NCBI GI NO: 18399308 NR Description: harpin-induced protein 1 family (HIN1)
  misc_feature (41)..(241): NCBI GI NO: 28392929 NR Description: putative VAMP protein SEC22 [Arabidopsis thaliana]
  misc_feature (39)..(254): NCBI GI NO: 15229906 NR Description: harpin-induced protein 1 family (HIN1)
  misc_feature (42)..(254): NCBI GI NO: 15231227 NR Description: harpin-induced protein 1 family (HIN1)
  misc_feature (39)..(254): NCBI GI NO: 22326984 NR Description: harpin-induced protein 1 family (HIN1)
  misc_feature (39)..(235): NCBI GI NO: 15240001 NR Description: harpin-induced protein, putative (HIN1)
  misc_feature (45)..(254): NCBI GI NO: 38344036 NR Description: OJ991214_12.17
  misc_feature (57)..(223): NCBI GI NO: 15227538 NR Description: harpin-induced protein 1 family (HIN1)
  misc_feature (57)..(221): NCBI GI NO: 15233951 NR Description: harpin-induced protein 1 family (HIN1)
KLVRAFSLLFSSLLFSSLLCSPLSRNSRSRKKKKRRKKMSIKHCDKHDCERRRLYRQFCAALVAVILLILLIVLIVWLVLRPTRPRFYLNGLTVACLNATSSPASYLTVTLQATIAARNPNSRVGIYFDRMDAYAEYKGQQVTVPTALPVVYQGHLDVSVWSPFLVGSNVPLAPYLAVALAQDETAGYVLLTVRVDGWIRWKAGAFITGHYHLRVRCPALLTVNGGQGSYGSIAGGGGNGYFNFQRAAPCVVDV

SEQ ID NO: 14029 - protein, 216 aa, Triticum aestivum
  peptide (1)..(216): Ceres Seq. ID no. 13597311
  misc_feature (1)..(216): NCBI GI NO: 38637038 NR Description: harpin-induced protein 1 family (HIN1)-like
  misc_feature (3)..(203): NCBI GI NO: 18399308 NR Description: harpin-induced protein 1 family (HIN1)
  misc_feature (3)..(203): NCBI GI NO: 28392929 NR Description: putative VAMP protein SEC22 [Arabidopsis thaliana]
  misc_feature (1)..(216): NCBI GI NO: 15229906 NR Description: harpin-induced protein 1 family (HIN1)
  misc_feature (4)..(216): NCBI GI NO: 15231227 NR Description: harpin-induced protein 1 family (HIN1)
  misc_feature (1)..(216): NCBI GI NO: 22326984 NR Description: harpin-induced protein 1 family (HIN1)
  misc_feature (1)..(197): NCBI GI NO: 15240001 NR Description: harpin-induced protein, putative (HIN1)
  misc_feature (7)..(216): NCBI GI NO: 38344036 NR Description: OJ991214_12.17
  misc_feature (19)..(185): NCBI GI NO: 15227538 NR Description: harpin-induced protein 1 family (HIN1)
  misc_feature (19)..(183): NCBI GI NO: 15233951 NR Description: harpin-induced protein 1 family (HIN1)
MSIKHCDKHDCERRRLYRQFCAALVAVILLILLIVLIVWLVLRPTRPRFYLNGLTVACLNATSSPASYLTVTLQATIAARNPNSRVGIYFDRMDAYAEYKGQQVTVPTALPVVYQGHLDVSVWSPFLVGSNVPLAPYLAVALAQDETAGYVLLTVRVDGWIRWKAGAFITGHYHLRVRCPALLTVNGGQGSYGSIAGGGGNGYFNFQRAAPCVVDV

SEQ ID NO: 14030 - DNA, 547 bp, Triticum aestivum
  misc_feature (1)..(547): Ceres Seq. ID no. 13597312
tcgttcgtttcagatcagatccagcgagagagagagacagagaaatccccaatccaccaaaccctaacccacacccactaggagagatcggcgagagagatcaggcgatggccgttgagaagatgcagtttgccatgccgatggccaccggcttcgagggatttccctacatcccgttccaggcggagaaggagcaggcgcaggcgttcgtcagggccagggcggagccggaggaggaggcggcgctcgtcatggtcaggacgaagccagaggcggcgatccgcaatgccaagtccaaggcgtccctgaaggccaaggccaaggcagagaaggaggcggaggtcctcaaggccaaggcggagaaggaagcggcgatcctcaaggccaaggcggaggcagagaaggaggaagcgatcaaggccaaggccaaggcggcgaaggaggagacgatcatcaaggccaactgctgctgcggctcggacgaggacgatgtgccgtacgacaagctgtgccacgactccgactcggaggaagacccggatataat

SEQ ID NO: 14031 - protein, 181 aa, Triticum aestivum
  peptide (1)..(181): Ceres Seq. ID no. 13597313
  misc_feature (31)..(169): Pfam Name: Pfam Description:  Caldesmon
VRFRSDPARERDREIPNPPNPNPHPLGEIGERDQAMAVEKMQFAMPMATGFEGFPYIPFQAEKEQAQAFVRARAEPEEEAALVMVRTKPEAAIRNAKSKASLKAKAKAEKEAEVLKAKAEKEAAILKAKAEAEKEEAIKAKAKAAKEETIIKANCCCGSDEDDVPYDKLCHDSDSEEDPDI

SEQ ID NO: 14032 - protein, 146 aa, Triticum aestivum
  peptide (1)..(146): Ceres Seq. ID no. 13597314
  misc_feature (1)..(134): Pfam Name: Pfam Description:  Caldesmon
MAVEKMQFAMPMATGFEGFPYIPFQAEKEQAQAFVRARAEPEEEAALVMVRTKPEAAIRNAKSKASLKAKAKAEKEAEVLKAKAEKEAAILKAKAEAEKEEAIKAKAKAAKEETIIKANCCCGSDEDDVPYDKLCHDSDSEEDPDI

SEQ ID NO: 14033 - protein, 141 aa, Triticum aestivum
  peptide (1)..(141): Ceres Seq. ID no. 13597315
  misc_feature (1)..(129): Pfam Name: Pfam Description:  Caldesmon
MQFAMPMATGFEGFPYIPFQAEKEQAQAFVRARAEPEEEAALVMVRTKPEAAIRNAKSKASLKAKAKAEKEAEVLKAKAEKEAAILKAKAEAEKEEAIKAKAKAAKEETIIKANCCCGSDEDDVPYDKLCHDSDSEEDPDI

SEQ ID NO: 14034 - DNA, 1500 bp, Triticum aestivum
  misc_feature (1)..(1500): Ceres Seq. ID no. 13597254
atatatattaatactggcagccgctgccagtgctccgagctcgacgccatcgcgatctccctccagtctcccctccgcccatcacccgtcgccgtcgcagccccgcccctaaaatactcccgcgcccctcctagccgccacccgccatccgtcccccgaaaatctcccagcgcagccgaactgaggtcacccgccctccccctcggccgatttactcctcggcttccctcccctgtttgaggcaatggcggcggcggagaacggcgggggcggggagagcaaggcggcgttcgcgcggatctacgacgcgctcaaggcggagctgctccgggaccccgccttcgagtacacggagtcgtcgcacgagtggatcgaccgcatgctggactacaatgtactgggaggaaagtgcaaccgtgggctctccgtggtcgatagctataagctgttgaaaggtgtcgatgttcttagtgaggaggagatgtttcttgcctccactctcggttggtgcattgaatggctccaagccttctttcttgtgcttgatgatatcatggacgactcccacactcgacgtgggcagccttgttggtttagggtgtctcgggttggcttgattgctgtaaatgatgggattctccttcgcaaccatatttcgagaatgcttcggctccactttaagaagaagccttactatgccgatctccttgatttattcaacgaggttgagttcaagacagcttctggtcaaatgctggatcttattacaacccacgagggagaaaaagatctaacaaaatataacattggagtccaccgccgaattgttcaattcaagacagcctactattcattttatctgccggttgcatgtgcgctgctactctctggtgagagtttggagaactacggtgctgtagagaacatacttgtcgagatgggaacttacttccaagttcaggatgattatctagactgttatggtgatcctgaatttattggcaagattggcaccgacattgaagattacaagtgctcctggctagttgtccaagctcttgagcgtgctgatgagagccaaaagagcattctatttgaaaactatggaaagaaagatccagcatgcgtggcaaaagtgaaggatctctacaaagaacttgaccttgaggcggtatttcatgagtacgagagcgagagctacaagaagctgattgctggtatcgaagcccagccgagcgacgctgttcagaaggttctgaagtccttcttgcacaagatctacaagaggcagaagtagggtgtctcttgggcaggaaatctgctccattgtcgcatgtttgatagatgactagtggtgttgattttatggtttagtgcttcatgttgtatgttgcgccttgctgctcccagtagtaataatgatgcaaggcgctatttcgggtttaatggaccgccttggtgtagacgactgatggttctgtaatttgcaccttgcccttt

SEQ ID NO: 14035 - protein, 350 aa, Triticum aestivum
  peptide (1)..(350): Ceres Seq. ID no. 15222057
  misc_feature (42)..(313): Pfam Name: Pfam Description:  Polyprenyl synthetase
  misc_feature (1)..(350): NCBI GI NO: 1346033 NR Description: Farnesyl pyrophosphate synthetase
  misc_feature (1)..(350): NCBI GI NO: 34911542 NR Description: putative farnesyl-pyrophosphate synthetase
  misc_feature (54)..(350): NCBI GI NO: 25458583 NR Description: probable farnesyl pyrophosphate synthase
  misc_feature (1)..(47): NCBI GI NO: 25458583 NR Description: probable farnesyl pyrophosphate synthase
  misc_feature (8)..(350): NCBI GI NO: 18958450 NR Description: farnesyl pyrophosphare synthase [Musa acuminata]
  misc_feature (13)..(350): NCBI GI NO: 7433992 NR Description: farnesyl-pyrophosphate synthetase
  misc_feature (13)..(350): NCBI GI NO: 1346028 NR Description: Farnesyl pyrophosphate synthetase 1
  misc_feature (13)..(350): NCBI GI NO: 4324960 NR Description: farnesyl diphosphate synthase [Artemisia annua]
  misc_feature (13)..(350): NCBI GI NO: 20135548 NR Description: farnesyl pyrophosphate synthase
  misc_feature (13)..(350): NCBI GI NO: 1346030 NR Description: FARNESYL PYROPHOSPHATE SYNTHETASE
MAAAENGGGGESKAAFARIYDALKAELLRDPAFEYTESSHEWIDRMLDYNVLGGKCNRGLSVVDSYKLLKGVDVLSEEEMFLASTLGWCIEWLQAFFLVLDDIMDDSHTRRGQPCWFRVSRVGLIAVNDGILLRNHISRMLRLHFKKKPYYADLLDLFNEVEFKTASGQMLDLITTHEGEKDLTKYNIGVHRRIVQFKTAYYSFYLPVACALLLSGESLENYGAVENILVEMGTYFQVQDDYLDCYGDPEFIGKIGTDIEDYKCSWLVVQALERADESQKSILFENYGKKDPACVAKVKDLYKELDLEAVFHEYESESYKKLIAGIEAQPSDAVQKVLKSFLHKIYKRQK

SEQ ID NO: 14036 - protein, 305 aa, Triticum aestivum
  peptide (1)..(305): Ceres Seq. ID no. 15222058
  misc_feature (1)..(268): Pfam Name: Pfam Description:  Polyprenyl synthetase
  misc_feature (1)..(305): NCBI GI NO: 1346033 NR Description: Farnesyl pyrophosphate synthetase
  misc_feature (1)..(305): NCBI GI NO: 34911542 NR Description: putative farnesyl-pyrophosphate synthetase
  misc_feature (9)..(305): NCBI GI NO: 25458583 NR Description: probable farnesyl pyrophosphate synthase
  misc_feature (1)..(305): NCBI GI NO: 18958450 NR Description: farnesyl pyrophosphare synthase [Musa acuminata]
  misc_feature (1)..(305): NCBI GI NO: 7433992 NR Description: farnesyl-pyrophosphate synthetase
  misc_feature (1)..(305): NCBI GI NO: 1346028 NR Description: Farnesyl pyrophosphate synthetase 1
  misc_feature (1)..(305): NCBI GI NO: 4324960 NR Description: farnesyl diphosphate synthase [Artemisia annua]
  misc_feature (1)..(305): NCBI GI NO: 20135548 NR Description: farnesyl pyrophosphate synthase
  misc_feature (1)..(305): NCBI GI NO: 1346030 NR Description: FARNESYL PYROPHOSPHATE SYNTHETASE
  misc_feature (1)..(305): NCBI GI NO: 1346029 NR Description: Farnesyl pyrophosphate synthetase 2
MLDYNVLGGKCNRGLSVVDSYKLLKGVDVLSEEEMFLASTLGWCIEWLQAFFLVLDDIMDDSHTRRGQPCWFRVSRVGLIAVNDGILLRNHISRMLRLHFKKKPYYADLLDLFNEVEFKTASGQMLDLITTHEGEKDLTKYNIGVHRRIVQFKTAYYSFYLPVACALLLSGESLENYGAVENILVEMGTYFQVQDDYLDCYGDPEFIGKIGTDIEDYKCSWLVVQALERADESQKSILFENYGKKDPACVAKVKDLYKELDLEAVFHEYESESYKKLIAGIEAQPSDAVQKVLKSFLHKIYKRQK

SEQ ID NO: 14037 - protein, 271 aa, Triticum aestivum
  peptide (1)..(271): Ceres Seq. ID no. 15222059
  misc_feature (1)..(234): Pfam Name: Pfam Description:  Polyprenyl synthetase
  misc_feature (1)..(271): NCBI GI NO: 1346033 NR Description: Farnesyl pyrophosphate synthetase
  misc_feature (1)..(271): NCBI GI NO: 34911542 NR Description: putative farnesyl-pyrophosphate synthetase
  misc_feature (1)..(271): NCBI GI NO: 25458583 NR Description: probable farnesyl pyrophosphate synthase
  misc_feature (1)..(271): NCBI GI NO: 18958450 NR Description: farnesyl pyrophosphare synthase [Musa acuminata]
  misc_feature (1)..(271): NCBI GI NO: 7433992 NR Description: farnesyl-pyrophosphate synthetase
  misc_feature (1)..(271): NCBI GI NO: 1346028 NR Description: Farnesyl pyrophosphate synthetase 1
  misc_feature (1)..(271): NCBI GI NO: 4324960 NR Description: farnesyl diphosphate synthase [Artemisia annua]
  misc_feature (1)..(271): NCBI GI NO: 20135548 NR Description: farnesyl pyrophosphate synthase
  misc_feature (1)..(271): NCBI GI NO: 1346030 NR Description: FARNESYL PYROPHOSPHATE SYNTHETASE
  misc_feature (1)..(271): NCBI GI NO: 1346029 NR Description: Farnesyl pyrophosphate synthetase 2
MFLASTLGWCIEWLQAFFLVLDDIMDDSHTRRGQPCWFRVSRVGLIAVNDGILLRNHISRMLRLHFKKKPYYADLLDLFNEVEFKTASGQMLDLITTHEGEKDLTKYNIGVHRRIVQFKTAYYSFYLPVACALLLSGESLENYGAVENILVEMGTYFQVQDDYLDCYGDPEFIGKIGTDIEDYKCSWLVVQALERADESQKSILFENYGKKDPACVAKVKDLYKELDLEAVFHEYESESYKKLIAGIEAQPSDAVQKVLKSFLHKIYKRQK

SEQ ID NO: 14038 - DNA, 1571 bp, Triticum aestivum
  misc_feature (1)..(1571): Ceres Seq. ID no. 13598488
caccctaatcgaaaaaacttttgcttcgccgtggaagggatcgtcgtagctggcttagcttgctgctttgcttccaagtgttgctgctggtggtgctgtggtagtgtggtgtgaggtgtgatggagctgcaggggctggggaggtactggggcgtgggcggcaggaggtgcgggtcgtgccgggggtcgccggcggcggtgcactgccggacgtgcgatgggggcagtggggacggggcgtacctgtgcgcgggctgtggcgaggggcacgcgcgggcggggcacgagagggtgtgggtctgcgaggtgtgcgagctcgcgccggccgcggtcacctgcaaggccgacgccgccgcgctctgcgccgcctgcgacgccgacatccaccacgccaacccgctcgcgcgccgccacgagcgcgtccccgtgcagcccatcgggtcctcgtcacccgaggggcaggagcaggagcaggatgcgttcgtgatgtcgttcggcggctcggtcgacggggagaagcagcagaaccccgtggtgaacctgaacgacgctctggaggccggcgccggcgggaaggagaacgtgaagctggacttcctgttcgcggacatgatggaccctttcttcggctccgagctcccgcgcttcccgcacgccgacagcgttgtccccagcggcggcgcggtggagctggacttcggtggcgtcgccgcccccgtcgtcgtctccaacccgtcctacagctcctacacggcggcgtcgctcggtggaagtggctcgtcgtcggaggtcggcttggtgccggacgcgatctgtggccgaggcggcggcatcatcgagctggacttcgcacagtccaaggccgcgtacctgccctacacccccacaccaagccacagtaccgtctcctcggtggatgttgggtcggtgccggagcggagcgacagcgccgtcgcggcggcgacgccggcgacgggggaggggagggaggcgcgtctgatgcggtaccgcgagaagcgcaagaaccggcggttcgagaagaccatccggtacgcgtcccggaaggcctacgccgagagcaggccgcgcgtcaagggccgcttcgccaagcgcgccgacgacgcggacaccgacgccgtcgcggcggccacgatcaccacgccggggccatgcgtgctcgacttcggcagctacggcgtcgtgcccaccttctgaggcggcgcctgatttcgtgtccatttcctccggcgagcgtgccggctgggtgcctaattaaatccggcaccgccatggccggcacgagcgcgccgacgtgcatgcgtcgtgttccctcttgtataattgcatgtaatgtttttcgagctggctgatcgctggctggcgtgtagtatactgtaatcaacatgcacgcacgcacgcacgcatgttttgctagaactagaataatacagatagttctagttgactagtctactaccctgtaccctttccctgggctagcttgatgccaaattaggctagggcaatgtaacgtgtttgctggaacagcttagttctagttttggatccgc

SEQ ID NO: 14039 - protein, 364 aa, Triticum aestivum
  peptide (1)..(364): Ceres Seq. ID no. 13598489
  misc_feature (56)..(103): Pfam Name: Pfam Description:  B-box zinc finger
  misc_feature (124)..(364): NCBI GI NO: 21655164 NR Description: CONSTANS-like protein CO7
  misc_feature (1)..(338): NCBI GI NO: 21655158 NR Description: CONSTANS-like protein CO6
  misc_feature (23)..(338): NCBI GI NO: 21655160 NR Description: CONSTANS-like protein CO6
  misc_feature (1)..(178): NCBI GI NO: 17433047 NR Description: Zinc finger protein constans-like 15
  misc_feature (240)..(364): NCBI GI NO: 17433047 NR Description: Zinc finger protein constans-like 15
  misc_feature (1)..(178): NCBI GI NO: 18424009 NR Description: CONSTANS B-box zinc finger family protein
  misc_feature (240)..(364): NCBI GI NO: 18424009 NR Description: CONSTANS B-box zinc finger family protein
  misc_feature (1)..(178): NCBI GI NO: 21594050 NR Description: CONSTANS-like B-box zinc finger protein-like
  misc_feature (240)..(364): NCBI GI NO: 21594050 NR Description: CONSTANS-like B-box zinc finger protein-like
  misc_feature (15)..(129): NCBI GI NO: 15224620 NR Description: CONSTANS B-box zinc finger family protein
MELQGLGRYWGVGGRRCGSCRGSPAAVHCRTCDGGSGDGAYLCAGCGEGHARAGHERVWVCEVCELAPAAVTCKADAAALCAACDADIHHANPLARRHERVPVQPIGSSSPEGQEQEQDAFVMSFGGSVDGEKQQNPVVNLNDALEAGAGGKENVKLDFLFADMMDPFFGSELPRFPHADSVVPSGGAVELDFGGVAAPVVVSNPSYSSYTAASLGGSGSSSEVGLVPDAICGRGGGIIELDFAQSKAAYLPYTPTPSHSTVSSVDVGSVPERSDSAVAAATPATGEGREARLMRYREKRKNRRFEKTIRYASRKAYAESRPRVKGRFAKRADDADTDAVAAATITTPGPCVLDFGSYGVVPTF

SEQ ID NO: 14040 - protein, 242 aa, Triticum aestivum
  peptide (1)..(242): Ceres Seq. ID no. 13598490
  misc_feature (172)..(211): Pfam Name: Pfam Description:  CCT motif
  misc_feature (2)..(242): NCBI GI NO: 21655164 NR Description: CONSTANS-like protein CO7
  misc_feature (1)..(216): NCBI GI NO: 21655158 NR Description: CONSTANS-like protein CO6
  misc_feature (1)..(216): NCBI GI NO: 21655160 NR Description: CONSTANS-like protein CO6
  misc_feature (1)..(56): NCBI GI NO: 17433047 NR Description: Zinc finger protein constans-like 15
  misc_feature (118)..(242): NCBI GI NO: 17433047 NR Description: Zinc finger protein constans-like 15
  misc_feature (1)..(56): NCBI GI NO: 18424009 NR Description: CONSTANS B-box zinc finger family protein
  misc_feature (118)..(242): NCBI GI NO: 18424009 NR Description: CONSTANS B-box zinc finger family protein
  misc_feature (1)..(56): NCBI GI NO: 21594050 NR Description: CONSTANS-like B-box zinc finger protein-like
  misc_feature (118)..(242): NCBI GI NO: 21594050 NR Description: CONSTANS-like B-box zinc finger protein-like
  misc_feature (137)..(242): NCBI GI NO: 15224620 NR Description: CONSTANS B-box zinc finger family protein
MSFGGSVDGEKQQNPVVNLNDALEAGAGGKENVKLDFLFADMMDPFFGSELPRFPHADSVVPSGGAVELDFGGVAAPVVVSNPSYSSYTAASLGGSGSSSEVGLVPDAICGRGGGIIELDFAQSKAAYLPYTPTPSHSTVSSVDVGSVPERSDSAVAAATPATGEGREARLMRYREKRKNRRFEKTIRYASRKAYAESRPRVKGRFAKRADDADTDAVAAATITTPGPCVLDFGSYGVVPTF

SEQ ID NO: 14041 - protein, 201 aa, Triticum aestivum
  peptide (1)..(201): Ceres Seq. ID no. 13598491
  misc_feature (131)..(170): Pfam Name: Pfam Description:  CCT motif
  misc_feature (1)..(201): NCBI GI NO: 21655164 NR Description: CONSTANS-like protein CO7
  misc_feature (1)..(175): NCBI GI NO: 21655158 NR Description: CONSTANS-like protein CO6
  misc_feature (1)..(175): NCBI GI NO: 21655160 NR Description: CONSTANS-like protein CO6
  misc_feature (1)..(15): NCBI GI NO: 17433047 NR Description: Zinc finger protein constans-like 15
  misc_feature (77)..(201): NCBI GI NO: 17433047 NR Description: Zinc finger protein constans-like 15
  misc_feature (1)..(15): NCBI GI NO: 18424009 NR Description: CONSTANS B-box zinc finger family protein
  misc_feature (77)..(201): NCBI GI NO: 18424009 NR Description: CONSTANS B-box zinc finger family protein
  misc_feature (1)..(15): NCBI GI NO: 21594050 NR Description: CONSTANS-like B-box zinc finger protein-like
  misc_feature (77)..(201): NCBI GI NO: 21594050 NR Description: CONSTANS-like B-box zinc finger protein-like
  misc_feature (96)..(201): NCBI GI NO: 15224620 NR Description: CONSTANS B-box zinc finger family protein
MMDPFFGSELPRFPHADSVVPSGGAVELDFGGVAAPVVVSNPSYSSYTAASLGGSGSSSEVGLVPDAICGRGGGIIELDFAQSKAAYLPYTPTPSHSTVSSVDVGSVPERSDSAVAAATPATGEGREARLMRYREKRKNRRFEKTIRYASRKAYAESRPRVKGRFAKRADDADTDAVAAATITTPGPCVLDFGSYGVVPTF

SEQ ID NO: 14042 - DNA, 1413 bp, Triticum aestivum
  misc_feature (1)..(1413): Ceres Seq. ID no. 13655684
  misc_feature (578)..(578): n is a, c, t, g, unknown, or other
  misc_feature (1401)..(1401): n is a, c, t, g, unknown, or other
acccgcgacgaattccgcaaggagagaacgcgaaatatagatccgccgtgaaggcccaacggcggctcaccgaaacccggggccgccgccggcgctcgcacccgaagcccccactccgcacgggcagtccaggcagagatggtggcgatctcgatgtaccgcggcaacctccaccggggcggggacgacgccgcgcgccgctggccggtgcccccacccacgctctccgcgtcccagttccgccgcctcctccaccgccggtccctcgccgtctcccgcctcgccggggctccccggcccaactcccccaactcccgcccggacgacggcgccgcggggcccgtggccgtgggggaggcgccggaggtggacgggggtcagcagcagcatcaggccgagcggcaggaggaggaggggcatgatgtgcagatgcagcagcagcagcagcagggggaggaagaggggcagggtgtgcaggatcaacagggggagggagatggccaagacgagcagcagcaaggagatgaggaggagcaggaggagggggcggtggaggatgtggaaatggacgatgcggnggaggtggtcgccggagatgctgatgccggcggcaatggtgaccctgaagaagggcaaggcgaaagcgaaggcttcgaccccaactcggaggtgggtcaacctgatggagttgaagaaaggaagagagagttgactgacaagctggataccttaagtaagaaaaagcatgatcttgtgcagatgctgaagcagattttaaatgccgaagaagaaatcagaacacgtagcatgcaggtttcgctgcgtgctgccatgcctcagccgccagaaaacacagctgatggaagtgttcctagacaggtgccgagaatgaccgttgatgtcaatttcagcgagtttgctggggagtcagatgctggttccaaccagggcactcctgggcgccccttgcatcatgtccacagtatttctccttcaacagcctcctttgctaggtctccattcggttctcgcaaccacaaacctcgcaacactccaagaagtccagcacctttctttacagcaagcccgtctcgcttcgcaggtaccgggcatcaaggacaccacccctcggcatcattaccagcaggcaactttgtagcatcgtcgccttcccctgctgcatccggtggctcttcctctgtattcagggactatcgcccgcccagttcaacataattccacaaaacccgaatgaaggccaatgtacatgagtcaccctgaatagtttgaatgctctttgtgctcctccttgcattgttactttattgacaatattatcagattgcgaagagcaactcagggagaacaaggtcatgttgaagtatcattttgtatatctgngccagtgctgct

SEQ ID NO: 14043 - protein, 365 aa, Triticum aestivum
  peptide (1)..(365): Ceres Seq. ID no. 13655685
  misc_feature (64)..(136): Pfam Name: Pfam Description:  Cupin
  misc_feature (181)..(360): NCBI GI NO: 15228266 NR Description: expressed protein [Arabidopsis thaliana]
  misc_feature (1)..(155): NCBI GI NO: 15228266 NR Description: expressed protein [Arabidopsis thaliana]
  misc_feature (181)..(360): NCBI GI NO: 21592503 NR Description: unknown [Arabidopsis thaliana]
  misc_feature (1)..(155): NCBI GI NO: 21592503 NR Description: unknown [Arabidopsis thaliana]
  misc_feature (62)..(190): NCBI GI NO: 9837379 NR Description: retinitis pigmentosa GTPase regulator
  misc_feature (72)..(190): NCBI GI NO: 9837379 NR Description: retinitis pigmentosa GTPase regulator
  misc_feature (73)..(186): NCBI GI NO: 9837379 NR Description: retinitis pigmentosa GTPase regulator
  misc_feature (60)..(218): NCBI GI NO: 9837383 NR Description: retinitis pigmentosa GTPase regulator [Bos taurus]
  misc_feature (72)..(190): NCBI GI NO: 9837379 NR Description: retinitis pigmentosa GTPase regulator
  misc_feature (72)..(190): NCBI GI NO: 9837381 NR Description: retinitis pigmentosa GTPase regulator
  misc_feature (147)..(147): Xaa is any aa, unknown or other
MVAISMYRGNLHRGGDDAARRWPVPPPTLSASQFRRLLHRRSLAVSRLAGAPRPNSPNSRPDDGAAGPVAVGEAPEVDGGQQQHQAERQEEEGHDVQMQQQQQQGEEEGQGVQDQQGEGDGQDEQQQGDEEEQEEGAVEDVEMDDAXEVVAGDADAGGNGDPEEGQGESEGFDPNSEVGQPDGVEERKRELTDKLDTLSKKKHDLVQMLKQILNAEEEIRTRSMQVSLRAAMPQPPENTADGSVPRQVPRMTVDVNFSEFAGESDAGSNQGTPGRPLHHVHSISPSTASFARSPFGSRNHKPRNTPRSPAPFFTASPSRFAGTGHQGHHPSASLPAGNFVASSPSPAASGGSSSVFRDYRPPSST

SEQ ID NO: 14044 - protein, 360 aa, Triticum aestivum
  peptide (1)..(360): Ceres Seq. ID no. 13655686
  misc_feature (59)..(131): Pfam Name: Pfam Description:  Cupin
  misc_feature (176)..(355): NCBI GI NO: 15228266 NR Description: expressed protein [Arabidopsis thaliana]
  misc_feature (1)..(150): NCBI GI NO: 15228266 NR Description: expressed protein [Arabidopsis thaliana]
  misc_feature (176)..(355): NCBI GI NO: 21592503 NR Description: unknown [Arabidopsis thaliana]
  misc_feature (1)..(150): NCBI GI NO: 21592503 NR Description: unknown [Arabidopsis thaliana]
  misc_feature (57)..(185): NCBI GI NO: 9837379 NR Description: retinitis pigmentosa GTPase regulator
  misc_feature (67)..(185): NCBI GI NO: 9837379 NR Description: retinitis pigmentosa GTPase regulator
  misc_feature (68)..(181): NCBI GI NO: 9837379 NR Description: retinitis pigmentosa GTPase regulator
  misc_feature (55)..(213): NCBI GI NO: 9837383 NR Description: retinitis pigmentosa GTPase regulator [Bos taurus]
  misc_feature (67)..(185): NCBI GI NO: 9837379 NR Description: retinitis pigmentosa GTPase regulator
  misc_feature (67)..(185): NCBI GI NO: 9837381 NR Description: retinitis pigmentosa GTPase regulator
  misc_feature (142)..(142): Xaa is any aa, unknown or other
MYRGNLHRGGDDAARRWPVPPPTLSASQFRRLLHRRSLAVSRLAGAPRPNSPNSRPDDGAAGPVAVGEAPEVDGGQQQHQAERQEEEGHDVQMQQQQQQGEEEGQGVQDQQGEGDGQDEQQQGDEEEQEEGAVEDVEMDDAXEVVAGDADAGGNGDPEEGQGESEGFDPNSEVGQPDGVEERKRELTDKLDTLSKKKHDLVQMLKQILNAEEEIRTRSMQVSLRAAMPQPPENTADGSVPRQVPRMTVDVNFSEFAGESDAGSNQGTPGRPLHHVHSISPSTASFARSPFGSRNHKPRNTPRSPAPFFTASPSRFAGTGHQGHHPSASLPAGNFVASSPSPAASGGSSSVFRDYRPPSST

SEQ ID NO: 14045 - protein, 268 aa, Triticum aestivum
  peptide (1)..(268): Ceres Seq. ID no. 13655687
  misc_feature (84)..(263): NCBI GI NO: 15228266 NR Description: expressed protein [Arabidopsis thaliana]
  misc_feature (1)..(58): NCBI GI NO: 15228266 NR Description: expressed protein [Arabidopsis thaliana]
  misc_feature (84)..(263): NCBI GI NO: 21592503 NR Description: unknown [Arabidopsis thaliana]
  misc_feature (1)..(58): NCBI GI NO: 21592503 NR Description: unknown [Arabidopsis thaliana]
  misc_feature (1)..(93): NCBI GI NO: 9837379 NR Description: retinitis pigmentosa GTPase regulator
  misc_feature (1)..(93): NCBI GI NO: 9837379 NR Description: retinitis pigmentosa GTPase regulator
  misc_feature (1)..(89): NCBI GI NO: 9837379 NR Description: retinitis pigmentosa GTPase regulator
  misc_feature (1)..(121): NCBI GI NO: 9837383 NR Description: retinitis pigmentosa GTPase regulator [Bos taurus]
  misc_feature (1)..(93): NCBI GI NO: 9837379 NR Description: retinitis pigmentosa GTPase regulator
  misc_feature (1)..(93): NCBI GI NO: 9837381 NR Description: retinitis pigmentosa GTPase regulator
  misc_feature (50)..(50): Xaa is any aa, unknown or other
MQQQQQQGEEEGQGVQDQQGEGDGQDEQQQGDEEEQEEGAVEDVEMDDAXEVVAGDADAGGNGDPEEGQGESEGFDPNSEVGQPDGVEERKRELTDKLDTLSKKKHDLVQMLKQILNAEEEIRTRSMQVSLRAAMPQPPENTADGSVPRQVPRMTVDVNFSEFAGESDAGSNQGTPGRPLHHVHSISPSTASFARSPFGSRNHKPRNTPRSPAPFFTASPSRFAGTGHQGHHPSASLPAGNFVASSPSPAASGGSSSVFRDYRPPSST

SEQ ID NO: 14046 - DNA, 1208 bp, Triticum aestivum
  misc_feature (1)..(1208): Ceres Seq. ID no. 13597245
tcgcatccctagctacaaacaactcccttgcatttggagaccgacctattgctatctgtcacagtagtagtacaacaagcgccaccggtaagatggaattccaggggcagcagggcaaccgcgtggaccagcacggcaacccggtcgccgccgcacctggagccaccgccgtgacgggggcgcccgccggcgggcagctgcagcccggcagggaggagcacaagacccgcggcatactccaccggtccagcagctccagctccagctcgtccgaggacgatggcatgggtggacggaggaagaagggcatcaaggagaagatcaaggataagcttcccggggctcgcaagcagacttacggccagcccgccgcgcccgcgggcatgaccggcaccggggcgaccggcggcccttactacgtgcagcccgctccggctggcaccggagcgcacgggaccacggcgacgaccggcacctacgggcagcccgctccggctggcatgaccggcaccggggcgcacgggaccacggcgactggtgagaagaagggcatgaaggacaagatcatggagaaactcccgggaggtcacaagaacgagcagcacaccatgcccaccgccggcgcctacggacagcccgggatgactggcaccggagtgcatgggaacaccgctcccggtgggggctatggtggtcagccagggcacgctggtatgatcggcactggaacgcatgggagcgggacaacgggcggtccttacgatcatcaagggcaccccggagtgaccggcaccggagcacacgggaccacggcgaccggcggtgcttacaaccagcaaggtcacgctggggtgacaggcaccggcgagaagaaaggtattatgggcaagatcaaggaaaagctgcctggccagcactaggcgccagtcagcgtgtttgtgaacaataggtacgagcggaggtggagcaataagcctataagtggctcacgtttgtgtgtagcgttggagtagttggtatgctgcagtactgtactgtgacgtagtgcggatgacacgtggagtcaggtgctagagtccacacgacagcgatcgtatcgtactgcagaagatctcaaccctatgtcgatgtatgagcatgttgtaagttgtaaccgttgtgtgaagtttcactatgttaaatattactttgtgtgcgcacaataatgg

SEQ ID NO: 14047 - protein, 305 aa, Triticum aestivum
  peptide (1)..(305): Ceres Seq. ID no. 13597246
  misc_feature (31)..(178): Pfam Name: Pfam Description:  Dehydrin
  misc_feature (119)..(305): NCBI GI NO: 6017946 NR Description: dehydrin; DHN10 [Hordeum vulgare]
  misc_feature (119)..(305): NCBI GI NO: 4105119 NR Description: dehydrin 10 [Hordeum vulgare]
  misc_feature (31)..(288): NCBI GI NO: 6017946 NR Description: dehydrin; DHN10 [Hordeum vulgare]
  misc_feature (31)..(288): NCBI GI NO: 4105119 NR Description: dehydrin 10 [Hordeum vulgare]
  misc_feature (30)..(305): NCBI GI NO: 7489666 NR Description: COR39 protein - wheat
  misc_feature (31)..(257): NCBI GI NO: 4105109 NR Description: dehydrin 4 [Hordeum vulgare]
  misc_feature (31)..(196): NCBI GI NO: 4105113 NR Description: dehydrin 7 [Hordeum vulgare]
  misc_feature (52)..(288): NCBI GI NO: 1169099 NR Description: COLD-SHOCK PROTEIN CS120
  misc_feature (31)..(230): NCBI GI NO: 118489 NR Description: DEHYDRIN DHN4 (B18)
  misc_feature (31)..(196): NCBI GI NO: 6017932 NR Description: dehydrin; DHN3 [Hordeum vulgare]
ASLATNNSLAFGDRPIAICHSSSTTSATGKMEFQGQQGNRVDQHGNPVAAAPGATAVTGAPAGGQLQPGREEHKTRGILHRSSSSSSSSSEDDGMGGRRKKGIKEKIKDKLPGARKQTYGQPAAPAGMTGTGATGGPYYVQPAPAGTGAHGTTATTGTYGQPAPAGMTGTGAHGTTATGEKKGMKDKIMEKLPGGHKNEQHTMPTAGAYGQPGMTGTGVHGNTAPGGGYGGQPGHAGMIGTGTHGSGTTGGPYDHQGHPGVTGTGAHGTTATGGAYNQQGHAGVTGTGEKKGIMGKIKEKLPGQH

SEQ ID NO: 14048 - protein, 275 aa, Triticum aestivum
  peptide (1)..(275): Ceres Seq. ID no. 13597247
  misc_feature (1)..(148): Pfam Name: Pfam Description:  Dehydrin
  misc_feature (89)..(275): NCBI GI NO: 6017946 NR Description: dehydrin; DHN10 [Hordeum vulgare]
  misc_feature (89)..(275): NCBI GI NO: 4105119 NR Description: dehydrin 10 [Hordeum vulgare]
  misc_feature (1)..(258): NCBI GI NO: 6017946 NR Description: dehydrin; DHN10 [Hordeum vulgare]
  misc_feature (1)..(258): NCBI GI NO: 4105119 NR Description: dehydrin 10 [Hordeum vulgare]
  misc_feature (1)..(275): NCBI GI NO: 7489666 NR Description: COR39 protein - wheat
  misc_feature (1)..(227): NCBI GI NO: 4105109 NR Description: dehydrin 4 [Hordeum vulgare]
  misc_feature (1)..(166): NCBI GI NO: 4105113 NR Description: dehydrin 7 [Hordeum vulgare]
  misc_feature (22)..(258): NCBI GI NO: 1169099 NR Description: COLD-SHOCK PROTEIN CS120
  misc_feature (1)..(200): NCBI GI NO: 118489 NR Description: DEHYDRIN DHN4 (B18)
  misc_feature (1)..(166): NCBI GI NO: 6017932 NR Description: dehydrin; DHN3 [Hordeum vulgare]
MEFQGQQGNRVDQHGNPVAAAPGATAVTGAPAGGQLQPGREEHKTRGILHRSSSSSSSSSEDDGMGGRRKKGIKEKIKDKLPGARKQTYGQPAAPAGMTGTGATGGPYYVQPAPAGTGAHGTTATTGTYGQPAPAGMTGTGAHGTTATGEKKGMKDKIMEKLPGGHKNEQHTMPTAGAYGQPGMTGTGVHGNTAPGGGYGGQPGHAGMIGTGTHGSGTTGGPYDHQGHPGVTGTGAHGTTATGGAYNQQGHAGVTGTGEKKGIMGKIKEKLPGQH

SEQ ID NO: 14049 - protein, 211 aa, Triticum aestivum
  peptide (1)..(211): Ceres Seq. ID no. 13597248
  misc_feature (1)..(84): Pfam Name: Pfam Description:  Dehydrin
  misc_feature (25)..(211): NCBI GI NO: 6017946 NR Description: dehydrin; DHN10 [Hordeum vulgare]
  misc_feature (25)..(211): NCBI GI NO: 4105119 NR Description: dehydrin 10 [Hordeum vulgare]
  misc_feature (1)..(194): NCBI GI NO: 6017946 NR Description: dehydrin; DHN10 [Hordeum vulgare]
  misc_feature (1)..(194): NCBI GI NO: 4105119 NR Description: dehydrin 10 [Hordeum vulgare]
  misc_feature (1)..(211): NCBI GI NO: 7489666 NR Description: COR39 protein - wheat
  misc_feature (1)..(163): NCBI GI NO: 4105109 NR Description: dehydrin 4 [Hordeum vulgare]
  misc_feature (1)..(102): NCBI GI NO: 4105113 NR Description: dehydrin 7 [Hordeum vulgare]
  misc_feature (1)..(194): NCBI GI NO: 1169099 NR Description: COLD-SHOCK PROTEIN CS120
  misc_feature (1)..(136): NCBI GI NO: 118489 NR Description: DEHYDRIN DHN4 (B18)
  misc_feature (1)..(102): NCBI GI NO: 6017932 NR Description: dehydrin; DHN3 [Hordeum vulgare]
MGGRRKKGIKEKIKDKLPGARKQTYGQPAAPAGMTGTGATGGPYYVQPAPAGTGAHGTTATTGTYGQPAPAGMTGTGAHGTTATGEKKGMKDKIMEKLPGGHKNEQHTMPTAGAYGQPGMTGTGVHGNTAPGGGYGGQPGHAGMIGTGTHGSGTTGGPYDHQGHPGVTGTGAHGTTATGGAYNQQGHAGVTGTGEKKGIMGKIKEKLPGQH

SEQ ID NO: 14050 - DNA, 1244 bp, Triticum aestivum
  misc_feature (1)..(1244): Ceres Seq. ID no. 13597255
gggaagagaggagcggacagaaaagcctggaaagccaaaaaagaaatcaccaacgcaaaggggaaaggagagagaggcgaggcgaggctagggtttcgtccaattccgccatggattccggcgacgcgtggggccgctcctcctccacctcctccgccgccgccgccgccgcgaggcgcctgcagtcccgctacgatctgtacatggggttcgacgacgcggacgccggcggggacgaggtggaggcgcgcggggcggaggcatacaactgccccttttgcggcgaggactttgacttcgtcgggctctgctgccacatcgacgacgagcacgccgtcgaggccaagagcggggtatgccccatctgtgctacaagggttggggcggacttgataggccacctgacaatgcagcatggaagttacttcaagatgcaacgcaggcgcagagtccgaaaagtatcttctgggtcccattctttgctgtctttgttgagaaaggatttaagagacggcagtttgcagtcctttcttggtggatcatcctatgtatctaatcctcctgctgccgcccctgatccatttttgcaatctttaatttgtagtttgcctgtggctgaaccatcgaaagattttcgttcagagtcatctgacaaaacatttttgctaaataaattcccagatgaaaagatcgtagagagagctgaaacatctctgtctgataaggatcagaaggagcgggctcaaaggagtgcatttgcccgtgggcttgtgctttccacaatatttgatgatgataccatgtaagggaaatcgactttgagagtggttgcatgacatagtcaagggcactcaacacaagagaatttatctagagcaatgcaaccttgtcatgcagccactgccgctcacaggcgttaacgaccaaccggaggtccatccagttatgaatgtatatgtatttatgtatgccttgccgagagcgcatcatgagaatagtggaggaaggccttgtgttgcagctttccacatggaataaggggatactatccttagtggcattgtgcatatacaaaagaggggcgagctactcgtcatgtattagattatattctgttcatcaatgtaataagtgtgttgtaaactcatctcatccttagtatgtgagattgctttgatgttttctgtatatattcgattgtggtacatttgacatttgaggaaagggaatggagtgaatttaac

SEQ ID NO: 14051 - protein, 267 aa, Triticum aestivum
  peptide (1)..(267): Ceres Seq. ID no. 13597256
  misc_feature (50)..(261): Pfam Name: Di19 Pfam Description: Drought induced 19 protein
  misc_feature (37)..(264): NCBI GI NO: 25992529 NR Description: fiber protein Fb2 [Gossypium barbadense]
  misc_feature (37)..(265): NCBI GI NO: 18377875 NR Description: AT3g06760/F3E22_10 [Arabidopsis thaliana]
  misc_feature (46)..(264): NCBI GI NO: 28393233 NR Description: unknown protein [Arabidopsis thaliana]
  misc_feature (60)..(264): NCBI GI NO: 15028023 NR Description: unknown protein [Arabidopsis thaliana]
  misc_feature (60)..(264): NCBI GI NO: 1076316 NR Description: drought-induced protein Di19
  misc_feature (37)..(264): NCBI GI NO: 13937216 NR Description: AT5g49230/K21P3_11 [Arabidopsis thaliana]
  misc_feature (37)..(264): NCBI GI NO: 15239827 NR Description: drought-induced protein -related
  misc_feature (46)..(264): NCBI GI NO: 15240426 NR Description: drought-induced protein -related
  misc_feature (37)..(265): NCBI GI NO: 15230782 NR Description: drought-induced protein -related
  misc_feature (60)..(264): NCBI GI NO: 30696095 NR Description: drought-induced protein -related
EERSGQKSLESQKRNHQRKGERRERRGEARVSSNSAMDSGDAWGRSSSTSSAAAAAARRLQSRYDLYMGFDDADAGGDEVEARGAEAYNCPFCGEDFDFVGLCCHIDDEHAVEAKSGVCPICATRVGADLIGHLTMQHGSYFKMQRRRRVRKVSSGSHSLLSLLRKDLRDGSLQSFLGGSSYVSNPPAAAPDPFLQSLICSLPVAEPSKDFRSESSDKTFLLNKFPDEKIVERAETSLSDKDQKERAQRSAFARGLVLSTIFDDDTM

SEQ ID NO: 14052 - protein, 231 aa, Triticum aestivum
  peptide (1)..(231): Ceres Seq. ID no. 13597257
  misc_feature (14)..(225): Pfam Name: Di19 Pfam Description: Drought induced 19 protein
  misc_feature (1)..(228): NCBI GI NO: 25992529 NR Description: fiber protein Fb2 [Gossypium barbadense]
  misc_feature (1)..(229): NCBI GI NO: 18377875 NR Description: AT3g06760/F3E22_10 [Arabidopsis thaliana]
  misc_feature (10)..(228): NCBI GI NO: 28393233 NR Description: unknown protein [Arabidopsis thaliana]
  misc_feature (24)..(228): NCBI GI NO: 15028023 NR Description: unknown protein [Arabidopsis thaliana]
  misc_feature (24)..(228): NCBI GI NO: 1076316 NR Description: drought-induced protein Di19
  misc_feature (1)..(228): NCBI GI NO: 13937216 NR Description: AT5g49230/K21P3_11 [Arabidopsis thaliana]
  misc_feature (1)..(228): NCBI GI NO: 15239827 NR Description: drought-induced protein -related
  misc_feature (10)..(228): NCBI GI NO: 15240426 NR Description: drought-induced protein -related
  misc_feature (1)..(229): NCBI GI NO: 15230782 NR Description: drought-induced protein -related
  misc_feature (24)..(228): NCBI GI NO: 30696095 NR Description: drought-induced protein -related
MDSGDAWGRSSSTSSAAAAAARRLQSRYDLYMGFDDADAGGDEVEARGAEAYNCPFCGEDFDFVGLCCHIDDEHAVEAKSGVCPICATRVGADLIGHLTMQHGSYFKMQRRRRVRKVSSGSHSLLSLLRKDLRDGSLQSFLGGSSYVSNPPAAAPDPFLQSLICSLPVAEPSKDFRSESSDKTFLLNKFPDEKIVERAETSLSDKDQKERAQRSAFARGLVLSTIFDDDTM

SEQ ID NO: 14053 - protein, 200 aa, Triticum aestivum
  peptide (1)..(200): Ceres Seq. ID no. 13597258
  misc_feature (1)..(194): Pfam Name: Di19 Pfam Description: Drought induced 19 protein
  misc_feature (1)..(197): NCBI GI NO: 25992529 NR Description: fiber protein Fb2 [Gossypium barbadense]
  misc_feature (1)..(198): NCBI GI NO: 18377875 NR Description: AT3g06760/F3E22_10 [Arabidopsis thaliana]
  misc_feature (1)..(197): NCBI GI NO: 28393233 NR Description: unknown protein [Arabidopsis thaliana]
  misc_feature (1)..(197): NCBI GI NO: 15028023 NR Description: unknown protein [Arabidopsis thaliana]
  misc_feature (1)..(197): NCBI GI NO: 1076316 NR Description: drought-induced protein Di19
  misc_feature (1)..(197): NCBI GI NO: 13937216 NR Description: AT5g49230/K21P3_11 [Arabidopsis thaliana]
  misc_feature (1)..(197): NCBI GI NO: 15239827 NR Description: drought-induced protein -related
  misc_feature (1)..(197): NCBI GI NO: 15240426 NR Description: drought-induced protein -related
  misc_feature (1)..(198): NCBI GI NO: 15230782 NR Description: drought-induced protein -related
  misc_feature (1)..(197): NCBI GI NO: 30696095 NR Description: drought-induced protein -related
MGFDDADAGGDEVEARGAEAYNCPFCGEDFDFVGLCCHIDDEHAVEAKSGVCPICATRVGADLIGHLTMQHGSYFKMQRRRRVRKVSSGSHSLLSLLRKDLRDGSLQSFLGGSSYVSNPPAAAPDPFLQSLICSLPVAEPSKDFRSESSDKTFLLNKFPDEKIVERAETSLSDKDQKERAQRSAFARGLVLSTIFDDDTM

SEQ ID NO: 14054 - DNA, 1563 bp, Triticum aestivum
  misc_feature (1)..(1563): Ceres Seq. ID no. 13590241
aggacaccgcggacggagagcgtcaggtcctcccccgctccgctcatcttgggaaggaagcaaagcagagccgcgccgccgaggaggatatggccgaggccgacgacgccgccgccgcccgccggcgcacggtcatcacggagtaccgcaacaagctcctgaactgccgcgagctggagacgagggtccgcacaggtagggaaaacctaaagaaggcgaagaaagattacgatataactgaagatgatttgaagtccttgcagagtgtgggccaaatcattggtgaagtacttcgaccattggacagtgaaagatttatcgtcaaagccagtagtggcccacgttatgtggttggctgcagaagcaaagttgacaaagaaaagctgacagctgcaacacgagttgtccttgacatgacaacattaacaataatgcgcactctaccacgtgaggttgatcccgtggtctataacatgctacacgaagaccccggcaatgtcagttactcagctgtaggtggactgtcggatcaaataagggagctgcgggagtccatcgagttacctcttatgaatccagaattgtttcttcgtgttgggattaaaccaccaaagggcgttctgctctatggcccacctggaacgggaaagacattgcttgctagagccattgctagcaacatcgatgctaactttttaaagattgtttcaagtgctatcattgacaaatatattggtgaaagtgcacgtcttataagagaaatgtttaactatgcacgtgagcatcaaccatgtattattttcatggatgagattgatgccattggtggccgaagattcagtgagggcactagtgcagatcgtgaaatacaacggacattgatggagctcctaaatcagttggatggattcgatgagctcggaaaggtgaagatgatcatggcgacgaaccggcctgatgtcttggaccctgcgctccttcgtcctggacgcctagaccggaagatagagattccgctgccgaatgagcaatccaggacggaggtcctgaaaatccatgcagctggtatcgccaagcatggcgaaattgattacgaggctgtggttaagctggccgagggcttcaatggcgctgatcttcgcaatgtctgcactgaggctggcatggccgccattcgagcagagcgtgactacgtcatccacgaagacttcatgaaggcagttcggaagttgaatgacgccaagaagctcgagtccagcgcacactacagcgccgactttggcaaggactaagatgagagtaggagactatcaggcgacgcgctgtctgttttcttgtaccatggcggagtttgtcacaccgaccccgacgatatagaacatcatgtgtttctaccttttatatgttgtgggacgactgcctttgccgcgcaagttgatgtaatgaaaagttgaaacaggtctgaaaccgactggtttcttagatttacaaaattgtttccttcaagttactgtgccttgattgtggaatcaaaaaaatgtggaaacattcgcgatttcttcc

SEQ ID NO: 14055 - protein, 429 aa, Triticum aestivum
  peptide (1)..(429): Ceres Seq. ID no. 13590242
  misc_feature (205)..(392): Pfam Name: AAA Pfam Description: ATPase family associated with various cellular activities
  misc_feature (30)..(429): NCBI GI NO: 11094192 NR Description: 26S proteasome regulatory particle triple-A ATPase subunit4
  misc_feature (30)..(429): NCBI GI NO: 15219503 NR Description: 26S proteasome regulatory particle triple-A ATPase subunit4 -related
  misc_feature (30)..(429): NCBI GI NO: 24745880 NR Description: 26S proteasome AAA-ATPase subunit RPT4a
  misc_feature (53)..(429): NCBI GI NO: 17298147 NR Description: 26S proteasome regulatory particle triple-A ATPase subunit4b
  misc_feature (30)..(429): NCBI GI NO: 15239140 NR Description: 26S proteasome AAA-ATPase subunit RPT4a
  misc_feature (41)..(422): NCBI GI NO: 24640100 NR Description: CG3455-PA [Drosophila melanogaster]
  misc_feature (41)..(422): NCBI GI NO: 17945503 NR Description: RE23388p [Drosophila melanogaster]
  misc_feature (41)..(422): NCBI GI NO: 6434958 NR Description: 26S proteasome regulatory complex subunit p42D
  misc_feature (30)..(422): NCBI GI NO: 2960216 NR Description: 26S proteasome regulatory ATPase subunit 10b
  misc_feature (27)..(422): NCBI GI NO: 6324833 NR Description: Proteasome Cap Subunit; Rpt4p
DTADGERQVLPRSAHLGKEAKQSRAAEEDMAEADDAAAARRRTVITEYRNKLLNCRELETRVRTGRENLKKAKKDYDITEDDLKSLQSVGQIIGEVLRPLDSERFIVKASSGPRYVVGCRSKVDKEKLTAATRVVLDMTTLTIMRTLPREVDPVVYNMLHEDPGNVSYSAVGGLSDQIRELRESIELPLMNPELFLRVGIKPPKGVLLYGPPGTGKTLLARAIASNIDANFLKIVSSAIIDKYIGESARLIREMFNYAREHQPCIIFMDEIDAIGGRRFSEGTSADREIQRTLMELLNQLDGFDELGKVKMIMATNRPDVLDPALLRPGRLDRKIEIPLPNEQSRTEVLKIHAAGIAKHGEIDYEAVVKLAEGFNGADLRNVCTEAGMAAIRAERDYVIHEDFMKAVRKLNDAKKLESSAHYSADFGKD

SEQ ID NO: 14056 - protein, 400 aa, Triticum aestivum
  peptide (1)..(400): Ceres Seq. ID no. 13590243
  misc_feature (176)..(363): Pfam Name: AAA Pfam Description: ATPase family associated with various cellular activities
  misc_feature (1)..(400): NCBI GI NO: 11094192 NR Description: 26S proteasome regulatory particle triple-A ATPase subunit4
  misc_feature (1)..(400): NCBI GI NO: 15219503 NR Description: 26S proteasome regulatory particle triple-A ATPase subunit4 -related
  misc_feature (1)..(400): NCBI GI NO: 24745880 NR Description: 26S proteasome AAA-ATPase subunit RPT4a
  misc_feature (24)..(400): NCBI GI NO: 17298147 NR Description: 26S proteasome regulatory particle triple-A ATPase subunit4b
  misc_feature (1)..(400): NCBI GI NO: 15239140 NR Description: 26S proteasome AAA-ATPase subunit RPT4a
  misc_feature (12)..(393): NCBI GI NO: 24640100 NR Description: CG3455-PA [Drosophila melanogaster]
  misc_feature (12)..(393): NCBI GI NO: 17945503 NR Description: RE23388p [Drosophila melanogaster]
  misc_feature (12)..(393): NCBI GI NO: 6434958 NR Description: 26S proteasome regulatory complex subunit p42D
  misc_feature (1)..(393): NCBI GI NO: 2960216 NR Description: 26S proteasome regulatory ATPase subunit 10b
  misc_feature (1)..(393): NCBI GI NO: 6324833 NR Description: Proteasome Cap Subunit; Rpt4p
MAEADDAAAARRRTVITEYRNKLLNCRELETRVRTGRENLKKAKKDYDITEDDLKSLQSVGQIIGEVLRPLDSERFIVKASSGPRYVVGCRSKVDKEKLTAATRVVLDMTTLTIMRTLPREVDPVVYNMLHEDPGNVSYSAVGGLSDQIRELRESIELPLMNPELFLRVGIKPPKGVLLYGPPGTGKTLLARAIASNIDANFLKIVSSAIIDKYIGESARLIREMFNYAREHQPCIIFMDEIDAIGGRRFSEGTSADREIQRTLMELLNQLDGFDELGKVKMIMATNRPDVLDPALLRPGRLDRKIEIPLPNEQSRTEVLKIHAAGIAKHGEIDYEAVVKLAEGFNGADLRNVCTEAGMAAIRAERDYVIHEDFMKAVRKLNDAKKLESSAHYSADFGKD

SEQ ID NO: 14057 - protein, 292 aa, Triticum aestivum
  peptide (1)..(292): Ceres Seq. ID no. 13590244
  misc_feature (68)..(255): Pfam Name: AAA Pfam Description: ATPase family associated with various cellular activities
  misc_feature (1)..(292): NCBI GI NO: 11094192 NR Description: 26S proteasome regulatory particle triple-A ATPase subunit4
  misc_feature (1)..(292): NCBI GI NO: 15219503 NR Description: 26S proteasome regulatory particle triple-A ATPase subunit4 -related
  misc_feature (1)..(292): NCBI GI NO: 24745880 NR Description: 26S proteasome AAA-ATPase subunit RPT4a
  misc_feature (1)..(292): NCBI GI NO: 17298147 NR Description: 26S proteasome regulatory particle triple-A ATPase subunit4b
  misc_feature (1)..(292): NCBI GI NO: 15239140 NR Description: 26S proteasome AAA-ATPase subunit RPT4a
  misc_feature (1)..(285): NCBI GI NO: 24640100 NR Description: CG3455-PA [Drosophila melanogaster]
  misc_feature (1)..(285): NCBI GI NO: 17945503 NR Description: RE23388p [Drosophila melanogaster]
  misc_feature (1)..(285): NCBI GI NO: 6434958 NR Description: 26S proteasome regulatory complex subunit p42D
  misc_feature (1)..(285): NCBI GI NO: 2960216 NR Description: 26S proteasome regulatory ATPase subunit 10b
  misc_feature (1)..(285): NCBI GI NO: 6324833 NR Description: Proteasome Cap Subunit; Rpt4p
MTTLTIMRTLPREVDPVVYNMLHEDPGNVSYSAVGGLSDQIRELRESIELPLMNPELFLRVGIKPPKGVLLYGPPGTGKTLLARAIASNIDANFLKIVSSAIIDKYIGESARLIREMFNYAREHQPCIIFMDEIDAIGGRRFSEGTSADREIQRTLMELLNQLDGFDELGKVKMIMATNRPDVLDPALLRPGRLDRKIEIPLPNEQSRTEVLKIHAAGIAKHGEIDYEAVVKLAEGFNGADLRNVCTEAGMAAIRAERDYVIHEDFMKAVRKLNDAKKLESSAHYSADFGKD

SEQ ID NO: 14058 - DNA, 1108 bp, Triticum aestivum
  misc_feature (1)..(1108): Ceres Seq. ID no. 13598492
aatcgaaaaatcgaccccagccacagccagatccgagagcagcagctactagctagtgagcatggcgtccaacaccgcacccgacgacaacgaggtggcgcacgactacggcctcgtccgcgtctacaagagcggccgcgtcgagcgccccctggtggctccgccagcggcggccggcctcgatcccgccaccggcgtcgagtccaaggacgtccagctcggcgactactccgcccgcctctacctgcccccggccgcgtccacggccacagacaagttccctgtcatcgtctacgtccacgggggcggcttcgtggccgagtccgtcgcgtcccccaacggccaccgcttcctcaacagcctcaccgccgcctgccctgccctcgccgtctccgtcgagtaccgcctcgccccggagcacccgctccccgcggcctacgaggactgcgtcgctgccctcacgtgggtgctctcggccgccgacccgtgggtcgccgagcacggcgacctgggccgcgtcttcgtggccggggacagcgccggggccaacgcctgccaccacctcgtcattcagccgggcgccgtgcgcctcaagggcgcggtgctgatccacccctggttctggggttccgaggccgtcggcgaggagacgcgcaaccccgcgtggcgcgccatgggcgggcggctgtgggagttcgcgtgccccggctcgagcggcgtcgacgacgcgcggatgaacccgatggcgcccggcgcgccggggctggaaacgctcgcgtgcgagagggtcatggtgtgcgtcgcggagggcgacttcctcaggtggcgcggccgcgcgtacgcggaggccgtggccgcggcgaggggcggcgaggggcagggcgtcgagctgctggagacggagggggtggggcacgtcttccacctcttcaagcccgactgcgacaaagccaaggagatgttcgacaggatagtcgccttcgttaacgcgccgtgatgctcgtgtggatgtgcccgcttattatcaggccggcagctttgtgtgtcgcgggggcgccacctactgaaataaatggattgcgataaatgatgaaataaatttggttgg

SEQ ID NO: 14059 - protein, 328 aa, Triticum aestivum
  peptide (1)..(328): Ceres Seq. ID no. 13598493
  misc_feature (47)..(323): NCBI GI NO: 23105183 NR Description: hypothetical protein [Azotobacter vinelandii]
  misc_feature (6)..(324): NCBI GI NO: 23018055 NR Description: hypothetical protein [Thermobifida fusca]
  misc_feature (31)..(290): NCBI GI NO: 29247944 NR Description: GLP_26_54603_52153 [Giardia lamblia ATCC 50803]
  misc_feature (29)..(270): NCBI GI NO: 29247944 NR Description: GLP_26_54603_52153 [Giardia lamblia ATCC 50803]
  misc_feature (28)..(278): NCBI GI NO: 23018055 NR Description: hypothetical protein [Thermobifida fusca]
  misc_feature (156)..(328): NCBI GI NO: 34911756 NR Description: P0038D11.21
NRKIDPSHSQIREQQLLASEHGVQHRTRRQRGGARLRPRPRLQERPRRAPPGGSASGGRPRSRHRRRVQGRPARRLLRPPLPAPGRVHGHRQVPCHRLRPRGRLRGRVRRVPQRPPLPQQPHRRLPCPRRLRRVPPRPGAPAPRGLRGLRRCPHVGALGRRPVGRRARRPGPRLRGRGQRRGQRLPPPRHSAGRRAPQGRGADPPLVLGFRGRRRGDAQPRVARHGRAAVGVRVPRLERRRRRADEPDGARRAGAGNARVREGHGVRRGGRLPQVARPRVRGGRGRGEGRRGAGRRAAGDGGGGARLPPLQARLRQSQGDVRQDSRLR

SEQ ID NO: 14060 - protein, 311 aa, Triticum aestivum
  peptide (1)..(311): Ceres Seq. ID no. 13598494
  misc_feature (60)..(115): Pfam Name: Pfam Description:  Carboxylesterase
  misc_feature (3)..(310): NCBI GI NO: 38344841 NR Description: OSJNBa0064H22.22
  misc_feature (21)..(309): NCBI GI NO: 21536771 NR Description: unknown [Arabidopsis thaliana]
  misc_feature (21)..(309): NCBI GI NO: 18401743 NR Description: expressed protein [Arabidopsis thaliana]
  misc_feature (10)..(311): NCBI GI NO: 34393904 NR Description: putative cell death associated protein
  misc_feature (9)..(308): NCBI GI NO: 18086341 NR Description: AT3g48690/T8P19_200 [Arabidopsis thaliana]
  misc_feature (9)..(308): NCBI GI NO: 15228425 NR Description: expressed protein [Arabidopsis thaliana]
  misc_feature (9)..(308): NCBI GI NO: 15228426 NR Description: expressed protein [Arabidopsis thaliana]
  misc_feature (9)..(309): NCBI GI NO: 15227669 NR Description: expressed protein [Arabidopsis thaliana]
  misc_feature (1)..(311): NCBI GI NO: 34393975 NR Description: putative PrMC3
  misc_feature (12)..(309): NCBI GI NO: 28393060 NR Description: putative esterase [Arabidopsis thaliana]
MASNTAPDDNEVAHDYGLVRVYKSGRVERPLVAPPAAAGLDPATGVESKDVQLGDYSARLYLPPAASTATDKFPVIVYVHGGGFVAESVASPNGHRFLNSLTAACPALAVSVEYRLAPEHPLPAAYEDCVAALTWVLSAADPWVAEHGDLGRVFVAGDSAGANACHHLVIQPGAVRLKGAVLIHPWFWGSEAVGEETRNPAWRAMGGRLWEFACPGSSGVDDARMNPMAPGAPGLETLACERVMVCVAEGDFLRWRGRAYAEAVAAARGGEGQGVELLETEGVGHVFHLFKPDCDKAKEMFDRIVAFVNAP

SEQ ID NO: 14061 - DNA, 1458 bp, Triticum aestivum
  misc_feature (1)..(1458): Ceres Seq. ID no. 13597260
agcgaatcgggcggaaacacaacgacgcagtcacgcaccggctctttcctccacccctcgtagggctagctagggtttctccgcccaaatcgtgtaataataacccacttgaagattcgcgcgaaagctgcggcgatggccaccaccgtccaaccccactccccggacccaacagccatcaccaccacccctgcccctccccctcctccttctccacctcgccaggagaacccgaccgccgcgggggaaggcgtagagatcgcggcgctcgatgagcagcctgccgccgtcgccgtcgccgacaaggggaatacggcccccggcggcgggaagctggtggcggaggccatgcgcaagtgcgcggcgccccggtcgtcgcgctaccacggcgtgacgaggctcaagtggagcggcaagtacgaggcacacctctgggacaacaccagccaggttgaggggcgcaagcgcaagggcaagcatgtgtacttgggaagctatgttactgaagagaatgctgcaagggcacatgaccttgcagccctgaaatattggggcataactcaacccaccaaactaaacttcaatatttctgattatgcaaaagaaattgagatcatgaagagcatgaatcaagatgaatttgtggcctacataaggaggcagagtagttgtttctcaagaggaacatcgtcatacaggggtgtaacaagacgaaaggatggtaaatggcaagcacgtattggtaggattggtgagagtagagacactaaagacatctatcttgggacctttgaaactgaagtggaggcagctgaagcgtatgacctagcagcaattcagctccgtggtgttcatgctgtgaccaactttgatatcagcaactactccgaagaaggtttgaagaaactagaaggctcatctgaggtagtgaacctggaggaccaatcagaagtcactaagttagctgtgaccaacttggatattagcaaacactgcgaagatggtttgaagaaactagatggcgcatcccaggtagtgaacctggagggccaatcagaagtcaccaagttatctgtgactaactttgatattagcaactgctgtgaagatggtttgaagaaactagaaggctcatccgaggtagcgaacctggaggaccaatcagaagtcacaaagttagctggacaatagatattagaatagcaacatgtaaattatttatttcttcctttttatcttttctctgatcgtcaatctctccacctttctcttttcttgattgatgatgagagtgtcttttcttcgtctgcctttcctgaaacttttttttcccaaggaatttcccttcgctggttgccaactctattatttaccagctccagagtaggatcgtgtgatgctgtactctgtattctcatgtacactgattacaaaccattgatagtatttgtagacatt

SEQ ID NO: 14062 - protein, 351 aa, Triticum aestivum
  peptide (1)..(351): Ceres Seq. ID no. 13597261
  misc_feature (80)..(154): Pfam Name: Pfam Description:  AP2 domain
  misc_feature (1)..(277): NCBI GI NO: 40253775 NR Description: ovule development protein aintegumenta (ANT)-like
  misc_feature (13)..(190): NCBI GI NO: 40644766 NR Description: putative AP2-like protein [Triticum aestivum]
  misc_feature (79)..(253): NCBI GI NO: 38492172 NR Description: ANT-like protein [Nicotiana tabacum]
  misc_feature (79)..(272): NCBI GI NO: 15218529 NR Description: ovule development protein, putative
  misc_feature (23)..(262): NCBI GI NO: 21069051 NR Description: AP2/EREBP transcription factor BABY BOOM1
  misc_feature (79)..(293): NCBI GI NO: 1171429 NR Description: CKC
  misc_feature (79)..(293): NCBI GI NO: 15235690 NR Description: ovule development protein aintegumenta (ANT)
  misc_feature (50)..(250): NCBI GI NO: 28201307 NR Description: putative ovule development protein antitegumenta
  misc_feature (79)..(280): NCBI GI NO: 21069057 NR Description: BABY BOOM [Arabidopsis thaliana]
  misc_feature (79)..(262): NCBI GI NO: 21069053 NR Description: AP2/EREBP transcription factor BABY BOOM2
MATTVQPHSPDPTAITTTPAPPPPPSPPRQENPTAAGEGVEIAALDEQPAAVAVADKGNTAPGGGKLVAEAMRKCAAPRSSRYHGVTRLKWSGKYEAHLWDNTSQVEGRKRKGKHVYLGSYVTEENAARAHDLAALKYWGITQPTKLNFNISDYAKEIEIMKSMNQDEFVAYIRRQSSCFSRGTSSYRGVTRRKDGKWQARIGRIGESRDTKDIYLGTFETEVEAAEAYDLAAIQLRGVHAVTNFDISNYSEEGLKKLEGSSEVVNLEDQSEVTKLAVTNLDISKHCEDGLKKLDGASQVVNLEGQSEVTKLSVTNFDISNCCEDGLKKLEGSSEVANLEDQSEVTKLAGQ

SEQ ID NO: 14063 - protein, 280 aa, Triticum aestivum
  peptide (1)..(280): Ceres Seq. ID no. 13597262
  misc_feature (9)..(83): Pfam Name: Pfam Description:  AP2 domain
  misc_feature (1)..(206): NCBI GI NO: 40253775 NR Description: ovule development protein aintegumenta (ANT)-like
  misc_feature (1)..(119): NCBI GI NO: 40644766 NR Description: putative AP2-like protein [Triticum aestivum]
  misc_feature (8)..(182): NCBI GI NO: 38492172 NR Description: ANT-like protein [Nicotiana tabacum]
  misc_feature (8)..(201): NCBI GI NO: 15218529 NR Description: ovule development protein, putative
  misc_feature (1)..(191): NCBI GI NO: 21069051 NR Description: AP2/EREBP transcription factor BABY BOOM1
  misc_feature (8)..(222): NCBI GI NO: 1171429 NR Description: CKC
  misc_feature (8)..(222): NCBI GI NO: 15235690 NR Description: ovule development protein aintegumenta (ANT)
  misc_feature (1)..(179): NCBI GI NO: 28201307 NR Description: putative ovule development protein antitegumenta
  misc_feature (8)..(209): NCBI GI NO: 21069057 NR Description: BABY BOOM [Arabidopsis thaliana]
  misc_feature (8)..(191): NCBI GI NO: 21069053 NR Description: AP2/EREBP transcription factor BABY BOOM2
MRKCAAPRSSRYHGVTRLKWSGKYEAHLWDNTSQVEGRKRKGKHVYLGSYVTEENAARAHDLAALKYWGITQPTKLNFNISDYAKEIEIMKSMNQDEFVAYIRRQSSCFSRGTSSYRGVTRRKDGKWQARIGRIGESRDTKDIYLGTFETEVEAAEAYDLAAIQLRGVHAVTNFDISNYSEEGLKKLEGSSEVVNLEDQSEVTKLAVTNLDISKHCEDGLKKLDGASQVVNLEGQSEVTKLSVTNFDISNCCEDGLKKLEGSSEVANLEDQSEVTKLAGQ

SEQ ID NO: 14064 - protein, 191 aa, Triticum aestivum
  peptide (1)..(191): Ceres Seq. ID no. 13597263
  misc_feature (24)..(90): Pfam Name: Pfam Description:  AP2 domain
  misc_feature (1)..(117): NCBI GI NO: 40253775 NR Description: ovule development protein aintegumenta (ANT)-like
  misc_feature (1)..(30): NCBI GI NO: 40644766 NR Description: putative AP2-like protein [Triticum aestivum]
  misc_feature (1)..(93): NCBI GI NO: 38492172 NR Description: ANT-like protein [Nicotiana tabacum]
  misc_feature (1)..(112): NCBI GI NO: 15218529 NR Description: ovule development protein, putative
  misc_feature (1)..(102): NCBI GI NO: 21069051 NR Description: AP2/EREBP transcription factor BABY BOOM1
  misc_feature (1)..(133): NCBI GI NO: 1171429 NR Description: CKC
  misc_feature (1)..(133): NCBI GI NO: 15235690 NR Description: ovule development protein aintegumenta (ANT)
  misc_feature (1)..(90): NCBI GI NO: 28201307 NR Description: putative ovule development protein antitegumenta
  misc_feature (1)..(120): NCBI GI NO: 21069057 NR Description: BABY BOOM [Arabidopsis thaliana]
  misc_feature (1)..(102): NCBI GI NO: 21069053 NR Description: AP2/EREBP transcription factor BABY BOOM2
MKSMNQDEFVAYIRRQSSCFSRGTSSYRGVTRRKDGKWQARIGRIGESRDTKDIYLGTFETEVEAAEAYDLAAIQLRGVHAVTNFDISNYSEEGLKKLEGSSEVVNLEDQSEVTKLAVTNLDISKHCEDGLKKLDGASQVVNLEGQSEVTKLSVTNFDISNCCEDGLKKLEGSSEVANLEDQSEVTKLAGQ

SEQ ID NO: 14065 - DNA, 1412 bp, Triticum aestivum
  misc_feature (1)..(1412): Ceres Seq. ID no. 13585382
gaaaatcccccttccattcctcctcccctccttgtccccaccctctctctctctctctccctccgtctgtccgtccgcgcgcgctctgcgttcttggggagggaggaaatggcggcaaagcgcgagctggtggtcagcttcggggagatgctgatagacttcgtgccgacggtggccggggtgtcgctggcggaggcgccggccttcgtcaaggcgcccgggggcgcccccgccaacgtcgccatcgccgtcgcgcgcctcggcggcggggccgccttcgtcggcaagctcggcgacgacgagttcggccgcatgctcgccaaaatcctccgcgaaaacggcgtcgacgccggcggcgtcgtcttcgactcgggcgcgcgcaccgcgctcgccttcgtcacgctccgcgccgacggggagcgcgagttcatgttctaccgcaaccccagcgccgacatgctcctcaccgccgacgagctcaaggtcgacgtcatcaagagggctgcagtcttccactatggatcaataagcttgatcgccgagccttgccggacagcgcatctgcacgccatgaaggttgccaaagaggccggcgcgcttctctcgtatgacccgaacctgagggaggcattgtggccctcccttgaggaggctcgcaccaagatcttgagcatctgggaccaggcagacattgtcaaggtcagcgaggtcgagcttgagtttttgactggcatcaactcggtggaggatgatgttgccatgaagctgtggcgccctacctttaagctcatgcttgtcactcttggagatcaaggatgcaagtactataccaaggatttccgtggaactgtcccatcctacaaggtacagcaagttgatacgacaggtgctggtgatgcatttattggttctctgctccgaaaaattgtccaagatccatcggcattgcaagataaaacaaagcttgagggggcgatcaaatttgccaatgcatgtggagcaatcaccgccacgaagaaaggggcaatcccttcattgcccaaggaagacgaggtgttgcggctgatggagaaggcgtagacgcggcttatgatttccagtagcttcgaattctgcaaattgtattgtaagctgttctggatcaggagcaaggtgtactcctcccaggatgcccctgcctttttgtttgctcccctttacgaaagggtttttgttttggaattcttctcatctgaataagcagatccttcaatattactgtgtcatttctgtaccaagtccttgatggtagtgttcttttttccttgttctgtcatcttatttgggttccaactgtattgggaatttgtggtttagcccctgaggtggtttctgttctcaattttcgacaagtgaaacgcatgtacaacgcc

SEQ ID NO: 14066 - protein, 359 aa, Triticum aestivum
  peptide (1)..(359): Ceres Seq. ID no. 13585383
  misc_feature (42)..(349): Pfam Name: Pfam Description:  pfkB family carbohydrate kinase
  misc_feature (37)..(359): NCBI GI NO: 34907582 NR Description: putative fructokinase I
  misc_feature (43)..(358): NCBI GI NO: 15224669 NR Description: fructokinase, putative [Arabidopsis thaliana]
  misc_feature (43)..(358): NCBI GI NO: 14423528 NR Description: putative fructokinase [Arabidopsis thaliana]
  misc_feature (38)..(358): NCBI GI NO: 33329200 NR Description: putative fructokinase 2
  misc_feature (43)..(358): NCBI GI NO: 33329198 NR Description: putative fructokinase
  misc_feature (41)..(358): NCBI GI NO: 7434223 NR Description: fructokinase (EC 2.7.1.4) - beet
  misc_feature (40)..(359): NCBI GI NO: 15221364 NR Description: pfkB type carbohydrate kinase protein family
  misc_feature (40)..(357): NCBI GI NO: 21592495 NR Description: fructokinase-like protein [Arabidopsis thaliana]
  misc_feature (38)..(357): NCBI GI NO: 1915974 NR Description: fructokinase [Lycopersicon esculentum]
  misc_feature (38)..(357): NCBI GI NO: 32765547 NR Description: fructokinase 2 [Lycopersicon hirsutum]
ENPPSIPPPLLVPTLSLSLSLRLSVRARSAFLGREEMAAKRELVVSFGEMLIDFVPTVAGVSLAEAPAFVKAPGGAPANVAIAVARLGGGAAFVGKLGDDEFGRMLAKILRENGVDAGGVVFDSGARTALAFVTLRADGEREFMFYRNPSADMLLTADELKVDVIKRAAVFHYGSISLIAEPCRTAHLHAMKVAKEAGALLSYDPNLREALWPSLEEARTKILSIWDQADIVKVSEVELEFLTGINSVEDDVAMKLWRPTFKLMLVTLGDQGCKYYTKDFRGTVPSYKVQQVDTTGAGDAFIGSLLRKIVQDPSALQDKTKLEGAIKFANACGAITATKKGAIPSLPKEDEVLRLMEKA

SEQ ID NO: 14067 - protein, 323 aa, Triticum aestivum
  peptide (1)..(323): Ceres Seq. ID no. 13585384
  misc_feature (6)..(313): Pfam Name: Pfam Description:  pfkB family carbohydrate kinase
  misc_feature (1)..(323): NCBI GI NO: 34907582 NR Description: putative fructokinase I
  misc_feature (7)..(322): NCBI GI NO: 15224669 NR Description: fructokinase, putative [Arabidopsis thaliana]
  misc_feature (7)..(322): NCBI GI NO: 14423528 NR Description: putative fructokinase [Arabidopsis thaliana]
  misc_feature (2)..(322): NCBI GI NO: 33329200 NR Description: putative fructokinase 2
  misc_feature (7)..(322): NCBI GI NO: 33329198 NR Description: putative fructokinase
  misc_feature (5)..(322): NCBI GI NO: 7434223 NR Description: fructokinase (EC 2.7.1.4) - beet
  misc_feature (4)..(323): NCBI GI NO: 15221364 NR Description: pfkB type carbohydrate kinase protein family
  misc_feature (4)..(321): NCBI GI NO: 21592495 NR Description: fructokinase-like protein [Arabidopsis thaliana]
  misc_feature (2)..(321): NCBI GI NO: 1915974 NR Description: fructokinase [Lycopersicon esculentum]
  misc_feature (2)..(321): NCBI GI NO: 32765547 NR Description: fructokinase 2 [Lycopersicon hirsutum]
MAAKRELVVSFGEMLIDFVPTVAGVSLAEAPAFVKAPGGAPANVAIAVARLGGGAAFVGKLGDDEFGRMLAKILRENGVDAGGVVFDSGARTALAFVTLRADGEREFMFYRNPSADMLLTADELKVDVIKRAAVFHYGSISLIAEPCRTAHLHAMKVAKEAGALLSYDPNLREALWPSLEEARTKILSIWDQADIVKVSEVELEFLTGINSVEDDVAMKLWRPTFKLMLVTLGDQGCKYYTKDFRGTVPSYKVQQVDTTGAGDAFIGSLLRKIVQDPSALQDKTKLEGAIKFANACGAITATKKGAIPSLPKEDEVLRLMEKA

SEQ ID NO: 14068 - protein, 310 aa, Triticum aestivum
  peptide (1)..(310): Ceres Seq. ID no. 13585385
  misc_feature (1)..(300): Pfam Name: Pfam Description:  pfkB family carbohydrate kinase
  misc_feature (1)..(310): NCBI GI NO: 34907582 NR Description: putative fructokinase I
  misc_feature (1)..(309): NCBI GI NO: 15224669 NR Description: fructokinase, putative [Arabidopsis thaliana]
  misc_feature (1)..(309): NCBI GI NO: 14423528 NR Description: putative fructokinase [Arabidopsis thaliana]
  misc_feature (1)..(309): NCBI GI NO: 33329200 NR Description: putative fructokinase 2
  misc_feature (1)..(309): NCBI GI NO: 33329198 NR Description: putative fructokinase
  misc_feature (1)..(309): NCBI GI NO: 7434223 NR Description: fructokinase (EC 2.7.1.4) - beet
  misc_feature (1)..(310): NCBI GI NO: 15221364 NR Description: pfkB type carbohydrate kinase protein family
  misc_feature (1)..(308): NCBI GI NO: 21592495 NR Description: fructokinase-like protein [Arabidopsis thaliana]
  misc_feature (1)..(308): NCBI GI NO: 1915974 NR Description: fructokinase [Lycopersicon esculentum]
  misc_feature (1)..(308): NCBI GI NO: 32765547 NR Description: fructokinase 2 [Lycopersicon hirsutum]
MLIDFVPTVAGVSLAEAPAFVKAPGGAPANVAIAVARLGGGAAFVGKLGDDEFGRMLAKILRENGVDAGGVVFDSGARTALAFVTLRADGEREFMFYRNPSADMLLTADELKVDVIKRAAVFHYGSISLIAEPCRTAHLHAMKVAKEAGALLSYDPNLREALWPSLEEARTKILSIWDQADIVKVSEVELEFLTGINSVEDDVAMKLWRPTFKLMLVTLGDQGCKYYTKDFRGTVPSYKVQQVDTTGAGDAFIGSLLRKIVQDPSALQDKTKLEGAIKFANACGAITATKKGAIPSLPKEDEVLRLMEKA

SEQ ID NO: 14069 - DNA, 1201 bp, Triticum aestivum
  misc_feature (1)..(1201): Ceres Seq. ID no. 13584271
agacagacagagaaaaaaaaaacccagagaaagagatcgagaccctctccaccctccttccccatccccgtcgtcgctcttcgattccgccggcgatccgtgccacagtctagccggaggagaggcgagcagcagggggagcgcgtgcggtctagcgggggctagggtttcctcgcgtgtgagggacgggagaggaggagcagggatggcgcaggcggtggaggagtggtaccggcagatgcccatcatcacgcgctcctacctcaccgccgccgtcctcaccaccgtcggatgcaccctcgagatcatctcgccctaccacctgtacctgaaccccaagctggtggtgcagcactacgagatctggcgcctcgtcaccaacttcctctacttccgcaagatggatttggatttcctgttccacatgttttttcttgcgcgctactgcaaacttctcgaggagaactcattcaggggaagaacagctgactttttctacatgctcttgtttggtgctactgtcctaaccagcatcgttctgattggtgggacaataccttacatttctgagacgtttgccaggattctgttcctcagcaattcattgacgtttatgatggtttatgtctggagcaagcacaatcccttcattcacatgagcttcttgggtctgttcaccttcactgctgcctacttaccttgggtccttcttggcttctctattctggtggggagcagcacatgggttgatcttttgggtatgattgctggccatgtgtattacttcctggaagacgtgtaccctcggatgacgggccgtcgccccctgaagaccccttccttcatcaaggcgctgttcgccgacgacaatgtggtcgtggcggcgcggccccccaacgctggtgtcgcggctgcaaggtttggtggtgtgggtgcagcagacccccagttccagtgatggtctacatgcagtttgttggatataattttgtacacccgtgtccgtgatgatatgtgcaaaaatacatagagagtataattctcagttaggggttgggcttgatgccaatgcgctgctaaccaaagtgtatgtagctgggctcgtgaagccgtctggttgttggttaactttgacttaacgtacttgtctcatcttgcgtggcaccttcgttaattaggcgaaaaaacacgctgaagcctc

SEQ ID NO: 14070 - protein, 318 aa, Triticum aestivum
  peptide (1)..(318): Ceres Seq. ID no. 13584272
  misc_feature (80)..(280): Pfam Name: Pfam Description:  Der1-like family
  misc_feature (69)..(318): NCBI GI NO: 27573354 NR Description: putative Der1-like protein
  misc_feature (69)..(307): NCBI GI NO: 15234480 NR Description: expressed protein [Arabidopsis thaliana]
  misc_feature (69)..(307): NCBI GI NO: 17473759 NR Description: putative protein [Arabidopsis thaliana]
  misc_feature (69)..(307): NCBI GI NO: 22328865 NR Description: expressed protein [Arabidopsis thaliana]
  misc_feature (83)..(307): NCBI GI NO: 7487831 NR Description: hypothetical protein T8O5
  misc_feature (102)..(307): NCBI GI NO: 25407582 NR Description: hypothetical protein AT4g21810
  misc_feature (69)..(286): NCBI GI NO: 40352706 NR Description: Unknown (protein for MGC:63991) [Danio rerio]
  misc_feature (71)..(286): NCBI GI NO: 15808990 NR Description: carcinoma related gene [Mus musculus]
  misc_feature (71)..(286): NCBI GI NO: 16151831 NR Description: F-LANa [Mus musculus]
  misc_feature (46)..(282): NCBI GI NO: 34852394 NR Description: similar to carcinoma related gene
DRQRKKKPRERDRDPLHPPSPSPSSLFDSAGDPCHSLAGGEASSRGSACGLAGARVSSRVRDGRGGAGMAQAVEEWYRQMPIITRSYLTAAVLTTVGCTLEIISPYHLYLNPKLVVQHYEIWRLVTNFLYFRKMDLDFLFHMFFLARYCKLLEENSFRGRTADFFYMLLFGATVLTSIVLIGGTIPYISETFARILFLSNSLTFMMVYVWSKHNPFIHMSFLGLFTFTAAYLPWVLLGFSILVGSSTWVDLLGMIAGHVYYFLEDVYPRMTGRRPLKTPSFIKALFADDNVVVAARPPNAGVAAARFGGVGAADPQFQ

SEQ ID NO: 14071 - protein, 250 aa, Triticum aestivum
  peptide (1)..(250): Ceres Seq. ID no. 13584273
  misc_feature (12)..(212): Pfam Name: Pfam Description:  Der1-like family
  misc_feature (1)..(250): NCBI GI NO: 27573354 NR Description: putative Der1-like protein
  misc_feature (1)..(239): NCBI GI NO: 15234480 NR Description: expressed protein [Arabidopsis thaliana]
  misc_feature (1)..(239): NCBI GI NO: 17473759 NR Description: putative protein [Arabidopsis thaliana]
  misc_feature (1)..(239): NCBI GI NO: 22328865 NR Description: expressed protein [Arabidopsis thaliana]
  misc_feature (15)..(239): NCBI GI NO: 7487831 NR Description: hypothetical protein T8O5
  misc_feature (34)..(239): NCBI GI NO: 25407582 NR Description: hypothetical protein AT4g21810
  misc_feature (1)..(218): NCBI GI NO: 40352706 NR Description: Unknown (protein for MGC:63991) [Danio rerio]
  misc_feature (3)..(218): NCBI GI NO: 15808990 NR Description: carcinoma related gene [Mus musculus]
  misc_feature (3)..(218): NCBI GI NO: 16151831 NR Description: F-LANa [Mus musculus]
  misc_feature (1)..(214): NCBI GI NO: 34852394 NR Description: similar to carcinoma related gene
MAQAVEEWYRQMPIITRSYLTAAVLTTVGCTLEIISPYHLYLNPKLVVQHYEIWRLVTNFLYFRKMDLDFLFHMFFLARYCKLLEENSFRGRTADFFYMLLFGATVLTSIVLIGGTIPYISETFARILFLSNSLTFMMVYVWSKHNPFIHMSFLGLFTFTAAYLPWVLLGFSILVGSSTWVDLLGMIAGHVYYFLEDVYPRMTGRRPLKTPSFIKALFADDNVVVAARPPNAGVAAARFGGVGAADPQFQ

SEQ ID NO: 14072 - protein, 239 aa, Triticum aestivum
  peptide (1)..(239): Ceres Seq. ID no. 13584274
  misc_feature (1)..(201): Pfam Name: Pfam Description:  Der1-like family
  misc_feature (1)..(239): NCBI GI NO: 27573354 NR Description: putative Der1-like protein
  misc_feature (1)..(228): NCBI GI NO: 15234480 NR Description: expressed protein [Arabidopsis thaliana]
  misc_feature (1)..(228): NCBI GI NO: 17473759 NR Description: putative protein [Arabidopsis thaliana]
  misc_feature (1)..(228): NCBI GI NO: 22328865 NR Description: expressed protein [Arabidopsis thaliana]
  misc_feature (4)..(228): NCBI GI NO: 7487831 NR Description: hypothetical protein T8O5
  misc_feature (23)..(228): NCBI GI NO: 25407582 NR Description: hypothetical protein AT4g21810
  misc_feature (1)..(207): NCBI GI NO: 40352706 NR Description: Unknown (protein for MGC:63991) [Danio rerio]
  misc_feature (1)..(207): NCBI GI NO: 15808990 NR Description: carcinoma related gene [Mus musculus]
  misc_feature (1)..(207): NCBI GI NO: 16151831 NR Description: F-LANa [Mus musculus]
  misc_feature (1)..(203): NCBI GI NO: 34852394 NR Description: similar to carcinoma related gene
MPIITRSYLTAAVLTTVGCTLEIISPYHLYLNPKLVVQHYEIWRLVTNFLYFRKMDLDFLFHMFFLARYCKLLEENSFRGRTADFFYMLLFGATVLTSIVLIGGTIPYISETFARILFLSNSLTFMMVYVWSKHNPFIHMSFLGLFTFTAAYLPWVLLGFSILVGSSTWVDLLGMIAGHVYYFLEDVYPRMTGRRPLKTPSFIKALFADDNVVVAARPPNAGVAAARFGGVGAADPQFQ

SEQ ID NO: 14073 - DNA, 1032 bp, Triticum aestivum
  misc_feature (1)..(1032): Ceres Seq. ID no. 13597264
atcgatcaaggatcagacgacacgagctagtagccacaaagccaacgatctcgaccgctcgggtcatcagcaacgaaccatggcgcgggtgctggctctcggcgccgccgcggctttcctcctcctggcagtggcatcgaccatggcggctgcgcagaactgcgggtgcgcggcgagtcagtgctgcagccgctgggggttctgcggcgccaccagcgagtactgcggcacgggctgccgctcgggtccctgcaccgtgcccgtcaccaacaacgtgtccgtgcccgccatcgtcacgccggccttcttcggcgcgctcgtcgcccaggccgccgacgactgcgccgccaagggcttctacacccgcgacgccttcctcacggcgctcggcgggtaccccgccttcggccgcaccggctccgacgacgactccaagcgcgagatcgccgccttcttcgcccacgtcaaccacgagaccataaagttctgctacatcgacgagatcaacgggccgagcaagaactactgcgacccgacgaacgcggagtggccgtgcgccgccgggaagggctactacggccgcgggccgctgcagatctcgtggaactacaactacggggcggcagggcagagcctcggcttcgacgggctcaacgacccggacgcggtggcgcggagccccgtcttggcgttccaagcggcgctctggtactggatgaacagcgtgcacgacgtcatcgtctccggccaggggttcggcgccaccatcagggccatcaatggcgcgctcgagtgcaacggcaagaaccccagcgccgtcaacgaccgcgtcgccttctacaagcagttctgccagcagttcggcgtcgacccggggaccagcctcacctgctaagctcactatctaggacatcgcgtggacttggttgtggcatatgtgcgtgcatctgattcggacagacatattcaggataaaattgctttctgatttgatactatacctgttaatttaatactaccttcgtctcgatg

SEQ ID NO: 14074 - protein, 297 aa, Triticum aestivum
  peptide (1)..(297): Ceres Seq. ID no. 13597265
  misc_feature (97)..(297): Pfam Name: Pfam Description:  Chitinase class I
  misc_feature (26)..(297): NCBI GI NO: 30793457 NR Description: chitinase [Oryza sativa (japonica cultivar-group)]
  misc_feature (40)..(297): NCBI GI NO: 33329392 NR Description: class IV chitinase [Vitis vinifera]
  misc_feature (40)..(297): NCBI GI NO: 2306811 NR Description: class IV endochitinase [Vitis vinifera]
  misc_feature (27)..(297): NCBI GI NO: 38345417 NR Description: OSJNBb0091E11.8
  misc_feature (26)..(297): NCBI GI NO: 15232509 NR Description: glycosyl hydrolase family 19 (class IV chitinase)
  misc_feature (32)..(297): NCBI GI NO: 2570164 NR Description: chitinase [Chenopodium amaranticolor]
  misc_feature (26)..(297): NCBI GI NO: 2597826 NR Description: class IV chitinase [Arabidopsis thaliana]
  misc_feature (25)..(297): NCBI GI NO: 40557195 NR Description: class IV chitinase precursor [Medicago truncatula]
  misc_feature (32)..(297): NCBI GI NO: 2570162 NR Description: chitinase [Chenopodium amaranticolor]
  misc_feature (37)..(297): NCBI GI NO: 2570166 NR Description: chitinase [Chenopodium amaranticolor]
SIKDQTTRASSHKANDLDRSGHQQRTMARVLALGAAAAFLLLAVASTMAAAQNCGCAASQCCSRWGFCGATSEYCGTGCRSGPCTVPVTNNVSVPAIVTPAFFGALVAQAADDCAAKGFYTRDAFLTALGGYPAFGRTGSDDDSKREIAAFFAHVNHETIKFCYIDEINGPSKNYCDPTNAEWPCAAGKGYYGRGPLQISWNYNYGAAGQSLGFDGLNDPDAVARSPVLAFQAALWYWMNSVHDVIVSGQGFGATIRAINGALECNGKNPSAVNDRVAFYKQFCQQFGVDPGTSLTC

SEQ ID NO: 14075 - protein, 271 aa, Triticum aestivum
  peptide (1)..(271): Ceres Seq. ID no. 13597266
  misc_feature (71)..(271): Pfam Name: Pfam Description:  Chitinase class I
  misc_feature (1)..(271): NCBI GI NO: 30793457 NR Description: chitinase [Oryza sativa (japonica cultivar-group)]
  misc_feature (14)..(271): NCBI GI NO: 33329392 NR Description: class IV chitinase [Vitis vinifera]
  misc_feature (14)..(271): NCBI GI NO: 2306811 NR Description: class IV endochitinase [Vitis vinifera]
  misc_feature (1)..(271): NCBI GI NO: 38345417 NR Description: OSJNBb0091E11.8
  misc_feature (1)..(271): NCBI GI NO: 15232509 NR Description: glycosyl hydrolase family 19 (class IV chitinase)
  misc_feature (6)..(271): NCBI GI NO: 2570164 NR Description: chitinase [Chenopodium amaranticolor]
  misc_feature (1)..(271): NCBI GI NO: 2597826 NR Description: class IV chitinase [Arabidopsis thaliana]
  misc_feature (1)..(271): NCBI GI NO: 40557195 NR Description: class IV chitinase precursor [Medicago truncatula]
  misc_feature (6)..(271): NCBI GI NO: 2570162 NR Description: chitinase [Chenopodium amaranticolor]
  misc_feature (11)..(271): NCBI GI NO: 2570166 NR Description: chitinase [Chenopodium amaranticolor]
MARVLALGAAAAFLLLAVASTMAAAQNCGCAASQCCSRWGFCGATSEYCGTGCRSGPCTVPVTNNVSVPAIVTPAFFGALVAQAADDCAAKGFYTRDAFLTALGGYPAFGRTGSDDDSKREIAAFFAHVNHETIKFCYIDEINGPSKNYCDPTNAEWPCAAGKGYYGRGPLQISWNYNYGAAGQSLGFDGLNDPDAVARSPVLAFQAALWYWMNSVHDVIVSGQGFGATIRAINGALECNGKNPSAVNDRVAFYKQFCQQFGVDPGTSLTC

SEQ ID NO: 14076 - protein, 250 aa, Triticum aestivum
  peptide (1)..(250): Ceres Seq. ID no. 13597267
  misc_feature (50)..(250): Pfam Name: Pfam Description:  Chitinase class I
  misc_feature (1)..(250): NCBI GI NO: 30793457 NR Description: chitinase [Oryza sativa (japonica cultivar-group)]
  misc_feature (1)..(250): NCBI GI NO: 33329392 NR Description: class IV chitinase [Vitis vinifera]
  misc_feature (1)..(250): NCBI GI NO: 2306811 NR Description: class IV endochitinase [Vitis vinifera]
  misc_feature (1)..(250): NCBI GI NO: 38345417 NR Description: OSJNBb0091E11.8
  misc_feature (1)..(250): NCBI GI NO: 15232509 NR Description: glycosyl hydrolase family 19 (class IV chitinase)
  misc_feature (1)..(250): NCBI GI NO: 2570164 NR Description: chitinase [Chenopodium amaranticolor]
  misc_feature (1)..(250): NCBI GI NO: 2597826 NR Description: class IV chitinase [Arabidopsis thaliana]
  misc_feature (1)..(250): NCBI GI NO: 40557195 NR Description: class IV chitinase precursor [Medicago truncatula]
  misc_feature (1)..(250): NCBI GI NO: 2570162 NR Description: chitinase [Chenopodium amaranticolor]
  misc_feature (1)..(250): NCBI GI NO: 2570166 NR Description: chitinase [Chenopodium amaranticolor]
MAAAQNCGCAASQCCSRWGFCGATSEYCGTGCRSGPCTVPVTNNVSVPAIVTPAFFGALVAQAADDCAAKGFYTRDAFLTALGGYPAFGRTGSDDDSKREIAAFFAHVNHETIKFCYIDEINGPSKNYCDPTNAEWPCAAGKGYYGRGPLQISWNYNYGAAGQSLGFDGLNDPDAVARSPVLAFQAALWYWMNSVHDVIVSGQGFGATIRAINGALECNGKNPSAVNDRVAFYKQFCQQFGVDPGTSLTC

SEQ ID NO: 14077 - DNA, 1311 bp, Triticum aestivum
  misc_feature (1)..(1311): Ceres Seq. ID no. 13597320
gatttcccccagaaattaataaaccaccaaagccatagcttgaggcggcgagaagcagagccggagaaggaggggagtcggagaagatggttgttctcgtggtagcgacggcgtccgacccggcgtccatcggccccgccgccgcgttcctggctatgcctggctggtcccccggcccgcccatccccgaggggatggagagctttacaaatgggaatgttaggttattgaagcatgaacgcagcattgttgcagaggatgatcttgaccgtcggtggcaggaagccactggagaggctgtttctgaggtcatattcctcagcaaacacactgcagtctccaaccgccctgcactcactgtccatccaatcggtgtgccacatctgagggaggatgagaccccccctcaaggagggaggcctggatgggcaggggtgccaaaccctcgaattggcccatggttccggttgatgcaaaaggttgctgccgaccaaggtcttgttccagagtttgagattacacttgaagctactcaccatggaccacttaccagtacacccacgatgtttgttgagataggaagtacacaagaatactggggtagacaagatgctgcacaggccattgctctagttctatggaaaggtcttggccttgaggaaggaaatgctgttggaacttggctggggagtggtgaaaaggttctactaggtatcggtggtggtcactatgcccctcgccatatggatattgtcatcaaagacggtgtctgggtgggtcatctcctgtctggttactctttgccgatggaggctccacctcaagtaaatggaaagagttctggtgaggttggtgggatgtggaagcattccatcaaagtttcgtatgaagccacaaaggcaggatttcccggtggtgaagttatagcacatcttgatcagaagagcttcaagggctggcaaaagaacgccatcacgagctatttgcaggagcaaaatatcaagataggaaaacccaatgatttcctctgcaaaaaaatttaaccgcgtccgcaaggcaagtcgtcgaagtgacttcaccctccctagggcctggcacatacaaatggagtaaatatagagcactgtattttcgtaacccgatttcaagatgtagagtactccctccccgttcgtcttagaaggcctgacttgtgccaaaaaaaaaaacaggaatatactacgagagagacatatcttaaggacacgactatgcgtgcttgtggttcccagagttggcaggcaaatgggggctatcattatccatattttt

SEQ ID NO: 14078 - protein, 318 aa, Triticum aestivum
  peptide (1)..(318): Ceres Seq. ID no. 13597321
  misc_feature (49)..(310): Pfam Name: DUF516 Pfam Description: Protein of unknown function
  misc_feature (1)..(313): NCBI GI NO: 38636945 NR Description: putative GEKO1
  misc_feature (1)..(313): NCBI GI NO: 15227708 NR Description: expressed protein [Arabidopsis thaliana]
  misc_feature (66)..(238): NCBI GI NO: 14601434 NR Description: hypothetical protein [Aeropyrum pernix]
  misc_feature (70)..(237): NCBI GI NO: 22406443 NR Description: hypothetical protein [Ferroplasma acidarmanus]
  misc_feature (76)..(238): NCBI GI NO: 15668338 NR Description: conserved hypothetical protein
  misc_feature (4)..(241): NCBI GI NO: 14589968 NR Description: hypothetical protein [Pyrococcus horikoshii]
  misc_feature (75)..(235): NCBI GI NO: 16081204 NR Description: hypothetical protein [Thermoplasma acidophilum]
  misc_feature (66)..(239): NCBI GI NO: 23051464 NR Description: hypothetical protein [Methanosarcina barkeri]
  misc_feature (4)..(241): NCBI GI NO: 14520224 NR Description: hypothetical protein [Pyrococcus abyssi]
  misc_feature (69)..(235): NCBI GI NO: 13540908 NR Description: Uncharacterized conserved protein
MVVLVVATASDPASIGPAAAFLAMPGWSPGPPIPEGMESFTNGNVRLLKHERSIVAEDDLDRRWQEATGEAVSEVIFLSKHTAVSNRPALTVHPIGVPHLREDETPPQGGRPGWAGVPNPRIGPWFRLMQKVAADQGLVPEFEITLEATHHGPLTSTPTMFVEIGSTQEYWGRQDAAQAIALVLWKGLGLEEGNAVGTWLGSGEKVLLGIGGGHYAPRHMDIVIKDGVWVGHLLSGYSLPMEAPPQVNGKSSGEVGGMWKHSIKVSYEATKAGFPGGEVIAHLDQKSFKGWQKNAITSYLQEQNIKIGKPNDFLCKKI

SEQ ID NO: 14079 - protein, 295 aa, Triticum aestivum
  peptide (1)..(295): Ceres Seq. ID no. 13597322
  misc_feature (26)..(287): Pfam Name: DUF516 Pfam Description: Protein of unknown function
  misc_feature (1)..(290): NCBI GI NO: 38636945 NR Description: putative GEKO1
  misc_feature (1)..(290): NCBI GI NO: 15227708 NR Description: expressed protein [Arabidopsis thaliana]
  misc_feature (43)..(215): NCBI GI NO: 14601434 NR Description: hypothetical protein [Aeropyrum pernix]
  misc_feature (47)..(214): NCBI GI NO: 22406443 NR Description: hypothetical protein [Ferroplasma acidarmanus]
  misc_feature (53)..(215): NCBI GI NO: 15668338 NR Description: conserved hypothetical protein
  misc_feature (1)..(218): NCBI GI NO: 14589968 NR Description: hypothetical protein [Pyrococcus horikoshii]
  misc_feature (52)..(212): NCBI GI NO: 16081204 NR Description: hypothetical protein [Thermoplasma acidophilum]
  misc_feature (43)..(216): NCBI GI NO: 23051464 NR Description: hypothetical protein [Methanosarcina barkeri]
  misc_feature (1)..(218): NCBI GI NO: 14520224 NR Description: hypothetical protein [Pyrococcus abyssi]
  misc_feature (46)..(212): NCBI GI NO: 13540908 NR Description: Uncharacterized conserved protein
MPGWSPGPPIPEGMESFTNGNVRLLKHERSIVAEDDLDRRWQEATGEAVSEVIFLSKHTAVSNRPALTVHPIGVPHLREDETPPQGGRPGWAGVPNPRIGPWFRLMQKVAADQGLVPEFEITLEATHHGPLTSTPTMFVEIGSTQEYWGRQDAAQAIALVLWKGLGLEEGNAVGTWLGSGEKVLLGIGGGHYAPRHMDIVIKDGVWVGHLLSGYSLPMEAPPQVNGKSSGEVGGMWKHSIKVSYEATKAGFPGGEVIAHLDQKSFKGWQKNAITSYLQEQNIKIGKPNDFLCKKI

SEQ ID NO: 14080 - protein, 282 aa, Triticum aestivum
  peptide (1)..(282): Ceres Seq. ID no. 13597323
  misc_feature (13)..(274): Pfam Name: DUF516 Pfam Description: Protein of unknown function
  misc_feature (1)..(277): NCBI GI NO: 38636945 NR Description: putative GEKO1
  misc_feature (1)..(277): NCBI GI NO: 15227708 NR Description: expressed protein [Arabidopsis thaliana]
  misc_feature (30)..(202): NCBI GI NO: 14601434 NR Description: hypothetical protein [Aeropyrum pernix]
  misc_feature (34)..(201): NCBI GI NO: 22406443 NR Description: hypothetical protein [Ferroplasma acidarmanus]
  misc_feature (40)..(202): NCBI GI NO: 15668338 NR Description: conserved hypothetical protein
  misc_feature (1)..(205): NCBI GI NO: 14589968 NR Description: hypothetical protein [Pyrococcus horikoshii]
  misc_feature (39)..(199): NCBI GI NO: 16081204 NR Description: hypothetical protein [Thermoplasma acidophilum]
  misc_feature (30)..(203): NCBI GI NO: 23051464 NR Description: hypothetical protein [Methanosarcina barkeri]
  misc_feature (1)..(205): NCBI GI NO: 14520224 NR Description: hypothetical protein [Pyrococcus abyssi]
  misc_feature (33)..(199): NCBI GI NO: 13540908 NR Description: Uncharacterized conserved protein
MESFTNGNVRLLKHERSIVAEDDLDRRWQEATGEAVSEVIFLSKHTAVSNRPALTVHPIGVPHLREDETPPQGGRPGWAGVPNPRIGPWFRLMQKVAADQGLVPEFEITLEATHHGPLTSTPTMFVEIGSTQEYWGRQDAAQAIALVLWKGLGLEEGNAVGTWLGSGEKVLLGIGGGHYAPRHMDIVIKDGVWVGHLLSGYSLPMEAPPQVNGKSSGEVGGMWKHSIKVSYEATKAGFPGGEVIAHLDQKSFKGWQKNAITSYLQEQNIKIGKPNDFLCKKI

SEQ ID NO: 14081 - DNA, 1488 bp, Triticum aestivum
  misc_feature (1)..(1488): Ceres Seq. ID no. 13584275
cacttgcacacaacattcttcctcgcaccactcagctagcagctgccaaacacaagctcgcaagctcacggccgggtacgtgcgaagcattgaacatgggagatgcgctgtgcgatcagctcctcgtggacgtcgacggtgagttccagctccccaccgacgccgaagacctattcagcatcctcgagacttgggaggactgcgtccacggcgccgctgcagcgttgagccccaccgccggcgccagcagccgtggtgagctgatgggcggttctgcgccggggaacaaaagcagcaagcggcgagcgcggccggacgaatgtgacggaatagcgcagacgcagaagaggcagaagtgctccccggaggagggaggcggcgcggcgccgaagacagcccacatcacggtggagcgcaaccgccggaagcagatgaacgagcacctgaccgtgctgcggtcgctcatgccctgcttctatgtcaagcgtggtgaccaagcatccatcataggaggagtggtggactacatcaaggagctgcagcaagtgaagcagtcgctggaggccaagaagcagcgcaaggcctacaccgagcacgtcctcagcccgcgtccgcccccgacgtcctacagcccacgcctacctctcagcccgctccacaaatccacgccgccgctcagcccattgctcaggtccactccgccgctcagcccgcgcctcgccgtcccgatcagccctgccaggacgccgccgacgccaggcagcccctacaagctccgccccctgccgccgccgatctccggctccacctacgtgtccccggcgatgacgccgaccggctacgagccgggctcctcctacctcccgtcgctcgacgccatcgccgccgagctgtcggtgtacgccaacaggcaggcgctgcagctgcccccgactgacccactccccgacgtgagggtggagttcgcaggcgcgaacctggtgctgaagacggtgtcgcaccgcgcgccggggcaggtggtgaagatcatcgccgcgctcgagtcacgggcgccggcgctggagattctccacgccaagatcagcaccatcgacgacactgacgtcaacgccttcaccgtcaagattggaatcgagtgttcgctcagcgctgaagagctggtgcaagagattcagcaaacgttctcgtaagcgtttagttaaggtccccgcttcgagttaaactctttcttgtttttcccaacagggctgaaactcgtcgaattagacggtgaagatgcatgtattggtaagcatgcataagtttgtgcatgtgtgtgtcttgtaagatcgaaactgaggatgagctgaggagccgggcacttgaatggtcgtggtacaggtcgtactctagctatagctaactagctagatcgatcatttcttgtgctacctgcgtacgtatgtaactgcagttgttcaatggcacgtgcatttattttcacaactc

SEQ ID NO: 14082 - protein, 395 aa, Triticum aestivum
  peptide (1)..(395): Ceres Seq. ID no. 13584276
  misc_feature (130)..(180): Pfam Name: Pfam Description:  Helix-loop-helix DNA-binding domain
  misc_feature (55)..(228): NCBI GI NO: 15238680 NR Description: bHLH protein family [Arabidopsis thaliana]
  misc_feature (314)..(394): NCBI GI NO: 15238680 NR Description: bHLH protein family [Arabidopsis thaliana]
  misc_feature (313)..(394): NCBI GI NO: 15230639 NR Description: bHLH protein family [Arabidopsis thaliana]
  misc_feature (132)..(193): NCBI GI NO: 15230639 NR Description: bHLH protein family [Arabidopsis thaliana]
  misc_feature (110)..(225): NCBI GI NO: 30687365 NR Description: bHLH protein family [Arabidopsis thaliana]
  misc_feature (314)..(395): NCBI GI NO: 30687365 NR Description: bHLH protein family [Arabidopsis thaliana]
  misc_feature (110)..(225): NCBI GI NO: 11994233 NR Description: contains similarity to helix-loop-helix DNA-bindingprotein~gene_id:MUJ8
  misc_feature (314)..(377): NCBI GI NO: 11994233 NR Description: contains similarity to helix-loop-helix DNA-bindingprotein~gene_id:MUJ8
  misc_feature (79)..(206): NCBI GI NO: 38346722 NR Description: OSJNBa0086O06.20
  misc_feature (63)..(206): NCBI GI NO: 37533680 NR Description: putative helix-loop-helix DNA-binding protein
LAHNILPRTTQLAAAKHKLASSRPGTCEALNMGDALCDQLLVDVDGEFQLPTDAEDLFSILETWEDCVHGAAAALSPTAGASSRGELMGGSAPGNKSSKRRARPDECDGIAQTQKRQKCSPEEGGGAAPKTAHITVERNRRKQMNEHLTVLRSLMPCFYVKRGDQASIIGGVVDYIKELQQVKQSLEAKKQRKAYTEHVLSPRPPPTSYSPRLPLSPLHKSTPPLSPLLRSTPPLSPRLAVPISPARTPPTPGSPYKLRPLPPPISGSTYVSPAMTPTGYEPGSSYLPSLDAIAAELSVYANRQALQLPPTDPLPDVRVEFAGANLVLKTVSHRAPGQVVKIIAALESRAPALEILHAKISTIDDTDVNAFTVKIGIECSLSAEELVQEIQQTFS

SEQ ID NO: 14083 - protein, 364 aa, Triticum aestivum
  peptide (1)..(364): Ceres Seq. ID no. 13584277
  misc_feature (99)..(149): Pfam Name: Pfam Description:  Helix-loop-helix DNA-binding domain
  misc_feature (24)..(197): NCBI GI NO: 15238680 NR Description: bHLH protein family [Arabidopsis thaliana]
  misc_feature (283)..(363): NCBI GI NO: 15238680 NR Description: bHLH protein family [Arabidopsis thaliana]
  misc_feature (282)..(363): NCBI GI NO: 15230639 NR Description: bHLH protein family [Arabidopsis thaliana]
  misc_feature (101)..(162): NCBI GI NO: 15230639 NR Description: bHLH protein family [Arabidopsis thaliana]
  misc_feature (79)..(194): NCBI GI NO: 30687365 NR Description: bHLH protein family [Arabidopsis thaliana]
  misc_feature (283)..(364): NCBI GI NO: 30687365 NR Description: bHLH protein family [Arabidopsis thaliana]
  misc_feature (79)..(194): NCBI GI NO: 11994233 NR Description: contains similarity to helix-loop-helix DNA-bindingprotein~gene_id:MUJ8
  misc_feature (283)..(346): NCBI GI NO: 11994233 NR Description: contains similarity to helix-loop-helix DNA-bindingprotein~gene_id:MUJ8
  misc_feature (48)..(175): NCBI GI NO: 38346722 NR Description: OSJNBa0086O06.20
  misc_feature (32)..(175): NCBI GI NO: 37533680 NR Description: putative helix-loop-helix DNA-binding protein
MGDALCDQLLVDVDGEFQLPTDAEDLFSILETWEDCVHGAAAALSPTAGASSRGELMGGSAPGNKSSKRRARPDECDGIAQTQKRQKCSPEEGGGAAPKTAHITVERNRRKQMNEHLTVLRSLMPCFYVKRGDQASIIGGVVDYIKELQQVKQSLEAKKQRKAYTEHVLSPRPPPTSYSPRLPLSPLHKSTPPLSPLLRSTPPLSPRLAVPISPARTPPTPGSPYKLRPLPPPISGSTYVSPAMTPTGYEPGSSYLPSLDAIAAELSVYANRQALQLPPTDPLPDVRVEFAGANLVLKTVSHRAPGQVVKIIAALESRAPALEILHAKISTIDDTDVNAFTVKIGIECSLSAEELVQEIQQTFS

SEQ ID NO: 14084 - protein, 308 aa, Triticum aestivum
  peptide (1)..(308): Ceres Seq. ID no. 13584278
  misc_feature (43)..(93): Pfam Name: Pfam Description:  Helix-loop-helix DNA-binding domain
  misc_feature (1)..(141): NCBI GI NO: 15238680 NR Description: bHLH protein family [Arabidopsis thaliana]
  misc_feature (227)..(307): NCBI GI NO: 15238680 NR Description: bHLH protein family [Arabidopsis thaliana]
  misc_feature (226)..(307): NCBI GI NO: 15230639 NR Description: bHLH protein family [Arabidopsis thaliana]
  misc_feature (45)..(106): NCBI GI NO: 15230639 NR Description: bHLH protein family [Arabidopsis thaliana]
  misc_feature (23)..(138): NCBI GI NO: 30687365 NR Description: bHLH protein family [Arabidopsis thaliana]
  misc_feature (227)..(308): NCBI GI NO: 30687365 NR Description: bHLH protein family [Arabidopsis thaliana]
  misc_feature (23)..(138): NCBI GI NO: 11994233 NR Description: contains similarity to helix-loop-helix DNA-bindingprotein~gene_id:MUJ8
  misc_feature (227)..(290): NCBI GI NO: 11994233 NR Description: contains similarity to helix-loop-helix DNA-bindingprotein~gene_id:MUJ8
  misc_feature (1)..(119): NCBI GI NO: 38346722 NR Description: OSJNBa0086O06.20
  misc_feature (1)..(119): NCBI GI NO: 37533680 NR Description: putative helix-loop-helix DNA-binding protein
MGGSAPGNKSSKRRARPDECDGIAQTQKRQKCSPEEGGGAAPKTAHITVERNRRKQMNEHLTVLRSLMPCFYVKRGDQASIIGGVVDYIKELQQVKQSLEAKKQRKAYTEHVLSPRPPPTSYSPRLPLSPLHKSTPPLSPLLRSTPPLSPRLAVPISPARTPPTPGSPYKLRPLPPPISGSTYVSPAMTPTGYEPGSSYLPSLDAIAAELSVYANRQALQLPPTDPLPDVRVEFAGANLVLKTVSHRAPGQVVKIIAALESRAPALEILHAKISTIDDTDVNAFTVKIGIECSLSAEELVQEIQQTFS

SEQ ID NO: 14085 - DNA, 1196 bp, Triticum aestivum
  misc_feature (1)..(1196): Ceres Seq. ID no. 12616895
atcacacaattcccagatcacaccgtgcgccacgcccccttccccaaaaacctttcgaaaaccgccgcgccaaccgccacccagccccgtccaagaaaccgcacgccaccgcggacgcgaccccccgccggcgccaagatggtgcggctaagcaacacggtgatcgggatcctgaacgcggtgaccttcctgctctcggtgcccatcctggcgggcggcatctggctgcgggcgcgcgccgacggcaccgagtgcgagcgctacctggcggcgccggtgatcgcggtgggggtgttcctcatgctcgtctccatcgcggggctcgtcggcgcctgctgccgcgtcacctgcctcctctggttctacctcgtcgccatgttcctgctcatcgtcgtcctcctcggcctcaccgtcttcgccttcgtcgtcacgcacaagggcaccggggaggccgtctccggccgcggattcaaggagtacaggctcggggactactccaactggctgcagaagcgggtggagaacgacaagaactggaacaggatcaagggctgcctccaggacgccaaggtctgcaagtcgctcgaggacaagacggtcgaccagttcatgtcctccgatctctcccccatccagtccggctgctgcaagcctccgatcagctgcggcttcacctacgtcaacagcacgcaatggaccggccccgccaagtcgacggagcccgactgcggcgcgtggtccaacgacggggcgctctgctacggctgccagtcgtgcaaggccggcgtggtggccaccctcaagcgcaattggaagcgctccgccatcatcaacatcgtcttcctcgtcttcatcatcattgtctactccgtcggctgctgcgccttcaggaacaaccgccgcgaccaccgcaacggcggcgggtacaagcagcagggcgcgtacgcctgatcgtttggctcggttatttattgcttggattggatggatgcgatcgtcgtgtcattttcattcatcgtcgtgcttctcttaggatggcctgatctagctttgtacaggcgagattattctgtgctctgatcatctactagttaggttctatactccgtggtcatgaggagggttgtgtatatatcttttctgttctttgatatgtatggcagaccattatatatgtaacagattattctggagtc

SEQ ID NO: 14086 - protein, 346 aa, Triticum aestivum
  peptide (1)..(346): Ceres Seq. ID no. 12616896
HTIPRSHRAPRPLPQKPFENRRANRHPAPSKKPHATADATPRRRQDGAAKQHGDRDPERGDLPALGAHPGGRHLAAGARRRHRVRALPGGAGDRGGGVPHARLHRGARRRLLPRHLPPLVLPRRHVPAHRRPPRPHRLRLRRHAQGHRGGRLRPRIQGVQARGLLQLAAEAGGERQELEQDQGLPPGRQGLQVARGQDGRPVHVLRSLPHPVRLLQASDQLRLHLRQQHAMDRPRQVDGARLRRVVQRRGALLRLPVVQGRRGGHPQAQLEALRHHQHRLPRLHHHCLLRRLLRLQEQPPRPPQRRRVQAAGRVRLIVWLGYLLLGLDGCDRRVIFIHRRASLRMA

SEQ ID NO: 14087 - protein, 316 aa, Triticum aestivum
  peptide (1)..(316): Ceres Seq. ID no. 12616897
  misc_feature (51)..(285): Pfam Name: Pfam Description:  Tetraspanin family
  misc_feature (49)..(316): NCBI GI NO: 29367553 NR Description: senescence-associated protein-like protein
  misc_feature (47)..(310): NCBI GI NO: 20197174 NR Description: hypothetical protein [Arabidopsis thaliana]
  misc_feature (47)..(307): NCBI GI NO: 3551954 NR Description: senescence-associated protein 5
  misc_feature (47)..(301): NCBI GI NO: 15234374 NR Description: senescence-associated protein -like
  misc_feature (47)..(307): NCBI GI NO: 15234743 NR Description: senescence-associated protein homolog
  misc_feature (47)..(307): NCBI GI NO: 21537169 NR Description: senescence-associated protein-like protein
  misc_feature (48)..(301): NCBI GI NO: 15231187 NR Description: putative protein; protein id: At3g45600
  misc_feature (48)..(316): NCBI GI NO: 15238641 NR Description: senescence-associated protein - like
  misc_feature (40)..(298): NCBI GI NO: 34906104 NR Description: putative senescence-assocated protein
  misc_feature (50)..(298): NCBI GI NO: 17979386 NR Description: putative senescence-associated protein 5
ITQFPDHTVRHAPFPKNLSKTAAPTATQPRPRNRTPPRTRPPAGAKMVRLSNTVIGILNAVTFLLSVPILAGGIWLRARADGTECERYLAAPVIAVGVFLMLVSIAGLVGACCRVTCLLWFYLVAMFLLIVVLLGLTVFAFVVTHKGTGEAVSGRGFKEYRLGDYSNWLQKRVENDKNWNRIKGCLQDAKVCKSLEDKTVDQFMSSDLSPIQSGCCKPPISCGFTYVNSTQWTGPAKSTEPDCGAWSNDGALCYGCQSCKAGVVATLKRNWKRSAIINIVFLVFIIIVYSVGCCAFRNNRRDHRNGGGYKQQGAYA

SEQ ID NO: 14088 - protein, 270 aa, Triticum aestivum
  peptide (1)..(270): Ceres Seq. ID no. 12616898
  misc_feature (5)..(239): Pfam Name: Pfam Description:  Tetraspanin family
  misc_feature (3)..(270): NCBI GI NO: 29367553 NR Description: senescence-associated protein-like protein
  misc_feature (1)..(264): NCBI GI NO: 20197174 NR Description: hypothetical protein [Arabidopsis thaliana]
  misc_feature (1)..(261): NCBI GI NO: 3551954 NR Description: senescence-associated protein 5
  misc_feature (1)..(255): NCBI GI NO: 15234374 NR Description: senescence-associated protein -like
  misc_feature (1)..(261): NCBI GI NO: 15234743 NR Description: senescence-associated protein homolog
  misc_feature (1)..(261): NCBI GI NO: 21537169 NR Description: senescence-associated protein-like protein
  misc_feature (2)..(255): NCBI GI NO: 15231187 NR Description: putative protein; protein id: At3g45600
  misc_feature (2)..(270): NCBI GI NO: 15238641 NR Description: senescence-associated protein - like
  misc_feature (1)..(252): NCBI GI NO: 34906104 NR Description: putative senescence-assocated protein
  misc_feature (4)..(252): NCBI GI NO: 17979386 NR Description: putative senescence-associated protein 5
MVRLSNTVIGILNAVTFLLSVPILAGGIWLRARADGTECERYLAAPVIAVGVFLMLVSIAGLVGACCRVTCLLWFYLVAMFLLIVVLLGLTVFAFVVTHKGTGEAVSGRGFKEYRLGDYSNWLQKRVENDKNWNRIKGCLQDAKVCKSLEDKTVDQFMSSDLSPIQSGCCKPPISCGFTYVNSTQWTGPAKSTEPDCGAWSNDGALCYGCQSCKAGVVATLKRNWKRSAIINIVFLVFIIIVYSVGCCAFRNNRRDHRNGGGYKQQGAYA

SEQ ID NO: 14089 - DNA, 855 bp, Triticum aestivum
  misc_feature (1)..(855): Ceres Seq. ID no. 15178538
tcctctcttatcccgattcacccctcgtctccctcccatcccacgctaccgccgcccaccaccccggcgacctccccactggcgatccccggcctctccctctccttctcccctgcatcttcctccgaggcgcggcaaggggaggccgccgtcgtcgccgccgccgcgcgcgatccgggagggcaagaggggaggcggacgcgggcgaggagatggcatcggaggacgtggtggggaagagcaggggcggcacggccatcaacaccatcgtcaacctggctgaggaggccaagctcgcgcgcgagggcgtcaagggccccggccaccaggtcctcaccgtctgcaagtccctcttcgccggaggcgtcgccggcggcctttcattgatgacagccaagggttcatgctcggaaacgactacatcttgctctacgttgtcggctcagctagagtccttaatcatgaggagatgggacacgtcgattgttagagtacacttgacaggggtgaccgacgctgactagcgcagccggtgggcgttgtgctcttcaaccactcagaggcggacttctccgtgaagctggtggccatgtcgcatagatgattgtccaggtgatttcaacgccggaggtcgccgaggtggtggacctcgacgccaccgtccgggggagggaggattcgggtccaccgacgtctaagctccgagccttggtagatacatctagggaagttgtctgtttaggttgatgatggaacaccagggaaggtacccacctttcgatgatcattgtgtgtgtctgaagttaaatggaatcttgagaatgttatgtgatgttggcaaaaaaaaaaaaaaaa

SEQ ID NO: 14090 - protein, 173 aa, Triticum aestivum
  peptide (1)..(173): Ceres Seq. ID no. 15178539
  misc_feature (71)..(127): NCBI GI NO: 15234063 NR Description: mitochondrial carrier protein family
LSYPDSPLVSLPSHATAAHHPGDLPTGDPRPLPLLLPCIFLRGAARGGRRRRRRRARSGRARGEADAGEEMASEDVVGKSRGGTAINTIVNLAEEAKLAREGVKGPGHQVLTVCKSLFAGGVAGGLSLMTAKGSCSETTTSCSTLSAQLESLIMRRWDTSIVRVHLTGVTDAD

SEQ ID NO: 14091 - protein, 128 aa, Triticum aestivum
  peptide (1)..(128): Ceres Seq. ID no. 15178540
SSLIPIHPSSPSHPTLPPPTTPATSPLAIPGLSLSFSPASSSEARQGEAAVVAAAARDPGGQEGRRTRARRWHRRTWWGRAGAARPSTPSSTWLRRPSSRARASRAPATRSSPSASPSSPEASPAAFH

SEQ ID NO: 14092 - protein, 103 aa, Triticum aestivum
  peptide (1)..(103): Ceres Seq. ID no. 15178541
  misc_feature (1)..(57): NCBI GI NO: 15234063 NR Description: mitochondrial carrier protein family
MASEDVVGKSRGGTAINTIVNLAEEAKLAREGVKGPGHQVLTVCKSLFAGGVAGGLSLMTAKGSCSETTTSCSTLSAQLESLIMRRWDTSIVRVHLTGVTDAD

SEQ ID NO: 14093 - DNA, 1144 bp, Triticum aestivum
  misc_feature (1)..(1144): Ceres Seq. ID no. 12616903
agcatcggctagccaagtccagtaagcatcagcaaatctgacgtaccccattcgtgccccgtctccactcccgctaccgactccggcgaccaccatggccactcgccggagccccgccaccacccaccaccgactcctcctactcctcctccccttgctgctaatcggctcgttcctcctccccctctcgtccgcctaccgccccggcgacatcatccccatgctccgctccggccagtaccacggctcgaggtcggtgtggttcgacgtcatcggccgccactgcccggtcttcgcggtcaaccgggaggtgctgatgccgatccccaagccgacggggttcaccggtgcggatccgtataagataacatttcagattggacacgaaaagttccatgttccttggctttatgttattaatcgcaaaagctctgaagttccactgattgatttccatttaaaatacactggaaacgatttgcttggtgttacggctaaagtagtggacatgcctcaccattttgtggaacttcatcctgacataaagaagaatttctgggatccacagaattggccaaaatatgtacttgttagttatacatgggaggaacaatcagagatagatgttactgcaggattctatgtgttatttggatctggccttgttctttcgttcatccttgcaatctatgtattgcaatcatctcaagataaattaacaaggtttgtacgagaagcggtttctgatagcagtctacctgaaggaggggttgcaaaggttgagtgatgtttccgcgaggggctgttggattatcaacaaatgtccacttatggaaacaccgacaaagacattgtgaacttgagctttcttgggagcgtggacaatagcatgcatctgaagaaccggtgaaccatagcgagttaaatgagagatgaattataggtttttccttgctataacggaacatttagcaaactgaagtatgtgcagttgctagctcattacagttttgatatatgacctgtgtgatttcaatgttgcaagaatttgtcttctacatctacattttgtagaatgtgtaagtagaaacaggcaccgtgtacacctctacagaggaaaagattggtgcaaatgttcattctt

SEQ ID NO: 14094 - protein, 230 aa, Triticum aestivum
  peptide (1)..(230): Ceres Seq. ID no. 12616904
  misc_feature (21)..(220): NCBI GI NO: 18409385 NR Description: putative protein; protein id: At3g51610
  misc_feature (21)..(220): NCBI GI NO: 21617957 NR Description: unknown [Arabidopsis thaliana]
  misc_feature (43)..(220): NCBI GI NO: 11280696 NR Description: hypothetical protein F26O13
MATRRSPATTHHRLLLLLLPLLLIGSFLLPLSSAYRPGDIIPMLRSGQYHGSRSVWFDVIGRHCPVFAVNREVLMPIPKPTGFTGADPYKITFQIGHEKFHVPWLYVINRKSSEVPLIDFHLKYTGNDLLGVTAKVVDMPHHFVELHPDIKKNFWDPQNWPKYVLVSYTWEEQSEIDVTAGFYVLFGSGLVLSFILAIYVLQSSQDKLTRFVREAVSDSSLPEGGVAKVE

SEQ ID NO: 14095 - protein, 188 aa, Triticum aestivum
  peptide (1)..(188): Ceres Seq. ID no. 12616905
  misc_feature (1)..(178): NCBI GI NO: 18409385 NR Description: putative protein; protein id: At3g51610
  misc_feature (1)..(178): NCBI GI NO: 21617957 NR Description: unknown [Arabidopsis thaliana]
  misc_feature (1)..(178): NCBI GI NO: 11280696 NR Description: hypothetical protein F26O13
MLRSGQYHGSRSVWFDVIGRHCPVFAVNREVLMPIPKPTGFTGADPYKITFQIGHEKFHVPWLYVINRKSSEVPLIDFHLKYTGNDLLGVTAKVVDMPHHFVELHPDIKKNFWDPQNWPKYVLVSYTWEEQSEIDVTAGFYVLFGSGLVLSFILAIYVLQSSQDKLTRFVREAVSDSSLPEGGVAKVE

SEQ ID NO: 14096 - protein, 156 aa, Triticum aestivum
  peptide (1)..(156): Ceres Seq. ID no. 12616906
  misc_feature (1)..(146): NCBI GI NO: 18409385 NR Description: putative protein; protein id: At3g51610
  misc_feature (1)..(146): NCBI GI NO: 21617957 NR Description: unknown [Arabidopsis thaliana]
  misc_feature (1)..(146): NCBI GI NO: 11280696 NR Description: hypothetical protein F26O13
MPIPKPTGFTGADPYKITFQIGHEKFHVPWLYVINRKSSEVPLIDFHLKYTGNDLLGVTAKVVDMPHHFVELHPDIKKNFWDPQNWPKYVLVSYTWEEQSEIDVTAGFYVLFGSGLVLSFILAIYVLQSSQDKLTRFVREAVSDSSLPEGGVAKVE

SEQ ID NO: 14097 - DNA, 1467 bp, Triticum aestivum
  misc_feature (1)..(1467): Ceres Seq. ID no. 15224513
cccggccgtcatggcgtcggcggacgaagcgaatgcggcggccgaaggtacggaggggaagaattggcagcggaaggggaagcacaagaaggagaagccgtgggacgatgaccccaacatcgaccgctggacggtggagaagttcgacccctcctggaacgagggcggcctgctggaagtcagctccttctccaccctcttcccccagtaccgagagaagtacctgcaggagacatggccgatcgtcaagggcgcactgaaggagtttggagtctcatgcgagctcaatttggtggaaggatccatgacggtttccaccaccaggaagaccagggacccctacattattcttaaggccagggacctgataaagctcttgtcgcgaagtgtccctgcaccccaagcaattaaagtgctcaatgatgagatgaactgtgatattgtcaagattggtagcatcataagaaacaaggaaagatttgtcaaaaggagagaacgccttttgggccctaacctgtccacccttaaggctatagagattttgactggctgctacatcttagtacagggaaatactgtggctgccatgggttcctttaagggactgaaacaggtccggaagattgtagaggattgcataaagaacataaagcatccagtgtaccacattaaggaactccttattaaacgtgagctggctaaaaatcctgccctagccactgaaagttgggacaggtttctaccgaactttaagaaaaagaatgtcaagcaaaagaagcccaatactaaggagaagaaacaatacacaccctttccgccgcctcagcagcctagcaagattgatcttgaactggagagtggtgagtatttcatgagtgacaagaagaagtcagctaagaaatggcaagagaagctagataagcaatcagagaaatcagaagaaaagaaaagaaagagagaagctgcatttgttccaccaaaggagaacactgctggtctatctgaatctgccaaaagtactaatgacaacgagattgctgatatcacaaaatccttaaagaaaaaggcaaagaaattcagaaatagtgaagctgaggaaaatgtgaaaatcgagtcatatgttgcgagcaacgaagaatcacgctccaaaaagaagcgcagatcgtcatccaagtaaccgcaatatgtcagctactgggatgacaattttaattgtttcaagtagttgaacacctgccattgaagtaggttttcaagcttcaagctttagtggtgaaacagacaaaccttcaaccttaagtggtgaacattgtagtctgtttgttggctactgccgtctgattactccaggagtattgcagctttcctgcatagtccacggcttctaatttacaagatcagatccgtcagcagtctttttagaaacatatgaagagcagttaatgataagtccgttaattcttcttt

SEQ ID NO: 14098 - protein, 391 aa, Triticum aestivum
  peptide (1)..(391): Ceres Seq. ID no. 15224514
  misc_feature (4)..(389): NCBI GI NO: 37534940 NR Description: unknown protein
  misc_feature (176)..(389): NCBI GI NO: 34910546 NR Description: rev interacting protein-like
  misc_feature (4)..(157): NCBI GI NO: 34910546 NR Description: rev interacting protein-like
  misc_feature (4)..(388): NCBI GI NO: 15241622 NR Description: rev interacting protein mis3 - like
  misc_feature (4)..(388): NCBI GI NO: 21592614 NR Description: rev interacting protein mis3-like
  misc_feature (17)..(330): NCBI GI NO: 19112865 NR Description: strong similarity to yeast cell division and sporegermination protein Krr1p
  misc_feature (28)..(379): NCBI GI NO: 40739194 NR Description: hypothetical protein AN5875.2
  misc_feature (28)..(328): NCBI GI NO: 6319791 NR Description: Involved in cell division and spore germination
  misc_feature (28)..(341): NCBI GI NO: 32413695 NR Description: hypothetical protein [Neurospora crassa]
  misc_feature (28)..(328): NCBI GI NO: 38106638 NR Description: hypothetical protein MG06049.4
PAVMASADEANAAAEGTEGKNWQRKGKHKKEKPWDDDPNIDRWTVEKFDPSWNEGGLLEVSSFSTLFPQYREKYLQETWPIVKGALKEFGVSCELNLVEGSMTVSTTRKTRDPYIILKARDLIKLLSRSVPAPQAIKVLNDEMNCDIVKIGSIIRNKERFVKRRERLLGPNLSTLKAIEILTGCYILVQGNTVAAMGSFKGLKQVRKIVEDCIKNIKHPVYHIKELLIKRELAKNPALATESWDRFLPNFKKKNVKQKKPNTKEKKQYTPFPPPQQPSKIDLELESGEYFMSDKKKSAKKWQEKLDKQSEKSEEKKRKREAAFVPPKENTAGLSESAKSTNDNEIADITKSLKKKAKKFRNSEAEENVKIESYVASNEESRSKKKRRSSSK

SEQ ID NO: 14099 - protein, 388 aa, Triticum aestivum
  peptide (1)..(388): Ceres Seq. ID no. 15224515
  misc_feature (1)..(386): NCBI GI NO: 37534940 NR Description: unknown protein
  misc_feature (173)..(386): NCBI GI NO: 34910546 NR Description: rev interacting protein-like
  misc_feature (1)..(154): NCBI GI NO: 34910546 NR Description: rev interacting protein-like
  misc_feature (1)..(385): NCBI GI NO: 15241622 NR Description: rev interacting protein mis3 - like
  misc_feature (1)..(385): NCBI GI NO: 21592614 NR Description: rev interacting protein mis3-like
  misc_feature (14)..(327): NCBI GI NO: 19112865 NR Description: strong similarity to yeast cell division and sporegermination protein Krr1p
  misc_feature (25)..(376): NCBI GI NO: 40739194 NR Description: hypothetical protein AN5875.2
  misc_feature (25)..(325): NCBI GI NO: 6319791 NR Description: Involved in cell division and spore germination
  misc_feature (25)..(338): NCBI GI NO: 32413695 NR Description: hypothetical protein [Neurospora crassa]
  misc_feature (25)..(325): NCBI GI NO: 38106638 NR Description: hypothetical protein MG06049.4
MASADEANAAAEGTEGKNWQRKGKHKKEKPWDDDPNIDRWTVEKFDPSWNEGGLLEVSSFSTLFPQYREKYLQETWPIVKGALKEFGVSCELNLVEGSMTVSTTRKTRDPYIILKARDLIKLLSRSVPAPQAIKVLNDEMNCDIVKIGSIIRNKERFVKRRERLLGPNLSTLKAIEILTGCYILVQGNTVAAMGSFKGLKQVRKIVEDCIKNIKHPVYHIKELLIKRELAKNPALATESWDRFLPNFKKKNVKQKKPNTKEKKQYTPFPPPQQPSKIDLELESGEYFMSDKKKSAKKWQEKLDKQSEKSEEKKRKREAAFVPPKENTAGLSESAKSTNDNEIADITKSLKKKAKKFRNSEAEENVKIESYVASNEESRSKKKRRSSSK

SEQ ID NO: 14100 - protein, 290 aa, Triticum aestivum
  peptide (1)..(290): Ceres Seq. ID no. 15224516
  misc_feature (1)..(288): NCBI GI NO: 37534940 NR Description: unknown protein
  misc_feature (75)..(288): NCBI GI NO: 34910546 NR Description: rev interacting protein-like
  misc_feature (1)..(56): NCBI GI NO: 34910546 NR Description: rev interacting protein-like
  misc_feature (1)..(287): NCBI GI NO: 15241622 NR Description: rev interacting protein mis3 - like
  misc_feature (1)..(287): NCBI GI NO: 21592614 NR Description: rev interacting protein mis3-like
  misc_feature (1)..(229): NCBI GI NO: 19112865 NR Description: strong similarity to yeast cell division and sporegermination protein Krr1p
  misc_feature (1)..(278): NCBI GI NO: 40739194 NR Description: hypothetical protein AN5875.2
  misc_feature (1)..(227): NCBI GI NO: 6319791 NR Description: Involved in cell division and spore germination
  misc_feature (1)..(240): NCBI GI NO: 32413695 NR Description: hypothetical protein [Neurospora crassa]
  misc_feature (1)..(227): NCBI GI NO: 38106638 NR Description: hypothetical protein MG06049.4
MTVSTTRKTRDPYIILKARDLIKLLSRSVPAPQAIKVLNDEMNCDIVKIGSIIRNKERFVKRRERLLGPNLSTLKAIEILTGCYILVQGNTVAAMGSFKGLKQVRKIVEDCIKNIKHPVYHIKELLIKRELAKNPALATESWDRFLPNFKKKNVKQKKPNTKEKKQYTPFPPPQQPSKIDLELESGEYFMSDKKKSAKKWQEKLDKQSEKSEEKKRKREAAFVPPKENTAGLSESAKSTNDNEIADITKSLKKKAKKFRNSEAEENVKIESYVASNEESRSKKKRRSSSK

SEQ ID NO: 14101 - DNA, 1022 bp, Triticum aestivum
  misc_feature (1)..(1022): Ceres Seq. ID no. 13597163
aaccccagacaccacagccagcaatcagaccatggacggcggcggcggcgtgcggccatcgctccagcccgcggcggccggaggaggggcgtcgggcagcccggacgagccccgcgacgcgcgcgtggtgcgggagctcctccgctccatggggctcggcgagggcgagtacgagccgcgcgtcgtgcaccagttcctcgacctcgcctaccgctacgccggggacgtgctcggcgacgcccaggtctacgccgaccacgccggcaagccccagctcgacgccgacgacgtccgcctcgccatccaggccaaggtcaacttctccttctcccagccgccgccccgcgaggttctactcgagctggcacgcagcaggaacaaaatcccgctgcccaagtctattgctccacctggctcgattcctctgccacctgagcaggacaccttgctgagccagaactaccagctcctacccgcattgaagccgccaactcagaccgaggaagcagaagatgacgaggagggtgccaacgcggacgctgccaatcctaacccgaactccttgcaggatcagacgggcaacgagcagcagcagcagcctcagagccagagccagggccagagggtttctttccagctgaacgccgtggccgccgcagctgcaaagcgtctccgaatgacgattgatcagctgaacatgggctgactggatgttgtagatcgttggctggtccctggtactttgtgtcattggtgttgtagattgttggctggtccctgggatcgctatcgccctcctatttcaccatgtgattagtttaaaaaagtaataattcaccatgagaaacgctgatgcttcaggaaacggagcagccttgcaaataagtgtatgttgttgccgtgcaccccgggttgattagtttctgtccatcgttgtcaacttggtttgttttgtagatggtgttgacttgtcaaacttgaactgttccattgttgtttctgaataccaaatcagtgttccc

SEQ ID NO: 14102 - protein, 234 aa, Triticum aestivum
  peptide (1)..(234): Ceres Seq. ID no. 13597164
  misc_feature (32)..(157): Pfam Name: Pfam Description:  Transcription initiation factor IID
  misc_feature (117)..(234): NCBI GI NO: 30017563 NR Description: putative transcription initiation factor
  misc_feature (15)..(116): NCBI GI NO: 30017563 NR Description: putative transcription initiation factor
  misc_feature (32)..(214): NCBI GI NO: 15221048 NR Description: transcriptional activation factor TAFII32 -related
  misc_feature (11)..(194): NCBI GI NO: 24059851 NR Description: transcriptional activation factor TAFII32-like
  misc_feature (33)..(222): NCBI GI NO: 33086648 NR Description: Cb1-739 [Rattus norvegicus]
  misc_feature (29)..(165): NCBI GI NO: 4689154 NR Description: neuronal cell death-related protein [Homo sapiens]
  misc_feature (29)..(165): NCBI GI NO: 20070280 NR Description: TBP-associated factor 9L
  misc_feature (37)..(165): NCBI GI NO: 30186181 NR Description: Similar to TAF9-like RNA polymerase II
  misc_feature (29)..(222): NCBI GI NO: 18079237 NR Description: TAF9 RNA polymerase II, TATA box binding protein
  misc_feature (33)..(222): NCBI GI NO: 34576553 NR Description: TAF9 RNA polymerase II, TATA box binding protein
TPDTTASNQTMDGGGGVRPSLQPAAAGGGASGSPDEPRDARVVRELLRSMGLGEGEYEPRVVHQFLDLAYRYAGDVLGDAQVYADHAGKPQLDADDVRLAIQAKVNFSFSQPPPREVLLELARSRNKIPLPKSIAPPGSIPLPPEQDTLLSQNYQLLPALKPPTQTEEAEDDEEGANADAANPNPNSLQDQTGNEQQQQPQSQSQGQRVSFQLNAVAAAAAKRLRMTIDQLNMG

SEQ ID NO: 14103 - protein, 224 aa, Triticum aestivum
  peptide (1)..(224): Ceres Seq. ID no. 13597165
  misc_feature (22)..(147): Pfam Name: Pfam Description:  Transcription initiation factor IID
  misc_feature (107)..(224): NCBI GI NO: 30017563 NR Description: putative transcription initiation factor
  misc_feature (5)..(106): NCBI GI NO: 30017563 NR Description: putative transcription initiation factor
  misc_feature (22)..(204): NCBI GI NO: 15221048 NR Description: transcriptional activation factor TAFII32 -related
  misc_feature (1)..(184): NCBI GI NO: 24059851 NR Description: transcriptional activation factor TAFII32-like
  misc_feature (23)..(212): NCBI GI NO: 33086648 NR Description: Cb1-739 [Rattus norvegicus]
  misc_feature (19)..(155): NCBI GI NO: 4689154 NR Description: neuronal cell death-related protein [Homo sapiens]
  misc_feature (19)..(155): NCBI GI NO: 20070280 NR Description: TBP-associated factor 9L
  misc_feature (27)..(155): NCBI GI NO: 30186181 NR Description: Similar to TAF9-like RNA polymerase II
  misc_feature (19)..(212): NCBI GI NO: 18079237 NR Description: TAF9 RNA polymerase II, TATA box binding protein
  misc_feature (23)..(212): NCBI GI NO: 34576553 NR Description: TAF9 RNA polymerase II, TATA box binding protein
MDGGGGVRPSLQPAAAGGGASGSPDEPRDARVVRELLRSMGLGEGEYEPRVVHQFLDLAYRYAGDVLGDAQVYADHAGKPQLDADDVRLAIQAKVNFSFSQPPPREVLLELARSRNKIPLPKSIAPPGSIPLPPEQDTLLSQNYQLLPALKPPTQTEEAEDDEEGANADAANPNPNSLQDQTGNEQQQQPQSQSQGQRVSFQLNAVAAAAAKRLRMTIDQLNMG

SEQ ID NO: 14104 - protein, 185 aa, Triticum aestivum
  peptide (1)..(185): Ceres Seq. ID no. 13597166
  misc_feature (1)..(108): Pfam Name: Pfam Description:  Transcription initiation factor IID
  misc_feature (68)..(185): NCBI GI NO: 30017563 NR Description: putative transcription initiation factor
  misc_feature (1)..(67): NCBI GI NO: 30017563 NR Description: putative transcription initiation factor
  misc_feature (1)..(165): NCBI GI NO: 15221048 NR Description: transcriptional activation factor TAFII32 -related
  misc_feature (1)..(145): NCBI GI NO: 24059851 NR Description: transcriptional activation factor TAFII32-like
  misc_feature (1)..(173): NCBI GI NO: 33086648 NR Description: Cb1-739 [Rattus norvegicus]
  misc_feature (1)..(116): NCBI GI NO: 4689154 NR Description: neuronal cell death-related protein [Homo sapiens]
  misc_feature (1)..(116): NCBI GI NO: 20070280 NR Description: TBP-associated factor 9L
  misc_feature (1)..(116): NCBI GI NO: 30186181 NR Description: Similar to TAF9-like RNA polymerase II
  misc_feature (1)..(173): NCBI GI NO: 18079237 NR Description: TAF9 RNA polymerase II, TATA box binding protein
  misc_feature (1)..(173): NCBI GI NO: 34576553 NR Description: TAF9 RNA polymerase II, TATA box binding protein
MGLGEGEYEPRVVHQFLDLAYRYAGDVLGDAQVYADHAGKPQLDADDVRLAIQAKVNFSFSQPPPREVLLELARSRNKIPLPKSIAPPGSIPLPPEQDTLLSQNYQLLPALKPPTQTEEAEDDEEGANADAANPNPNSLQDQTGNEQQQQPQSQSQGQRVSFQLNAVAAAAAKRLRMTIDQLNMG

SEQ ID NO: 14105 - DNA, 1314 bp, Triticum aestivum
  misc_feature (1)..(1314): Ceres Seq. ID no. 13597268
aatccattcatctcagatctcaactacatcccctcctggtgttctcttctcagcttggatcccgcaccaactgttcatcttcaaggtgctcattaaatcccacctctggttttctacccagcttggatctctaatcaggcttttctccaagttagagttgctcacctcaataacttcatacatcgtcagcaatggccaccggaggtataaccatagaaaccataccagaggaacttccacttgactttctgaagaaaattacgaataacttctccagcgacagtgatcatctgattggaacaggatcatttgggtcagtttatagggggtttctggataatggcgaggtgattgctgtgaagaaactcggggaagaatcacctgtgccacgtgacaaagtatttgcaaatgaggttaagaatattatggtgctcgaacatgaaaatattgtcaagttgatagcatactgctatgacacaaacaacagattggtgctgagcaatggaagacacattattgcagagattactgaaactttactctgctatgaatacttagctaagggcggcctcgacaagaatcttttcggtgaacccagtattgactgggatacacggttcaaaataataaaggggatttgtgaaggtgtacattttatacataccttacctagtcccattctccatttgggtctgaagactcaaaatatattgctggatgacaacttgacaccaaaactttcggattttggattcgccagaatatttggggaagaatacacccgaataaacacaagaagtgttgtgggacatgttggatacatggccccagagtatctatataatggtgaaatctcggcccgttcggacatatatagtttaggcctaattatattggagatctgcacgaaagagaagaatagttccagcactgaccagaagcatgcaaggaaatatattgacggggtaaaaaaacattggttccaaatagaacaaataatggccgagtattccgatttagaagaacattgttttgaccaaatagaaggctgcatacatattggactagaatgtgtggagcttgatcagaagaagagaccttccatagagcacattgtgaacaagctcaataatctcccaactgagaatagttaattccattagattgtaagacaatatactatgataggttagcaagtgcctacgtacaaagccacactcgtgtcattttttaagttttaagaatgattaaaattcattcctatgtggttattggaaggaagttaaacaagcgaaagggttgaccaaaaaccag

SEQ ID NO: 14106 - protein, 320 aa, Triticum aestivum
  peptide (1)..(320): Ceres Seq. ID no. 15222062
  misc_feature (120)..(312): NCBI GI NO: 37532178 NR Description: putative receptor-like protein kinase
  misc_feature (15)..(105): NCBI GI NO: 37532178 NR Description: putative receptor-like protein kinase
  misc_feature (11)..(315): NCBI GI NO: 38344521 NR Description: OSJNBa0016N04.14
  misc_feature (14)..(315): NCBI GI NO: 21728344 NR Description: stem rust resistance protein Rpg1
  misc_feature (14)..(315): NCBI GI NO: 21929723 NR Description: barley stem rust resistance protein
  misc_feature (14)..(315): NCBI GI NO: 21929729 NR Description: barley stem rust resistance protein
  misc_feature (146)..(312): NCBI GI NO: 38344522 NR Description: OSJNBa0016N04.15
  misc_feature (11)..(133): NCBI GI NO: 38344522 NR Description: OSJNBa0016N04.15
  misc_feature (54)..(315): NCBI GI NO: 21724199 NR Description: stem rust resistance protein
  misc_feature (14)..(315): NCBI GI NO: 21929723 NR Description: barley stem rust resistance protein
MATGGITIETIPEELPLDFLKKITNNFSSDSDHLIGTGSFGSVYRGFLDNGEVIAVKKLGEESPVPRDKVFANEVKNIMVLEHENIVKLIAYCYDTNNRLVLSNGRHIIAEITETLLCYEYLAKGGLDKNLFGEPSIDWDTRFKIIKGICEGVHFIHTLPSPILHLGLKTQNILLDDNLTPKLSDFGFARIFGEEYTRINTRSVVGHVGYMAPEYLYNGEISARSDIYSLGLIILEICTKEKNSSSTDQKHARKYIDGVKKHWFQIEQIMAEYSDLEEHCFDQIEGCIHIGLECVELDQKKRPSIEHIVNKLNNLPTENS

SEQ ID NO: 14107 - protein, 242 aa, Triticum aestivum
  peptide (1)..(242): Ceres Seq. ID no. 15222063
  misc_feature (42)..(234): NCBI GI NO: 37532178 NR Description: putative receptor-like protein kinase
  misc_feature (1)..(27): NCBI GI NO: 37532178 NR Description: putative receptor-like protein kinase
  misc_feature (1)..(237): NCBI GI NO: 38344521 NR Description: OSJNBa0016N04.14
  misc_feature (1)..(237): NCBI GI NO: 21728344 NR Description: stem rust resistance protein Rpg1
  misc_feature (1)..(237): NCBI GI NO: 21929729 NR Description: barley stem rust resistance protein
  misc_feature (1)..(237): NCBI GI NO: 21929723 NR Description: barley stem rust resistance protein
  misc_feature (68)..(234): NCBI GI NO: 38344522 NR Description: OSJNBa0016N04.15
  misc_feature (1)..(55): NCBI GI NO: 38344522 NR Description: OSJNBa0016N04.15
  misc_feature (1)..(237): NCBI GI NO: 21724199 NR Description: stem rust resistance protein
  misc_feature (1)..(237): NCBI GI NO: 21929723 NR Description: barley stem rust resistance protein
MVLEHENIVKLIAYCYDTNNRLVLSNGRHIIAEITETLLCYEYLAKGGLDKNLFGEPSIDWDTRFKIIKGICEGVHFIHTLPSPILHLGLKTQNILLDDNLTPKLSDFGFARIFGEEYTRINTRSVVGHVGYMAPEYLYNGEISARSDIYSLGLIILEICTKEKNSSSTDQKHARKYIDGVKKHWFQIEQIMAEYSDLEEHCFDQIEGCIHIGLECVELDQKKRPSIEHIVNKLNNLPTENS

SEQ ID NO: 14108 - DNA, 1354 bp, Triticum aestivum
  misc_feature (1)..(1354): Ceres Seq. ID no. 13597269
aacctatcaccagtcaccaccattataaaccaacggccagctaggtagctaaagtgacctcctgtgagcaagaaaagctcgccaagatcagtagtgctaagcgacaggtagtgagccaagccagagcaacgaaggatggcgtccgagacgagcgtcgccgacgagaaggcgcccgctgggctgagccgctacgaggcggacgcggaggacgggcaggagggcggcggcgacgaaaagtcccggctgtccggcctgctgtggcacggcgggtcggcgtacgacgcgtggttcagctgcgcgtcgaaccaggtcgcgcaggtcctgctgacgctgccctactcgttcgcgcagctgggcatggtgagcggcatcctgttccagctcttctacggcctcctcggcagctggaccgcctacctcatcagcatcctctacctcgagtaccgcacccgcaaggagaaggacaaggtcgacttccgcaaccacgtcatccagtggttcgaggtgctggacgggctgctggggcggcactggcggaacgtggggctggccttcaactgcacgttcctgctgttcgggtcggtgatccagctcatcggctgcgctagcaacatctactacgtgaacgaccacctggacaagcggacgtggacctacatcttcggcgcctgctgcgccaccaccgtcttcatcccctccttccacaactaccgcgtctggtccttcctcggcctcctcatgaccacctacaccgcctggtacatcgccgtcgcctccctcatgcacggccaggccgacgccgtcaagcactccggccccaccaccatcatgctctacttcaccggcgccaccaacatcctctacaccttcggggggcacgctgtcaccgtgtaagccgacacgccccaccccgccccatcgtcccacctgctcacttttcacttgcatgccctaatctttttccaaagctgatcatctagtttatccgtcgtatatatacaatgttgtaacggtcactggtcacggagcgtgcacgctactactgcccagctcggggtcacgtgcaacgggaatgtcgtctgacatgcggggccgtcctgtgtataagcaacgggcgtcacctggggaccacctagacctagacatgcacgcacggtgcccatatgcgtacatgcagtatatcccaagagcacacacgtgctacccacacatcaaccgagcacaatgctcgtggatgctggagcggaacatatacgtttctgaattttcaacataaacaaagttgaaacctgagctagcaggataatatatctatctacgattttcgttaccctcaaaaaagaatttagggtcc

SEQ ID NO: 14109 - protein, 252 aa, Triticum aestivum
  peptide (1)..(252): Ceres Seq. ID no. 13597270
  misc_feature (6)..(252): NCBI GI NO: 6689614 NR Description: AUX1 protein [Zea mays]
  misc_feature (1)..(252): NCBI GI NO: 37531048 NR Description: putative AUX1-like permease
  misc_feature (32)..(252): NCBI GI NO: 15226450 NR Description: amino acid permease, putative
  misc_feature (7)..(252): NCBI GI NO: 10800922 NR Description: putative AUX1-like permease [Medicago truncatula]
  misc_feature (32)..(252): NCBI GI NO: 21586474 NR Description: auxin influx carrier protein [Medicago truncatula]
  misc_feature (10)..(252): NCBI GI NO: 15217443 NR Description: amino acid permease, putative
  misc_feature (32)..(252): NCBI GI NO: 14279184 NR Description: putative AUX1-like permease
  misc_feature (1)..(252): NCBI GI NO: 25956260 NR Description: AUX1-like auxin transport protein
  misc_feature (24)..(252): NCBI GI NO: 18404642 NR Description: amino acid permease, putative (AUX1)
  misc_feature (1)..(252): NCBI GI NO: 34908418 NR Description: putative AUX1-like permease
MASETSVADEKAPAGLSRYEADAEDGQEGGGDEKSRLSGLLWHGGSAYDAWFSCASNQVAQVLLTLPYSFAQLGMVSGILFQLFYGLLGSWTAYLISILYLEYRTRKEKDKVDFRNHVIQWFEVLDGLLGRHWRNVGLAFNCTFLLFGSVIQLIGCASNIYYVNDHLDKRTWTYIFGACCATTVFIPSFHNYRVWSFLGLLMTTYTAWYIAVASLMHGQADAVKHSGPTTIMLYFTGATNILYTFGGHAVTV

SEQ ID NO: 14110 - protein, 178 aa, Triticum aestivum
  peptide (1)..(178): Ceres Seq. ID no. 13597271
  misc_feature (1)..(178): NCBI GI NO: 6689614 NR Description: AUX1 protein [Zea mays]
  misc_feature (1)..(178): NCBI GI NO: 37531048 NR Description: putative AUX1-like permease
  misc_feature (1)..(178): NCBI GI NO: 15226450 NR Description: amino acid permease, putative
  misc_feature (1)..(178): NCBI GI NO: 10800922 NR Description: putative AUX1-like permease [Medicago truncatula]
  misc_feature (1)..(178): NCBI GI NO: 21586474 NR Description: auxin influx carrier protein [Medicago truncatula]
  misc_feature (1)..(178): NCBI GI NO: 15217443 NR Description: amino acid permease, putative
  misc_feature (1)..(178): NCBI GI NO: 14279184 NR Description: putative AUX1-like permease
  misc_feature (1)..(178): NCBI GI NO: 25956260 NR Description: AUX1-like auxin transport protein
  misc_feature (1)..(178): NCBI GI NO: 18404642 NR Description: amino acid permease, putative (AUX1)
  misc_feature (1)..(178): NCBI GI NO: 34908418 NR Description: putative AUX1-like permease
MVSGILFQLFYGLLGSWTAYLISILYLEYRTRKEKDKVDFRNHVIQWFEVLDGLLGRHWRNVGLAFNCTFLLFGSVIQLIGCASNIYYVNDHLDKRTWTYIFGACCATTVFIPSFHNYRVWSFLGLLMTTYTAWYIAVASLMHGQADAVKHSGPTTIMLYFTGATNILYTFGGHAVTV

SEQ ID NO: 14111 - DNA, 1725 bp, Triticum aestivum
  misc_feature (1)..(1725): Ceres Seq. ID no. 13597325
ttttttttcgagcggcgacgaaatgcagtccacctccgtttgctacccacgcacgcggccgcgggcccacggccggaggagctagaaagacctatcgccaccaggcccggtcccgagggaaaggaatccagcaaggcagccaggagcgcgcccccacccgccggcgacggccacatgccgaccgcctcctgcctccgcccgcctctccgcagcggccgctccgccgcggcgggcctcaggttccctcccccggcggggctggcgattgggagctggcggaggaggctcgccggggtcggggtggcggccgcctccgcctcgcccttcgacgagctctacgcgcggggaaggcccatccacggcccctccaagaaatctaccttgtggaatttgatccaagacatagagcctttggatcttagtgtcattcagaaagatgttcctcttgaaacggttgatgcaatgaagaggaccatctctggcatgttgggtctgcttccatctgatcagttccgtgttgttgtagaagccctttggagtccatttttcaagttattggtatcttcaatcatgactgggtatactctacgtaatgctgaatgcaggctctcttttgaaaggaacctagaactttctgaagaagatgctgaatgtgagaaaagagacacgactgaagataatcttcatgatatcaatttgggtaggcctgttacaattttcagattatcggaagacgacatgccccaggactctggaaaaagtgacgaagaatcatctggtgagagtatgggggaaatgttaagtaacttaacaccccaagtggaagagcagattattcggttgcaatctcgtttggatgcgatgaaaaaggagttgcatgacctgaagaggaaaaattctgcccttcaaatgcaacagtttgttggagaagagaaaaatgatctgctagactatctaagatccctaacaccagagaaggttgctgaactctcggaatccacctgtcccggtgtgcaagaggctatccagtctgttgtgcatggtttgcttgctactctttcccccaaggtacactcaaagtctcctccgccactagagaatgctgggggagccctaaatcgtgggggtgaggacgatgactgtgcagagcttgtcgagaatacttccctcccgtttcagcccctaatatctgtcccacgtgattatcttgcacgtttgctattctggtgcatgttgctgggtcactacatccggggtctggaataccggttagagctggcacaccttctcagaatatctagcgacgtggggtctttccccattgatgacaatcattttatttgagaaagcttcgctggcttattgagatccatcagcgaagaggatggaaatgcactggccaagaggccgcagaagttgctgtttggggcatttcctgacaatgaaacagggagttctgggccatagctcctgttgtagttcttgtaaagtcggaacgaaggcgttcgggtgtaaagttagtgttacatatcaatgtgaacaatatattttatttccttctatttattgtgtcgtatacaaaataaacatgttgttcttgctgctaatctcgtggtagcatggtggatactgggtattaggcatcccttgtactcataggttgtatgtatttgtctaatgtttatcacgtgaatgatattatattgtcgagtcgtatcaaggttc

SEQ ID NO: 14112 - protein, 447 aa, Triticum aestivum
  peptide (1)..(447): Ceres Seq. ID no. 13597326
  misc_feature (59)..(447): NCBI GI NO: 40538958 NR Description: expressed protein
  misc_feature (124)..(438): NCBI GI NO: 15226027 NR Description: expressed protein [Arabidopsis thaliana]
  misc_feature (107)..(441): NCBI GI NO: 6648962 NR Description: seed maturation protein PM23 [Glycine max]
  misc_feature (130)..(353): NCBI GI NO: 15242177 NR Description: seed maturation -related protein
  misc_feature (130)..(353): NCBI GI NO: 21536629 NR Description: seed maturation-like protein
  misc_feature (232)..(427): NCBI GI NO: 15242177 NR Description: seed maturation -related protein
  misc_feature (232)..(427): NCBI GI NO: 21536629 NR Description: seed maturation-like protein
  misc_feature (123)..(308): NCBI GI NO: 30696873 NR Description: expressed protein [Arabidopsis thaliana]
  misc_feature (403)..(440): NCBI GI NO: 30696873 NR Description: expressed protein [Arabidopsis thaliana]
  misc_feature (123)..(308): NCBI GI NO: 25404427 NR Description: unknown protein, 83181-85105
FFFERRRNAVHLRLLPTHAAAGPRPEELERPIATRPGPEGKESSKAARSAPPPAGDGHMPTASCLRPPLRSGRSAAAGLRFPPPAGLAIGSWRRRLAGVGVAAASASPFDELYARGRPIHGPSKKSTLWNLIQDIEPLDLSVIQKDVPLETVDAMKRTISGMLGLLPSDQFRVVVEALWSPFFKLLVSSIMTGYTLRNAECRLSFERNLELSEEDAECEKRDTTEDNLHDINLGRPVTIFRLSEDDMPQDSGKSDEESSGESMGEMLSNLTPQVEEQIIRLQSRLDAMKKELHDLKRKNSALQMQQFVGEEKNDLLDYLRSLTPEKVAELSESTCPGVQEAIQSVVHGLLATLSPKVHSKSPPPLENAGGALNRGGEDDDCAELVENTSLPFQPLISVPRDYLARLLFWCMLLGHYIRGLEYRLELAHLLRISSDVGSFPIDDNHFI

SEQ ID NO: 14113 - protein, 389 aa, Triticum aestivum
  peptide (1)..(389): Ceres Seq. ID no. 13597327
  misc_feature (1)..(389): NCBI GI NO: 40538958 NR Description: expressed protein
  misc_feature (66)..(380): NCBI GI NO: 15226027 NR Description: expressed protein [Arabidopsis thaliana]
  misc_feature (49)..(383): NCBI GI NO: 6648962 NR Description: seed maturation protein PM23 [Glycine max]
  misc_feature (72)..(295): NCBI GI NO: 15242177 NR Description: seed maturation -related protein
  misc_feature (72)..(295): NCBI GI NO: 21536629 NR Description: seed maturation-like protein
  misc_feature (174)..(369): NCBI GI NO: 15242177 NR Description: seed maturation -related protein
  misc_feature (174)..(369): NCBI GI NO: 21536629 NR Description: seed maturation-like protein
  misc_feature (65)..(250): NCBI GI NO: 30696873 NR Description: expressed protein [Arabidopsis thaliana]
  misc_feature (345)..(382): NCBI GI NO: 30696873 NR Description: expressed protein [Arabidopsis thaliana]
  misc_feature (65)..(250): NCBI GI NO: 25404427 NR Description: unknown protein, 83181-85105
MPTASCLRPPLRSGRSAAAGLRFPPPAGLAIGSWRRRLAGVGVAAASASPFDELYARGRPIHGPSKKSTLWNLIQDIEPLDLSVIQKDVPLETVDAMKRTISGMLGLLPSDQFRVVVEALWSPFFKLLVSSIMTGYTLRNAECRLSFERNLELSEEDAECEKRDTTEDNLHDINLGRPVTIFRLSEDDMPQDSGKSDEESSGESMGEMLSNLTPQVEEQIIRLQSRLDAMKKELHDLKRKNSALQMQQFVGEEKNDLLDYLRSLTPEKVAELSESTCPGVQEAIQSVVHGLLATLSPKVHSKSPPPLENAGGALNRGGEDDDCAELVENTSLPFQPLISVPRDYLARLLFWCMLLGHYIRGLEYRLELAHLLRISSDVGSFPIDDNHFI

SEQ ID NO: 14114 - protein, 293 aa, Triticum aestivum
  peptide (1)..(293): Ceres Seq. ID no. 13597328
  misc_feature (1)..(293): NCBI GI NO: 40538958 NR Description: expressed protein
  misc_feature (1)..(284): NCBI GI NO: 15226027 NR Description: expressed protein [Arabidopsis thaliana]
  misc_feature (1)..(287): NCBI GI NO: 6648962 NR Description: seed maturation protein PM23 [Glycine max]
  misc_feature (1)..(199): NCBI GI NO: 15242177 NR Description: seed maturation -related protein
  misc_feature (1)..(199): NCBI GI NO: 21536629 NR Description: seed maturation-like protein
  misc_feature (78)..(273): NCBI GI NO: 15242177 NR Description: seed maturation -related protein
  misc_feature (78)..(273): NCBI GI NO: 21536629 NR Description: seed maturation-like protein
  misc_feature (1)..(154): NCBI GI NO: 30696873 NR Description: expressed protein [Arabidopsis thaliana]
  misc_feature (249)..(286): NCBI GI NO: 30696873 NR Description: expressed protein [Arabidopsis thaliana]
  misc_feature (1)..(154): NCBI GI NO: 25404427 NR Description: unknown protein, 83181-85105
MKRTISGMLGLLPSDQFRVVVEALWSPFFKLLVSSIMTGYTLRNAECRLSFERNLELSEEDAECEKRDTTEDNLHDINLGRPVTIFRLSEDDMPQDSGKSDEESSGESMGEMLSNLTPQVEEQIIRLQSRLDAMKKELHDLKRKNSALQMQQFVGEEKNDLLDYLRSLTPEKVAELSESTCPGVQEAIQSVVHGLLATLSPKVHSKSPPPLENAGGALNRGGEDDDCAELVENTSLPFQPLISVPRDYLARLLFWCMLLGHYIRGLEYRLELAHLLRISSDVGSFPIDDNHFI

SEQ ID NO: 14115 - DNA, 1460 bp, Triticum aestivum
  misc_feature (1)..(1460): Ceres Seq. ID no. 13598495
aggtatcgtgcacttcactcgcttggcatttcgtcacgtctcttccttcctttctcagttccccgcagccgcttcgctcgcttgccttctctcgccgtctccgcctcctcctccagtcctccgtcccacccctcgacgattcctcggcgatgggcggcgcggcggcggcgacgggcgccgccaggtggatccagcggctgagcgcggccaggatctcgacggaggcgctggagcggggccagagccgcgtcatcgacgcctccctcaccctcatccgcgagcgcgccaagctcaagggcgagctgctgcgtgctatgggcggtgtcaaagcttctgcaacactcttaggagtaccccttgggcacaactcgtctttcttgcaggggcctgcgtttgctcctcctcgcataagggaggccatttggtgtggaagcaccaactctagcacagaagaaggcaaggaattaaatgatccaagggtgctaactgatgtcggtgatgtccccatacaagagattcgtgactgtggtgttgaagatgacagattgatgcatgtaatcagcgagtctgtcaaaacagtaatggacgaagatcctcttcggccgttggtcttaggaggcgatcactcgatatcttatccagttgttagggctgtgtctgaaaagcttggcggacctgttgacattcttcatcttgacgcacatccagatatctatgactgttttgaaggcaacacttactcacacgcttcttcatttgcaagaataatggaaggaggttatgcgaggcgacttttgcaggttggacttagatcaattaccaaagaaggacgtgagcaagggaagagatttggtgtggaacagtatgagatgcgcaccttctccagagatcgggagaagcttgagaatctgaaacttggggaaggtgtgaagggggtgtatgtctccgttgacgtggactgcctcgaccccgcattcgctcctggcgtgtctcatatcgagccgggaggcctctcatttcgcgacgtgctcaacatcctccagaatctgcaaggcgatgtcgtcgccggagatgtggtggagttcaacccgcagcgcgacacggtcgacgggatgacggctatggtcgccgcgaagctggtccgggagctgagcgccaagatctcaaaatgagcagcgacagtcaggacagaggcagcagcagagaggattttcaggcacagtggtcgttgatcttagttcctgccaatcattcagttgtgccacgttttagtctgacaatcttctataaataataaaatcaggctgcaaaacgacttcgaatttggtatgtgctctgtggtatttgttggttctcctttcacatgcacgcatccaagattaagctcgtaggtgcctagtagtcgataagaacatcgtctctcacgcaaaggatatgttgaaaaatctgaaatgaatttg

SEQ ID NO: 14116 - protein, 389 aa, Triticum aestivum
  peptide (1)..(389): Ceres Seq. ID no. 13598496
  misc_feature (109)..(388): Pfam Name: Pfam Description:  Arginase family
  misc_feature (62)..(389): NCBI GI NO: 15236640 NR Description: arginase [Arabidopsis thaliana]
  misc_feature (62)..(381): NCBI GI NO: 13182957 NR Description: arginase [Brassica napus]
  misc_feature (61)..(389): NCBI GI NO: 12802155 NR Description: arginase [Pinus taeda]
  misc_feature (62)..(389): NCBI GI NO: 15236635 NR Description: arginase -related [Arabidopsis thaliana]
  misc_feature (62)..(389): NCBI GI NO: 21592908 NR Description: putative arginase [Arabidopsis thaliana]
  misc_feature (63)..(389): NCBI GI NO: 3334122 NR Description: Arginase
  misc_feature (110)..(383): NCBI GI NO: 23021440 NR Description: hypothetical protein
  misc_feature (202)..(386): NCBI GI NO: 14600625 NR Description: agmatinase [Aeropyrum pernix]
  misc_feature (109)..(383): NCBI GI NO: 30023400 NR Description: Agmatinase [Bacillus cereus ATCC 14579]
  misc_feature (112)..(389): NCBI GI NO: 37537722 NR Description: agmatine ureohydrolase (agmatinase); agmatinase
VSCTSLAWHFVTSLPSFLSSPQPLRSLAFSRRLRLLLQSSVPPLDDSSAMGGAAAATGAARWIQRLSAARISTEALERGQSRVIDASLTLIRERAKLKGELLRAMGGVKASATLLGVPLGHNSSFLQGPAFAPPRIREAIWCGSTNSSTEEGKELNDPRVLTDVGDVPIQEIRDCGVEDDRLMHVISESVKTVMDEDPLRPLVLGGDHSISYPVVRAVSEKLGGPVDILHLDAHPDIYDCFEGNTYSHASSFARIMEGGYARRLLQVGLRSITKEGREQGKRFGVEQYEMRTFSRDREKLENLKLGEGVKGVYVSVDVDCLDPAFAPGVSHIEPGGLSFRDVLNILQNLQGDVVAGDVVEFNPQRDTVDGMTAMVAAKLVRELSAKISK

SEQ ID NO: 14117 - protein, 340 aa, Triticum aestivum
  peptide (1)..(340): Ceres Seq. ID no. 13598497
  misc_feature (60)..(339): Pfam Name: Pfam Description:  Arginase family
  misc_feature (13)..(340): NCBI GI NO: 15236640 NR Description: arginase [Arabidopsis thaliana]
  misc_feature (13)..(332): NCBI GI NO: 13182957 NR Description: arginase [Brassica napus]
  misc_feature (12)..(340): NCBI GI NO: 12802155 NR Description: arginase [Pinus taeda]
  misc_feature (13)..(340): NCBI GI NO: 15236635 NR Description: arginase -related [Arabidopsis thaliana]
  misc_feature (13)..(340): NCBI GI NO: 21592908 NR Description: putative arginase [Arabidopsis thaliana]
  misc_feature (14)..(340): NCBI GI NO: 3334122 NR Description: Arginase
  misc_feature (61)..(334): NCBI GI NO: 23021440 NR Description: hypothetical protein
  misc_feature (153)..(337): NCBI GI NO: 14600625 NR Description: agmatinase [Aeropyrum pernix]
  misc_feature (60)..(334): NCBI GI NO: 30023400 NR Description: Agmatinase [Bacillus cereus ATCC 14579]
  misc_feature (63)..(340): NCBI GI NO: 37537722 NR Description: agmatine ureohydrolase (agmatinase); agmatinase
MGGAAAATGAARWIQRLSAARISTEALERGQSRVIDASLTLIRERAKLKGELLRAMGGVKASATLLGVPLGHNSSFLQGPAFAPPRIREAIWCGSTNSSTEEGKELNDPRVLTDVGDVPIQEIRDCGVEDDRLMHVISESVKTVMDEDPLRPLVLGGDHSISYPVVRAVSEKLGGPVDILHLDAHPDIYDCFEGNTYSHASSFARIMEGGYARRLLQVGLRSITKEGREQGKRFGVEQYEMRTFSRDREKLENLKLGEGVKGVYVSVDVDCLDPAFAPGVSHIEPGGLSFRDVLNILQNLQGDVVAGDVVEFNPQRDTVDGMTAMVAAKLVRELSAKISK

SEQ ID NO: 14118 - protein, 285 aa, Triticum aestivum
  peptide (1)..(285): Ceres Seq. ID no. 13598498
  misc_feature (5)..(284): Pfam Name: Pfam Description:  Arginase family
  misc_feature (1)..(285): NCBI GI NO: 15236640 NR Description: arginase [Arabidopsis thaliana]
  misc_feature (1)..(277): NCBI GI NO: 13182957 NR Description: arginase [Brassica napus]
  misc_feature (1)..(285): NCBI GI NO: 12802155 NR Description: arginase [Pinus taeda]
  misc_feature (1)..(285): NCBI GI NO: 15236635 NR Description: arginase -related [Arabidopsis thaliana]
  misc_feature (1)..(285): NCBI GI NO: 21592908 NR Description: putative arginase [Arabidopsis thaliana]
  misc_feature (1)..(285): NCBI GI NO: 3334122 NR Description: Arginase
  misc_feature (6)..(279): NCBI GI NO: 23021440 NR Description: hypothetical protein
  misc_feature (98)..(282): NCBI GI NO: 14600625 NR Description: agmatinase [Aeropyrum pernix]
  misc_feature (5)..(279): NCBI GI NO: 30023400 NR Description: Agmatinase [Bacillus cereus ATCC 14579]
  misc_feature (8)..(285): NCBI GI NO: 37537722 NR Description: agmatine ureohydrolase (agmatinase); agmatinase
MGGVKASATLLGVPLGHNSSFLQGPAFAPPRIREAIWCGSTNSSTEEGKELNDPRVLTDVGDVPIQEIRDCGVEDDRLMHVISESVKTVMDEDPLRPLVLGGDHSISYPVVRAVSEKLGGPVDILHLDAHPDIYDCFEGNTYSHASSFARIMEGGYARRLLQVGLRSITKEGREQGKRFGVEQYEMRTFSRDREKLENLKLGEGVKGVYVSVDVDCLDPAFAPGVSHIEPGGLSFRDVLNILQNLQGDVVAGDVVEFNPQRDTVDGMTAMVAAKLVRELSAKISK

SEQ ID NO: 14119 - DNA, 1317 bp, Triticum aestivum
  misc_feature (1)..(1317): Ceres Seq. ID no. 12617080
atccagtccagcgctttctcctcgctcccaccccacccttcccctccaatagccaagcaagaactgggacacaagcaaagctttgccaagaggactaccaccagaggaggagacaaggaatccgccgcgctcgcttcccctccagcccaaccccaaccccaaccaggccccgcggcgaccacaagctcctccgctccccgcaacctcgcctcgccacgctcaggctgttgagtggccagaaatctggatatggatgtgcctgcggctccagccatggcatttaaagcctacaagtacaaagaggttcttgtcagggactacttgctcgcagactcgtatgctccatacgctgctgtgctcggggggatcctgatgtgcaaattggcctatgatttcacgcgcattatcagttcatttaacttcaaaggttatgcttctcttaacaatatgcagaagatcgaatggaacaacagggggatgtccactgtccatgcaatattcattacagttatgtcagtatacctagtgttcttctcgggtatgttttctgaccagctggatggaccagtaacagtgagaagttcaagcctctccagttttacattaggggtctctattgggtatttcattacagacattgccatgatatattggctttaccctgcccttggtggaatggagtatgttatccaccacatgctgtcacttatgtctacaatgtacgctatgctttctggggaagcacatgtatacatatacatgggtctcatcactgagactacaacgccaggaatcaatctaagatggttccttgatgttgctggaatgaagaactccaaagcttaccttgttaacggagttgcaatggttgttacttggctggttgcaaggataatcctgttcatgtacttgttttaccacatgtttgtacattatgaccagattaagaagatgaacaccttcggctattttctggtacttattgcgccttgcataatcttcgtgatgaatgtgctttggttctccaagatcctaaaaggcctcaagaagacgatggccaagaggcatgctgagtagtggaatgtgtgttcatgattaacgtacggccaccatccgatcatctgtagatttggttacatctgcatatagcttatgagtagtcagtcactactgtagcccatacctgtgatttcagctcggctgtcatgtttcggtgtatgactacccagccagcctttcctagacgctcgatttgtatatatgtttggttacggctgcatttacctatttgcatgttaataaatcttttagttgtgt

SEQ ID NO: 14120 - protein, 275 aa, Triticum aestivum
  peptide (1)..(275): Ceres Seq. ID no. 12617081
  misc_feature (32)..(272): Pfam Name: DUF887 Pfam Description: Eukaryotic protein of unknown function
  misc_feature (9)..(271): NCBI GI NO: 40538924 NR Description: expressed protein
  misc_feature (9)..(272): NCBI GI NO: 22328807 NR Description: unknown protein; protein id: At4g19645.1
  misc_feature (10)..(272): NCBI GI NO: 18397885 NR Description: expressed protein; protein id: At1g31300
  misc_feature (34)..(275): NCBI GI NO: 34909246 NR Description: B1148D12.11
  misc_feature (34)..(271): NCBI GI NO: 18413327 NR Description: expressed protein; protein id: At4g10360
  misc_feature (34)..(271): NCBI GI NO: 21537382 NR Description: unknown [Arabidopsis thaliana]
  misc_feature (10)..(170): NCBI GI NO: 25403400 NR Description: protein T19E23.9 [imported] - Arabidopsis thaliana
  misc_feature (216)..(272): NCBI GI NO: 25403400 NR Description: protein T19E23.9 [imported] - Arabidopsis thaliana
  misc_feature (34)..(271): NCBI GI NO: 7486070 NR Description: hypothetical protein F24G24
  misc_feature (60)..(270): NCBI GI NO: 34860211 NR Description: similar to RIKEN cDNA C730036B01
MDVPAAPAMAFKAYKYKEVLVRDYLLADSYAPYAAVLGGILMCKLAYDFTRIISSFNFKGYASLNNMQKIEWNNRGMSTVHAIFITVMSVYLVFFSGMFSDQLDGPVTVRSSSLSSFTLGVSIGYFITDIAMIYWLYPALGGMEYVIHHMLSLMSTMYAMLSGEAHVYIYMGLITETTTPGINLRWFLDVAGMKNSKAYLVNGVAMVVTWLVARIILFMYLFYHMFVHYDQIKKMNTFGYFLVLIAPCIIFVMNVLWFSKILKGLKKTMAKRHAE

SEQ ID NO: 14121 - protein, 267 aa, Triticum aestivum
  peptide (1)..(267): Ceres Seq. ID no. 12617082
  misc_feature (24)..(264): Pfam Name: DUF887 Pfam Description: Eukaryotic protein of unknown function
  misc_feature (1)..(263): NCBI GI NO: 40538924 NR Description: expressed protein
  misc_feature (1)..(264): NCBI GI NO: 22328807 NR Description: unknown protein; protein id: At4g19645.1
  misc_feature (2)..(264): NCBI GI NO: 18397885 NR Description: expressed protein; protein id: At1g31300
  misc_feature (26)..(267): NCBI GI NO: 34909246 NR Description: B1148D12.11
  misc_feature (26)..(263): NCBI GI NO: 18413327 NR Description: expressed protein; protein id: At4g10360
  misc_feature (26)..(263): NCBI GI NO: 21537382 NR Description: unknown [Arabidopsis thaliana]
  misc_feature (2)..(162): NCBI GI NO: 25403400 NR Description: protein T19E23.9 [imported] - Arabidopsis thaliana
  misc_feature (208)..(264): NCBI GI NO: 25403400 NR Description: protein T19E23.9 [imported] - Arabidopsis thaliana
  misc_feature (26)..(263): NCBI GI NO: 7486070 NR Description: hypothetical protein F24G24
  misc_feature (52)..(262): NCBI GI NO: 34860211 NR Description: similar to RIKEN cDNA C730036B01
MAFKAYKYKEVLVRDYLLADSYAPYAAVLGGILMCKLAYDFTRIISSFNFKGYASLNNMQKIEWNNRGMSTVHAIFITVMSVYLVFFSGMFSDQLDGPVTVRSSSLSSFTLGVSIGYFITDIAMIYWLYPALGGMEYVIHHMLSLMSTMYAMLSGEAHVYIYMGLITETTTPGINLRWFLDVAGMKNSKAYLVNGVAMVVTWLVARIILFMYLFYHMFVHYDQIKKMNTFGYFLVLIAPCIIFVMNVLWFSKILKGLKKTMAKRHAE

SEQ ID NO: 14122 - protein, 234 aa, Triticum aestivum
  peptide (1)..(234): Ceres Seq. ID no. 12617083
  misc_feature (1)..(231): Pfam Name: DUF887 Pfam Description: Eukaryotic protein of unknown function
  misc_feature (1)..(230): NCBI GI NO: 40538924 NR Description: expressed protein
  misc_feature (1)..(231): NCBI GI NO: 22328807 NR Description: unknown protein; protein id: At4g19645.1
  misc_feature (1)..(231): NCBI GI NO: 18397885 NR Description: expressed protein; protein id: At1g31300
  misc_feature (1)..(234): NCBI GI NO: 34909246 NR Description: B1148D12.11
  misc_feature (1)..(230): NCBI GI NO: 18413327 NR Description: expressed protein; protein id: At4g10360
  misc_feature (1)..(230): NCBI GI NO: 21537382 NR Description: unknown [Arabidopsis thaliana]
  misc_feature (1)..(129): NCBI GI NO: 25403400 NR Description: protein T19E23.9 [imported] - Arabidopsis thaliana
  misc_feature (175)..(231): NCBI GI NO: 25403400 NR Description: protein T19E23.9 [imported] - Arabidopsis thaliana
  misc_feature (1)..(230): NCBI GI NO: 7486070 NR Description: hypothetical protein F24G24
  misc_feature (19)..(229): NCBI GI NO: 34860211 NR Description: similar to RIKEN cDNA C730036B01
MCKLAYDFTRIISSFNFKGYASLNNMQKIEWNNRGMSTVHAIFITVMSVYLVFFSGMFSDQLDGPVTVRSSSLSSFTLGVSIGYFITDIAMIYWLYPALGGMEYVIHHMLSLMSTMYAMLSGEAHVYIYMGLITETTTPGINLRWFLDVAGMKNSKAYLVNGVAMVVTWLVARIILFMYLFYHMFVHYDQIKKMNTFGYFLVLIAPCIIFVMNVLWFSKILKGLKKTMAKRHAE

SEQ ID NO: 14123 - DNA, 1672 bp, Triticum aestivum
  misc_feature (1)..(1672): Ceres Seq. ID no. 15225196
ttgctacacagaacatcctcaccgcataccactcttccctttccctgtacccgaatcatcatccgttccccatctcatccgttcccttgagagctgcagcggcgacatgggcggcggcggcgcagccggggatgccgatgggtgggcggatcaggaccaggggaacggcgggagccgcggcgggggtgaggcgaagcggtcggagatctatacctacgaggccggttggcacatctacggtatgaactggagcgtgcggcgggacaagaagtaccgactcgccatcgcaagttttctcgagcagctcgtcaatcgcgtggaggtggtccagctcgacgagtccacaggtgacatcgcccccgtgctctccttcgaccaccctttccctccccccaagtccatgttcgtcccggacccccaaggcctccgccccgatctgcttgccacctctgcagacctccttcgcatatggcgcatcacggacgacgacgccgctgccccgggcgctgccgactccaacaatggctccgtccgctgcaacggcgtggggagccccgctggtcagcagccgggcgtcaagctgtgctgcgagctcaacggcaaccgcaacagcgacttctgcggcccgctcacctcctttgactggaacgacgccgacccacgccgcatcggaacatcatccatcgataccacttgcaccatctgggacgttgaacgtgaggtagtcgacacccagctcatagcccatgacaaagaggtctatgacatagcctggggtggcgctggtgtctttgcatctgtttctgcggatggctcggtccgcgtgtttgatcttcgggataaggaacattccacaatcatctatgagagtagttctggcggcggctccaattctgctgctacggatggtggggctgtgttgccgacaccattggttaggctggggtggaacaagcaggacccaaggtatatggcaacaatcatcatggatagccccaaggtggtcgtgcttgacattcgctacccaacactgcctgtcgttgaactccaccgccatcatgctcctgtgaatgcaatcgcatgggcgcctcactcttcttgccacatttgcacagctggggatgactcgcaagcactgatatgggacctctcctccatgggcacggggaacaatagcggaggcaatggaaatggaaatggcaatgctgctgcagctgcagcagcagagggtggtcttgaccctatattggcttacactgcaggggcggaggtggagcagctgcagtggtcagctacccagcctgactgggttgccattgtattcgccaataaactgcagattctcagggtctgatttcttcattctagctttatcaatggtggggcagaaagaggcaaagaagcccatcatggatgatgagagttcaggcaatgggaggacggtaattttgcttttgctttagtgatgtatgttgcagacagctgatatgtgtgctgagttgctgatagaaatgatggttcactaggtagaagctggaattgacaatgaactgagttattaagagtaattagacttataggattagtgttggtgatactgaactaaattgctgttatttaaattgctcgactctagtactgctgttaacttgcttattgctgcaattgtcac

SEQ ID NO: 14124 - protein, 450 aa, Triticum aestivum
  peptide (1)..(450): Ceres Seq. ID no. 15225197
  misc_feature (198)..(236): Pfam Name: Pfam Description:  WD domain, G-beta repeat
  misc_feature (40)..(450): NCBI GI NO: 37719680 NR Description: WD40 repeat protein [Zea mays]
  misc_feature (198)..(386): NCBI GI NO: 22324803 NR Description: WD-repeat protein GhTTG2 [Gossypium hirsutum]
  misc_feature (49)..(184): NCBI GI NO: 22324803 NR Description: WD-repeat protein GhTTG2 [Gossypium hirsutum]
  misc_feature (409)..(450): NCBI GI NO: 22324803 NR Description: WD-repeat protein GhTTG2 [Gossypium hirsutum]
  misc_feature (192)..(387): NCBI GI NO: 15222113 NR Description: flower pigmentation protein ATAN11
  misc_feature (63)..(184): NCBI GI NO: 15222113 NR Description: flower pigmentation protein ATAN11
  misc_feature (409)..(450): NCBI GI NO: 15222113 NR Description: flower pigmentation protein ATAN11
  misc_feature (192)..(387): NCBI GI NO: 2290528 NR Description: ATAN11 [Arabidopsis thaliana]
  misc_feature (63)..(184): NCBI GI NO: 2290528 NR Description: ATAN11 [Arabidopsis thaliana]
  misc_feature (409)..(450): NCBI GI NO: 2290528 NR Description: ATAN11 [Arabidopsis thaliana]
CYTEHPHRIPLFPFPVPESSSVPHLIRSLESCSGDMGGGGAAGDADGWADQDQGNGGSRGGGEAKRSEIYTYEAGWHIYGMNWSVRRDKKYRLAIASFLEQLVNRVEVVQLDESTGDIAPVLSFDHPFPPPKSMFVPDPQGLRPDLLATSADLLRIWRITDDDAAAPGAADSNNGSVRCNGVGSPAGQQPGVKLCCELNGNRNSDFCGPLTSFDWNDADPRRIGTSSIDTTCTIWDVEREVVDTQLIAHDKEVYDIAWGGAGVFASVSADGSVRVFDLRDKEHSTIIYESSSGGGSNSAATDGGAVLPTPLVRLGWNKQDPRYMATIIMDSPKVVVLDIRYPTLPVVELHRHHAPVNAIAWAPHSSCHICTAGDDSQALIWDLSSMGTGNNSGGNGNGNGNAAAAAAAEGGLDPILAYTAGAEVEQLQWSATQPDWVAIVFANKLQILRV

SEQ ID NO: 14125 - protein, 415 aa, Triticum aestivum
  peptide (1)..(415): Ceres Seq. ID no. 15225198
  misc_feature (163)..(201): Pfam Name: Pfam Description:  WD domain, G-beta repeat
  misc_feature (5)..(415): NCBI GI NO: 37719680 NR Description: WD40 repeat protein [Zea mays]
  misc_feature (163)..(351): NCBI GI NO: 22324803 NR Description: WD-repeat protein GhTTG2 [Gossypium hirsutum]
  misc_feature (14)..(149): NCBI GI NO: 22324803 NR Description: WD-repeat protein GhTTG2 [Gossypium hirsutum]
  misc_feature (374)..(415): NCBI GI NO: 22324803 NR Description: WD-repeat protein GhTTG2 [Gossypium hirsutum]
  misc_feature (157)..(352): NCBI GI NO: 15222113 NR Description: flower pigmentation protein ATAN11
  misc_feature (28)..(149): NCBI GI NO: 15222113 NR Description: flower pigmentation protein ATAN11
  misc_feature (374)..(415): NCBI GI NO: 15222113 NR Description: flower pigmentation protein ATAN11
  misc_feature (157)..(352): NCBI GI NO: 2290528 NR Description: ATAN11 [Arabidopsis thaliana]
  misc_feature (28)..(149): NCBI GI NO: 2290528 NR Description: ATAN11 [Arabidopsis thaliana]
  misc_feature (374)..(415): NCBI GI NO: 2290528 NR Description: ATAN11 [Arabidopsis thaliana]
MGGGGAAGDADGWADQDQGNGGSRGGGEAKRSEIYTYEAGWHIYGMNWSVRRDKKYRLAIASFLEQLVNRVEVVQLDESTGDIAPVLSFDHPFPPPKSMFVPDPQGLRPDLLATSADLLRIWRITDDDAAAPGAADSNNGSVRCNGVGSPAGQQPGVKLCCELNGNRNSDFCGPLTSFDWNDADPRRIGTSSIDTTCTIWDVEREVVDTQLIAHDKEVYDIAWGGAGVFASVSADGSVRVFDLRDKEHSTIIYESSSGGGSNSAATDGGAVLPTPLVRLGWNKQDPRYMATIIMDSPKVVVLDIRYPTLPVVELHRHHAPVNAIAWAPHSSCHICTAGDDSQALIWDLSSMGTGNNSGGNGNGNGNAAAAAAAEGGLDPILAYTAGAEVEQLQWSATQPDWVAIVFANKLQILRV

SEQ ID NO: 14126 - protein, 370 aa, Triticum aestivum
  peptide (1)..(370): Ceres Seq. ID no. 15225199
  misc_feature (118)..(156): Pfam Name: Pfam Description:  WD domain, G-beta repeat
  misc_feature (1)..(370): NCBI GI NO: 37719680 NR Description: WD40 repeat protein [Zea mays]
  misc_feature (118)..(306): NCBI GI NO: 22324803 NR Description: WD-repeat protein GhTTG2 [Gossypium hirsutum]
  misc_feature (1)..(104): NCBI GI NO: 22324803 NR Description: WD-repeat protein GhTTG2 [Gossypium hirsutum]
  misc_feature (329)..(370): NCBI GI NO: 22324803 NR Description: WD-repeat protein GhTTG2 [Gossypium hirsutum]
  misc_feature (112)..(307): NCBI GI NO: 15222113 NR Description: flower pigmentation protein ATAN11
  misc_feature (1)..(104): NCBI GI NO: 15222113 NR Description: flower pigmentation protein ATAN11
  misc_feature (329)..(370): NCBI GI NO: 15222113 NR Description: flower pigmentation protein ATAN11
  misc_feature (112)..(307): NCBI GI NO: 2290528 NR Description: ATAN11 [Arabidopsis thaliana]
  misc_feature (1)..(104): NCBI GI NO: 2290528 NR Description: ATAN11 [Arabidopsis thaliana]
  misc_feature (329)..(370): NCBI GI NO: 2290528 NR Description: ATAN11 [Arabidopsis thaliana]
MNWSVRRDKKYRLAIASFLEQLVNRVEVVQLDESTGDIAPVLSFDHPFPPPKSMFVPDPQGLRPDLLATSADLLRIWRITDDDAAAPGAADSNNGSVRCNGVGSPAGQQPGVKLCCELNGNRNSDFCGPLTSFDWNDADPRRIGTSSIDTTCTIWDVEREVVDTQLIAHDKEVYDIAWGGAGVFASVSADGSVRVFDLRDKEHSTIIYESSSGGGSNSAATDGGAVLPTPLVRLGWNKQDPRYMATIIMDSPKVVVLDIRYPTLPVVELHRHHAPVNAIAWAPHSSCHICTAGDDSQALIWDLSSMGTGNNSGGNGNGNGNAAAAAAAEGGLDPILAYTAGAEVEQLQWSATQPDWVAIVFANKLQILRV

SEQ ID NO: 14127 - DNA, 1212 bp, Triticum aestivum
  misc_feature (1)..(1212): Ceres Seq. ID no. 13597272
aaacacaactcgtgcccgtccgtcccggcggctctctcaaacccacactccccaccttcttgcggcacaagccggagccgacgatccccccacccgcgccgccgtcgacgcggcctcctccgcccgccgggatcggagagaactgtataaacgttttagtggttgaagcgacttgagtctttaaccatgagtagcattggaaccgggtatgatctgtccgtcaccactttttccccggacggccgtgtcttccaggtcgagtatgctggcaaggccgtcgacaacagcgggacgattgttgggatcaagtgcaaagatggaattgtcctcggtgtggagaagctgataacgtcgaagatgatacttgctgggtcgaatcggagacttcactctgttcaccggaactctggcttggctgtggctgggttagcagcagacggtaggcaggtggtctcaagagcaaagtcagaagcagccaattatgaaaaggtatacggagaacccatgcctgtgaaggaattagctgatcgtgtagctagctacgttcatctgtgtacactctactggtggctcaggccttttggctgtggagttattcttggaggttatgatagggatgggccacagctctacatgatcgaaccttcagggctctcatataaatattttggtgctgctctgggtaaaggaagacaggctgcaaaaacggagatagagaaattgaagctttctgagctaacctgcagggaaggcattgttgaggttgccaagataatttatggtgtacacgacgaagcgaaagacaaatcttttgagctggaactgagctgggtgtgcgatgaatctaaccgtcagcatgagaaggttccaaatgatcttctggagcaggccaaggcagcagcgcaggcagcgttggaagagatggatgccgactaagaagagaccatgagctctgcttcccatttacttctacgtgcggcataacagatacaggagtggagcggtttgtttccagtgcaaaaaaactaccttcagggcgttgttgcttccagttccatgattccatcccagtcgaggtagcaagcaggttctcgtgttttggggggttgtagtgaatcgtattctccttgctgttggtcacacactgaatcttaatctattgaattccgaacatatttgtcacatatcttaatcacgcgtggcctaagagat

SEQ ID NO: 14128 - protein, 249 aa, Triticum aestivum
  peptide (1)..(249): Ceres Seq. ID no. 15222064
  misc_feature (31)..(216): Pfam Name: Pfam Description:  Proteasome A-type and B-type
  misc_feature (1)..(249): NCBI GI NO: 34909168 NR Description: proteasome subunit alpha type 3
  misc_feature (1)..(249): NCBI GI NO: 14594925 NR Description: putative alpha7 proteasome subunit
  misc_feature (1)..(249): NCBI GI NO: 3914431 NR Description: Proteasome subunit alpha type 3
  misc_feature (1)..(249): NCBI GI NO: 15225839 NR Description: 20S proteasome alpha subunit G (PAG1)
  misc_feature (1)..(249): NCBI GI NO: 2511592 NR Description: multicatalytic endopeptidase complex
  misc_feature (3)..(249): NCBI GI NO: 3914413 NR Description: Proteasome subunit alpha type 3
  misc_feature (1)..(249): NCBI GI NO: 20810439 NR Description: proteasome
  misc_feature (1)..(249): NCBI GI NO: 4506183 NR Description: proteasome alpha 3 subunit isoform 1
  misc_feature (1)..(249): NCBI GI NO: 542655 NR Description: C 3
  misc_feature (1)..(245): NCBI GI NO: 3914440 NR Description: Proteasome subunit alpha type 3
MSSIGTGYDLSVTTFSPDGRVFQVEYAGKAVDNSGTIVGIKCKDGIVLGVEKLITSKMILAGSNRRLHSVHRNSGLAVAGLAADGRQVVSRAKSEAANYEKVYGEPMPVKELADRVASYVHLCTLYWWLRPFGCGVILGGYDRDGPQLYMIEPSGLSYKYFGAALGKGRQAAKTEIEKLKLSELTCREGIVEVAKIIYGVHDEAKDKSFELELSWVCDESNRQHEKVPNDLLEQAKAAAQAALEEMDAD

SEQ ID NO: 14129 - protein, 192 aa, Triticum aestivum
  peptide (1)..(192): Ceres Seq. ID no. 15222065
  misc_feature (1)..(159): Pfam Name: Pfam Description:  Proteasome A-type and B-type
  misc_feature (1)..(192): NCBI GI NO: 34909168 NR Description: proteasome subunit alpha type 3
  misc_feature (1)..(192): NCBI GI NO: 14594925 NR Description: putative alpha7 proteasome subunit
  misc_feature (1)..(192): NCBI GI NO: 3914431 NR Description: Proteasome subunit alpha type 3
  misc_feature (1)..(192): NCBI GI NO: 15225839 NR Description: 20S proteasome alpha subunit G (PAG1)
  misc_feature (1)..(192): NCBI GI NO: 2511592 NR Description: multicatalytic endopeptidase complex
  misc_feature (1)..(192): NCBI GI NO: 3914413 NR Description: Proteasome subunit alpha type 3
  misc_feature (1)..(192): NCBI GI NO: 20810439 NR Description: proteasome
  misc_feature (1)..(192): NCBI GI NO: 4506183 NR Description: proteasome alpha 3 subunit isoform 1
  misc_feature (1)..(192): NCBI GI NO: 542655 NR Description: C 3
  misc_feature (1)..(188): NCBI GI NO: 3914440 NR Description: Proteasome subunit alpha type 3
MILAGSNRRLHSVHRNSGLAVAGLAADGRQVVSRAKSEAANYEKVYGEPMPVKELADRVASYVHLCTLYWWLRPFGCGVILGGYDRDGPQLYMIEPSGLSYKYFGAALGKGRQAAKTEIEKLKLSELTCREGIVEVAKIIYGVHDEAKDKSFELELSWVCDESNRQHEKVPNDLLEQAKAAAQAALEEMDAD

SEQ ID NO: 14130 - protein, 143 aa, Triticum aestivum
  peptide (1)..(143): Ceres Seq. ID no. 15222066
  misc_feature (1)..(110): Pfam Name: Pfam Description:  Proteasome A-type and B-type
  misc_feature (1)..(143): NCBI GI NO: 34909168 NR Description: proteasome subunit alpha type 3
  misc_feature (1)..(143): NCBI GI NO: 14594925 NR Description: putative alpha7 proteasome subunit
  misc_feature (1)..(143): NCBI GI NO: 3914431 NR Description: Proteasome subunit alpha type 3
  misc_feature (1)..(143): NCBI GI NO: 15225839 NR Description: 20S proteasome alpha subunit G (PAG1)
  misc_feature (1)..(143): NCBI GI NO: 2511592 NR Description: multicatalytic endopeptidase complex
  misc_feature (1)..(143): NCBI GI NO: 3914413 NR Description: Proteasome subunit alpha type 3
  misc_feature (1)..(143): NCBI GI NO: 20810439 NR Description: proteasome
  misc_feature (1)..(143): NCBI GI NO: 4506183 NR Description: proteasome alpha 3 subunit isoform 1
  misc_feature (1)..(143): NCBI GI NO: 542655 NR Description: C 3
  misc_feature (1)..(139): NCBI GI NO: 3914440 NR Description: Proteasome subunit alpha type 3
MPVKELADRVASYVHLCTLYWWLRPFGCGVILGGYDRDGPQLYMIEPSGLSYKYFGAALGKGRQAAKTEIEKLKLSELTCREGIVEVAKIIYGVHDEAKDKSFELELSWVCDESNRQHEKVPNDLLEQAKAAAQAALEEMDAD

SEQ ID NO: 14131 - DNA, 1440 bp, Triticum aestivum
  misc_feature (1)..(1440): Ceres Seq. ID no. 13597162
gcaggaattcgccmcsmkmccrttmcmactwkawyrtgyytaatcgaaaaaagacaacatccggtagtagctagagcaacaaggacgaattaaacaacaacacaactactcttaggaatggccggcgaggaggagatgcaggtggtggagtcctgcttcgtgacgccggtggcggacgcaccgagcagggcgatccggctctcgccgttcgacctcatgctagccagcagaggctacaccccactcgtccacttctaccgcccaccagaaaccgtgggcgacgacttcttcgacgtgacaaggttgaagacggcgttgggcaaggcgcttgtgcccttctaccccctggccggccgcttgagggcgggcggcgacggcaggttggagatcgactgcaacggcaagggcatgctcttccttgtggctcagtctcgtctcaccatggatgacttcagcgacttcaagccatcatcaaagcagaggaggctgtttgttcctcatgtcagcgactcagatggcctcttatgggcaacccaggtgacattcttaaagtgtggtggggtggtcttagggtcggcaatccatcatgctggtatggacggatctgttgtattccacttcttaaggacatgatcagctttctccagagacggcgaccgggctatggtgaacctcccctgccatgatcgctcgcgcttgtctgcgcgtgatccacctgttgttcatccctatgctctttccatttttagccccaagataaacctacccccacagccagggctggtcgtcaacgaggttgtagccctcacccttgccaaggaccaactttccactctcaagcacatatctggtggcgatggcgtgagcaccttcagcgccttgagcgcccacctgtggcaatgcatgtgtttagcccggcagctacccccggatgctacgacgcagcttatgttctcggccaacatccgccgcatcatgaggccaccactcccagacggctacttcggcaacgcgataataaacctaagtgtcggcgacaaagcgcgtgcaatcgcctcgcgcgagctgagctacattgcgcggcgaataagagacacccacagacggttgaacgacgagctagtgcattcagcaatcgactacctcgagctagcaaagagggacgacgagcgcccgactacaggcaatttgccggtgactgacattagagttgtcagctggcttggcatgccgtcgtacgatgcggatttcagctggggaaggccattggctatgttccgtgctgaaccaaaccgcggaggttttgttcacctgattgacagcgcacagggtgatggcagtgtgcgcatcatcatgtctatagaggctgcaattctcagcgagttgaagcgtttgttgtatgccaaattcgacaccatgttgtattctaagttttaacct

SEQ ID NO: 14132 - protein, 257 aa, Triticum aestivum
  peptide (1)..(257): Ceres Seq. ID no. 15222043
  misc_feature (1)..(246): Pfam Name: Pfam Description:  Transferase family
  misc_feature (1)..(132): NCBI GI NO: 40253398 NR Description: putative hydroxyanthranilatehydroxycinnamoyltransferase 2
  misc_feature (1)..(246): NCBI GI NO: 27475616 NR Description: hydroxycinnamoyl transferase [Nicotiana tabacum]
  misc_feature (1)..(246): NCBI GI NO: 21536883 NR Description: anthranilate N-benzoyltransferase
  misc_feature (1)..(246): NCBI GI NO: 15239747 NR Description: anthranilate N-hydroxycinnamoyl/ benzoyltransferasefamily
  misc_feature (1)..(246): NCBI GI NO: 38345030 NR Description: OSJNBa0029H02.14
  misc_feature (1)..(246): NCBI GI NO: 6469032 NR Description: N-hydroxycinnamoyl/benzoyltransferase
  misc_feature (1)..(246): NCBI GI NO: 40644084 NR Description: hydroxycinnamoyl CoA quinate transferase
  misc_feature (1)..(246): NCBI GI NO: 40644899 NR Description: hydroxycinnamoyl CoA quinate transferase
  misc_feature (1)..(246): NCBI GI NO: 7484689 NR Description: anthranilate N-benzoyltransferase (EC 2
  misc_feature (1)..(246): NCBI GI NO: 7484692 NR Description: anthranilate N-benzoyltransferase (EC 2
MVNLPCHDRSRLSARDPPVVHPYALSIFSPKINLPPQPGLVVNEVVALTLAKDQLSTLKHISGGDGVSTFSALSAHLWQCMCLARQLPPDATTQLMFSANIRRIMRPPLPDGYFGNAIINLSVGDKARAIASRELSYIARRIRDTHRRLNDELVHSAIDYLELAKRDDERPTTGNLPVTDIRVVSWLGMPSYDADFSWGRPLAMFRAEPNRGGFVHLIDSAQGDGSVRIIMSIEAAILSELKRLLYAKFDTMLYSKF

SEQ ID NO: 14133 - protein, 177 aa, Triticum aestivum
  peptide (1)..(177): Ceres Seq. ID no. 15222044
  misc_feature (1)..(166): Pfam Name: Pfam Description:  Transferase family
  misc_feature (1)..(52): NCBI GI NO: 40253398 NR Description: putative hydroxyanthranilatehydroxycinnamoyltransferase 2
  misc_feature (1)..(166): NCBI GI NO: 27475616 NR Description: hydroxycinnamoyl transferase [Nicotiana tabacum]
  misc_feature (1)..(166): NCBI GI NO: 21536883 NR Description: anthranilate N-benzoyltransferase
  misc_feature (1)..(166): NCBI GI NO: 15239747 NR Description: anthranilate N-hydroxycinnamoyl/ benzoyltransferasefamily
  misc_feature (1)..(166): NCBI GI NO: 38345030 NR Description: OSJNBa0029H02.14
  misc_feature (1)..(166): NCBI GI NO: 6469032 NR Description: N-hydroxycinnamoyl/benzoyltransferase
  misc_feature (1)..(166): NCBI GI NO: 40644084 NR Description: hydroxycinnamoyl CoA quinate transferase
  misc_feature (1)..(166): NCBI GI NO: 40644899 NR Description: hydroxycinnamoyl CoA quinate transferase
  misc_feature (1)..(166): NCBI GI NO: 7484689 NR Description: anthranilate N-benzoyltransferase (EC 2
  misc_feature (1)..(166): NCBI GI NO: 7484692 NR Description: anthranilate N-benzoyltransferase (EC 2
MCLARQLPPDATTQLMFSANIRRIMRPPLPDGYFGNAIINLSVGDKARAIASRELSYIARRIRDTHRRLNDELVHSAIDYLELAKRDDERPTTGNLPVTDIRVVSWLGMPSYDADFSWGRPLAMFRAEPNRGGFVHLIDSAQGDGSVRIIMSIEAAILSELKRLLYAKFDTMLYSKF

SEQ ID NO: 14134 - protein, 171 aa, Triticum aestivum
  peptide (1)..(171): Ceres Seq. ID no. 15222045
  misc_feature (6)..(171): Pfam Name: Pfam Description:  Transferase family
  misc_feature (4)..(171): NCBI GI NO: 40253398 NR Description: putative hydroxyanthranilatehydroxycinnamoyltransferase 2
  misc_feature (6)..(171): NCBI GI NO: 27475616 NR Description: hydroxycinnamoyl transferase [Nicotiana tabacum]
  misc_feature (6)..(171): NCBI GI NO: 21536883 NR Description: anthranilate N-benzoyltransferase
  misc_feature (6)..(171): NCBI GI NO: 15239747 NR Description: anthranilate N-hydroxycinnamoyl/ benzoyltransferasefamily
  misc_feature (9)..(171): NCBI GI NO: 38345030 NR Description: OSJNBa0029H02.14
  misc_feature (1)..(171): NCBI GI NO: 6469032 NR Description: N-hydroxycinnamoyl/benzoyltransferase
  misc_feature (3)..(171): NCBI GI NO: 40644084 NR Description: hydroxycinnamoyl CoA quinate transferase
  misc_feature (3)..(171): NCBI GI NO: 40644899 NR Description: hydroxycinnamoyl CoA quinate transferase
  misc_feature (7)..(171): NCBI GI NO: 7484689 NR Description: anthranilate N-benzoyltransferase (EC 2
  misc_feature (7)..(171): NCBI GI NO: 7484692 NR Description: anthranilate N-benzoyltransferase (EC 2
MAGEEEMQVVESCFVTPVADAPSRAIRLSPFDLMLASRGYTPLVHFYRPPETVGDDFFDVTRLKTALGKALVPFYPLAGRLRAGGDGRLEIDCNGKGMLFLVAQSRLTMDDFSDFKPSSKQRRLFVPHVSDSDGLLWATQVTFLKCGGVVLGSAIHHAGMDGSVVFHFLRT

SEQ ID NO: 14135 - DNA, 789 bp, Triticum aestivum
  misc_feature (1)..(789): Ceres Seq. ID no. 12625648
tactttgtagctagccatgtcgagccatagatcttgtggcctggtggtggtgctcgcctgcgccgctctcatggcggcggtggccggcacggcgcagtacaacgtcggcggcgacaacgggtggggcgtgcccggcgccggcgccgagtcctacaacacctgggccgagaagaccaccttccaggtcggcgaccagctcgtgttcgtgtaccccaaggacaaggactcggtgctgctggtggcgccggccgactacaacgcctgcaacaccaacacctacgacaagcagttcagcgacggcaacaccgtcttcgacctcgaccgcgccggcgccttcttcttcatcagcggcgtcgacgccaactgccgcgccaacgagaagctcatcgtcatggtcgccgccgccgccaagggcgctcccacgcccagccaggggtcgcctgcagcaacagcaacgaccccgccgtctgctccctcaggtggcgccccgccaaactccccagcaaccccaaatgctccggcgggtgaggcgagtaactcaacgccggccaagggcgcacctcctggagccgccagcggcgccggtctcacggtggcaggcctcgccggctcgttcgtggcattgtttggatacgccatgcttgctttctagtactgctttccaaagctatcttttactgctccttttcaaagccggaagactatttgctccttttcagagggcaacgtgtctctgctcagattcttttccgttatgatcaatgacaaatgcaatatgatggttcctgg

SEQ ID NO: 14136 - protein, 211 aa, Triticum aestivum
  peptide (1)..(211): Ceres Seq. ID no. 12625649
  misc_feature (36)..(121): Pfam Name: Pfam Description:  Plastocyanin-like domain
  misc_feature (11)..(196): NCBI GI NO: 34908784 NR Description: P0415A04.29
  misc_feature (1)..(202): NCBI GI NO: 18402674 NR Description: expressed protein; protein id: At3g20570
  misc_feature (1)..(202): NCBI GI NO: 21618177 NR Description: unknown [Arabidopsis thaliana]
  misc_feature (7)..(183): NCBI GI NO: 15238868 NR Description: putative protein; protein id: At5g53870.1
  misc_feature (7)..(183): NCBI GI NO: 28396618 NR Description: phytocyanin protein, PUP2 [Arabidopsis thaliana]
  misc_feature (6)..(209): NCBI GI NO: 14140127 NR Description: uclacyanin 3-like protein [Oryza sativa]
  misc_feature (1)..(204): NCBI GI NO: 8515096 NR Description: phytocyanin homolog [Pinus taeda]
  misc_feature (12)..(186): NCBI GI NO: 15234164 NR Description: putative protein; protein id: At4g27520
  misc_feature (12)..(186): NCBI GI NO: 21592865 NR Description: unknown [Arabidopsis thaliana]
  misc_feature (29)..(207): NCBI GI NO: 15224081 NR Description: nodulin-like protein; protein id: At2g23990.1
MSSHRSCGLVVVLACAALMAAVAGTAQYNVGGDNGWGVPGAGAESYNTWAEKTTFQVGDQLVFVYPKDKDSVLLVAPADYNACNTNTYDKQFSDGNTVFDLDRAGAFFFISGVDANCRANEKLIVMVAAAAKGAPTPSQGSPAATATTPPSAPSGGAPPNSPATPNAPAGEASNSTPAKGAPPGAASGAGLTVAGLAGSFVALFGYAMLAF

SEQ ID NO: 14137 - protein, 193 aa, Triticum aestivum
  peptide (1)..(193): Ceres Seq. ID no. 12625650
  misc_feature (18)..(103): Pfam Name: Pfam Description:  Plastocyanin-like domain
  misc_feature (1)..(178): NCBI GI NO: 34908784 NR Description: P0415A04.29
  misc_feature (1)..(184): NCBI GI NO: 18402674 NR Description: expressed protein; protein id: At3g20570
  misc_feature (1)..(184): NCBI GI NO: 21618177 NR Description: unknown [Arabidopsis thaliana]
  misc_feature (1)..(165): NCBI GI NO: 15238868 NR Description: putative protein; protein id: At5g53870.1
  misc_feature (1)..(165): NCBI GI NO: 28396618 NR Description: phytocyanin protein, PUP2 [Arabidopsis thaliana]
  misc_feature (1)..(191): NCBI GI NO: 14140127 NR Description: uclacyanin 3-like protein [Oryza sativa]
  misc_feature (1)..(186): NCBI GI NO: 8515096 NR Description: phytocyanin homolog [Pinus taeda]
  misc_feature (1)..(168): NCBI GI NO: 15234164 NR Description: putative protein; protein id: At4g27520
  misc_feature (1)..(168): NCBI GI NO: 21592865 NR Description: unknown [Arabidopsis thaliana]
  misc_feature (11)..(189): NCBI GI NO: 15224081 NR Description: nodulin-like protein; protein id: At2g23990.1
MAAVAGTAQYNVGGDNGWGVPGAGAESYNTWAEKTTFQVGDQLVFVYPKDKDSVLLVAPADYNACNTNTYDKQFSDGNTVFDLDRAGAFFFISGVDANCRANEKLIVMVAAAAKGAPTPSQGSPAATATTPPSAPSGGAPPNSPATPNAPAGEASNSTPAKGAPPGAASGAGLTVAGLAGSFVALFGYAMLAF

SEQ ID NO: 14138 - DNA, 971 bp, Triticum aestivum
  misc_feature (1)..(971): Ceres Seq. ID no. 12616929
attccccatctccctccctcaccatggccgccgccgccgccgcttccatggcccgcaggctgctctcccccaccaccaccacctcctactcgaccaccgcccgcctcctcatctcccgccgcctcgcctccgccgcgtccgtcccgcgcgccccggcggcggcggcgaaggagatgctgcgcccggcggccgtcgcctcctcctctctattcttccgcggcgtcgggggcgccaggggcatggcgcggcggcccgggggcggcgacgggtacgcccccgcgcggggcgggggcggagggggcgcgccgacggagatggcgccgctgttccccgggtgcgactacgagcactggctgatcgtcatggacaagcccggcggcgagggcgcctccaagcaccagatgatcgactgctacgtccacaccctcgccaaggtcctcggcagcgaggaggaggccaagaggaagatttacaacgtctcgtgcgagcgctacttcgggttcgggtgcgagatcgacgaggagacatccaacaagcttgaagggattcctggtgttctctttgtgctccctgattcctatgttgaccctgaacacaaggactacggagcggagctgtttgtgaatggggagatcgtgcagagatctcccgagaggcagaggagggtggagcccgtgccgcagagagcgtcggacaggccgaggtacaacgacaggacccggtacgcgcggcggagggagaaccagcagcagcagcagccgcagcgatgatccatcacatgaccgaggcggaggccagagctggaggcaacctgctgtgctggtttcatcccctcgacatagcgagcagttgttattgcttggttttagtaatccgtttcatgttgccactactctgttatctgtatgtatttgacatcttggaacctgaaactgtgaatcttgatagcataaaagaattttagagccggg

SEQ ID NO: 14139 - protein, 255 aa, Triticum aestivum
  peptide (1)..(255): Ceres Seq. ID no. 12616930
  misc_feature (8)..(249): NCBI GI NO: 34897972 NR Description: putative plastid protein
  misc_feature (41)..(252): NCBI GI NO: 38344141 NR Description: OSJNBa0041A02.8
  misc_feature (37)..(247): NCBI GI NO: 2440029 NR Description: DAL1 protein [Arabidopsis thaliana]
  misc_feature (37)..(247): NCBI GI NO: 15226108 NR Description: plastid protein; protein id: At2g33430
  misc_feature (87)..(247): NCBI GI NO: 25370552 NR Description: DAG protein homolog
  misc_feature (37)..(247): NCBI GI NO: 21617909 NR Description: plastid protein [Arabidopsis thaliana]
  misc_feature (26)..(249): NCBI GI NO: 15223247 NR Description: plastid protein, putative; protein id: At1g32580
  misc_feature (26)..(249): NCBI GI NO: 15226934 NR Description: unknown protein; protein id: At2g35240
  misc_feature (28)..(254): NCBI GI NO: 38636775 NR Description: putative DAG protein
  misc_feature (16)..(255): NCBI GI NO: 18400602 NR Description: expressed protein; protein id: At3g15000
SPSPSLTMAAAAAASMARRLLSPTTTTSYSTTARLLISRRLASAASVPRAPAAAAKEMLRPAAVASSSLFFRGVGGARGMARRPGGGDGYAPARGGGGGGAPTEMAPLFPGCDYEHWLIVMDKPGGEGASKHQMIDCYVHTLAKVLGSEEEAKRKIYNVSCERYFGFGCEIDEETSNKLEGIPGVLFVLPDSYVDPEHKDYGAELFVNGEIVQRSPERQRRVEPVPQRASDRPRYNDRTRYARRRENQQQQQPQR

SEQ ID NO: 14140 - protein, 248 aa, Triticum aestivum
  peptide (1)..(248): Ceres Seq. ID no. 12616931
  misc_feature (1)..(242): NCBI GI NO: 34897972 NR Description: putative plastid protein
  misc_feature (34)..(245): NCBI GI NO: 38344141 NR Description: OSJNBa0041A02.8
  misc_feature (30)..(240): NCBI GI NO: 2440029 NR Description: DAL1 protein [Arabidopsis thaliana]
  misc_feature (30)..(240): NCBI GI NO: 15226108 NR Description: plastid protein; protein id: At2g33430
  misc_feature (80)..(240): NCBI GI NO: 25370552 NR Description: DAG protein homolog
  misc_feature (30)..(240): NCBI GI NO: 21617909 NR Description: plastid protein [Arabidopsis thaliana]
  misc_feature (19)..(242): NCBI GI NO: 15223247 NR Description: plastid protein, putative; protein id: At1g32580
  misc_feature (19)..(242): NCBI GI NO: 15226934 NR Description: unknown protein; protein id: At2g35240
  misc_feature (21)..(247): NCBI GI NO: 38636775 NR Description: putative DAG protein
  misc_feature (9)..(248): NCBI GI NO: 18400602 NR Description: expressed protein; protein id: At3g15000
MAAAAAASMARRLLSPTTTTSYSTTARLLISRRLASAASVPRAPAAAAKEMLRPAAVASSSLFFRGVGGARGMARRPGGGDGYAPARGGGGGGAPTEMAPLFPGCDYEHWLIVMDKPGGEGASKHQMIDCYVHTLAKVLGSEEEAKRKIYNVSCERYFGFGCEIDEETSNKLEGIPGVLFVLPDSYVDPEHKDYGAELFVNGEIVQRSPERQRRVEPVPQRASDRPRYNDRTRYARRRENQQQQQPQR

SEQ ID NO: 14141 - protein, 240 aa, Triticum aestivum
  peptide (1)..(240): Ceres Seq. ID no. 12616932
  misc_feature (1)..(234): NCBI GI NO: 34897972 NR Description: putative plastid protein
  misc_feature (26)..(237): NCBI GI NO: 38344141 NR Description: OSJNBa0041A02.8
  misc_feature (22)..(232): NCBI GI NO: 2440029 NR Description: DAL1 protein [Arabidopsis thaliana]
  misc_feature (22)..(232): NCBI GI NO: 15226108 NR Description: plastid protein; protein id: At2g33430
  misc_feature (72)..(232): NCBI GI NO: 25370552 NR Description: DAG protein homolog
  misc_feature (22)..(232): NCBI GI NO: 21617909 NR Description: plastid protein [Arabidopsis thaliana]
  misc_feature (11)..(234): NCBI GI NO: 15223247 NR Description: plastid protein, putative; protein id: At1g32580
  misc_feature (11)..(234): NCBI GI NO: 15226934 NR Description: unknown protein; protein id: At2g35240
  misc_feature (13)..(239): NCBI GI NO: 38636775 NR Description: putative DAG protein
  misc_feature (1)..(240): NCBI GI NO: 18400602 NR Description: expressed protein; protein id: At3g15000
MARRLLSPTTTTSYSTTARLLISRRLASAASVPRAPAAAAKEMLRPAAVASSSLFFRGVGGARGMARRPGGGDGYAPARGGGGGGAPTEMAPLFPGCDYEHWLIVMDKPGGEGASKHQMIDCYVHTLAKVLGSEEEAKRKIYNVSCERYFGFGCEIDEETSNKLEGIPGVLFVLPDSYVDPEHKDYGAELFVNGEIVQRSPERQRRVEPVPQRASDRPRYNDRTRYARRRENQQQQQPQR

SEQ ID NO: 14142 - DNA, 456 bp, Triticum aestivum
  misc_feature (1)..(456): Ceres Seq. ID no. 15173081
agtcgagagggatgactccagagccaagaaccaggatattggtgaaagcaatacatatgaagaaggatgggcctgagactgaagatcgatccccaagtatgactgggaaaaatctaaaattggatcgtcgatcaggacttttccatgttcgtaaatagtcaccggaagatcctgcttaattatcctagcagaagatgctgagcatctgggcttatggaacatcatccagtgactttcaaccttgggctaaaagaaatccacaagagaagagtcattgacaatacgatgccccaaaatttatgctgtttgaaatgtcacagcaggatatgtttaggatgtattgggcaattcaattgcaggtacttgcttagatgcttgtattctggagatgtatgtgtaatacttacatatgtttgtttcttcttgcattatatatgtcgttcgtagttgtttctg

SEQ ID NO: 14143 - protein, 77 aa, Triticum aestivum
  peptide (1)..(77): Ceres Seq. ID no. 15173082
MEHHPVTFNLGLKEIHKRRVIDNTMPQNLCCLKCHSRICLGCIGQFNCRYLLRCLYSGDVCVILTYVCFFLHYICRS

SEQ ID NO: 14144 - protein, 53 aa, Triticum aestivum
  peptide (1)..(53): Ceres Seq. ID no. 15173083
MPQNLCCLKCHSRICLGCIGQFNCRYLLRCLYSGDVCVILTYVCFFLHYICRS

SEQ ID NO: 14145 - protein, 51 aa, Triticum aestivum
  peptide (1)..(51): Ceres Seq. ID no. 15173084
  misc_feature (1)..(51): NCBI GI NO: 34895880 NR Description: P0009G03.20
SRGMTPEPRTRILVKAIHMKKDGPETEDRSPSMTGKNLKLDRRSGLFHVRK

SEQ ID NO: 14146 - DNA, 1831 bp, Triticum aestivum
  misc_feature (1)..(1831): Ceres Seq. ID no. 14307995
ctgcatccactctcagccatagtgttagaggatgcgaggcgatatggctcaagtactcaccatcttctccccggaagttctgctctcactcttgctctgcttcttcgtactacgccgctactacttggcaagacgatctgcgaacaattgcagtgatcatggccgccgtctcccgccgtcgcctccgaagctccctctcataggccacctgcacctcgtcggccccgacccgcacatctccctcgccgagctctcaaggaagcacgccggccgcgacggcctcatgctcctccgcctcggccaggtgcccaacctcgtcgtctcctccccgagcgccgccgaggccgtcctgcgcacgcacgaccacgtcttcgcctcccgcccgccgtccatcgtcgccggcgtcctcctcagcggcccctccgacgtcgccctcaccccctacggcgagtactggcggcaggccaggaagctcgttaccacccacctgctgagcgcccggaaggtgcgcgcgctccagggcggccgcgaggaggaggtgcgccttgtggtggccaaactccgggcggccgcggccgcccgctctgccgtcgacatgaccgagctgctcggcggcttcaccaacgacgtcgtatgccgcgccgtgtccgggaagttcttcagggaggaaggcaggaacgagctgttccgggagctcatcgccgggaacgtggctgcgataggggggttcaacctggaggactacttcccgagcttggccaaggtaggtcttctccggcgagtggtgctcggcaagacgaggaggctgaagaagagatgggacgagttgctcgacaagatcatagacgaccacgcgaccaaatcaccatggctagtaggagtacatcagcatcaacccaatgagcaagagcaaaaccaacaagatgaagacagagacttggtagatgttctcctctctcttcaacacgagtacagtctcactagagacaacgtcaaggccatcttgttggacatgttctctgcgggcacagacacgtcatccatcgtcctggagttcgccatggcggagctcatgcggaagccacacctcatggccaaactccaggccgacgtgaggagcaagacacccaagacccagcaaacagtcaaggaggacgatctgggcaacatgtcctacctcaaggctgtggtgaaggagacgctccggctccacccaccggcgccgctcctcctcccacacctctccatggccgagtgcgacgacgtcaacggctacatggtcccggcagggacacgcgtcatcatcaacgcgtgggctctctgcagagacaccgagtcctgggggatgaaggcggaggagttctggccggagaggttcatagacggggccaaagcagctgccgacttcaaagggagggatttccaattcctgccgtttggagccgggcggaggatttgccccgggatgggctttgggctcgccacggtcgaggccatgcttgccaaccttgtttattgcttcgactgggagctccccgatgggatgcgggaggaggacgttgacatggccgacgtgtttggagtgacgatgcgtcggaaggagaagcttgttcttgtcccaagaataccacaagatgcaaacatatagtgcatgcgcaccattccatactatcagttagtatagccgcaataaaaatttagaccaactcaaatatgaacatctcctagttatgcttctctcctacagaatgtaaaaaacgcaggaactgtactttttgcaggaattgtttctttaggagagataaagacacatgttgcattggacttctcg

SEQ ID NO: 14147 - protein, 538 aa, Triticum aestivum
  peptide (1)..(538): Ceres Seq. ID no. 14307996
  misc_feature (49)..(529): Pfam Name: Pfam Description:  Cytochrome P450
  misc_feature (11)..(530): NCBI GI NO: 19909892 NR Description: P450 [Triticum aestivum]
  misc_feature (11)..(530): NCBI GI NO: 19909894 NR Description: P450 [Triticum aestivum]
  misc_feature (13)..(533): NCBI GI NO: 19909888 NR Description: P450 [Triticum aestivum]
  misc_feature (13)..(533): NCBI GI NO: 26655531 NR Description: cytochrome P450 [Triticum aestivum]
  misc_feature (6)..(531): NCBI GI NO: 5921189 NR Description: Cytochrome P450 71C4
  misc_feature (16)..(532): NCBI GI NO: 5921187 NR Description: Cytochrome P450 71C2
  misc_feature (17)..(534): NCBI GI NO: 7430630 NR Description: cytochrome P450 - maize
  misc_feature (13)..(532): NCBI GI NO: 19909886 NR Description: P450 [Triticum aestivum]
  misc_feature (17)..(534): NCBI GI NO: 5921186 NR Description: Cytochrome P450 71C1
  misc_feature (13)..(279): NCBI GI NO: 13661750 NR Description: putative cytochrome P450 [Lolium rigidum]
MRGDMAQVLTIFSPEVLLSLLLCFFVLRRYYLARRSANNCSDHGRRLPPSPPKLPLIGHLHLVGPDPHISLAELSRKHAGRDGLMLLRLGQVPNLVVSSPSAAEAVLRTHDHVFASRPPSIVAGVLLSGPSDVALTPYGEYWRQARKLVTTHLLSARKVRALQGGREEEVRLVVAKLRAAAAARSAVDMTELLGGFTNDVVCRAVSGKFFREEGRNELFRELIAGNVAAIGGFNLEDYFPSLAKVGLLRRVVLGKTRRLKKRWDELLDKIIDDHATKSPWLVGVHQHQPNEQEQNQQDEDRDLVDVLLSLQHEYSLTRDNVKAILLDMFSAGTDTSSIVLEFAMAELMRKPHLMAKLQADVRSKTPKTQQTVKEDDLGNMSYLKAVVKETLRLHPPAPLLLPHLSMAECDDVNGYMVPAGTRVIINAWALCRDTESWGMKAEEFWPERFIDGAKAAADFKGRDFQFLPFGAGRRICPGMGFGLATVEAMLANLVYCFDWELPDGMREEDVDMADVFGVTMRRKEKLVLVPRIPQDANI

SEQ ID NO: 14148 - protein, 534 aa, Triticum aestivum
  peptide (1)..(534): Ceres Seq. ID no. 14307997
  misc_feature (45)..(525): Pfam Name: Pfam Description:  Cytochrome P450
  misc_feature (7)..(526): NCBI GI NO: 19909892 NR Description: P450 [Triticum aestivum]
  misc_feature (7)..(526): NCBI GI NO: 19909894 NR Description: P450 [Triticum aestivum]
  misc_feature (9)..(529): NCBI GI NO: 19909888 NR Description: P450 [Triticum aestivum]
  misc_feature (9)..(529): NCBI GI NO: 26655531 NR Description: cytochrome P450 [Triticum aestivum]
  misc_feature (2)..(527): NCBI GI NO: 5921189 NR Description: Cytochrome P450 71C4
  misc_feature (12)..(528): NCBI GI NO: 5921187 NR Description: Cytochrome P450 71C2
  misc_feature (13)..(530): NCBI GI NO: 7430630 NR Description: cytochrome P450 - maize
  misc_feature (9)..(528): NCBI GI NO: 19909886 NR Description: P450 [Triticum aestivum]
  misc_feature (13)..(530): NCBI GI NO: 5921186 NR Description: Cytochrome P450 71C1
  misc_feature (9)..(275): NCBI GI NO: 13661750 NR Description: putative cytochrome P450 [Lolium rigidum]
MAQVLTIFSPEVLLSLLLCFFVLRRYYLARRSANNCSDHGRRLPPSPPKLPLIGHLHLVGPDPHISLAELSRKHAGRDGLMLLRLGQVPNLVVSSPSAAEAVLRTHDHVFASRPPSIVAGVLLSGPSDVALTPYGEYWRQARKLVTTHLLSARKVRALQGGREEEVRLVVAKLRAAAAARSAVDMTELLGGFTNDVVCRAVSGKFFREEGRNELFRELIAGNVAAIGGFNLEDYFPSLAKVGLLRRVVLGKTRRLKKRWDELLDKIIDDHATKSPWLVGVHQHQPNEQEQNQQDEDRDLVDVLLSLQHEYSLTRDNVKAILLDMFSAGTDTSSIVLEFAMAELMRKPHLMAKLQADVRSKTPKTQQTVKEDDLGNMSYLKAVVKETLRLHPPAPLLLPHLSMAECDDVNGYMVPAGTRVIINAWALCRDTESWGMKAEEFWPERFIDGAKAAADFKGRDFQFLPFGAGRRICPGMGFGLATVEAMLANLVYCFDWELPDGMREEDVDMADVFGVTMRRKEKLVLVPRIPQDANI

SEQ ID NO: 14149 - protein, 454 aa, Triticum aestivum
  peptide (1)..(454): Ceres Seq. ID no. 14307998
  misc_feature (1)..(445): Pfam Name: Pfam Description:  Cytochrome P450
  misc_feature (1)..(446): NCBI GI NO: 19909892 NR Description: P450 [Triticum aestivum]
  misc_feature (1)..(446): NCBI GI NO: 19909894 NR Description: P450 [Triticum aestivum]
  misc_feature (1)..(449): NCBI GI NO: 19909888 NR Description: P450 [Triticum aestivum]
  misc_feature (1)..(449): NCBI GI NO: 26655531 NR Description: cytochrome P450 [Triticum aestivum]
  misc_feature (1)..(447): NCBI GI NO: 5921189 NR Description: Cytochrome P450 71C4
  misc_feature (1)..(448): NCBI GI NO: 5921187 NR Description: Cytochrome P450 71C2
  misc_feature (1)..(450): NCBI GI NO: 7430630 NR Description: cytochrome P450 - maize
  misc_feature (1)..(448): NCBI GI NO: 19909886 NR Description: P450 [Triticum aestivum]
  misc_feature (1)..(450): NCBI GI NO: 5921186 NR Description: Cytochrome P450 71C1
  misc_feature (1)..(195): NCBI GI NO: 13661750 NR Description: putative cytochrome P450 [Lolium rigidum]
MLLRLGQVPNLVVSSPSAAEAVLRTHDHVFASRPPSIVAGVLLSGPSDVALTPYGEYWRQARKLVTTHLLSARKVRALQGGREEEVRLVVAKLRAAAAARSAVDMTELLGGFTNDVVCRAVSGKFFREEGRNELFRELIAGNVAAIGGFNLEDYFPSLAKVGLLRRVVLGKTRRLKKRWDELLDKIIDDHATKSPWLVGVHQHQPNEQEQNQQDEDRDLVDVLLSLQHEYSLTRDNVKAILLDMFSAGTDTSSIVLEFAMAELMRKPHLMAKLQADVRSKTPKTQQTVKEDDLGNMSYLKAVVKETLRLHPPAPLLLPHLSMAECDDVNGYMVPAGTRVIINAWALCRDTESWGMKAEEFWPERFIDGAKAAADFKGRDFQFLPFGAGRRICPGMGFGLATVEAMLANLVYCFDWELPDGMREEDVDMADVFGVTMRRKEKLVLVPRIPQDANI

SEQ ID NO: 14150 - DNA, 1233 bp, Triticum aestivum
  misc_feature (1)..(1233): Ceres Seq. ID no. 13597333
gaatccgaccacaaatccgcacccccaggaccagcagcagcagccatgacgccctccgccgtcgccaacctagccggcgcctccccgctgcccgccttcgcgccgaggcccaggtccaggcccaactcggccagcccgggcccgttcgggcccgcgccgcgccggctcgccgtcgccgccccgccgcgggccttcttctcctccgcgccctaccagccgccggagccggagggctactcctccgtccgcgagtacggcctcgtgcccatggtcgtcgagaccacctcccgcggggagcgcgcctacgacatcttctcccgcctgctcaaggagcggatcgtctgcatccacgggcccatcgccgacgagacggcctcgctcgtcgtcgcgcagctgctcttcctcgagtccgagaacccgctcaagcccatcagcctctacatcaactcccccgggggcgtcgtcaccgccgggctcgccatctacgacaccatgcagtacatccgctgccccgtcaacaccatctgcatcggccaggccgcctccatgggctccctcctcctcgccgccggcgcgcgcggggagaggcgggcgctgcccaacgccagggtcatgatccaccagccctccggcggggcccagggccaggccaccgacatcgccatccaggccaaggagatcctcaagctgcgcgaccgcctcaacaagatctacgccaagcacacgggccagaacatcgacaagatcgagcagtgcatggagcgtgaccttttcatggaccccgaggaggcgcgcgaatgggggcttatagacgaggtcatcgagaaccgcccggcctccctcatgcctgagggcctcagtgccgttgacccgcctcaccacggtgggggcgccggcgccaacggccgtggcagggacagggatatggaggagccctccgctgtatgaggggtggccacgaaggtgaaaccttttcctgagtccggtggctatgttgtttgttgttagatctaagttttgatgattcctaatacaacaggtcaacttggtatcttctccctgttgtttcaattgcctgaactgagctattgctgatattattgcaactcgtaaaagggatttcattcctttggtactgataaattgatagtgtgttgaatgtccgttatacgatcaatttcaggttacagcatcaaaaacatgctgttcttttttatgcataggattttcttt

SEQ ID NO: 14151 - protein, 315 aa, Triticum aestivum
  peptide (1)..(315): Ceres Seq. ID no. 15222076
  misc_feature (96)..(277): Pfam Name: Pfam Description:  Clp protease
  misc_feature (54)..(313): NCBI GI NO: 38344435 NR Description: OSJNBa0038O10.7
  misc_feature (83)..(286): NCBI GI NO: 18420643 NR Description: ATP-dependent Clp protease proteolytic subunit
  misc_feature (87)..(281): NCBI GI NO: 6685315 NR Description: ATP-dependent Clp protease proteolytic subunit
  misc_feature (6)..(296): NCBI GI NO: 34882298 NR Description: similar to ClpP protease [Rattus norvegicus]
  misc_feature (87)..(280): NCBI GI NO: 23014984 NR Description: hypothetical protein
  misc_feature (55)..(292): NCBI GI NO: 8393156 NR Description: caseinolytic protease
  misc_feature (87)..(280): NCBI GI NO: 22967580 NR Description: hypothetical protein [Rhodospirillum rubrum]
  misc_feature (88)..(277): NCBI GI NO: 3023519 NR Description: ATP-dependent Clp protease proteolytic subunit 1
  misc_feature (82)..(283): NCBI GI NO: 22964887 NR Description: hypothetical protein [Rhodopseudomonas palustris]
  misc_feature (80)..(278): NCBI GI NO: 5174419 NR Description: endopeptidase Clp precursor
ESDHKSAPPGPAAAAMTPSAVANLAGASPLPAFAPRPRSRPNSASPGPFGPAPRRLAVAAPPRAFFSSAPYQPPEPEGYSSVREYGLVPMVVETTSRGERAYDIFSRLLKERIVCIHGPIADETASLVVAQLLFLESENPLKPISLYINSPGGVVTAGLAIYDTMQYIRCPVNTICIGQAASMGSLLLAAGARGERRALPNARVMIHQPSGGAQGQATDIAIQAKEILKLRDRLNKIYAKHTGQNIDKIEQCMERDLFMDPEEAREWGLIDEVIENRPASLMPEGLSAVDPPHHGGGAGANGRGRDRDMEEPSAV

SEQ ID NO: 14152 - protein, 300 aa, Triticum aestivum
  peptide (1)..(300): Ceres Seq. ID no. 15222077
  misc_feature (81)..(262): Pfam Name: Pfam Description:  Clp protease
  misc_feature (39)..(298): NCBI GI NO: 38344435 NR Description: OSJNBa0038O10.7
  misc_feature (68)..(271): NCBI GI NO: 18420643 NR Description: ATP-dependent Clp protease proteolytic subunit
  misc_feature (72)..(266): NCBI GI NO: 6685315 NR Description: ATP-dependent Clp protease proteolytic subunit
  misc_feature (1)..(281): NCBI GI NO: 34882298 NR Description: similar to ClpP protease [Rattus norvegicus]
  misc_feature (72)..(265): NCBI GI NO: 23014984 NR Description: hypothetical protein
  misc_feature (40)..(277): NCBI GI NO: 8393156 NR Description: caseinolytic protease
  misc_feature (72)..(265): NCBI GI NO: 22967580 NR Description: hypothetical protein [Rhodospirillum rubrum]
  misc_feature (73)..(262): NCBI GI NO: 3023519 NR Description: ATP-dependent Clp protease proteolytic subunit 1
  misc_feature (67)..(268): NCBI GI NO: 22964887 NR Description: hypothetical protein [Rhodopseudomonas palustris]
  misc_feature (65)..(263): NCBI GI NO: 5174419 NR Description: endopeptidase Clp precursor
MTPSAVANLAGASPLPAFAPRPRSRPNSASPGPFGPAPRRLAVAAPPRAFFSSAPYQPPEPEGYSSVREYGLVPMVVETTSRGERAYDIFSRLLKERIVCIHGPIADETASLVVAQLLFLESENPLKPISLYINSPGGVVTAGLAIYDTMQYIRCPVNTICIGQAASMGSLLLAAGARGERRALPNARVMIHQPSGGAQGQATDIAIQAKEILKLRDRLNKIYAKHTGQNIDKIEQCMERDLFMDPEEAREWGLIDEVIENRPASLMPEGLSAVDPPHHGGGAGANGRGRDRDMEEPSAV

SEQ ID NO: 14153 - protein, 254 aa, Triticum aestivum
  peptide (1)..(254): Ceres Seq. ID no. 15222078
  misc_feature (107)..(247): Pfam Name: Pfam Description:  Amidohydrolase family
IRPQIRTPRTSSSSHDALRRRQPSRRLPAARLRAEAQVQAQLGQPGPVRARAAPARRRRPAAGLLLLRALPAAGAGGLLLRPRVRPRAHGRRDHLPRGARLRHLLPPAQGADRLHPRAHRRRDGLARRRAAALPRVREPAQAHQPLHQLPRGRRHRRARHLRHHAVHPLPRQHHLHRPGRLHGLPPPRRRRARGEAGAAQRQGHDPPALRRGPGPGHRHRHPGQGDPQAARPPQQDLRQAHGPEHRQDRAVHGA

SEQ ID NO: 14154 - DNA, 1121 bp, Triticum aestivum
  misc_feature (1)..(1121): Ceres Seq. ID no. 13585609
aaccatccagatccaggtccttcctcgttatctttcaccatgccttcagcagcttcccgactcgtgcggatcggccgtgccgctcgctcagctgcggcgaccacatctcgcttcgcccaattcgttgaagcagcgaccctctccacgaaggcggtggcgaccaaacctcacgctatcttaggttcagatcgtgccgcctccgtagatctgcgtatgaaccaatccactgtccatgctcctccacgcgccatggcacctgcctccctgacactcagtcacccagaagaacaaaggcaggaaggtaaggtgaagtttgtggtagaggagaaagaccttgagtcagaagcagccctttgggccttgtatgagcgctggtgcaaagatttcaaccaaaagcgtgatcatgatgagatggttcactggttcaacacattcaaggagactgtcctgcttgtccaccgtcggaacaatgctaatctgccctacaaattgggaataaacaaattcgcggatgggaagctaaggaagctctgttgctgtcatgatcctattcttaaaaagattgatgaggagtttggcgacaaaccaggtgaatttattctaggtgatggtgacaaacttctcaagcgagtcttcgctgattataaggtggttcatggcagactgtatgttcatttaccaaagggagttgatgtggaaaccatcaccaccaatcctgaatgggtcgagctggaagcgaccaccaaccctccataccgataccctacttacatctagtggtgctatcattattgctactaagctgtgcttctgccaacggttgcatactaggacttggatgttgtccttcttgctaataaaacatactccctccgtccggaaatacttgtcatcgaaatggataaaagagatgtatttagacgtattttagttttagatacatctcttttgatccattttgatgacaagtattttaggacggagggcgtatgcataataagctaaccgtgagcatatgaggattacgttaatgcttttgtaagatattttaaactttgactaaggtgttgtaatattccagattcatcgttatgtgctcattagtcaggttttttcctctc

SEQ ID NO: 14155 - protein, 258 aa, Triticum aestivum
  peptide (1)..(258): Ceres Seq. ID no. 13585610
  misc_feature (10)..(157): NCBI GI NO: 38605767 NR Description: OSJNBa0044K18.10
  misc_feature (16)..(172): NCBI GI NO: 40786566 NR Description: putative cysteine proteinase
  misc_feature (105)..(171): NCBI GI NO: 1336648 NR Description: endopeptidase-like protein
  misc_feature (105)..(171): NCBI GI NO: 7435802 NR Description: cysteine proteinase (EC 3
  misc_feature (105)..(171): NCBI GI NO: 16444924 NR Description: cysteine proteinase [Daucus carota]
  misc_feature (107)..(172): NCBI GI NO: 34897042 NR Description: hypothetical protein
  misc_feature (109)..(171): NCBI GI NO: 40806500 NR Description: putative cysteine protease 2 [Iris hollandica]
  misc_feature (105)..(171): NCBI GI NO: 18408616 NR Description: cysteine proteinase, putative
  misc_feature (107)..(171): NCBI GI NO: 4731374 NR Description: papain-like cysteine protease
  misc_feature (105)..(171): NCBI GI NO: 118158 NR Description: Vignain precursor
NHPDPGPSSLSFTMPSAASRLVRIGRAARSAAATTSRFAQFVEAATLSTKAVATKPHAILGSDRAASVDLRMNQSTVHAPPRAMAPASLTLSHPEEQRQEGKVKFVVEEKDLESEAALWALYERWCKDFNQKRDHDEMVHWFNTFKETVLLVHRRNNANLPYKLGINKFADGKLRKLCCCHDPILKKIDEEFGDKPGEFILGDGDKLLKRVFADYKVVHGRLYVHLPKGVDVETITTNPEWVELEATTNPPYRYPTYI

SEQ ID NO: 14156 - protein, 245 aa, Triticum aestivum
  peptide (1)..(245): Ceres Seq. ID no. 13585611
  misc_feature (1)..(144): NCBI GI NO: 38605767 NR Description: OSJNBa0044K18.10
  misc_feature (3)..(159): NCBI GI NO: 40786566 NR Description: putative cysteine proteinase
  misc_feature (92)..(158): NCBI GI NO: 1336648 NR Description: endopeptidase-like protein
  misc_feature (92)..(158): NCBI GI NO: 7435802 NR Description: cysteine proteinase (EC 3
  misc_feature (92)..(158): NCBI GI NO: 16444924 NR Description: cysteine proteinase [Daucus carota]
  misc_feature (94)..(159): NCBI GI NO: 34897042 NR Description: hypothetical protein
  misc_feature (96)..(158): NCBI GI NO: 40806500 NR Description: putative cysteine protease 2 [Iris hollandica]
  misc_feature (92)..(158): NCBI GI NO: 18408616 NR Description: cysteine proteinase, putative
  misc_feature (94)..(158): NCBI GI NO: 4731374 NR Description: papain-like cysteine protease
  misc_feature (92)..(158): NCBI GI NO: 118158 NR Description: Vignain precursor
MPSAASRLVRIGRAARSAAATTSRFAQFVEAATLSTKAVATKPHAILGSDRAASVDLRMNQSTVHAPPRAMAPASLTLSHPEEQRQEGKVKFVVEEKDLESEAALWALYERWCKDFNQKRDHDEMVHWFNTFKETVLLVHRRNNANLPYKLGINKFADGKLRKLCCCHDPILKKIDEEFGDKPGEFILGDGDKLLKRVFADYKVVHGRLYVHLPKGVDVETITTNPEWVELEATTNPPYRYPTYI

SEQ ID NO: 14157 - protein, 187 aa, Triticum aestivum
  peptide (1)..(187): Ceres Seq. ID no. 13585612
  misc_feature (1)..(86): NCBI GI NO: 38605767 NR Description: OSJNBa0044K18.10
  misc_feature (1)..(101): NCBI GI NO: 40786566 NR Description: putative cysteine proteinase
  misc_feature (34)..(100): NCBI GI NO: 1336648 NR Description: endopeptidase-like protein
  misc_feature (34)..(100): NCBI GI NO: 7435802 NR Description: cysteine proteinase (EC 3
  misc_feature (34)..(100): NCBI GI NO: 16444924 NR Description: cysteine proteinase [Daucus carota]
  misc_feature (36)..(101): NCBI GI NO: 34897042 NR Description: hypothetical protein
  misc_feature (38)..(100): NCBI GI NO: 40806500 NR Description: putative cysteine protease 2 [Iris hollandica]
  misc_feature (34)..(100): NCBI GI NO: 18408616 NR Description: cysteine proteinase, putative
  misc_feature (36)..(100): NCBI GI NO: 4731374 NR Description: papain-like cysteine protease
  misc_feature (34)..(100): NCBI GI NO: 118158 NR Description: Vignain precursor
MNQSTVHAPPRAMAPASLTLSHPEEQRQEGKVKFVVEEKDLESEAALWALYERWCKDFNQKRDHDEMVHWFNTFKETVLLVHRRNNANLPYKLGINKFADGKLRKLCCCHDPILKKIDEEFGDKPGEFILGDGDKLLKRVFADYKVVHGRLYVHLPKGVDVETITTNPEWVELEATTNPPYRYPTYI

SEQ ID NO: 14158 - DNA, 2156 bp, Triticum aestivum
  misc_feature (1)..(2156): Ceres Seq. ID no. 12597287
ctcccgttcccctttttcgaatcgagcccaaccgcatcgtgcgtgcgcacccccactcctcccccctagggtttcgaggttctccgacgatgtcgctgcggcccaacgagcgggccgaggtgcggcgcagccgctacaaggcgtccgtcgacgccgaggacgggcgccggcggcgggaggatcagatggtggagatccggaagaatcagcgcgacgcgaacctccagaagaagcgccgcgacgggttcccggccggcgccgcgtccgctgccggtggcgcgccgcagatgggccactcctcggctctccagcagaagctggagggcttgcccgcgatggtgcaggcggttctctcggacgacaacgccgtgcagctcgaggccaccacccagttccggaagctgctctccatcgagcgaagccctccaattgaggaagtgatcaacacaggcgtggtgcctcgcttcattgagttcctcacacgggaggactatccccaactccagtttgaggctgcatgggcgctcaccaacatcgcgtcaggcacatcagacaacaccaaagtggtggttgagtatggtgctgtgcccatctttgtcaagctactcagctctcctagtgaggatgtccgcgaacaggctgtttgggctctggggaatgttgctggtgactctccaaagtgccgtgaccttgtgcttggaagtggtggtctgttccctttgttgcagcagctcaatgagcatgccaagctctcgatgctcaggaatgccacatggacactctccaacttctgccgtgggaaaccacagccaaattttgaacaggtcaaaccggctctctcagcactgcagcgccttatccactctcaggatgaggaggtgctaactgatgcctgctgggctctctcgtacctttctgatggaactaatgacaagatccaatccgtgattgagtctggtgtttttcctcggcttgtggagcttctcttgcacccttcggcttctgttctcattccagctctgcgcacggtgggtaacattgtcactggtgatgatttgcagactcagtgtgtcattgatcaccaagcacttccctgtctcttgaacctcttgactaccaaccacaagaaaagcatcaagaaagaagcatgctggacaatctcaaacatcacagctggtaaccgggaccagattcaggctgttatccaggcaaacattattggtccgctggtccatctcctgcaaggtgctgaatttgacattaagaaggagacagcttgggcaatttcaaatgccacttctggtggaacacatgatcagattaagtatcttgttgcccagggttgcatcaagccgctctgtgatctgctcatttgcccggatcccagaattgtaacagtttgcttggaaggtcttgagaacatcctgaaggttggggaggcagaaaagaaccttggagcaggggatgtcaacaactatgcgcagatgattgatgacgctgagggactggaaaagattgagaaccttcagagccatgacaacacagaaatatatgagaaggcagtgaagatgcttgagtcctactggttggaggaggaagatgaggtcatgccctcaggtgataatgcccagaatggcttcaactttggaagtcagcagaactcggttccatcgggtgggttcaactttggctgaagatacccggttggacgtgtaccttagctacttgcttgggactagtcagatttggggaggtctttgtcgttcgagtcattgttgggtcctgtcggtctggtctcaagcagtcgtcaagtcagtctaagcagggtcagtccttgggctgcatcgtcggtggtgcagcttggtcaatggtcagtcttcaaggtcaaccggtcggatcatttgggttctgcctcaccagaggacgtccagagccgcatgtgttgtcgggagagtcgggttttgcctcctaatatagcttgaaccaaaattatattgatatatctgtgtgaggtaaaaagaaccttgaaagatagggttttcacggttgttggttgtgtcggtttttgtcagaagtgtttctgtgctgtattaacttgacgaaagagtatggagcacaccttataaacatcaaaagcaactgggttttgggagtcc

SEQ ID NO: 14159 - protein, 563 aa, Triticum aestivum
  peptide (1)..(563): Ceres Seq. ID no. 12597288
  misc_feature (33)..(130): Pfam Name: Pfam Description:  Importin beta binding domain
  misc_feature (30)..(563): NCBI GI NO: 34897636 NR Description: putative impotin alpha 1b [Oryza sativa]
  misc_feature (30)..(563): NCBI GI NO: 6682927 NR Description: importin alpha 1b
  misc_feature (30)..(563): NCBI GI NO: 13752562 NR Description: importin alpha 2 [Capsicum annuum]
  misc_feature (30)..(562): NCBI GI NO: 15230778 NR Description: importin alpha; protein id: At3g06720
  misc_feature (30)..(562): NCBI GI NO: 13605661 NR Description: AT3g06720/F3E22_14 [Arabidopsis thaliana]
  misc_feature (30)..(562): NCBI GI NO: 25314876 NR Description: probable nuclear transport factor importin alpha-like protein
  misc_feature (30)..(562): NCBI GI NO: 15809794 NR Description: AT3g06720/F3E22_14 [Arabidopsis thaliana]
  misc_feature (30)..(562): NCBI GI NO: 13699777 NR Description: AtKAP alpha [Arabidopsis thaliana]
  misc_feature (30)..(562): NCBI GI NO: 25314870 NR Description: probable nuclear transport factor importin alpha
  misc_feature (41)..(563): NCBI GI NO: 30421147 NR Description: importin alpha [Toxoplasma gondii]
PVPLFRIEPNRIVRAHPHSSPLGFRGSPTMSLRPNERAEVRRSRYKASVDAEDGRRRREDQMVEIRKNQRDANLQKKRRDGFPAGAASAAGGAPQMGHSSALQQKLEGLPAMVQAVLSDDNAVQLEATTQFRKLLSIERSPPIEEVINTGVVPRFIEFLTREDYPQLQFEAAWALTNIASGTSDNTKVVVEYGAVPIFVKLLSSPSEDVREQAVWALGNVAGDSPKCRDLVLGSGGLFPLLQQLNEHAKLSMLRNATWTLSNFCRGKPQPNFEQVKPALSALQRLIHSQDEEVLTDACWALSYLSDGTNDKIQSVIESGVFPRLVELLLHPSASVLIPALRTVGNIVTGDDLQTQCVIDHQALPCLLNLLTTNHKKSIKKEACWTISNITAGNRDQIQAVIQANIIGPLVHLLQGAEFDIKKETAWAISNATSGGTHDQIKYLVAQGCIKPLCDLLICPDPRIVTVCLEGLENILKVGEAEKNLGAGDVNNYAQMIDDAEGLEKIENLQSHDNTEIYEKAVKMLESYWLEEEDEVMPSGDNAQNGFNFGSQQNSVPSGGFNFG

SEQ ID NO: 14160 - protein, 534 aa, Triticum aestivum
  peptide (1)..(534): Ceres Seq. ID no. 12597289
  misc_feature (4)..(101): Pfam Name: Pfam Description:  Importin beta binding domain
  misc_feature (1)..(534): NCBI GI NO: 34897636 NR Description: putative impotin alpha 1b [Oryza sativa]
  misc_feature (1)..(534): NCBI GI NO: 6682927 NR Description: importin alpha 1b
  misc_feature (1)..(534): NCBI GI NO: 13752562 NR Description: importin alpha 2 [Capsicum annuum]
  misc_feature (1)..(533): NCBI GI NO: 15230778 NR Description: importin alpha; protein id: At3g06720
  misc_feature (1)..(533): NCBI GI NO: 13605661 NR Description: AT3g06720/F3E22_14 [Arabidopsis thaliana]
  misc_feature (1)..(533): NCBI GI NO: 25314876 NR Description: probable nuclear transport factor importin alpha-like protein
  misc_feature (1)..(533): NCBI GI NO: 15809794 NR Description: AT3g06720/F3E22_14 [Arabidopsis thaliana]
  misc_feature (1)..(533): NCBI GI NO: 13699777 NR Description: AtKAP alpha [Arabidopsis thaliana]
  misc_feature (1)..(533): NCBI GI NO: 25314870 NR Description: probable nuclear transport factor importin alpha
  misc_feature (12)..(534): NCBI GI NO: 30421147 NR Description: importin alpha [Toxoplasma gondii]
MSLRPNERAEVRRSRYKASVDAEDGRRRREDQMVEIRKNQRDANLQKKRRDGFPAGAASAAGGAPQMGHSSALQQKLEGLPAMVQAVLSDDNAVQLEATTQFRKLLSIERSPPIEEVINTGVVPRFIEFLTREDYPQLQFEAAWALTNIASGTSDNTKVVVEYGAVPIFVKLLSSPSEDVREQAVWALGNVAGDSPKCRDLVLGSGGLFPLLQQLNEHAKLSMLRNATWTLSNFCRGKPQPNFEQVKPALSALQRLIHSQDEEVLTDACWALSYLSDGTNDKIQSVIESGVFPRLVELLLHPSASVLIPALRTVGNIVTGDDLQTQCVIDHQALPCLLNLLTTNHKKSIKKEACWTISNITAGNRDQIQAVIQANIIGPLVHLLQGAEFDIKKETAWAISNATSGGTHDQIKYLVAQGCIKPLCDLLICPDPRIVTVCLEGLENILKVGEAEKNLGAGDVNNYAQMIDDAEGLEKIENLQSHDNTEIYEKAVKMLESYWLEEEDEVMPSGDNAQNGFNFGSQQNSVPSGGFNFG

SEQ ID NO: 14161 - protein, 502 aa, Triticum aestivum
  peptide (1)..(502): Ceres Seq. ID no. 12597290
  misc_feature (1)..(69): Pfam Name: Pfam Description:  Importin beta binding domain
  misc_feature (1)..(502): NCBI GI NO: 34897636 NR Description: putative impotin alpha 1b [Oryza sativa]
  misc_feature (1)..(502): NCBI GI NO: 6682927 NR Description: importin alpha 1b
  misc_feature (1)..(502): NCBI GI NO: 13752562 NR Description: importin alpha 2 [Capsicum annuum]
  misc_feature (1)..(501): NCBI GI NO: 15230778 NR Description: importin alpha; protein id: At3g06720
  misc_feature (1)..(501): NCBI GI NO: 13605661 NR Description: AT3g06720/F3E22_14 [Arabidopsis thaliana]
  misc_feature (1)..(501): NCBI GI NO: 25314876 NR Description: probable nuclear transport factor importin alpha-like protein
  misc_feature (1)..(501): NCBI GI NO: 15809794 NR Description: AT3g06720/F3E22_14 [Arabidopsis thaliana]
  misc_feature (1)..(501): NCBI GI NO: 13699777 NR Description: AtKAP alpha [Arabidopsis thaliana]
  misc_feature (1)..(501): NCBI GI NO: 25314870 NR Description: probable nuclear transport factor importin alpha
  misc_feature (1)..(502): NCBI GI NO: 30421147 NR Description: importin alpha [Toxoplasma gondii]
MVEIRKNQRDANLQKKRRDGFPAGAASAAGGAPQMGHSSALQQKLEGLPAMVQAVLSDDNAVQLEATTQFRKLLSIERSPPIEEVINTGVVPRFIEFLTREDYPQLQFEAAWALTNIASGTSDNTKVVVEYGAVPIFVKLLSSPSEDVREQAVWALGNVAGDSPKCRDLVLGSGGLFPLLQQLNEHAKLSMLRNATWTLSNFCRGKPQPNFEQVKPALSALQRLIHSQDEEVLTDACWALSYLSDGTNDKIQSVIESGVFPRLVELLLHPSASVLIPALRTVGNIVTGDDLQTQCVIDHQALPCLLNLLTTNHKKSIKKEACWTISNITAGNRDQIQAVIQANIIGPLVHLLQGAEFDIKKETAWAISNATSGGTHDQIKYLVAQGCIKPLCDLLICPDPRIVTVCLEGLENILKVGEAEKNLGAGDVNNYAQMIDDAEGLEKIENLQSHDNTEIYEKAVKMLESYWLEEEDEVMPSGDNAQNGFNFGSQQNSVPSGGFNFG

SEQ ID NO: 14162 - DNA, 1988 bp, Triticum aestivum
  misc_feature (1)..(1988): Ceres Seq. ID no. 13597375
aaaaaaccctaatcccctcgcagccgccacagcccccggagcccgcccgcccgaacccaccgccatggccgacgacgcggcatcggccccgccgacggcgcagctggccgccgcctccatctcctcgccgccctcctcggacctcgagccaccgacctcccgcacccgcatccgcgccatcctggacgccggcgacgccatggccggggagcgcgtggtcgtcggcggctgggtcaagaccggccgccagcagggcaagggcgagttcgccttcctcgaggtcaacgacgggtcctgccaggggaacctccaggtcatggtcgaaaaggacgtgcatccgctcgcaagcctcacccacacgggcacctccgtgctcgtcgagggcgtgctcaagaagccccccgcggaagccaagcagcgtatcgagttgaaggtggagcgggtcatcgagctcggggaggtggacgccgccgcctacccgctgcccaagaccaagatcacgctcgagacactcagggactttgtccacctccgcgcacgcaccaacacgataggcgcagttgctcggataaggcaccagcttgcctatgcaacccacagttttttcgatgaaaatggatttttgtatattcacacccccataataaccaccagcgactgtgagggtgcaggtgagatgttccaagtcactgccttattcagccaggctgaaaaggtggagaaggagcttaaggagaaccctgcaccatcagaagctgacgttgaggctgctaagcttgttgttaaagagaaaggagatgcagttgctcaactgaaagcagcaaaagctagcaagcaagagataactgctgctgtttccgtgcttacaaaagctaaagagaatgtgttaagggtggaagagaggtctaagttgaaacctggacttccactcaagggtgatgggaaaattgcgtttgagaatgacttcttcaagcgtcaagcttttctgaccgtttcaggccaacttcaggtcgaaacttatgcttgtgctctcagtaatgtgtatacctttggaccgacattccgggcagagaactcacatacatcaagacatttggcagagttttggatggttgaaccagaaattgcatttgcaaacttgcaggatgatatgaactgtgctgaaaggtatgtacagtacctgtgcaaatggttactcaagcattgccgagaagacatggaattcatggttaaacatgtggacaagaccgcaattgagcgtctggagcttgtttcctctactccgtttgaacgcatttcatatacaaaggctgtggagatcttagaaggtgtagataagaagtttgagaacaaggttgaatggggaattgatttagcgtctgagcatgagaggtatttgactgaggtgatatttaagaggccagttattgtgtataactacccaaaaggaataaaggcattttacatgaggctcaatgatgaccagaagacagtagctgcaatggatgttcttgttcccaaggttggtgaattaatcggtggaagccaaagggaggagcgtcttgatattcttaagcaaaggatactggacgcagatcttcctctggagccgtatgagtggtacctggacctccgacgctttggctcagtgaagcacagcgggttcggcctggggttcgagaggatgatccttttcgccaccggcctggagaacatcagagatgtcatcccgttcccacgataccccgggagggccgatctttgaagggttgcagatttctgccttgaaatataagaacgtcaattacactttcgttagcgtttttggaatagtgttggccgcccggttagattgatatatatacgcatgctgatatcatttgatatgcctcgtgtcttggcttgttgtgattctaaaaagaagtatcaggcttgttttatgattagaatattgaagtattattggtccttagcatcttcttttttgt

SEQ ID NO: 14163 - protein, 587 aa, Triticum aestivum
  peptide (1)..(587): Ceres Seq. ID no. 15222085
  misc_feature (321)..(583): Pfam Name: D, K and N Pfam Description: tRNA synthetases class II
  misc_feature (22)..(587): NCBI GI NO: 34914792 NR Description: putative asparaginyl-tRNA synthetase
  misc_feature (22)..(587): NCBI GI NO: 15241897 NR Description: asparaginyl-tRNA synthetase, cytoplasmic 1
  misc_feature (22)..(587): NCBI GI NO: 15223302 NR Description: asparaginyl-tRNA synthetase, cytoplasmic
  misc_feature (308)..(586): NCBI GI NO: 23040758 NR Description: hypothetical protein
  misc_feature (53)..(232): NCBI GI NO: 23040758 NR Description: hypothetical protein
  misc_feature (308)..(586): NCBI GI NO: 15236037 NR Description: asparaginyl-tRNA synthetase
  misc_feature (62)..(247): NCBI GI NO: 15236037 NR Description: asparaginyl-tRNA synthetase
  misc_feature (308)..(586): NCBI GI NO: 2664210 NR Description: asparaginyl-tRNA synthetase [Arabidopsis thaliana]
  misc_feature (308)..(586): NCBI GI NO: 20139977 NR Description: Asparaginyl-tRNA synthetase
  misc_feature (62)..(238): NCBI GI NO: 2664210 NR Description: asparaginyl-tRNA synthetase [Arabidopsis thaliana]
KNPNPLAAATAPGARPPEPTAMADDAASAPPTAQLAAASISSPPSSDLEPPTSRTRIRAILDAGDAMAGERVVVGGWVKTGRQQGKGEFAFLEVNDGSCQGNLQVMVEKDVHPLASLTHTGTSVLVEGVLKKPPAEAKQRIELKVERVIELGEVDAAAYPLPKTKITLETLRDFVHLRARTNTIGAVARIRHQLAYATHSFFDENGFLYIHTPIITTSDCEGAGEMFQVTALFSQAEKVEKELKENPAPSEADVEAAKLVVKEKGDAVAQLKAAKASKQEITAAVSVLTKAKENVLRVEERSKLKPGLPLKGDGKIAFENDFFKRQAFLTVSGQLQVETYACALSNVYTFGPTFRAENSHTSRHLAEFWMVEPEIAFANLQDDMNCAERYVQYLCKWLLKHCREDMEFMVKHVDKTAIERLELVSSTPFERISYTKAVEILEGVDKKFENKVEWGIDLASEHERYLTEVIFKRPVIVYNYPKGIKAFYMRLNDDQKTVAAMDVLVPKVGELIGGSQREERLDILKQRILDADLPLEPYEWYLDLRRFGSVKHSGFGLGFERMILFATGLENIRDVIPFPRYPGRADL

SEQ ID NO: 14164 - protein, 566 aa, Triticum aestivum
  peptide (1)..(566): Ceres Seq. ID no. 15222086
  misc_feature (300)..(562): Pfam Name: D, K and N Pfam Description: tRNA synthetases class II
  misc_feature (1)..(566): NCBI GI NO: 34914792 NR Description: putative asparaginyl-tRNA synthetase
  misc_feature (1)..(566): NCBI GI NO: 15241897 NR Description: asparaginyl-tRNA synthetase, cytoplasmic 1
  misc_feature (1)..(566): NCBI GI NO: 15223302 NR Description: asparaginyl-tRNA synthetase, cytoplasmic
  misc_feature (287)..(565): NCBI GI NO: 23040758 NR Description: hypothetical protein
  misc_feature (32)..(211): NCBI GI NO: 23040758 NR Description: hypothetical protein
  misc_feature (287)..(565): NCBI GI NO: 15236037 NR Description: asparaginyl-tRNA synthetase
  misc_feature (41)..(226): NCBI GI NO: 15236037 NR Description: asparaginyl-tRNA synthetase
  misc_feature (287)..(565): NCBI GI NO: 2664210 NR Description: asparaginyl-tRNA synthetase [Arabidopsis thaliana]
  misc_feature (287)..(565): NCBI GI NO: 20139977 NR Description: Asparaginyl-tRNA synthetase
  misc_feature (41)..(217): NCBI GI NO: 2664210 NR Description: asparaginyl-tRNA synthetase [Arabidopsis thaliana]
MADDAASAPPTAQLAAASISSPPSSDLEPPTSRTRIRAILDAGDAMAGERVVVGGWVKTGRQQGKGEFAFLEVNDGSCQGNLQVMVEKDVHPLASLTHTGTSVLVEGVLKKPPAEAKQRIELKVERVIELGEVDAAAYPLPKTKITLETLRDFVHLRARTNTIGAVARIRHQLAYATHSFFDENGFLYIHTPIITTSDCEGAGEMFQVTALFSQAEKVEKELKENPAPSEADVEAAKLVVKEKGDAVAQLKAAKASKQEITAAVSVLTKAKENVLRVEERSKLKPGLPLKGDGKIAFENDFFKRQAFLTVSGQLQVETYACALSNVYTFGPTFRAENSHTSRHLAEFWMVEPEIAFANLQDDMNCAERYVQYLCKWLLKHCREDMEFMVKHVDKTAIERLELVSSTPFERISYTKAVEILEGVDKKFENKVEWGIDLASEHERYLTEVIFKRPVIVYNYPKGIKAFYMRLNDDQKTVAAMDVLVPKVGELIGGSQREERLDILKQRILDADLPLEPYEWYLDLRRFGSVKHSGFGLGFERMILFATGLENIRDVIPFPRYPGRADL

SEQ ID NO: 14165 - protein, 521 aa, Triticum aestivum
  peptide (1)..(521): Ceres Seq. ID no. 15222087
  misc_feature (255)..(517): Pfam Name: D, K and N Pfam Description: tRNA synthetases class II
  misc_feature (1)..(521): NCBI GI NO: 34914792 NR Description: putative asparaginyl-tRNA synthetase
  misc_feature (1)..(521): NCBI GI NO: 15241897 NR Description: asparaginyl-tRNA synthetase, cytoplasmic 1
  misc_feature (1)..(521): NCBI GI NO: 15223302 NR Description: asparaginyl-tRNA synthetase, cytoplasmic
  misc_feature (242)..(520): NCBI GI NO: 23040758 NR Description: hypothetical protein
  misc_feature (1)..(166): NCBI GI NO: 23040758 NR Description: hypothetical protein
  misc_feature (242)..(520): NCBI GI NO: 15236037 NR Description: asparaginyl-tRNA synthetase
  misc_feature (1)..(181): NCBI GI NO: 15236037 NR Description: asparaginyl-tRNA synthetase
  misc_feature (242)..(520): NCBI GI NO: 2664210 NR Description: asparaginyl-tRNA synthetase [Arabidopsis thaliana]
  misc_feature (242)..(520): NCBI GI NO: 20139977 NR Description: Asparaginyl-tRNA synthetase
  misc_feature (1)..(172): NCBI GI NO: 2664210 NR Description: asparaginyl-tRNA synthetase [Arabidopsis thaliana]
MAGERVVVGGWVKTGRQQGKGEFAFLEVNDGSCQGNLQVMVEKDVHPLASLTHTGTSVLVEGVLKKPPAEAKQRIELKVERVIELGEVDAAAYPLPKTKITLETLRDFVHLRARTNTIGAVARIRHQLAYATHSFFDENGFLYIHTPIITTSDCEGAGEMFQVTALFSQAEKVEKELKENPAPSEADVEAAKLVVKEKGDAVAQLKAAKASKQEITAAVSVLTKAKENVLRVEERSKLKPGLPLKGDGKIAFENDFFKRQAFLTVSGQLQVETYACALSNVYTFGPTFRAENSHTSRHLAEFWMVEPEIAFANLQDDMNCAERYVQYLCKWLLKHCREDMEFMVKHVDKTAIERLELVSSTPFERISYTKAVEILEGVDKKFENKVEWGIDLASEHERYLTEVIFKRPVIVYNYPKGIKAFYMRLNDDQKTVAAMDVLVPKVGELIGGSQREERLDILKQRILDADLPLEPYEWYLDLRRFGSVKHSGFGLGFERMILFATGLENIRDVIPFPRYPGRADL

SEQ ID NO: 14166 - DNA, 1266 bp, Triticum aestivum
  misc_feature (1)..(1266): Ceres Seq. ID no. 12617235
catcctaatcgaaaaaaaaatatcaaaaccaattcaactccctcagatcctagtcttgcagtccacccacggcggcgatggcggagctcaagagccggcgggtgatcctcaaggactacgtggagggctaccccacggaggcgcacatggagctgctccccgccgcgcccgtcgacgaggccgaggagggctcggtgctggtcaagaacctctacctctcctgcgacccctacatgcgccccaagatgtcccgcccgctgcaccagtcctacaccgccgccttcgtcccgggcgccgccatcaccggttacggcgtgtcccaggtcgtccgctcctcgcgccccgggctcgccgccggcgacctcgtctggggcatgaccggctgggaggactacagcgtcatcaagccgcccttcacggccatactcaccaagatccagcccgacgacggcgtgccgctgtcctactacaccggcatcctcggcatgccggggctcacggcctacgtgggattccaccacatctgctcccccaaggccggcgagacggtgttcgtctccgcggcctccggcgccgtcggccagctcgtcggccagttcgccaggctcctcggctgccacgtcgtcggcagtgcgggctccaaggagaaggtggacctactcatcaacaagttcggcttccacgacgccttcaactacaaggaggaggacgccgacctcgccggcgcgctcaagaagcgcttccccgacggcatcgacgtctacttcgagaacgttggcggcaagatgctcgaggccgtgctgctcaacatgaaggtgcacggacgcatcgccgtctgcggcctcatctcccagtacaacctcaccgccggcgagaaggacgccgacgtcggcgtgcgcaacctcacctccctcgtctccaagcgcatcaagatgcagggcttcatcgagcccgaccacaagcacctctacccggagtacatggcgtgggtgctcccgcacatcaaggagggcagggtcgtctacgtcgaggacgtcgccgacgggctcgacgccgcgcccgcagcgctcatcggcctctaccacggccgcaacgtcggcaagcaggtcgtcaggctcaccaaccccgaccccaagtgactcacacactgtactgtagtagcagatcaattatcaaccacgcgtcaatctattcacatcgcaatcgcatcttggtggttggatggcaacgaaagagtcaaattaaataaaagatccttgctttctc

SEQ ID NO: 14167 - protein, 415 aa, Triticum aestivum
  peptide (1)..(415): Ceres Seq. ID no. 12617236
  misc_feature (144)..(375): Pfam Name: Pfam Description:  HlyD family secretion protein
ILIEKKISKPIQLPQILVLQSTHGGDGGAQEPAGDPQGLRGGLPHGGAHGAAPRRARRRGRGGLGAGQEPLPLLRPLHAPQDVPPAAPVLHRRLRPGRRHHRLRRVPGRPLLAPRARRRRPRLGHDRLGGLQRHQAALHGHTHQDPARRRRAAVLLHRHPRHAGAHGLRGIPPHLLPQGRRDGVRLRGLRRRRPARRPVRQAPRLPRRRQCGLQGEGGPTHQQVRLPRRLQLQGGGRRPRRRAQEALPRRHRRLLRERWRQDARGRAAQHEGARTHRRLRPHLPVQPHRRREGRRRRRAQPHLPRLQAHQDAGLHRARPQAPLPGVHGVGAPAHQGGQGRLRRGRRRRARRRARSAHRPLPRPQRRQAGRQAHQPRPQVTHTLYCSSRSIINHASIYSHRNRILVVGWQRKSQIK

SEQ ID NO: 14168 - protein, 353 aa, Triticum aestivum
  peptide (1)..(353): Ceres Seq. ID no. 12617237
  misc_feature (94)..(345): Pfam Name: Pfam Description:  Zinc-binding dehydrogenase
  misc_feature (3)..(348): NCBI GI NO: 6692816 NR Description: allyl alcohol dehydrogenase [Nicotiana tabacum]
  misc_feature (6)..(345): NCBI GI NO: 15237888 NR Description: quinone oxidoreductase -like protein
  misc_feature (6)..(345): NCBI GI NO: 15237890 NR Description: quinone oxidoreductase - like protein
  misc_feature (6)..(345): NCBI GI NO: 38345384 NR Description: OSJNBa0067K08.13
  misc_feature (6)..(345): NCBI GI NO: 21539447 NR Description: quinone oxidoreductase-like protein
  misc_feature (6)..(345): NCBI GI NO: 21554121 NR Description: quinone oxidoreductase-like protein
  misc_feature (6)..(345): NCBI GI NO: 1362014 NR Description: probable NADPH2:quinone reductase (EC 1
  misc_feature (6)..(345): NCBI GI NO: 22326861 NR Description: quinone oxidoreductase - like protein
  misc_feature (6)..(345): NCBI GI NO: 17529140 NR Description: putative quinone oxidoreductase
  misc_feature (1)..(345): NCBI GI NO: 15228456 NR Description: putative NADP-dependent oxidoreductase
MAELKSRRVILKDYVEGYPTEAHMELLPAAPVDEAEEGSVLVKNLYLSCDPYMRPKMSRPLHQSYTAAFVPGAAITGYGVSQVVRSSRPGLAAGDLVWGMTGWEDYSVIKPPFTAILTKIQPDDGVPLSYYTGILGMPGLTAYVGFHHICSPKAGETVFVSAASGAVGQLVGQFARLLGCHVVGSAGSKEKVDLLINKFGFHDAFNYKEEDADLAGALKKRFPDGIDVYFENVGGKMLEAVLLNMKVHGRIAVCGLISQYNLTAGEKDADVGVRNLTSLVSKRIKMQGFIEPDHKHLYPEYMAWVLPHIKEGRVVYVEDVADGLDAAPAALIGLYHGRNVGKQVVRLTNPDPK

SEQ ID NO: 14169 - protein, 330 aa, Triticum aestivum
  peptide (1)..(330): Ceres Seq. ID no. 12617238
  misc_feature (71)..(322): Pfam Name: Pfam Description:  Zinc-binding dehydrogenase
  misc_feature (1)..(325): NCBI GI NO: 6692816 NR Description: allyl alcohol dehydrogenase [Nicotiana tabacum]
  misc_feature (1)..(322): NCBI GI NO: 15237888 NR Description: quinone oxidoreductase -like protein
  misc_feature (1)..(322): NCBI GI NO: 15237890 NR Description: quinone oxidoreductase - like protein
  misc_feature (1)..(322): NCBI GI NO: 38345384 NR Description: OSJNBa0067K08.13
  misc_feature (1)..(322): NCBI GI NO: 21539447 NR Description: quinone oxidoreductase-like protein
  misc_feature (1)..(322): NCBI GI NO: 21554121 NR Description: quinone oxidoreductase-like protein
  misc_feature (1)..(322): NCBI GI NO: 1362014 NR Description: probable NADPH2:quinone reductase (EC 1
  misc_feature (1)..(322): NCBI GI NO: 22326861 NR Description: quinone oxidoreductase - like protein
  misc_feature (1)..(322): NCBI GI NO: 17529140 NR Description: putative quinone oxidoreductase
  misc_feature (1)..(322): NCBI GI NO: 15228456 NR Description: putative NADP-dependent oxidoreductase
MELLPAAPVDEAEEGSVLVKNLYLSCDPYMRPKMSRPLHQSYTAAFVPGAAITGYGVSQVVRSSRPGLAAGDLVWGMTGWEDYSVIKPPFTAILTKIQPDDGVPLSYYTGILGMPGLTAYVGFHHICSPKAGETVFVSAASGAVGQLVGQFARLLGCHVVGSAGSKEKVDLLINKFGFHDAFNYKEEDADLAGALKKRFPDGIDVYFENVGGKMLEAVLLNMKVHGRIAVCGLISQYNLTAGEKDADVGVRNLTSLVSKRIKMQGFIEPDHKHLYPEYMAWVLPHIKEGRVVYVEDVADGLDAAPAALIGLYHGRNVGKQVVRLTNPDPK

SEQ ID NO: 14170 - DNA, 1394 bp, Triticum aestivum
  misc_feature (1)..(1394): Ceres Seq. ID no. 13597225
cccacaccgtccccctcgtctctcctcatctcgcctgtgctctccacacgaccacaccaaaaatccagacctgcccgcccgcctcgcctcctcgtctgcctcctctcctgcgcttcagtttccaggctaggttgctgctgttgttcacatggattcctttttccaaagagctttcggcgacccaatgtgctcggaagacagtaatgttgtccaacaaggaattgagaaatgcccattcctgaggaacatcaacgagcctacgagtttttccttgacatccgttaattttcccgctccggcaaccggagccaagggtccaatttttgaagacgggcccaactttgacacggcatttcgagttttccacggcagagacggggttgttccactttcagaaggagcctttgcacatattgagaagcctctgccaaagcccactcctgaatttaaccccttggcagccaaagcagctaccatcagtctctcgggattcggaggctttttcagcttcggtgatttctcaaacaagcgcaataagcagaactccaacaagaagaatcccaacaacctcccccagaataaaggccagtctaataacaatcatgaagcgatgagcaatgactggctggaaaatggtcaatgccctcttgcaaagtcatatagagcaatcggtggagtcgtgcctcttgtcgcaaagctgctgacacccccagctggtatgaaactgacgtgccctcctgcgattgttgctgcccgtgcagcaatatcccgcacggcgtttgcgaaggggcttcgccctcagcccctaccgacaaaagtagtggtgatcgcactgctcggtatggcagcaaatgttcctcttggcatctggagggagcacactacgaagttttcagtgcaatggtttgcggcggtccatgctgcagtgcctttcatagggatgctgaggaagtccatcctgatgccgaagagcgccatggcccttaccatagctgcctctatattgggtcagacaattggttcaagagctgaacgtatcagattgaagagggcaaaattagcagcagagggccatggccatgaacatgctacccggattgaagctccggtgaccctgaaaactgggagctcaggtgctgtccagctctgggatccgcttggcctcagagtcaaaggcgccgtgtccccagccctggttccgactgttggtgccatgtactgatgagatgatcatgcttcactgcggcggctgcgagaattgtatcaagagttccagaaattgtttcttgtattcattgttattgtgtcttgtaaaggattactggctacattggattcttatccccacatgagtttgggtgcaatcaataaatttcaccatgtcctttggtttc

SEQ ID NO: 14171 - protein, 357 aa, Triticum aestivum
  peptide (1)..(357): Ceres Seq. ID no. 13597226
  misc_feature (1)..(352): NCBI GI NO: 37537220 NR Description: unknown protein
  misc_feature (139)..(352): NCBI GI NO: 34897958 NR Description: contains ESTsAU068433
  misc_feature (1)..(155): NCBI GI NO: 34897958 NR Description: contains ESTsAU068433
  misc_feature (1)..(352): NCBI GI NO: 33146734 NR Description: unknown protein
  misc_feature (1)..(352): NCBI GI NO: 34899856 NR Description: OJ1714_H10.10
  misc_feature (14)..(353): NCBI GI NO: 15234866 NR Description: expressed protein [Arabidopsis thaliana]
  misc_feature (25)..(300): NCBI GI NO: 21595083 NR Description: unknown [Arabidopsis thaliana]
  misc_feature (25)..(300): NCBI GI NO: 21954084 NR Description: unknown protein [Arabidopsis thaliana]
  misc_feature (25)..(300): NCBI GI NO: 30694759 NR Description: expressed protein [Arabidopsis thaliana]
MDSFFQRAFGDPMCSEDSNVVQQGIEKCPFLRNINEPTSFSLTSVNFPAPATGAKGPIFEDGPNFDTAFRVFHGRDGVVPLSEGAFAHIEKPLPKPTPEFNPLAAKAATISLSGFGGFFSFGDFSNKRNKQNSNKKNPNNLPQNKGQSNNNHEAMSNDWLENGQCPLAKSYRAIGGVVPLVAKLLTPPAGMKLTCPPAIVAARAAISRTAFAKGLRPQPLPTKVVVIALLGMAANVPLGIWREHTTKFSVQWFAAVHAAVPFIGMLRKSILMPKSAMALTIAASILGQTIGSRAERIRLKRAKLAAEGHGHEHATRIEAPVTLKTGSSGAVQLWDPLGLRVKGAVSPALVPTVGAMY

SEQ ID NO: 14172 - protein, 345 aa, Triticum aestivum
  peptide (1)..(345): Ceres Seq. ID no. 13597227
  misc_feature (1)..(340): NCBI GI NO: 37537220 NR Description: unknown protein
  misc_feature (127)..(340): NCBI GI NO: 34897958 NR Description: contains ESTsAU068433
  misc_feature (1)..(143): NCBI GI NO: 34897958 NR Description: contains ESTsAU068433
  misc_feature (1)..(340): NCBI GI NO: 33146734 NR Description: unknown protein
  misc_feature (1)..(340): NCBI GI NO: 34899856 NR Description: OJ1714_H10.10
  misc_feature (2)..(341): NCBI GI NO: 15234866 NR Description: expressed protein [Arabidopsis thaliana]
  misc_feature (13)..(288): NCBI GI NO: 21595083 NR Description: unknown [Arabidopsis thaliana]
  misc_feature (13)..(288): NCBI GI NO: 21954084 NR Description: unknown protein [Arabidopsis thaliana]
  misc_feature (13)..(288): NCBI GI NO: 30694759 NR Description: expressed protein [Arabidopsis thaliana]
MCSEDSNVVQQGIEKCPFLRNINEPTSFSLTSVNFPAPATGAKGPIFEDGPNFDTAFRVFHGRDGVVPLSEGAFAHIEKPLPKPTPEFNPLAAKAATISLSGFGGFFSFGDFSNKRNKQNSNKKNPNNLPQNKGQSNNNHEAMSNDWLENGQCPLAKSYRAIGGVVPLVAKLLTPPAGMKLTCPPAIVAARAAISRTAFAKGLRPQPLPTKVVVIALLGMAANVPLGIWREHTTKFSVQWFAAVHAAVPFIGMLRKSILMPKSAMALTIAASILGQTIGSRAERIRLKRAKLAAEGHGHEHATRIEAPVTLKTGSSGAVQLWDPLGLRVKGAVSPALVPTVGAMY

SEQ ID NO: 14173 - protein, 203 aa, Triticum aestivum
  peptide (1)..(203): Ceres Seq. ID no. 13597228
  misc_feature (1)..(198): NCBI GI NO: 37537220 NR Description: unknown protein
  misc_feature (1)..(198): NCBI GI NO: 34897958 NR Description: contains ESTsAU068433
  misc_feature (1)..(198): NCBI GI NO: 33146734 NR Description: unknown protein
  misc_feature (1)..(198): NCBI GI NO: 34899856 NR Description: OJ1714_H10.10
  misc_feature (1)..(199): NCBI GI NO: 15234866 NR Description: expressed protein [Arabidopsis thaliana]
  misc_feature (1)..(146): NCBI GI NO: 21595083 NR Description: unknown [Arabidopsis thaliana]
  misc_feature (1)..(146): NCBI GI NO: 21954084 NR Description: unknown protein [Arabidopsis thaliana]
  misc_feature (1)..(146): NCBI GI NO: 30694759 NR Description: expressed protein [Arabidopsis thaliana]
MSNDWLENGQCPLAKSYRAIGGVVPLVAKLLTPPAGMKLTCPPAIVAARAAISRTAFAKGLRPQPLPTKVVVIALLGMAANVPLGIWREHTTKFSVQWFAAVHAAVPFIGMLRKSILMPKSAMALTIAASILGQTIGSRAERIRLKRAKLAAEGHGHEHATRIEAPVTLKTGSSGAVQLWDPLGLRVKGAVSPALVPTVGAMY

SEQ ID NO: 14174 - DNA, 1790 bp, Triticum aestivum
  misc_feature (1)..(1790): Ceres Seq. ID no. 13597161
agaagcctacgagaaccacagtccagccgaccagccgccgccgcgcgataaccggagttaatggagacgccgcccccatggagggtcctcgagttctacagcggtatcggcggcatgcggtactcccttgcgtcgtcgggcgttcgagcggaggtggtggaggcctttgacatcaacgacgtcgccaacgacgtctacgagcacaacttcggccaccgcccctgccagggaaacattcaaacactcactgctggtgatctagacaagtacaaggcacatgcatggctcctttctcctccatgtcaaccatatacacggcaaggacttcagaaacattcagctgatgctcgggcattttcatttataaagattttaaaccttatgcaaaacatgagctttcctccacaaatgttatttgtggaaaatgttgtcggattcgaggtatctgatacacatgaccagttgctagcggtcctttcaactctcagtttcaacacacaagaattcatcctaagccccttgcagtttggtgtcccatattctagaccgcgctacttctgtttggcaaaacaggaatctatgtgttttccaaatccatcagtcaatgacaagctgcttaggacacctacatgcctaacattgaacactacgagaactcagaatagctatgaccagaatgaagatgatctggaagtagtatgtaatccaataagaaacttccttgaagcacagagtattggagataaggaatcttcagccatcatctctgactttaaggaggctgatggatgcactccgattgaaactgcttcacatgactacacagttccactaagcttgattgaacggtggggaaatgctatggatattgtataccctgaatcaaaacggtgctgctgttttactaaaagttattatcgctatgtgaagggcacaggctctgtactggttacatctaaaagcctcaaaccagttccaaaagagaaccttgaaatgtcttcactgagtgagttgggtctacggtttttcacccctcgagaggtcgctaatttgcattcatttcccccgagtttccgttttccggatcagataagcctcagacaacagtatgccatgctgggtaatagtctgagcatagcggttgtggctcctttgttgtgctatctgtttgccgagacatagacaagttctcaatcatttggcaggtgatattcaccttggcccgccatctgatatttgtcaaaatcttgccacacttgagttgcaagtatgatattttatccatcagtttttgtgtgtctccgatctgtgcattgttgtgagttgtgatcatgctcatccttcacgccacggtgcagtttcaccgagcttgaggacgtgcggtcaattcgctgacggcctagcaggtagtattacagtgaagaggtgggtgcgtccaaaataaggcggcatgtacggccgaagctcaacctttggatctattgtagcatataccaataccagtcccaagtactccctccgtcccaaaataaaactagtacaaagttgagtcacttatttgtaaaattagtacaaagttgagtcatttattttgggatggagggaatattaggggtcgacctctgctttgtgccttccactccacagccatatttatgttgcaacattgcatgttttgaggcccagttagtaatgtgataattttgttttgggcaagtgtaatgtgatactatgtgatgacttatcgtattgcgtgcaataaatggatgcaaatcaaatcccactatatg

SEQ ID NO: 14175 - protein, 373 aa, Triticum aestivum
  peptide (1)..(373): Ceres Seq. ID no. 15222040
  misc_feature (7)..(371): Pfam Name: Pfam Description:  C-5 cytosine-specific DNA methylase
  misc_feature (1)..(372): NCBI GI NO: 13936240 NR Description: DNA methyltransferase ZMET4 [Zea mays]
  misc_feature (1)..(373): NCBI GI NO: 34912588 NR Description: putative DNA methyltransferase
  misc_feature (6)..(370): NCBI GI NO: 18420929 NR Description: DNA methyltransferase PMT1 - like protein
  misc_feature (6)..(370): NCBI GI NO: 21553420 NR Description: DNA methyltransferase PMT1-like protein
  misc_feature (8)..(190): NCBI GI NO: 28422212 NR Description: Similar to DNA (cytosine-5-)-methyltransferase 2
  misc_feature (221)..(369): NCBI GI NO: 28422212 NR Description: Similar to DNA (cytosine-5-)-methyltransferase 2
  misc_feature (6)..(222): NCBI GI NO: 13096616 NR Description: Chain A
  misc_feature (231)..(370): NCBI GI NO: 13096616 NR Description: Chain A
  misc_feature (8)..(170): NCBI GI NO: 19112479 NR Description: DNA methyltransferase pmt1
  misc_feature (247)..(369): NCBI GI NO: 19112479 NR Description: DNA methyltransferase pmt1
METPPPWRVLEFYSGIGGMRYSLASSGVRAEVVEAFDINDVANDVYEHNFGHRPCQGNIQTLTAGDLDKYKAHAWLLSPPCQPYTRQGLQKHSADARAFSFIKILNLMQNMSFPPQMLFVENVVGFEVSDTHDQLLAVLSTLSFNTQEFILSPLQFGVPYSRPRYFCLAKQESMCFPNPSVNDKLLRTPTCLTLNTTRTQNSYDQNEDDLEVVCNPIRNFLEAQSIGDKESSAIISDFKEADGCTPIETASHDYTVPLSLIERWGNAMDIVYPESKRCCCFTKSYYRYVKGTGSVLVTSKSLKPVPKENLEMSSLSELGLRFFTPREVANLHSFPPSFRFPDQISLRQQYAMLGNSLSIAVVAPLLCYLFAET

SEQ ID NO: 14176 - protein, 355 aa, Triticum aestivum
  peptide (1)..(355): Ceres Seq. ID no. 15222041
  misc_feature (1)..(353): Pfam Name: Pfam Description:  C-5 cytosine-specific DNA methylase
  misc_feature (1)..(354): NCBI GI NO: 13936240 NR Description: DNA methyltransferase ZMET4 [Zea mays]
  misc_feature (1)..(355): NCBI GI NO: 34912588 NR Description: putative DNA methyltransferase
  misc_feature (1)..(352): NCBI GI NO: 18420929 NR Description: DNA methyltransferase PMT1 - like protein
  misc_feature (1)..(352): NCBI GI NO: 21553420 NR Description: DNA methyltransferase PMT1-like protein
  misc_feature (1)..(172): NCBI GI NO: 28422212 NR Description: Similar to DNA (cytosine-5-)-methyltransferase 2
  misc_feature (203)..(351): NCBI GI NO: 28422212 NR Description: Similar to DNA (cytosine-5-)-methyltransferase 2
  misc_feature (1)..(204): NCBI GI NO: 13096616 NR Description: Chain A
  misc_feature (213)..(352): NCBI GI NO: 13096616 NR Description: Chain A
  misc_feature (1)..(152): NCBI GI NO: 19112479 NR Description: DNA methyltransferase pmt1
  misc_feature (229)..(351): NCBI GI NO: 19112479 NR Description: DNA methyltransferase pmt1
MRYSLASSGVRAEVVEAFDINDVANDVYEHNFGHRPCQGNIQTLTAGDLDKYKAHAWLLSPPCQPYTRQGLQKHSADARAFSFIKILNLMQNMSFPPQMLFVENVVGFEVSDTHDQLLAVLSTLSFNTQEFILSPLQFGVPYSRPRYFCLAKQESMCFPNPSVNDKLLRTPTCLTLNTTRTQNSYDQNEDDLEVVCNPIRNFLEAQSIGDKESSAIISDFKEADGCTPIETASHDYTVPLSLIERWGNAMDIVYPESKRCCCFTKSYYRYVKGTGSVLVTSKSLKPVPKENLEMSSLSELGLRFFTPREVANLHSFPPSFRFPDQISLRQQYAMLGNSLSIAVVAPLLCYLFAET

SEQ ID NO: 14177 - protein, 266 aa, Triticum aestivum
  peptide (1)..(266): Ceres Seq. ID no. 15222042
  misc_feature (1)..(264): Pfam Name: Pfam Description:  C-5 cytosine-specific DNA methylase
  misc_feature (1)..(265): NCBI GI NO: 13936240 NR Description: DNA methyltransferase ZMET4 [Zea mays]
  misc_feature (1)..(266): NCBI GI NO: 34912588 NR Description: putative DNA methyltransferase
  misc_feature (1)..(263): NCBI GI NO: 18420929 NR Description: DNA methyltransferase PMT1 - like protein
  misc_feature (1)..(263): NCBI GI NO: 21553420 NR Description: DNA methyltransferase PMT1-like protein
  misc_feature (1)..(83): NCBI GI NO: 28422212 NR Description: Similar to DNA (cytosine-5-)-methyltransferase 2
  misc_feature (114)..(262): NCBI GI NO: 28422212 NR Description: Similar to DNA (cytosine-5-)-methyltransferase 2
  misc_feature (1)..(115): NCBI GI NO: 13096616 NR Description: Chain A
  misc_feature (124)..(263): NCBI GI NO: 13096616 NR Description: Chain A
  misc_feature (1)..(63): NCBI GI NO: 19112479 NR Description: DNA methyltransferase pmt1
  misc_feature (140)..(262): NCBI GI NO: 19112479 NR Description: DNA methyltransferase pmt1
MQNMSFPPQMLFVENVVGFEVSDTHDQLLAVLSTLSFNTQEFILSPLQFGVPYSRPRYFCLAKQESMCFPNPSVNDKLLRTPTCLTLNTTRTQNSYDQNEDDLEVVCNPIRNFLEAQSIGDKESSAIISDFKEADGCTPIETASHDYTVPLSLIERWGNAMDIVYPESKRCCCFTKSYYRYVKGTGSVLVTSKSLKPVPKENLEMSSLSELGLRFFTPREVANLHSFPPSFRFPDQISLRQQYAMLGNSLSIAVVAPLLCYLFAET

SEQ ID NO: 14178 - DNA, 1548 bp, Triticum aestivum
  misc_feature (1)..(1548): Ceres Seq. ID no. 13597376
aaaacaagaagaagagacgcacaagtccccctctctctccctctctcacaaacaaacaaacaaaccgctcttgtctcccattccaatctcgccccgtcggtcgaattacaagttagaagaagaagaagaggaatcagaggaagaagaagatggtgtctgcggtgcttcggacgatcctggtgacgggcggcgcggggtacatcggcagccacacggtgctgcagctgctgctccagggcttccgcgtcctcgtcgtcgacagcctcgacaacgcctccgaggaggccatccgccgcgtccggcaactcgccaacgccccgcaaaacagcctcgacttccgcaaggtggaccttcgtgacaaggaggcgctggacgaaatcttctcgacccaaaggttcgaggctgtgatccactttgccgggctgaaagccgtgggggagagcgtgcagaagcccctgctttactacgacaacaacctcatcggcaccatcaccctcctccaagtcatggcagcacatggatgcaacaagcttgtgttctcatcatcagccactgtgtacgggtggcccaaggaggtgccctgcaccgaggagttcccgctctccgcgaccaacccttacggccgaactaagcttgtcattgaagacatctgccgcgacctccagcgctcggaccccgactggaagatcatcctgctgaggtacttcaacccggtcggcgcgcacccgagtggctacatcggggaagaccccctcggagtccccaacaacctgatgccctatgtccagcaagtcgctgtcgggaggcggcccgcgctgacggtttatgggaccgactacaacaccaaggatggaacaggggtacgtgactacatccatgttgttgacctggctgacggccacatcgccgccctgaggaagctctacgaagattctgacagaatagggtgcgaggtgtacaatctgggcactggaaaggggacgtccgtgctggaaatggttgctgcattcgagaaggcttgcggaaagaaaatccctctggtttatgctggaagaagagctggagatgccgagactgtgtacgctgccaccgccaaagctgagaaggagctcaagtggaaggccaagtatggggtggaggagatgtgcagagacctgtggaactgggccagcaagaacccctacggctacggatccagcgacaacggccactgattaatagtcaccagagcaagtagtaatagcagcatatatacgccaccatccatctatatatttatccaccaccaccaccacagagagcagagagaagaagaggaagactactactgatgtgtatagggaaggagtgagtgagtcggatccatcagtagcttataattaattatattgttcgcgttagaaagctaatcatatccatctcccttatggagtaagtagaagaaataaggttggttcccttgccttgtagaaatatatatatagatatcttgtcggtcatggaataacttactttacctactgatataaatatatatatgcttggttc

SEQ ID NO: 14179 - protein, 354 aa, Triticum aestivum
  peptide (1)..(354): Ceres Seq. ID no. 13597377
  misc_feature (9)..(344): Pfam Name: Pfam Description:  NAD dependent epimerase/dehydratase family
  misc_feature (1)..(354): NCBI GI NO: 21715990 NR Description: UDP-glucose 4-epimerase
  misc_feature (7)..(352): NCBI GI NO: 11386775 NR Description: UDP-glucose 4-epimerase GEPI48
  misc_feature (7)..(353): NCBI GI NO: 15236663 NR Description: UDP-glucose 4-epimerase
  misc_feature (7)..(353): NCBI GI NO: 21536846 NR Description: UDPglucose 4-epimerase-like protein
  misc_feature (7)..(354): NCBI GI NO: 21553659 NR Description: UDP-galactose 4-epimerase-like protein
  misc_feature (7)..(354): NCBI GI NO: 12643850 NR Description: Probable UDP-glucose 4-epimerase At4g10960
  misc_feature (7)..(354): NCBI GI NO: 15236988 NR Description: UDP-glucose 4-epimerase
  misc_feature (1)..(354): NCBI GI NO: 40253348 NR Description: putative UDP-glucose 4-epimerase
  misc_feature (1)..(354): NCBI GI NO: 25553520 NR Description: putative UDP-glucose 4-epimerase
  misc_feature (9)..(352): NCBI GI NO: 15217653 NR Description: UDP-glucose 4-epimerase
MVSAVLRTILVTGGAGYIGSHTVLQLLLQGFRVLVVDSLDNASEEAIRRVRQLANAPQNSLDFRKVDLRDKEALDEIFSTQRFEAVIHFAGLKAVGESVQKPLLYYDNNLIGTITLLQVMAAHGCNKLVFSSSATVYGWPKEVPCTEEFPLSATNPYGRTKLVIEDICRDLQRSDPDWKIILLRYFNPVGAHPSGYIGEDPLGVPNNLMPYVQQVAVGRRPALTVYGTDYNTKDGTGVRDYIHVVDLADGHIAALRKLYEDSDRIGCEVYNLGTGKGTSVLEMVAAFEKACGKKIPLVYAGRRAGDAETVYAATAKAEKELKWKAKYGVEEMCRDLWNWASKNPYGYGSSDNGH

SEQ ID NO: 14180 - protein, 235 aa, Triticum aestivum
  peptide (1)..(235): Ceres Seq. ID no. 13597378
  misc_feature (1)..(225): Pfam Name: Pfam Description:  NAD dependent epimerase/dehydratase family
  misc_feature (1)..(235): NCBI GI NO: 21715990 NR Description: UDP-glucose 4-epimerase
  misc_feature (1)..(233): NCBI GI NO: 11386775 NR Description: UDP-glucose 4-epimerase GEPI48
  misc_feature (1)..(234): NCBI GI NO: 15236663 NR Description: UDP-glucose 4-epimerase
  misc_feature (1)..(234): NCBI GI NO: 21536846 NR Description: UDPglucose 4-epimerase-like protein
  misc_feature (1)..(235): NCBI GI NO: 21553659 NR Description: UDP-galactose 4-epimerase-like protein
  misc_feature (1)..(235): NCBI GI NO: 12643850 NR Description: Probable UDP-glucose 4-epimerase At4g10960
  misc_feature (1)..(235): NCBI GI NO: 15236988 NR Description: UDP-glucose 4-epimerase
  misc_feature (1)..(235): NCBI GI NO: 40253348 NR Description: putative UDP-glucose 4-epimerase
  misc_feature (1)..(235): NCBI GI NO: 25553520 NR Description: putative UDP-glucose 4-epimerase
  misc_feature (1)..(233): NCBI GI NO: 15217653 NR Description: UDP-glucose 4-epimerase
MAAHGCNKLVFSSSATVYGWPKEVPCTEEFPLSATNPYGRTKLVIEDICRDLQRSDPDWKIILLRYFNPVGAHPSGYIGEDPLGVPNNLMPYVQQVAVGRRPALTVYGTDYNTKDGTGVRDYIHVVDLADGHIAALRKLYEDSDRIGCEVYNLGTGKGTSVLEMVAAFEKACGKKIPLVYAGRRAGDAETVYAATAKAEKELKWKAKYGVEEMCRDLWNWASKNPYGYGSSDNGH

SEQ ID NO: 14181 - DNA, 1412 bp, Triticum aestivum
  misc_feature (1)..(1412): Ceres Seq. ID no. 12617090
attagtagcatctcaggagcagcaacaggagatggaatctctccccgtcccgagcgtgcaggccatggtggcggccaccggcggagccgatgtgccaccgaggtatctccggcctgcggaggcggtcaccggcatcgtcgacggcgagggtgaggcccagatccccatcatcgactaccggaggctgctgctggagctggatcgccgcggcgaggagtccgcgcgcctccacagcgcctgccaggaatggggcttcttccagctggttaaccacagtgtcccggccgatgtggtggagggaatgaaggccaacattcagcaattctttcagctacccgcagagacaaagaaacgattcgcgcaggagcgagggcagctggaaggctacggtcagctgttcgtcgtctcggaggatcagaagcttgactgggccgatatgctttacctgtacacacagccacctgagagcaggaacaccaagttctggcctgaccagcctgttaacttcagatcgacgctggatagatactctggtgctgtgaaggagatagcggattcccttttggcgacgatggcggagaacttgggactgaaacaagaggtgattgctgacagatgcgtgggcggagtgcagtctgtcaggatgaactactacccgccgtgcgctcaagcagagaaagtcgtcggcttctccccgcactctgacgctgatctcctgaccctcgtcctccaagtgaaccatgtccaaggcctgcagatcaagaggaacggcagctggttccccgtcaggcctgtcgagggcgctctcatcgtcaacattggggatatctttgagatcttcacaaatgggaggtacaggagcatcgagcaccgtgcggtcgtcgaccccaaggaggaacggctgtcggccgcggcgttccactccccgaacatccacgccacgataggcccgctgaaggagcttacggcggacgaagacgaggcctacaagacggtggaccacgagaacttcatgaggcttttcttcgcgacgaagctggaggggaagagcttcttggatcggatgaagctgaagtagctagcagctgattgctacgtacccagcatagcaggtaaactgtgtcgttggtcctcgcatcattgtcagatattcaggtagttcatgctctctggaatttagttcctgatggccgtcttgttggagcacaagagagctgaacttggcaaacataataataatactgtggtttcttcagtagttgcttgtgttctgcaaacatttgatagatttgctcctatgtgcttgatgtcgtgtacaaagtgggctatgtgctgctgtgtcatttcagtttctgtccagtgtgaaaacagttgattcccagaaaataagataagaatggaagttgatcccc

SEQ ID NO: 14182 - protein, 358 aa, Triticum aestivum
  peptide (1)..(358): Ceres Seq. ID no. 12617091
  misc_feature (209)..(309): Pfam Name: II Pfam Description: 2OG-Fe
  misc_feature (11)..(356): NCBI GI NO: 34895204 NR Description: P0463A02.24
  misc_feature (13)..(357): NCBI GI NO: 37536802 NR Description: putative ethylene-forming enzyme
  misc_feature (13)..(357): NCBI GI NO: 37536792 NR Description: putative dioxygenase
  misc_feature (13)..(358): NCBI GI NO: 37536804 NR Description: putative ethylene-forming enzyme
  misc_feature (13)..(358): NCBI GI NO: 37536796 NR Description: putative dioxygenase
  misc_feature (18)..(357): NCBI GI NO: 37536820 NR Description: putative ethylene-forming enzyme
  misc_feature (10)..(357): NCBI GI NO: 15219988 NR Description: SRG1-like protein; protein id: At1g17020
  misc_feature (6)..(358): NCBI GI NO: 15219986 NR Description: SRG1-like protein; protein id: At1g17010.1
  misc_feature (13)..(357): NCBI GI NO: 15235014 NR Description: SRG1-like protein; protein id: At4g25300.1
  misc_feature (6)..(357): NCBI GI NO: 15218400 NR Description: flavanone 3-hydroxylase, putative
LVASQEQQQEMESLPVPSVQAMVAATGGADVPPRYLRPAEAVTGIVDGEGEAQIPIIDYRRLLLELDRRGEESARLHSACQEWGFFQLVNHSVPADVVEGMKANIQQFFQLPAETKKRFAQERGQLEGYGQLFVVSEDQKLDWADMLYLYTQPPESRNTKFWPDQPVNFRSTLDRYSGAVKEIADSLLATMAENLGLKQEVIADRCVGGVQSVRMNYYPPCAQAEKVVGFSPHSDADLLTLVLQVNHVQGLQIKRNGSWFPVRPVEGALIVNIGDIFEIFTNGRYRSIEHRAVVDPKEERLSAAAFHSPNIHATIGPLKELTADEDEAYKTVDHENFMRLFFATKLEGKSFLDRMKLK

SEQ ID NO: 14183 - protein, 348 aa, Triticum aestivum
  peptide (1)..(348): Ceres Seq. ID no. 12617092
  misc_feature (199)..(299): Pfam Name: II Pfam Description: 2OG-Fe
  misc_feature (1)..(346): NCBI GI NO: 34895204 NR Description: P0463A02.24
  misc_feature (3)..(347): NCBI GI NO: 37536802 NR Description: putative ethylene-forming enzyme
  misc_feature (3)..(347): NCBI GI NO: 37536792 NR Description: putative dioxygenase
  misc_feature (3)..(348): NCBI GI NO: 37536804 NR Description: putative ethylene-forming enzyme
  misc_feature (3)..(348): NCBI GI NO: 37536796 NR Description: putative dioxygenase
  misc_feature (8)..(347): NCBI GI NO: 37536820 NR Description: putative ethylene-forming enzyme
  misc_feature (1)..(347): NCBI GI NO: 15219988 NR Description: SRG1-like protein; protein id: At1g17020
  misc_feature (1)..(348): NCBI GI NO: 15219986 NR Description: SRG1-like protein; protein id: At1g17010.1
  misc_feature (3)..(347): NCBI GI NO: 15235014 NR Description: SRG1-like protein; protein id: At4g25300.1
  misc_feature (1)..(347): NCBI GI NO: 15218400 NR Description: flavanone 3-hydroxylase, putative
MESLPVPSVQAMVAATGGADVPPRYLRPAEAVTGIVDGEGEAQIPIIDYRRLLLELDRRGEESARLHSACQEWGFFQLVNHSVPADVVEGMKANIQQFFQLPAETKKRFAQERGQLEGYGQLFVVSEDQKLDWADMLYLYTQPPESRNTKFWPDQPVNFRSTLDRYSGAVKEIADSLLATMAENLGLKQEVIADRCVGGVQSVRMNYYPPCAQAEKVVGFSPHSDADLLTLVLQVNHVQGLQIKRNGSWFPVRPVEGALIVNIGDIFEIFTNGRYRSIEHRAVVDPKEERLSAAAFHSPNIHATIGPLKELTADEDEAYKTVDHENFMRLFFATKLEGKSFLDRMKLK

SEQ ID NO: 14184 - protein, 337 aa, Triticum aestivum
  peptide (1)..(337): Ceres Seq. ID no. 12617093
  misc_feature (188)..(288): Pfam Name: II Pfam Description: 2OG-Fe
  misc_feature (1)..(335): NCBI GI NO: 34895204 NR Description: P0463A02.24
  misc_feature (1)..(336): NCBI GI NO: 37536802 NR Description: putative ethylene-forming enzyme
  misc_feature (1)..(336): NCBI GI NO: 37536792 NR Description: putative dioxygenase
  misc_feature (1)..(337): NCBI GI NO: 37536804 NR Description: putative ethylene-forming enzyme
  misc_feature (1)..(337): NCBI GI NO: 37536796 NR Description: putative dioxygenase
  misc_feature (1)..(336): NCBI GI NO: 37536820 NR Description: putative ethylene-forming enzyme
  misc_feature (1)..(336): NCBI GI NO: 15219988 NR Description: SRG1-like protein; protein id: At1g17020
  misc_feature (1)..(337): NCBI GI NO: 15219986 NR Description: SRG1-like protein; protein id: At1g17010.1
  misc_feature (1)..(336): NCBI GI NO: 15235014 NR Description: SRG1-like protein; protein id: At4g25300.1
  misc_feature (1)..(336): NCBI GI NO: 15218400 NR Description: flavanone 3-hydroxylase, putative
MVAATGGADVPPRYLRPAEAVTGIVDGEGEAQIPIIDYRRLLLELDRRGEESARLHSACQEWGFFQLVNHSVPADVVEGMKANIQQFFQLPAETKKRFAQERGQLEGYGQLFVVSEDQKLDWADMLYLYTQPPESRNTKFWPDQPVNFRSTLDRYSGAVKEIADSLLATMAENLGLKQEVIADRCVGGVQSVRMNYYPPCAQAEKVVGFSPHSDADLLTLVLQVNHVQGLQIKRNGSWFPVRPVEGALIVNIGDIFEIFTNGRYRSIEHRAVVDPKEERLSAAAFHSPNIHATIGPLKELTADEDEAYKTVDHENFMRLFFATKLEGKSFLDRMKLK

SEQ ID NO: 14185 - DNA, 1508 bp, Triticum aestivum
  misc_feature (1)..(1508): Ceres Seq. ID no. 15226269
cccgagtccagtcctcccggcggcgccgcctctgcgcgctttgggcaggaggccgacgccaccattgccggagacctcgcaccccttcggacccaagtaggagtccagtgtctttactctggagagcgatggattctccagaaattccgccctctgaccgcagagaagagcggccgccagcgtcgctgccgctgccggcggcctttctcgagttcctcggcgagaatggcctggaccccgcgctctactccaaggcggacaccatcccgcgctacatcaggttaaaaccaggcatggagtccagtgtggtgacagagatcgaaagcgagctcaagtgtgatctcatgagggtgtcgtggctgccggacttctatgcgatcccgcctgaaattcagattgctggatccaaggcttatcagcaagggaagatctatgggattgatgcagcttctggagctgccatcttagcactcgatgttcaatcaggagaccatgttcttgacctctgtgctgcaccaggtgcaaagctttgcatgcttgcagatatgcttggtagctcaggttctttgactggtgttgatgttgcaaagcaccgtcttgcagcctgtcgtacgatgttgcagaagtattctcttggagatcgtagtcgactctttgttgctgatgggacttcgttttccatattgcctgtgaactccaatctggggagcatggaagcttttgttggaattgaggataatggaagcatattctcagaatggacttcaaagagatcatggaaagacagacagaagtctaaaaaggcaaaagcagccggttcacctcatctaccatcaacttccgaacctgaactgatatactatggcaaagattcaggattagttggattgcaaaaacgttatgttcttcacccatcaactgatgctgctgcctgtacatctgggtatgataaggtcctagtggatgcagaatgtactcatgatggatcgataaaacacattcagaagtttgagttctggggatggaaaacattagaccgccgtgtactcaacgtagaaagaactggcaacctacttcatcttcagttagggcttctcacaaatggttttaaattattgaaaacaggcggatcacttgtctatagtacttgcagcttgactgttgcacaaaacgagaatgtggttcagcaattcctctcaaaacatccttcagcagagctgctaaagatcaatccagccgatagctggccctgcagaagcggcggcatccagaaaaccttgcggttcgatcccgcgacgtcacaaactagtggacttttcgttgccaagttcgtcaagttgtgatgttctttatgagatgctcgcaacttcgtataagttaatttcatatgaaaccaggatgtcgtgagtaaattttgctaggttttactctagttctttaaacaacaggttgtcgaagtctgcttgttgtttatttattttactctaatttgaaataagcttcttggg

SEQ ID NO: 14186 - protein, 446 aa, Triticum aestivum
  peptide (1)..(446): Ceres Seq. ID no. 15226270
  misc_feature (356)..(443): Pfam Name: Pfam Description:  NOL1/NOP2/sun family
  misc_feature (142)..(287): NCBI GI NO: 18481712 NR Description: putative nucleolar protein [Sorghum bicolor]
  misc_feature (307)..(446): NCBI GI NO: 18481712 NR Description: putative nucleolar protein [Sorghum bicolor]
  misc_feature (243)..(446): NCBI GI NO: 15239280 NR Description: hypothetical protein [Arabidopsis thaliana]
  misc_feature (60)..(173): NCBI GI NO: 15239280 NR Description: hypothetical protein [Arabidopsis thaliana]
  misc_feature (28)..(146): NCBI GI NO: 18481711 NR Description: putative phosphate/phosphoenolpyruvate translocatorprotein-like
  misc_feature (61)..(208): NCBI GI NO: 14520982 NR Description: NUCLEOLAR PROTEIN [Pyrococcus abyssi]
  misc_feature (315)..(446): NCBI GI NO: 14520982 NR Description: NUCLEOLAR PROTEIN [Pyrococcus abyssi]
  misc_feature (316)..(445): NCBI GI NO: 14590712 NR Description: fmu protein [Pyrococcus horikoshii]
  misc_feature (94)..(211): NCBI GI NO: 14590712 NR Description: fmu protein [Pyrococcus horikoshii]
  misc_feature (40)..(211): NCBI GI NO: 14521455 NR Description: proliferating-cell nucleolar antigen P120
RVQSSRRRRLCALWAGGRRHHCRRPRTPSDPSRSPVSLLWRAMDSPEIPPSDRREERPPASLPLPAAFLEFLGENGLDPALYSKADTIPRYIRLKPGMESSVVTEIESELKCDLMRVSWLPDFYAIPPEIQIAGSKAYQQGKIYGIDAASGAAILALDVQSGDHVLDLCAAPGAKLCMLADMLGSSGSLTGVDVAKHRLAACRTMLQKYSLGDRSRLFVADGTSFSILPVNSNLGSMEAFVGIEDNGSIFSEWTSKRSWKDRQKSKKAKAAGSPHLPSTSEPELIYYGKDSGLVGLQKRYVLHPSTDAAACTSGYDKVLVDAECTHDGSIKHIQKFEFWGWKTLDRRVLNVERTGNLLHLQLGLLTNGFKLLKTGGSLVYSTCSLTVAQNENVVQQFLSKHPSAELLKINPADSWPCRSGGIQKTLRFDPATSQTSGLFVAKFVKL

SEQ ID NO: 14187 - protein, 404 aa, Triticum aestivum
  peptide (1)..(404): Ceres Seq. ID no. 15226271
  misc_feature (314)..(401): Pfam Name: Pfam Description:  NOL1/NOP2/sun family
  misc_feature (100)..(245): NCBI GI NO: 18481712 NR Description: putative nucleolar protein [Sorghum bicolor]
  misc_feature (265)..(404): NCBI GI NO: 18481712 NR Description: putative nucleolar protein [Sorghum bicolor]
  misc_feature (201)..(404): NCBI GI NO: 15239280 NR Description: hypothetical protein [Arabidopsis thaliana]
  misc_feature (18)..(131): NCBI GI NO: 15239280 NR Description: hypothetical protein [Arabidopsis thaliana]
  misc_feature (1)..(104): NCBI GI NO: 18481711 NR Description: putative phosphate/phosphoenolpyruvate translocatorprotein-like
  misc_feature (19)..(166): NCBI GI NO: 14520982 NR Description: NUCLEOLAR PROTEIN [Pyrococcus abyssi]
  misc_feature (273)..(404): NCBI GI NO: 14520982 NR Description: NUCLEOLAR PROTEIN [Pyrococcus abyssi]
  misc_feature (274)..(403): NCBI GI NO: 14590712 NR Description: fmu protein [Pyrococcus horikoshii]
  misc_feature (52)..(169): NCBI GI NO: 14590712 NR Description: fmu protein [Pyrococcus horikoshii]
  misc_feature (1)..(169): NCBI GI NO: 14521455 NR Description: proliferating-cell nucleolar antigen P120
MDSPEIPPSDRREERPPASLPLPAAFLEFLGENGLDPALYSKADTIPRYIRLKPGMESSVVTEIESELKCDLMRVSWLPDFYAIPPEIQIAGSKAYQQGKIYGIDAASGAAILALDVQSGDHVLDLCAAPGAKLCMLADMLGSSGSLTGVDVAKHRLAACRTMLQKYSLGDRSRLFVADGTSFSILPVNSNLGSMEAFVGIEDNGSIFSEWTSKRSWKDRQKSKKAKAAGSPHLPSTSEPELIYYGKDSGLVGLQKRYVLHPSTDAAACTSGYDKVLVDAECTHDGSIKHIQKFEFWGWKTLDRRVLNVERTGNLLHLQLGLLTNGFKLLKTGGSLVYSTCSLTVAQNENVVQQFLSKHPSAELLKINPADSWPCRSGGIQKTLRFDPATSQTSGLFVAKFVKL

SEQ ID NO: 14188 - protein, 349 aa, Triticum aestivum
  peptide (1)..(349): Ceres Seq. ID no. 15226272
  misc_feature (259)..(346): Pfam Name: Pfam Description:  NOL1/NOP2/sun family
  misc_feature (45)..(190): NCBI GI NO: 18481712 NR Description: putative nucleolar protein [Sorghum bicolor]
  misc_feature (210)..(349): NCBI GI NO: 18481712 NR Description: putative nucleolar protein [Sorghum bicolor]
  misc_feature (146)..(349): NCBI GI NO: 15239280 NR Description: hypothetical protein [Arabidopsis thaliana]
  misc_feature (1)..(76): NCBI GI NO: 15239280 NR Description: hypothetical protein [Arabidopsis thaliana]
  misc_feature (1)..(49): NCBI GI NO: 18481711 NR Description: putative phosphate/phosphoenolpyruvate translocatorprotein-like
  misc_feature (1)..(111): NCBI GI NO: 14520982 NR Description: NUCLEOLAR PROTEIN [Pyrococcus abyssi]
  misc_feature (218)..(349): NCBI GI NO: 14520982 NR Description: NUCLEOLAR PROTEIN [Pyrococcus abyssi]
  misc_feature (219)..(348): NCBI GI NO: 14590712 NR Description: fmu protein [Pyrococcus horikoshii]
  misc_feature (1)..(114): NCBI GI NO: 14590712 NR Description: fmu protein [Pyrococcus horikoshii]
  misc_feature (1)..(114): NCBI GI NO: 14521455 NR Description: proliferating-cell nucleolar antigen P120
MESSVVTEIESELKCDLMRVSWLPDFYAIPPEIQIAGSKAYQQGKIYGIDAASGAAILALDVQSGDHVLDLCAAPGAKLCMLADMLGSSGSLTGVDVAKHRLAACRTMLQKYSLGDRSRLFVADGTSFSILPVNSNLGSMEAFVGIEDNGSIFSEWTSKRSWKDRQKSKKAKAAGSPHLPSTSEPELIYYGKDSGLVGLQKRYVLHPSTDAAACTSGYDKVLVDAECTHDGSIKHIQKFEFWGWKTLDRRVLNVERTGNLLHLQLGLLTNGFKLLKTGGSLVYSTCSLTVAQNENVVQQFLSKHPSAELLKINPADSWPCRSGGIQKTLRFDPATSQTSGLFVAKFVKL

SEQ ID NO: 14189 - DNA, 1291 bp, Triticum aestivum
  misc_feature (1)..(1291): Ceres Seq. ID no. 13598499
gaagcttctacatggaacacctcaacctagggccggcagccgcaggagaagaagacaagccgcggtagacatcgagatcagccggagagaaaaatcgaggggacacgatacgagagcaggaagccatggccttcctcctccccaagctcaccacgcctccctgcagatcgccgccgcccagtcccctcaagccccagctcggcctgcccagccacggaggcggcaggctccacggggccggctcggcgcaggccgcggcgccgacccacctcaacctcccgctcctcctcagcgcctcgcagcaagaagcccccacggccaagtccgccgagaccaggaacagggctgcgagcggcggcggcggcggcggcggggacccgcgaaggtcggatttttacctcaaccttggggcggcggtgcgcgcgctgcgggacgacctgccggccgtgtttctccgggaacccaactacgacatctaccgcgaagacatcacatttgttgatccgctgaacactttccatgggattgacaactacaaaacaatcttctgggctctcagattccacggacgtctactattcagtgaaattgggctcgacgtatcacgcatttggcaactaacagaaacctcgatagttgtccggtgggaactgtggggcacaccgcgtgtcccgtgggaatcatatggctgcttcagtggcacatccaggtacaaagtcgacaggaacgggaaaatttacgagcataaagtcgacaacctggcattggacttcccccggccggctgtcaaagtgagcagcattactaacttagtagttgctgcatacccaccgagccccaatccaactttctgggatgtagttgggacaggcgatggatgctcatggacaaagctttaccgagcggtgctggagacagtagagcgggaaggtgacattcccgcaggcatttgcatggaaggtctactcacttgttcatagatggaatcaacttcaggactagctgcttcggtagtgagttttgctagaaaaaatgtatagaatgtggatacatattaatcacatcactgtcagttctctgtttgtataatgtagctcagcactagaacaactttagatcaaattcatggtagatgactatacctcatcatcattgttgtgtattttaggatattactgccacttgcttacatcttatgagatatgaatacaaagttgtagattttctcatgggttaggaaaactctgttccctaaattatttaggaaaatggaagatcttgaagactcaat

SEQ ID NO: 14190 - protein, 284 aa, Triticum aestivum
  peptide (1)..(284): Ceres Seq. ID no. 15222352
  misc_feature (1)..(284): NCBI GI NO: 38347356 NR Description: OSJNBa0070C17.17
  misc_feature (1)..(284): NCBI GI NO: 15219209 NR Description: expressed protein [Arabidopsis thaliana]
  misc_feature (1)..(268): NCBI GI NO: 18412399 NR Description: expressed protein [Arabidopsis thaliana]
  misc_feature (87)..(244): NCBI GI NO: 18407008 NR Description: expressed protein [Arabidopsis thaliana]
  misc_feature (84)..(209): NCBI GI NO: 34904098 NR Description: unnamed protein product
  misc_feature (87)..(208): NCBI GI NO: 25408977 NR Description: hypothetical protein At2g46220
  misc_feature (92)..(207): NCBI GI NO: 17228448 NR Description: hypothetical protein [Nostoc sp. PCC 7120]
  misc_feature (87)..(207): NCBI GI NO: 23126421 NR Description: hypothetical protein [Nostoc punctiforme]
  misc_feature (98)..(207): NCBI GI NO: 23040676 NR Description: hypothetical protein
  misc_feature (109)..(207): NCBI GI NO: 37522054 NR Description: hypothetical protein glr2485
MAFLLPKLTTPPCRSPPPSPLKPQLGLPSHGGGRLHGAGSAQAAAPTHLNLPLLLSASQQEAPTAKSAETRNRAASGGGGGGGDPRRSDFYLNLGAAVRALRDDLPAVFLREPNYDIYREDITFVDPLNTFHGIDNYKTIFWALRFHGRLLFSEIGLDVSRIWQLTETSIVVRWELWGTPRVPWESYGCFSGTSRYKVDRNGKIYEHKVDNLALDFPRPAVKVSSITNLVVAAYPPSPNPTFWDVVGTGDGCSWTKLYRAVLETVEREGDIPAGICMEGLLTCS

SEQ ID NO: 14191 - protein, 166 aa, Triticum aestivum
  peptide (1)..(166): Ceres Seq. ID no. 15222353
KLLHGTPQPRAGSRRRRRQAAVDIEISRREKSRGHDTRAGSHGLPPPQAHHASLQIAAAQSPQAPARPAQPRRRQAPRGRLGAGRGADPPQPPAPPQRLAARSPHGQVRRDQEQGCERRRRRRRGPAKVGFLPQPWGGGARAAGRPAGRVSPGTQLRHLPRRHHIC

SEQ ID NO: 14192 - DNA, 1374 bp, Triticum aestivum
  misc_feature (1)..(1374): Ceres Seq. ID no. 13597160
aagacttcatcaccctgtacgtgcgcctctctccactcccatgttcaggaagcgaaaatttcaggggcgttttatctgattggatacctgatgcaaactttactagagtatattcggttcttgctagattgggatatttgggggcacgcggctgatgctagacttggtttatgccggagaaggctgctgtgcttgctgaccgggtgctcacggagctcgttaaggaactgaatattagaccagtacctgttgtgtttgcatccttttcgggaggaccaaaaggttgcacatacaaggttcttcagctgatccagagaaggtgcaaagggcagctgagtttggatgactatcaacttgtacgggactgcgtatgtggacaaatatatgactcgagtcctgtagattttgtgagtgatttaggcacccgctttcttcttcacccaagtgtcctgaagatgcctgaacctccacgtgtcttatcatggatgactagaggcattgcctcgggtctagacactcttttcattggcaagtttgaagcacagcgcaaagaatattgggagacactatactcatcagtgcatgttggcccaatactcatattctgttcagaggatgatgaacttgctccatgttcggccgttcaaaattttggacggcgtctgctggagctgggtggtgatgtgaatttagttaaatggcacagttctccacatgtaggacattacaagcatcacactgaggaataccgagctgcagtgactgagctgctcatgaaggcttcagcgctttacacaagcagaaaacgactcaatgactacagtgtcggcacgagtgaggacagtgacacaccttattcgtctcgcaatctacataagactgctgtaagctccagtgataggctagggagggtttcagttgatccagccaatcatttcttcttaccgagttccatggagtaccatgaaagcaggagtgaagtgctaaaacccgagttgttcaacatgccgagtgttgaaagcgcgaagaaccctgatggcgtgttggggacgatgctctatgatgcatgtgtcccaaagaacgtggaaggctgggacttcaagcttgcatcaatagatggacagcgtatgcattttactgcccgtcagcatggtacttccaatccaacaaaatgtatacgccgctcaagattgtaatgattttgactcaacatctaagtgcattccagcagactgctctatactgccagagtatacttgtttcaggagaatgttattgtgttgaccttttctggaaattttagagtatactgccagagtatactaatgcttttttatggaaattttagttgccgcaaagatggcaaattccttt

SEQ ID NO: 14193 - protein, 341 aa, Triticum aestivum
  peptide (1)..(341): Ceres Seq. ID no. 15222037
  misc_feature (34)..(308): Pfam Name: DUF829 Pfam Description: Eukaryotic protein of unknown function
  misc_feature (1)..(341): NCBI GI NO: 15241450 NR Description: expressed protein [Arabidopsis thaliana]
  misc_feature (1)..(341): NCBI GI NO: 18397898 NR Description: expressed protein [Arabidopsis thaliana]
  misc_feature (1)..(318): NCBI GI NO: 25411656 NR Description: hypothetical protein At2g15690
MPEKAAVLADRVLTELVKELNIRPVPVVFASFSGGPKGCTYKVLQLIQRRCKGQLSLDDYQLVRDCVCGQIYDSSPVDFVSDLGTRFLLHPSVLKMPEPPRVLSWMTRGIASGLDTLFIGKFEAQRKEYWETLYSSVHVGPILIFCSEDDELAPCSAVQNFGRRLLELGGDVNLVKWHSSPHVGHYKHHTEEYRAAVTELLMKASALYTSRKRLNDYSVGTSEDSDTPYSSRNLHKTAVSSSDRLGRVSVDPANHFFLPSSMEYHESRSEVLKPELFNMPSVESAKNPDGVLGTMLYDACVPKNVEGWDFKLASIDGQRMHFTARQHGTSNPTKCIRRSRL

SEQ ID NO: 14194 - protein, 246 aa, Triticum aestivum
  peptide (1)..(246): Ceres Seq. ID no. 15222038
  misc_feature (1)..(213): Pfam Name: DUF829 Pfam Description: Eukaryotic protein of unknown function
  misc_feature (1)..(246): NCBI GI NO: 15241450 NR Description: expressed protein [Arabidopsis thaliana]
  misc_feature (1)..(246): NCBI GI NO: 18397898 NR Description: expressed protein [Arabidopsis thaliana]
  misc_feature (1)..(223): NCBI GI NO: 25411656 NR Description: hypothetical protein At2g15690
MPEPPRVLSWMTRGIASGLDTLFIGKFEAQRKEYWETLYSSVHVGPILIFCSEDDELAPCSAVQNFGRRLLELGGDVNLVKWHSSPHVGHYKHHTEEYRAAVTELLMKASALYTSRKRLNDYSVGTSEDSDTPYSSRNLHKTAVSSSDRLGRVSVDPANHFFLPSSMEYHESRSEVLKPELFNMPSVESAKNPDGVLGTMLYDACVPKNVEGWDFKLASIDGQRMHFTARQHGTSNPTKCIRRSRL

SEQ ID NO: 14195 - protein, 236 aa, Triticum aestivum
  peptide (1)..(236): Ceres Seq. ID no. 15222039
  misc_feature (1)..(203): Pfam Name: DUF829 Pfam Description: Eukaryotic protein of unknown function
  misc_feature (1)..(236): NCBI GI NO: 15241450 NR Description: expressed protein [Arabidopsis thaliana]
  misc_feature (1)..(236): NCBI GI NO: 18397898 NR Description: expressed protein [Arabidopsis thaliana]
  misc_feature (1)..(213): NCBI GI NO: 25411656 NR Description: hypothetical protein At2g15690
MTRGIASGLDTLFIGKFEAQRKEYWETLYSSVHVGPILIFCSEDDELAPCSAVQNFGRRLLELGGDVNLVKWHSSPHVGHYKHHTEEYRAAVTELLMKASALYTSRKRLNDYSVGTSEDSDTPYSSRNLHKTAVSSSDRLGRVSVDPANHFFLPSSMEYHESRSEVLKPELFNMPSVESAKNPDGVLGTMLYDACVPKNVEGWDFKLASIDGQRMHFTARQHGTSNPTKCIRRSRL

SEQ ID NO: 14196 - DNA, 1384 bp, Triticum aestivum
  misc_feature (1)..(1384): Ceres Seq. ID no. 12587535
acactaaacttagatcacagcctgctctagttctcaaagcaccactgcttcactcgctgtgccgtaagacatcgtagatgatggtgagggcaagagagatggtgcaaggtccccgttgcgtcgcgctgttgctgctcgtctgcatggctgctctcgtagcttcggacaccaccgatggcctcctgccgaacggcaacttcgaggaggcgccggaccggtcgcagatggacgggacgagggtgacgggccgctacgcgataccgcggtgggaggcctgcgggtgcgtggagtacatctgctcgggccagaagcagggggacatggtgctgccggtccccgagggcgcccacgccgtgcggctcggcaacgacgcctccgtccagcagcagctcagcgtgacgccggggacgcactacgcgatcaccttcagcgcggcgcgcacctgcgcccaggccgagaagctgaacgtgacggtcggggcgcagtccggcgagctccccatccagacggtgtacaccagcagcggctgggactcctactcctgggcgttcgaggccaaggagagcgtcgtaacgctcaccgtccacaaccccggatatgatgaagacgccgcctgcggccccgtcgtcgactccttcgccatcaggaccctcctgccaccacaaagcaacgaatataacatgctgaagaacggggacttcgaggagggcccgtacatctgccccagcacgtcgtgcggggtgatggtgccgcccatggacgaggacagctactccccgctgttcccgtgggtgatcctgtcgtcgaccaagtccgtccggtacgtggacgcggcgcactacgcggtgccgcagggcgcccgggccgtgcagctggtgttcggcgcggagagcgcgctggtgcaggaggtgtgcaccgtgccgggggtgtcttacaggatggagttctcgatcggggacgcggccgacgggtgcacgggctccctcgccgtggaggcgtacgcggcgggcgggagggtgacggtcccgtacgagtcccagggcacgggcgggttcacgcgcggcgtgctcgagttcacggcgacggaggaccggacgcgggtggtgttcgtcagcgcgagctacaacatgaagtccgacggcacggtctgcgggcccgtcgtcgacgacgcctcgctcgtctgcgcgcagagccacgctcgccggctgcttctgtgattgtgcggcgccgcaatgtacggtccgttggtttgtgacacgaacaatttgacctcttccgttatggagtaggatctaaaattccggacggtcggcagttgtaaaccagggttctgtaatgtatcgtggataatttgcattagggaacatcattttaacatttcttt

SEQ ID NO: 14197 - protein, 379 aa, Triticum aestivum
  peptide (1)..(379): Ceres Seq. ID no. 12587536
  misc_feature (50)..(368): Pfam Name: Pfam Description:  Protein of unknown function, DUF642
  misc_feature (8)..(378): NCBI GI NO: 38345426 NR Description: OSJNBb0091E11.17
  misc_feature (8)..(379): NCBI GI NO: 38345427 NR Description: OSJNBb0091E11.18
  misc_feature (11)..(378): NCBI GI NO: 38345423 NR Description: OSJNBb0091E11.14
  misc_feature (15)..(377): NCBI GI NO: 38345428 NR Description: OSJNBb0091E11.19
  misc_feature (15)..(379): NCBI GI NO: 34912572 NR Description: P0410E03.24
  misc_feature (17)..(368): NCBI GI NO: 7488898 NR Description: hypothetical protein - castor bean
  misc_feature (19)..(371): NCBI GI NO: 15239049 NR Description: putative protein; protein id: At5g11420
  misc_feature (19)..(371): NCBI GI NO: 21554402 NR Description: unknown [Arabidopsis thaliana]
  misc_feature (19)..(371): NCBI GI NO: 23397043 NR Description: unknown protein [Arabidopsis thaliana]
  misc_feature (5)..(364): NCBI GI NO: 34909656 NR Description: OJ1414_E05.5
MMVRAREMVQGPRCVALLLLVCMAALVASDTTDGLLPNGNFEEAPDRSQMDGTRVTGRYAIPRWEACGCVEYICSGQKQGDMVLPVPEGAHAVRLGNDASVQQQLSVTPGTHYAITFSAARTCAQAEKLNVTVGAQSGELPIQTVYTSSGWDSYSWAFEAKESVVTLTVHNPGYDEDAACGPVVDSFAIRTLLPPQSNEYNMLKNGDFEEGPYICPSTSCGVMVPPMDEDSYSPLFPWVILSSTKSVRYVDAAHYAVPQGARAVQLVFGAESALVQEVCTVPGVSYRMEFSIGDAADGCTGSLAVEAYAAGGRVTVPYESQGTGGFTRGVLEFTATEDRTRVVFVSASYNMKSDGTVCGPVVDDASLVCAQSHARRLLL

SEQ ID NO: 14198 - protein, 378 aa, Triticum aestivum
  peptide (1)..(378): Ceres Seq. ID no. 12587537
  misc_feature (49)..(367): Pfam Name: Pfam Description:  Protein of unknown function, DUF642
  misc_feature (7)..(377): NCBI GI NO: 38345426 NR Description: OSJNBb0091E11.17
  misc_feature (7)..(378): NCBI GI NO: 38345427 NR Description: OSJNBb0091E11.18
  misc_feature (10)..(377): NCBI GI NO: 38345423 NR Description: OSJNBb0091E11.14
  misc_feature (14)..(376): NCBI GI NO: 38345428 NR Description: OSJNBb0091E11.19
  misc_feature (14)..(378): NCBI GI NO: 34912572 NR Description: P0410E03.24
  misc_feature (16)..(367): NCBI GI NO: 7488898 NR Description: hypothetical protein - castor bean
  misc_feature (18)..(370): NCBI GI NO: 15239049 NR Description: putative protein; protein id: At5g11420
  misc_feature (18)..(370): NCBI GI NO: 21554402 NR Description: unknown [Arabidopsis thaliana]
  misc_feature (18)..(370): NCBI GI NO: 23397043 NR Description: unknown protein [Arabidopsis thaliana]
  misc_feature (4)..(363): NCBI GI NO: 34909656 NR Description: OJ1414_E05.5
MVRAREMVQGPRCVALLLLVCMAALVASDTTDGLLPNGNFEEAPDRSQMDGTRVTGRYAIPRWEACGCVEYICSGQKQGDMVLPVPEGAHAVRLGNDASVQQQLSVTPGTHYAITFSAARTCAQAEKLNVTVGAQSGELPIQTVYTSSGWDSYSWAFEAKESVVTLTVHNPGYDEDAACGPVVDSFAIRTLLPPQSNEYNMLKNGDFEEGPYICPSTSCGVMVPPMDEDSYSPLFPWVILSSTKSVRYVDAAHYAVPQGARAVQLVFGAESALVQEVCTVPGVSYRMEFSIGDAADGCTGSLAVEAYAAGGRVTVPYESQGTGGFTRGVLEFTATEDRTRVVFVSASYNMKSDGTVCGPVVDDASLVCAQSHARRLLL

SEQ ID NO: 14199 - protein, 372 aa, Triticum aestivum
  peptide (1)..(372): Ceres Seq. ID no. 12587538
  misc_feature (43)..(361): Pfam Name: Pfam Description:  Protein of unknown function, DUF642
  misc_feature (1)..(371): NCBI GI NO: 38345426 NR Description: OSJNBb0091E11.17
  misc_feature (1)..(372): NCBI GI NO: 38345427 NR Description: OSJNBb0091E11.18
  misc_feature (4)..(371): NCBI GI NO: 38345423 NR Description: OSJNBb0091E11.14
  misc_feature (8)..(370): NCBI GI NO: 38345428 NR Description: OSJNBb0091E11.19
  misc_feature (8)..(372): NCBI GI NO: 34912572 NR Description: P0410E03.24
  misc_feature (10)..(361): NCBI GI NO: 7488898 NR Description: hypothetical protein - castor bean
  misc_feature (12)..(364): NCBI GI NO: 15239049 NR Description: putative protein; protein id: At5g11420
  misc_feature (12)..(364): NCBI GI NO: 23397043 NR Description: unknown protein [Arabidopsis thaliana]
  misc_feature (12)..(364): NCBI GI NO: 21554402 NR Description: unknown [Arabidopsis thaliana]
  misc_feature (1)..(357): NCBI GI NO: 34909656 NR Description: OJ1414_E05.5
MVQGPRCVALLLLVCMAALVASDTTDGLLPNGNFEEAPDRSQMDGTRVTGRYAIPRWEACGCVEYICSGQKQGDMVLPVPEGAHAVRLGNDASVQQQLSVTPGTHYAITFSAARTCAQAEKLNVTVGAQSGELPIQTVYTSSGWDSYSWAFEAKESVVTLTVHNPGYDEDAACGPVVDSFAIRTLLPPQSNEYNMLKNGDFEEGPYICPSTSCGVMVPPMDEDSYSPLFPWVILSSTKSVRYVDAAHYAVPQGARAVQLVFGAESALVQEVCTVPGVSYRMEFSIGDAADGCTGSLAVEAYAAGGRVTVPYESQGTGGFTRGVLEFTATEDRTRVVFVSASYNMKSDGTVCGPVVDDASLVCAQSHARRLLL

SEQ ID NO: 14200 - DNA, 1380 bp, Triticum aestivum
  misc_feature (1)..(1380): Ceres Seq. ID no. 13584217
acaggacgtgtaccccaagaaccagagagccaaccaacccaacccctgagcatctccggccacgcatcggctaagcacacgcaaacagccgcccccacgatactcacgaggctccttcccctccgtgcgctctcttgtttcccccatcccatggccaccccaaccacgacgccggcgacgatgcgggccgtgcagtacgacgcctgcggcggaggcgccgccggcctcaagcatgtagaagtccccgtcccttctgcaaagaagaatgaggtcctgctgaaactgcaagctgcaaccatcaacccagttgactggaagatacagaaaggggacttgaggcctctgctgcctcgtagactgccttttatcccagtgactgatgttgcaggagtagttgttgatgttggtcctggagtgaaaggtctcacagcgggtgatcaagtcgtcgccatgttgaactcttttaacggaggtggactggcagagtatgctgtagcatccgcaaacctgaccgtcaaaaggccagctgaggtttctgcagctgagggtgctgggcttcccattgctgcaggcactgcgctccaggcactaaggtccattggtgccaagtttgacggcaccggcaagccattaaacgtgttggtcaccgctgcctctggcggcgtaggcctgtacgcggtgcagcttgcaaagctagcgaaccttcatgttaccgccacctgcggcgcacgcaacatggatcttgtgaagagcttgggcgcagacgaggtgatggactacaggaccccagagggggcgagcctgcagagtccctccggcaggaagtacgacggcgtggttcactgcaccgtcggtgtcagctggtcgtctttccagccattgctcagtgatgccgggcgagtgatcgatatcacccccaacttctcggccatcctcacatctgcgctgcacaggatgacattttccaagaagcgcctggtgcccctgctcctgtcgcccaacaaggcggacctggagttattggttgggttgctcaaggaaggcaagctgaagacggtggtcgactcgaagttcccgttgagcgaggcagacaaggcgtggcagagcagtatcgatggccactggtaagattgtcgttgagatggagagctgatcgtcgtcaatgcttcctagtattaaggacttgcatacagacggtggacgtgaatacttagatgtaatcatacagactagtcacttgtgcgtttgtttattgggtgatggttcgtttattcagtttatattatattatatcttacagtatattattaaaagggtattgagaactatgagttgcaaaaaactgtatggctatcggtaaacaatagcattgtgctgtct

SEQ ID NO: 14201 - protein, 375 aa, Triticum aestivum
  peptide (1)..(375): Ceres Seq. ID no. 15222782
  misc_feature (61)..(374): NCBI GI NO: 15235549 NR Description: oxidoreductase, zinc-binding dehydrogenase family
  misc_feature (61)..(374): NCBI GI NO: 12484050 NR Description: quinone-oxidoreductase QR1
  misc_feature (61)..(374): NCBI GI NO: 24370984 NR Description: quinone-oxidoreductase homologue
  misc_feature (61)..(374): NCBI GI NO: 38016531 NR Description: fiber quinone-oxidoreductase
  misc_feature (51)..(374): NCBI GI NO: 38346453 NR Description: OSJNBa0018J19.14
  misc_feature (58)..(374): NCBI GI NO: 38346442 NR Description: OSJNBa0018J19.3
  misc_feature (58)..(374): NCBI GI NO: 38346450 NR Description: OSJNBa0018J19.11
  misc_feature (61)..(337): NCBI GI NO: 5701738 NR Description: LEDI-4 protein [Lithospermum erythrorhizon]
  misc_feature (61)..(375): NCBI GI NO: 23039352 NR Description: hypothetical protein
  misc_feature (71)..(361): NCBI GI NO: 23023348 NR Description: hypothetical protein
TGRVPQEPESQPTQPLSISGHASAKHTQTAAPTILTRLLPLRALSCFPHPMATPTTTPATMRAVQYDACGGGAAGLKHVEVPVPSAKKNEVLLKLQAATINPVDWKIQKGDLRPLLPRRLPFIPVTDVAGVVVDVGPGVKGLTAGDQVVAMLNSFNGGGLAEYAVASANLTVKRPAEVSAAEGAGLPIAAGTALQALRSIGAKFDGTGKPLNVLVTAASGGVGLYAVQLAKLANLHVTATCGARNMDLVKSLGADEVMDYRTPEGASLQSPSGRKYDGVVHCTVGVSWSSFQPLLSDAGRVIDITPNFSAILTSALHRMTFSKKRLVPLLLSPNKADLELLVGLLKEGKLKTVVDSKFPLSEADKAWQSSIDGHW

SEQ ID NO: 14202 - protein, 325 aa, Triticum aestivum
  peptide (1)..(325): Ceres Seq. ID no. 15222783
  misc_feature (11)..(324): NCBI GI NO: 15235549 NR Description: oxidoreductase, zinc-binding dehydrogenase family
  misc_feature (11)..(324): NCBI GI NO: 12484050 NR Description: quinone-oxidoreductase QR1
  misc_feature (11)..(324): NCBI GI NO: 24370984 NR Description: quinone-oxidoreductase homologue
  misc_feature (11)..(324): NCBI GI NO: 38016531 NR Description: fiber quinone-oxidoreductase
  misc_feature (1)..(324): NCBI GI NO: 38346453 NR Description: OSJNBa0018J19.14
  misc_feature (8)..(324): NCBI GI NO: 38346442 NR Description: OSJNBa0018J19.3
  misc_feature (8)..(324): NCBI GI NO: 38346450 NR Description: OSJNBa0018J19.11
  misc_feature (11)..(287): NCBI GI NO: 5701738 NR Description: LEDI-4 protein [Lithospermum erythrorhizon]
  misc_feature (11)..(325): NCBI GI NO: 23039352 NR Description: hypothetical protein
  misc_feature (21)..(311): NCBI GI NO: 23023348 NR Description: hypothetical protein
MATPTTTPATMRAVQYDACGGGAAGLKHVEVPVPSAKKNEVLLKLQAATINPVDWKIQKGDLRPLLPRRLPFIPVTDVAGVVVDVGPGVKGLTAGDQVVAMLNSFNGGGLAEYAVASANLTVKRPAEVSAAEGAGLPIAAGTALQALRSIGAKFDGTGKPLNVLVTAASGGVGLYAVQLAKLANLHVTATCGARNMDLVKSLGADEVMDYRTPEGASLQSPSGRKYDGVVHCTVGVSWSSFQPLLSDAGRVIDITPNFSAILTSALHRMTFSKKRLVPLLLSPNKADLELLVGLLKEGKLKTVVDSKFPLSEADKAWQSSIDGHW

SEQ ID NO: 14203 - protein, 315 aa, Triticum aestivum
  peptide (1)..(315): Ceres Seq. ID no. 15222784
  misc_feature (1)..(314): NCBI GI NO: 15235549 NR Description: oxidoreductase, zinc-binding dehydrogenase family
  misc_feature (1)..(314): NCBI GI NO: 12484050 NR Description: quinone-oxidoreductase QR1
  misc_feature (1)..(314): NCBI GI NO: 24370984 NR Description: quinone-oxidoreductase homologue
  misc_feature (1)..(314): NCBI GI NO: 38016531 NR Description: fiber quinone-oxidoreductase
  misc_feature (1)..(314): NCBI GI NO: 38346453 NR Description: OSJNBa0018J19.14
  misc_feature (1)..(314): NCBI GI NO: 38346442 NR Description: OSJNBa0018J19.3
  misc_feature (1)..(314): NCBI GI NO: 38346450 NR Description: OSJNBa0018J19.11
  misc_feature (1)..(277): NCBI GI NO: 5701738 NR Description: LEDI-4 protein [Lithospermum erythrorhizon]
  misc_feature (1)..(315): NCBI GI NO: 23039352 NR Description: hypothetical protein
  misc_feature (11)..(301): NCBI GI NO: 23023348 NR Description: hypothetical protein
MRAVQYDACGGGAAGLKHVEVPVPSAKKNEVLLKLQAATINPVDWKIQKGDLRPLLPRRLPFIPVTDVAGVVVDVGPGVKGLTAGDQVVAMLNSFNGGGLAEYAVASANLTVKRPAEVSAAEGAGLPIAAGTALQALRSIGAKFDGTGKPLNVLVTAASGGVGLYAVQLAKLANLHVTATCGARNMDLVKSLGADEVMDYRTPEGASLQSPSGRKYDGVVHCTVGVSWSSFQPLLSDAGRVIDITPNFSAILTSALHRMTFSKKRLVPLLLSPNKADLELLVGLLKEGKLKTVVDSKFPLSEADKAWQSSIDGHW

SEQ ID NO: 14204 - DNA, 883 bp, Triticum aestivum
  misc_feature (1)..(883): Ceres Seq. ID no. 12586351
ctaacagtcaagtcaagcaccaagccaccaaccacacaagagccgatcaagacaccagcaatggccggaggaggaagcgacgaagtgaagctgctgggcatgtgggcgagcccgttcgtccttcgcgtccagctcgcgctcagcctcaagggcgtcggctacgagtacgtcgaagaggacctcaagagcaagagcgagctgctcctcaagtccaaccccgtgctccagaaggtgccggtgctgatccacgacggcaagcccgtgtgcgagtcgtcggtcatcctgcagtacatcgacgaggctttcgccggcgtcggcccctcgctcctcccggaggaaccccacggccgcgccgttgctcgcttctgggccgcttacatcgacggcacgctcgtgaaagcgtcgtcccaggcgtccatggccaagacggaggaggagaaggccgaggggaagaagcaggtgaccgccgcggtggagaccttggagggggccctgagggactgctctaacggcaaacccttcttcggcggcgacaccgcggggtacgtcgacgtgatgctcggcggcctcctcgcatgggtgcacgcgggcgataagatgaagggcgtcaagaccttcgatcccgccaccactccgctcttggctgcgtgggcggacaacttcggatcgttggacgcggtggaggcggtcatgccggacgtgggcaagctggtcgagtttgccatggcgatgcacgctcgcgccgcagccgccgctacaaactaaagagacgtgcctacaatcatatattgttttctgtatatcgtttgtgttatctctgtggaatttgtgtgcctatccatataatacgtcaatatgtcacattcgtcgactttaaatgttg

SEQ ID NO: 14205 - protein, 254 aa, Triticum aestivum
  peptide (1)..(254): Ceres Seq. ID no. 12586352
  misc_feature (21)..(254): NCBI GI NO: 37536284 NR Description: putative glutathione S-transferase
  misc_feature (21)..(250): NCBI GI NO: 11385535 NR Description: glutathione S-transferase GST 42 [Zea mays]
  misc_feature (21)..(254): NCBI GI NO: 37536306 NR Description: putative glutathione S-transferase
  misc_feature (21)..(254): NCBI GI NO: 37536308 NR Description: putative glutathione S-transferase
  misc_feature (21)..(252): NCBI GI NO: 37536280 NR Description: putative glutathione S-transferase
  misc_feature (21)..(254): NCBI GI NO: 33304612 NR Description: tau class GST protein 3
  misc_feature (21)..(254): NCBI GI NO: 37536312 NR Description: putative glutathione S-transferase
  misc_feature (21)..(254): NCBI GI NO: 11385531 NR Description: glutathione S-transferase GST 40 [Zea mays]
  misc_feature (21)..(251): NCBI GI NO: 37536250 NR Description: putative glutathione S-transferase
  misc_feature (21)..(252): NCBI GI NO: 33304610 NR Description: tau class GST protein 4
LTVKSSTKPPTTQEPIKTPAMAGGGSDEVKLLGMWASPFVLRVQLALSLKGVGYEYVEEDLKSKSELLLKSNPVLQKVPVLIHDGKPVCESSVILQYIDEAFAGVGPSLLPEEPHGRAVARFWAAYIDGTLVKASSQASMAKTEEEKAEGKKQVTAAVETLEGALRDCSNGKPFFGGDTAGYVDVMLGGLLAWVHAGDKMKGVKTFDPATTPLLAAWADNFGSLDAVEAVMPDVGKLVEFAMAMHARAAAAATN

SEQ ID NO: 14206 - protein, 234 aa, Triticum aestivum
  peptide (1)..(234): Ceres Seq. ID no. 12586353
  misc_feature (1)..(234): NCBI GI NO: 37536284 NR Description: putative glutathione S-transferase
  misc_feature (1)..(230): NCBI GI NO: 11385535 NR Description: glutathione S-transferase GST 42 [Zea mays]
  misc_feature (1)..(234): NCBI GI NO: 37536306 NR Description: putative glutathione S-transferase
  misc_feature (1)..(234): NCBI GI NO: 37536308 NR Description: putative glutathione S-transferase
  misc_feature (1)..(232): NCBI GI NO: 37536280 NR Description: putative glutathione S-transferase
  misc_feature (1)..(234): NCBI GI NO: 33304612 NR Description: tau class GST protein 3
  misc_feature (1)..(234): NCBI GI NO: 37536312 NR Description: putative glutathione S-transferase
  misc_feature (1)..(234): NCBI GI NO: 11385531 NR Description: glutathione S-transferase GST 40 [Zea mays]
  misc_feature (1)..(231): NCBI GI NO: 37536250 NR Description: putative glutathione S-transferase
  misc_feature (1)..(232): NCBI GI NO: 33304610 NR Description: tau class GST protein 4
MAGGGSDEVKLLGMWASPFVLRVQLALSLKGVGYEYVEEDLKSKSELLLKSNPVLQKVPVLIHDGKPVCESSVILQYIDEAFAGVGPSLLPEEPHGRAVARFWAAYIDGTLVKASSQASMAKTEEEKAEGKKQVTAAVETLEGALRDCSNGKPFFGGDTAGYVDVMLGGLLAWVHAGDKMKGVKTFDPATTPLLAAWADNFGSLDAVEAVMPDVGKLVEFAMAMHARAAAAATN

SEQ ID NO: 14207 - protein, 221 aa, Triticum aestivum
  peptide (1)..(221): Ceres Seq. ID no. 12586354
  misc_feature (1)..(221): NCBI GI NO: 37536284 NR Description: putative glutathione S-transferase
  misc_feature (1)..(217): NCBI GI NO: 11385535 NR Description: glutathione S-transferase GST 42 [Zea mays]
  misc_feature (1)..(221): NCBI GI NO: 37536306 NR Description: putative glutathione S-transferase
  misc_feature (1)..(221): NCBI GI NO: 37536308 NR Description: putative glutathione S-transferase
  misc_feature (1)..(219): NCBI GI NO: 37536280 NR Description: putative glutathione S-transferase
  misc_feature (1)..(221): NCBI GI NO: 33304612 NR Description: tau class GST protein 3
  misc_feature (1)..(221): NCBI GI NO: 37536312 NR Description: putative glutathione S-transferase
  misc_feature (1)..(221): NCBI GI NO: 11385531 NR Description: glutathione S-transferase GST 40 [Zea mays]
  misc_feature (1)..(218): NCBI GI NO: 37536250 NR Description: putative glutathione S-transferase
  misc_feature (1)..(219): NCBI GI NO: 33304610 NR Description: tau class GST protein 4
MWASPFVLRVQLALSLKGVGYEYVEEDLKSKSELLLKSNPVLQKVPVLIHDGKPVCESSVILQYIDEAFAGVGPSLLPEEPHGRAVARFWAAYIDGTLVKASSQASMAKTEEEKAEGKKQVTAAVETLEGALRDCSNGKPFFGGDTAGYVDVMLGGLLAWVHAGDKMKGVKTFDPATTPLLAAWADNFGSLDAVEAVMPDVGKLVEFAMAMHARAAAAATN

SEQ ID NO: 14208 - DNA, 1627 bp, Triticum aestivum
  misc_feature (1)..(1627): Ceres Seq. ID no. 13655744
tctccctctccctatccatcccatcctctcccccgaccccgcgcacccgccagagaagccgcctccatggcctccctcgccgccgcctccgcctccacggcgctcctcttcccctccacctcctcctccaagccccgcctcccgctctccacatcccttggcttctccgcgcccgcgcggtcacgccgcgccactgcggtggcggggagctccggcaggcgcccggggctgctcgtcgtgcgcgccgccaggggcaagttcgagcggaacaagccccacgtcaacatcggcaccatcggccacgtcgaccacggcaagaccaccctcaccgccgcgctcaccatggtgctcgcctccgtcgggggcagcgcgcccaagaagtacgacgagatcgacgccgcccctgaggagcgcgcccgtggtatcaccatcaacaccgccaccgtcgagtacgagacggagacgcgccactacgcgcacgtcgactgccccggtcacgccgactacgtcaagaacatgattaccggggccgcccagatggacggcgccatcctcgtcgtctccggcgccgacggccccatgccgcagaccaaggagcacatcctgctcgccaaccaggtcggtgtccccagcattgttgttttcctcaacaagaaggaccaggtcgacgacgaggagctgctcgagctcgtcgatctcgaggtccgcgagctgctcacggcctatgaatacgatggtgacaatgtgccaatcgtctccggctctgcactcagagcgctcgaggccctcatggccacccctggcctcaagcgtggggataacgagtgggtggatggcatcttctccttgattgattccgtggatacccacatccctgtcccgcagaggcagaccgacctccccttcttgctcgctgttgaggatgttttctccatcactggtcgtggtacagttgccactggccgtatcgagcgtggcaccgtcaaggttggggacccagtcgacctcgtcggcatcagggagacccgcaatgccacggtcactggtgttgagatgttccagaagaccatggatgatgccattgctggggacaatgttgggcttctgctccgtggtatgcagaaggaagacattgagagaggcatggtgttggcaaagcccggttccatcacgccacacaccaagtttgaggctgttgtgtatgtgctcaagaaggaggagggtggccggcactccccatttttccctggttaccgtccgcaattctacatgcggactactgatgtcacggggaatgtgacaaacattatgaacgacaaggatgaggaggcgaagatgtgcatgccaggtgaccgtatcaagatggttgtggagctcatccagcctgtggcttgtgagcagggaatgaggtttgccatccgtgaaggtggcaagaccgtcggtgccggtgtcatcaataatatcattcagtaatgtggatggaggatatccaccgtgagaattttcctcatttactcttttgcgaaatgctatgtagttgttattatgcgtttagggaaggctcttgtgaaattgtagtatggcacatttttcttcaagtgaaattgcatactttgtagtattcacg

SEQ ID NO: 14209 - protein, 490 aa, Triticum aestivum
  peptide (1)..(490): Ceres Seq. ID no. 13655745
  misc_feature (91)..(295): Pfam Name: Pfam Description:  Elongation factor Tu GTP binding domain
  misc_feature (23)..(490): NCBI GI NO: 17225494 NR Description: translational elongation factor Tu [Oryza sativa]
  misc_feature (23)..(490): NCBI GI NO: 6525065 NR Description: chloroplast translational elongation factor Tu
  misc_feature (16)..(490): NCBI GI NO: 12830555 NR Description: chloroplast translational elongation factor Tu
  misc_feature (17)..(490): NCBI GI NO: 2494261 NR Description: Elongation factor Tu, chloroplast precursor
  misc_feature (25)..(490): NCBI GI NO: 459241 NR Description: chloroplast elongation factor TuB(EF-TuB)
  misc_feature (15)..(490): NCBI GI NO: 15237059 NR Description: elongation factor Tu (EF-Tu)
  misc_feature (15)..(490): NCBI GI NO: 23397095 NR Description: putative chloroplast translation elongation factorEF-Tu precursor
  misc_feature (22)..(490): NCBI GI NO: 6015084 NR Description: ELONGATION FACTOR TU, CHLOROPLAST PRECURSOR
  misc_feature (25)..(490): NCBI GI NO: 486827 NR Description: translation elongation factor EF-Tu
  misc_feature (38)..(490): NCBI GI NO: 1169494 NR Description: ELONGATION FACTOR TU, CHLOROPLAST PRECURSOR
SPSPYPSHPLPRPRAPAREAASMASLAAASASTALLFPSTSSSKPRLPLSTSLGFSAPARSRRATAVAGSSGRRPGLLVVRAARGKFERNKPHVNIGTIGHVDHGKTTLTAALTMVLASVGGSAPKKYDEIDAAPEERARGITINTATVEYETETRHYAHVDCPGHADYVKNMITGAAQMDGAILVVSGADGPMPQTKEHILLANQVGVPSIVVFLNKKDQVDDEELLELVDLEVRELLTAYEYDGDNVPIVSGSALRALEALMATPGLKRGDNEWVDGIFSLIDSVDTHIPVPQRQTDLPFLLAVEDVFSITGRGTVATGRIERGTVKVGDPVDLVGIRETRNATVTGVEMFQKTMDDAIAGDNVGLLLRGMQKEDIERGMVLAKPGSITPHTKFEAVVYVLKKEEGGRHSPFFPGYRPQFYMRTTDVTGNVTNIMNDKDEEAKMCMPGDRIKMVVELIQPVACEQGMRFAIREGGKTVGAGVINNIIQ

SEQ ID NO: 14210 - protein, 468 aa, Triticum aestivum
  peptide (1)..(468): Ceres Seq. ID no. 13655746
  misc_feature (69)..(273): Pfam Name: Pfam Description:  Elongation factor Tu GTP binding domain
  misc_feature (1)..(468): NCBI GI NO: 17225494 NR Description: translational elongation factor Tu [Oryza sativa]
  misc_feature (1)..(468): NCBI GI NO: 6525065 NR Description: chloroplast translational elongation factor Tu
  misc_feature (1)..(468): NCBI GI NO: 12830555 NR Description: chloroplast translational elongation factor Tu
  misc_feature (1)..(468): NCBI GI NO: 2494261 NR Description: Elongation factor Tu, chloroplast precursor
  misc_feature (3)..(468): NCBI GI NO: 459241 NR Description: chloroplast elongation factor TuB(EF-TuB)
  misc_feature (1)..(468): NCBI GI NO: 15237059 NR Description: elongation factor Tu (EF-Tu)
  misc_feature (1)..(468): NCBI GI NO: 23397095 NR Description: putative chloroplast translation elongation factorEF-Tu precursor
  misc_feature (1)..(468): NCBI GI NO: 6015084 NR Description: ELONGATION FACTOR TU, CHLOROPLAST PRECURSOR
  misc_feature (3)..(468): NCBI GI NO: 486827 NR Description: translation elongation factor EF-Tu
  misc_feature (16)..(468): NCBI GI NO: 1169494 NR Description: ELONGATION FACTOR TU, CHLOROPLAST PRECURSOR
MASLAAASASTALLFPSTSSSKPRLPLSTSLGFSAPARSRRATAVAGSSGRRPGLLVVRAARGKFERNKPHVNIGTIGHVDHGKTTLTAALTMVLASVGGSAPKKYDEIDAAPEERARGITINTATVEYETETRHYAHVDCPGHADYVKNMITGAAQMDGAILVVSGADGPMPQTKEHILLANQVGVPSIVVFLNKKDQVDDEELLELVDLEVRELLTAYEYDGDNVPIVSGSALRALEALMATPGLKRGDNEWVDGIFSLIDSVDTHIPVPQRQTDLPFLLAVEDVFSITGRGTVATGRIERGTVKVGDPVDLVGIRETRNATVTGVEMFQKTMDDAIAGDNVGLLLRGMQKEDIERGMVLAKPGSITPHTKFEAVVYVLKKEEGGRHSPFFPGYRPQFYMRTTDVTGNVTNIMNDKDEEAKMCMPGDRIKMVVELIQPVACEQGMRFAIREGGKTVGAGVINNIIQ

SEQ ID NO: 14211 - protein, 376 aa, Triticum aestivum
  peptide (1)..(376): Ceres Seq. ID no. 13655747
  misc_feature (1)..(181): Pfam Name: Pfam Description:  Elongation factor Tu GTP binding domain
  misc_feature (1)..(376): NCBI GI NO: 17225494 NR Description: translational elongation factor Tu [Oryza sativa]
  misc_feature (1)..(376): NCBI GI NO: 6525065 NR Description: chloroplast translational elongation factor Tu
  misc_feature (1)..(376): NCBI GI NO: 12830555 NR Description: chloroplast translational elongation factor Tu
  misc_feature (1)..(376): NCBI GI NO: 2494261 NR Description: Elongation factor Tu, chloroplast precursor
  misc_feature (1)..(376): NCBI GI NO: 459241 NR Description: chloroplast elongation factor TuB(EF-TuB)
  misc_feature (1)..(376): NCBI GI NO: 15237059 NR Description: elongation factor Tu (EF-Tu)
  misc_feature (1)..(376): NCBI GI NO: 23397095 NR Description: putative chloroplast translation elongation factorEF-Tu precursor
  misc_feature (1)..(376): NCBI GI NO: 6015084 NR Description: ELONGATION FACTOR TU, CHLOROPLAST PRECURSOR
  misc_feature (1)..(376): NCBI GI NO: 486827 NR Description: translation elongation factor EF-Tu
  misc_feature (1)..(376): NCBI GI NO: 1169494 NR Description: ELONGATION FACTOR TU, CHLOROPLAST PRECURSOR
MVLASVGGSAPKKYDEIDAAPEERARGITINTATVEYETETRHYAHVDCPGHADYVKNMITGAAQMDGAILVVSGADGPMPQTKEHILLANQVGVPSIVVFLNKKDQVDDEELLELVDLEVRELLTAYEYDGDNVPIVSGSALRALEALMATPGLKRGDNEWVDGIFSLIDSVDTHIPVPQRQTDLPFLLAVEDVFSITGRGTVATGRIERGTVKVGDPVDLVGIRETRNATVTGVEMFQKTMDDAIAGDNVGLLLRGMQKEDIERGMVLAKPGSITPHTKFEAVVYVLKKEEGGRHSPFFPGYRPQFYMRTTDVTGNVTNIMNDKDEEAKMCMPGDRIKMVVELIQPVACEQGMRFAIREGGKTVGAGVINNIIQ

SEQ ID NO: 14212 - DNA, 1231 bp, Triticum aestivum
  misc_feature (1)..(1231): Ceres Seq. ID no. 12627139
cggggagaggcttgcgttgcgtgctggaggagcggaggaggcaggagccggcgtcgtgtttgagtaggagtaggataagcggattgctctctcgtctcggagatttccggcgagaaggactcgagcggatcgagtgcgcccgcccgcccgccggcctcgccgatcagccgcgatgaactgcgagacgtgccacctcaacgaactggagctggagccgctggagatcaaagacgtgctgcgatgcatcttgcataccatattctttcatcgaaccctcactcttgttcggcccaaggatgttgactgcgacctctttgagatcacatatgttcaatgtggacttgcagaactagaaaaggaggtcgatgaaaagatcaaccagttcattgcttgggctgaaaagcatccaaatcggaaaagccaggtgtgcctctctttcttcgatgagaagaacaagcacccgggctggttcagcagcaagactgagagggtttactgggaacaatggttcatcaatttgcatgtcacaagccctaaaggacaaggcaaatcacgtggctccaaagcaccggcaaatactaaaggacaagcattggaagagaccagctcaagacgtgatgcgctgagcttgctgatccaagaagtcctgttccagatcattaactacgccaatgagaaaaaagaccatattcctccaatctctgacagaatattcaatcatgagattttggtccccaggtgacaccttttccttggacgtgtgttcacagctcttctgattctgtattcgggtggaacgccgacgttcttcggagggcattgagtagtggacattcgtactcactgaactgaagatctttgttagaaactgcactaaacgaagatgttggtatcgatgtgctacctttcgcagtgatgccacattgcccctttctcacctctccattgatcgtttggttataagacgttgtcagagctgctgactcatggaagcaatgttgtgtacagaataatgtagaactgctagtgaactgactctgttatccatccaatcatgtaattcccacttgtttagctgtaaatatttctcttgacagtctgtgtccaaaaattattaccatgttattatgcagatgtgaaaaatatgtgtattctggatgttatgtgcactggtgtttattcagtgtgctgacataagggagaaacctggagtgggaagctgttttgactg

SEQ ID NO: 14213 - protein, 189 aa, Triticum aestivum
  peptide (1)..(189): Ceres Seq. ID no. 12627140
  misc_feature (1)..(188): NCBI GI NO: 30698268 NR Description: expressed protein [Arabidopsis thaliana]
  misc_feature (12)..(189): NCBI GI NO: 9758143 NR Description: gene_id:MUD21
  misc_feature (1)..(131): NCBI GI NO: 30698266 NR Description: expressed protein [Arabidopsis thaliana]
  misc_feature (1)..(131): NCBI GI NO: 15810345 NR Description: unknown protein [Arabidopsis thaliana]
MNCETCHLNELELEPLEIKDVLRCILHTIFFHRTLTLVRPKDVDCDLFEITYVQCGLAELEKEVDEKINQFIAWAEKHPNRKSQVCLSFFDEKNKHPGWFSSKTERVYWEQWFINLHVTSPKGQGKSRGSKAPANTKGQALEETSSRRDALSLLIQEVLFQIINYANEKKDHIPPISDRIFNHEILVPR

SEQ ID NO: 14214 - DNA, 1540 bp, Triticum aestivum
  misc_feature (1)..(1540): Ceres Seq. ID no. 13597427
cctggaacatcctaatcgaaaacattccagtccaggacggcagcaggaaagggaagaaccaatcaaccgattccccctccccactccaccccgcgccgcagcgagagcgaactggtgcctgccttccactgccggccgcgtcgtcgtcgtcccttccttccctcaatccctccctcccgctgcgctcccgtccgagactgtgaacatgtcagatagtgcattgcaagatctcaacgctgcccaatcagttgtgctcgagaaaagcaaagacagttctgtggaaccctgcagttctaagcccgtgttaaacgggaacaaatgtgtcaagaaggaaggaaatgctgtacctgatgtgaccaatggatgtgatgctgtagttgtagatatcgagtatattgattctgagaatctcacagatcttccagatgttgacacaagcctgagtactttgcttgcaaggttggattcaaaggattggatcaagacatgtgaagctcttaataatgttcgtcagttggcgatatatcacaagcaaaggttgcaggagctgctggagcctctagttcctcttattgtgaaatctgttaagaatccaaggagtgctctatgcaaaaccgcacttatgacctgcgctgacatctttaaggcatacggtgaacaaatggtcgacttgattgatcagctgctaatgccgctatttctgaaatcttcacaagacaagcgctttgtttgtgaagcagctgaggcagcccttatgtcaatgacaagctggatctccccctctatattgttaccaaaaatgcagccctacctcaaaaacaggaatccacgaattcgagcaaaagcatctgtttgtttcagtaagagtgtaccacgccttggtctggagggaatcaaagaatacggaatggacaagctcattcaggtcgcagcaacccagctcagcgaccagcttcctgaatcaagggaggctgctcgtaacctttcattggagcttcaagcattctatgagaagtctcaagcctctggtttaggcgaagatgacagcgcacctgctatttcaccagaagctgaaacctgggaggctttctgcctatctaagctttctgctttaagcgcccaagcaatcctccgtgtcactgtgggtgtccctgttgccccaaaagaaggcggcatctctgctgctctgaaagaaggcggcatccctgctgccctgaaagaaggtggcatctctgttgtcgttgctccaaaagaaggtggcgcccctgttgctacgaaagaaggtgctgcggccgtgggctgctagcgttgggagttggccgacacaagcgatgttgcgatttttccacatccaattcacgtttttgctgtacatgatttatgggttgctcggtcggtaaatcgaatctccttttgctggagttcttcaggcttgagggcctggggtgggtgttaatattggtgcgagatatagtcccttatagttgactgtataatcctttggttccgtcactacttatcagtttggcattgattggcc

SEQ ID NO: 14215 - protein, 434 aa, Triticum aestivum
  peptide (1)..(434): Ceres Seq. ID no. 13597428
  misc_feature (69)..(390): NCBI GI NO: 15241493 NR Description: expressed protein [Arabidopsis thaliana]
  misc_feature (69)..(395): NCBI GI NO: 18395821 NR Description: expressed protein [Arabidopsis thaliana]
  misc_feature (69)..(395): NCBI GI NO: 21537265 NR Description: unknown [Arabidopsis thaliana]
  misc_feature (106)..(379): NCBI GI NO: 21593517 NR Description: unknown [Arabidopsis thaliana]
  misc_feature (106)..(379): NCBI GI NO: 18414533 NR Description: expressed protein [Arabidopsis thaliana]
  misc_feature (69)..(293): NCBI GI NO: 15229670 NR Description: expressed protein [Arabidopsis thaliana]
  misc_feature (323)..(395): NCBI GI NO: 15229670 NR Description: expressed protein [Arabidopsis thaliana]
  misc_feature (69)..(304): NCBI GI NO: 9294314 NR Description: gb|AAF24615
  misc_feature (187)..(379): NCBI GI NO: 7485173 NR Description: hypothetical protein - Arabidopsis thaliana
  misc_feature (115)..(328): NCBI GI NO: 34865276 NR Description: similar to KIAA0423 [Rattus norvegicus]
LEHPNRKHSSPGRQQEREEPINRFPLPTPPRAAARANWCLPSTAGRVVVVPSFPQSLPPAALPSETVNMSDSALQDLNAAQSVVLEKSKDSSVEPCSSKPVLNGNKCVKKEGNAVPDVTNGCDAVVVDIEYIDSENLTDLPDVDTSLSTLLARLDSKDWIKTCEALNNVRQLAIYHKQRLQELLEPLVPLIVKSVKNPRSALCKTALMTCADIFKAYGEQMVDLIDQLLMPLFLKSSQDKRFVCEAAEAALMSMTSWISPSILLPKMQPYLKNRNPRIRAKASVCFSKSVPRLGLEGIKEYGMDKLIQVAATQLSDQLPESREAARNLSLELQAFYEKSQASGLGEDDSAPAISPEAETWEAFCLSKLSALSAQAILRVTVGVPVAPKEGGISAALKEGGIPAALKEGGISVVVAPKEGGAPVATKEGAAAVGC

SEQ ID NO: 14216 - protein, 366 aa, Triticum aestivum
  peptide (1)..(366): Ceres Seq. ID no. 13597429
  misc_feature (1)..(322): NCBI GI NO: 15241493 NR Description: expressed protein [Arabidopsis thaliana]
  misc_feature (1)..(327): NCBI GI NO: 18395821 NR Description: expressed protein [Arabidopsis thaliana]
  misc_feature (1)..(327): NCBI GI NO: 21537265 NR Description: unknown [Arabidopsis thaliana]
  misc_feature (38)..(311): NCBI GI NO: 21593517 NR Description: unknown [Arabidopsis thaliana]
  misc_feature (38)..(311): NCBI GI NO: 18414533 NR Description: expressed protein [Arabidopsis thaliana]
  misc_feature (1)..(225): NCBI GI NO: 15229670 NR Description: expressed protein [Arabidopsis thaliana]
  misc_feature (255)..(327): NCBI GI NO: 15229670 NR Description: expressed protein [Arabidopsis thaliana]
  misc_feature (1)..(236): NCBI GI NO: 9294314 NR Description: gb|AAF24615
  misc_feature (119)..(311): NCBI GI NO: 7485173 NR Description: hypothetical protein - Arabidopsis thaliana
  misc_feature (47)..(260): NCBI GI NO: 34865276 NR Description: similar to KIAA0423 [Rattus norvegicus]
MSDSALQDLNAAQSVVLEKSKDSSVEPCSSKPVLNGNKCVKKEGNAVPDVTNGCDAVVVDIEYIDSENLTDLPDVDTSLSTLLARLDSKDWIKTCEALNNVRQLAIYHKQRLQELLEPLVPLIVKSVKNPRSALCKTALMTCADIFKAYGEQMVDLIDQLLMPLFLKSSQDKRFVCEAAEAALMSMTSWISPSILLPKMQPYLKNRNPRIRAKASVCFSKSVPRLGLEGIKEYGMDKLIQVAATQLSDQLPESREAARNLSLELQAFYEKSQASGLGEDDSAPAISPEAETWEAFCLSKLSALSAQAILRVTVGVPVAPKEGGISAALKEGGIPAALKEGGISVVVAPKEGGAPVATKEGAAAVGC

SEQ ID NO: 14217 - protein, 227 aa, Triticum aestivum
  peptide (1)..(227): Ceres Seq. ID no. 13597430
  misc_feature (1)..(183): NCBI GI NO: 15241493 NR Description: expressed protein [Arabidopsis thaliana]
  misc_feature (1)..(188): NCBI GI NO: 18395821 NR Description: expressed protein [Arabidopsis thaliana]
  misc_feature (1)..(188): NCBI GI NO: 21537265 NR Description: unknown [Arabidopsis thaliana]
  misc_feature (1)..(172): NCBI GI NO: 21593517 NR Description: unknown [Arabidopsis thaliana]
  misc_feature (1)..(172): NCBI GI NO: 18414533 NR Description: expressed protein [Arabidopsis thaliana]
  misc_feature (1)..(86): NCBI GI NO: 15229670 NR Description: expressed protein [Arabidopsis thaliana]
  misc_feature (116)..(188): NCBI GI NO: 15229670 NR Description: expressed protein [Arabidopsis thaliana]
  misc_feature (1)..(97): NCBI GI NO: 9294314 NR Description: gb|AAF24615
  misc_feature (1)..(172): NCBI GI NO: 7485173 NR Description: hypothetical protein - Arabidopsis thaliana
  misc_feature (1)..(121): NCBI GI NO: 34865276 NR Description: similar to KIAA0423 [Rattus norvegicus]
MTCADIFKAYGEQMVDLIDQLLMPLFLKSSQDKRFVCEAAEAALMSMTSWISPSILLPKMQPYLKNRNPRIRAKASVCFSKSVPRLGLEGIKEYGMDKLIQVAATQLSDQLPESREAARNLSLELQAFYEKSQASGLGEDDSAPAISPEAETWEAFCLSKLSALSAQAILRVTVGVPVAPKEGGISAALKEGGIPAALKEGGISVVVAPKEGGAPVATKEGAAAVGC

SEQ ID NO: 14218 - DNA, 1299 bp, Triticum aestivum
  misc_feature (1)..(1299): Ceres Seq. ID no. 15226458
attaacactacccgcctcaagctaggcactagctccgatgagtagctgcttcaacggtggcgccggctggccggagcccgtggtgcgcgtgcaggccgtgtcggacacctgcggcgagacaatacctgagtggtacgtcaagctgccgttggatcggccgtcggcgacgaccctccaaccggcggtctcacatgggggcggcagcctaaacatcccggtagtggacatgtcaatgccggactcgggcgagacagtccgtgccgtggacgcggcgtgccgggagtgggggttcttccaggcggtgaaccacggcgtgagccctgagctgctgcggcgggcgcgctcgtcgtggcgcggcttcttcaggcagccagccgaggtgcgcgagcggtacgccaactcgccggcgacgtacgagggctacggcagccgtctcggtaccaccaagggtgggcacctcgactggggcgactactatttcttgcacctcctcccgccgtcgatcaagagccacgacaagtggccgtcccttccgtccaccctacgggacgcgacggaggagtacggcgaggaggtggtgaagctgtgccggagggtatcaaaggtgctgtccaaggggctgggactcgacggcgggaggctgcaggcagcgttcggcggggagggcggcgagggggcatgcatgagggttaacttctacccgaggtgcccgcagccggagctgacgctgggcgtggcggcgcactccgaccccggcggcatgaccatgctgctcgtcgacgaccacgttcgggggctgcaggtgctgagcaacgcggcgtacaagagcgtggagcaccgggtgacggtgagcgcagcggaggagcggctatcgctcgccttcttctacaacccgcggagcgacgtgcccgtggcgcccatggcggagctggtggcgccgggacgcccggcgctgtacccggagatgaccttcgacgagtaccgggcccacatccggcagcgcggcctcagcggcaaggcgcagctacagtctctgcagaacgccaacaacagcgtcgcctcctgacactaggcacggccagccggccggccgggcggcctgctactcccttgtcctgtgcatgcgcaccactccattgtatgcgtggccggtgaagacgtgcatatgtatgtataatagacgtttccgctaataaatatacacggaatagtctcgtacgtatgccattcatgttaacttgatcagtttgtttaccctatatgacgtatataattaaggagactgctcattcgttatgc

SEQ ID NO: 14219 - protein, 342 aa, Triticum aestivum
  peptide (1)..(342): Ceres Seq. ID no. 15226459
  misc_feature (11)..(256): NCBI GI NO: 34907994 NR Description: leucoanthocyanidin dioxygenase-like protein
  misc_feature (254)..(334): NCBI GI NO: 34907994 NR Description: leucoanthocyanidin dioxygenase-like protein
  misc_feature (8)..(256): NCBI GI NO: 15229694 NR Description: oxidoreductase, 2OG-Fe(II) oxygenase family
  misc_feature (254)..(332): NCBI GI NO: 15229694 NR Description: oxidoreductase, 2OG-Fe(II) oxygenase family
  misc_feature (11)..(266): NCBI GI NO: 15239179 NR Description: oxidoreductase, 2OG-Fe(II) oxygenase family
  misc_feature (254)..(332): NCBI GI NO: 15239179 NR Description: oxidoreductase, 2OG-Fe(II) oxygenase family
  misc_feature (11)..(266): NCBI GI NO: 21537324 NR Description: leucoanthocyanidin dioxygenase-like protein
  misc_feature (254)..(332): NCBI GI NO: 21537324 NR Description: leucoanthocyanidin dioxygenase-like protein
  misc_feature (11)..(276): NCBI GI NO: 15224472 NR Description: oxidoreductase, 2OG-Fe(II) oxygenase family
  misc_feature (254)..(333): NCBI GI NO: 15224472 NR Description: oxidoreductase, 2OG-Fe(II) oxygenase family
MSSCFNGGAGWPEPVVRVQAVSDTCGETIPEWYVKLPLDRPSATTLQPAVSHGGGSLNIPVVDMSMPDSGETVRAVDAACREWGFFQAVNHGVSPELLRRARSSWRGFFRQPAEVRERYANSPATYEGYGSRLGTTKGGHLDWGDYYFLHLLPPSIKSHDKWPSLPSTLRDATEEYGEEVVKLCRRVSKVLSKGLGLDGGRLQAAFGGEGGEGACMRVNFYPRCPQPELTLGVAAHSDPGGMTMLLVDDHVRGLQVLSNAAYKSVEHRVTVSAAEERLSLAFFYNPRSDVPVAPMAELVAPGRPALYPEMTFDEYRAHIRQRGLSGKAQLQSLQNANNSVAS

SEQ ID NO: 14220 - protein, 279 aa, Triticum aestivum
  peptide (1)..(279): Ceres Seq. ID no. 15226460
  misc_feature (1)..(193): NCBI GI NO: 34907994 NR Description: leucoanthocyanidin dioxygenase-like protein
  misc_feature (191)..(271): NCBI GI NO: 34907994 NR Description: leucoanthocyanidin dioxygenase-like protein
  misc_feature (1)..(193): NCBI GI NO: 15229694 NR Description: oxidoreductase, 2OG-Fe(II) oxygenase family
  misc_feature (191)..(269): NCBI GI NO: 15229694 NR Description: oxidoreductase, 2OG-Fe(II) oxygenase family
  misc_feature (1)..(203): NCBI GI NO: 15239179 NR Description: oxidoreductase, 2OG-Fe(II) oxygenase family
  misc_feature (191)..(269): NCBI GI NO: 15239179 NR Description: oxidoreductase, 2OG-Fe(II) oxygenase family
  misc_feature (1)..(203): NCBI GI NO: 21537324 NR Description: leucoanthocyanidin dioxygenase-like protein
  misc_feature (191)..(269): NCBI GI NO: 21537324 NR Description: leucoanthocyanidin dioxygenase-like protein
  misc_feature (1)..(213): NCBI GI NO: 15224472 NR Description: oxidoreductase, 2OG-Fe(II) oxygenase family
  misc_feature (191)..(270): NCBI GI NO: 15224472 NR Description: oxidoreductase, 2OG-Fe(II) oxygenase family
MSMPDSGETVRAVDAACREWGFFQAVNHGVSPELLRRARSSWRGFFRQPAEVRERYANSPATYEGYGSRLGTTKGGHLDWGDYYFLHLLPPSIKSHDKWPSLPSTLRDATEEYGEEVVKLCRRVSKVLSKGLGLDGGRLQAAFGGEGGEGACMRVNFYPRCPQPELTLGVAAHSDPGGMTMLLVDDHVRGLQVLSNAAYKSVEHRVTVSAAEERLSLAFFYNPRSDVPVAPMAELVAPGRPALYPEMTFDEYRAHIRQRGLSGKAQLQSLQNANNSVAS

SEQ ID NO: 14221 - protein, 277 aa, Triticum aestivum
  peptide (1)..(277): Ceres Seq. ID no. 15226461
  misc_feature (1)..(191): NCBI GI NO: 34907994 NR Description: leucoanthocyanidin dioxygenase-like protein
  misc_feature (189)..(269): NCBI GI NO: 34907994 NR Description: leucoanthocyanidin dioxygenase-like protein
  misc_feature (1)..(191): NCBI GI NO: 15229694 NR Description: oxidoreductase, 2OG-Fe(II) oxygenase family
  misc_feature (189)..(267): NCBI GI NO: 15229694 NR Description: oxidoreductase, 2OG-Fe(II) oxygenase family
  misc_feature (1)..(201): NCBI GI NO: 15239179 NR Description: oxidoreductase, 2OG-Fe(II) oxygenase family
  misc_feature (189)..(267): NCBI GI NO: 15239179 NR Description: oxidoreductase, 2OG-Fe(II) oxygenase family
  misc_feature (1)..(201): NCBI GI NO: 21537324 NR Description: leucoanthocyanidin dioxygenase-like protein
  misc_feature (189)..(267): NCBI GI NO: 21537324 NR Description: leucoanthocyanidin dioxygenase-like protein
  misc_feature (1)..(211): NCBI GI NO: 15224472 NR Description: oxidoreductase, 2OG-Fe(II) oxygenase family
  misc_feature (189)..(268): NCBI GI NO: 15224472 NR Description: oxidoreductase, 2OG-Fe(II) oxygenase family
MPDSGETVRAVDAACREWGFFQAVNHGVSPELLRRARSSWRGFFRQPAEVRERYANSPATYEGYGSRLGTTKGGHLDWGDYYFLHLLPPSIKSHDKWPSLPSTLRDATEEYGEEVVKLCRRVSKVLSKGLGLDGGRLQAAFGGEGGEGACMRVNFYPRCPQPELTLGVAAHSDPGGMTMLLVDDHVRGLQVLSNAAYKSVEHRVTVSAAEERLSLAFFYNPRSDVPVAPMAELVAPGRPALYPEMTFDEYRAHIRQRGLSGKAQLQSLQNANNSVAS
